United States Patent Application Publication US 2014/0057251 A1 - sequence listing, part 75

SEQ ID NO: 116611 - DNA, 4214 bp, Cannabis sativa
aaaaatctttgaacgtaaaaatataaatattttataaaaaatattgccttatgtaattattccaaattaaaaatttatactacatggctaatactcatcattaatgaagaatatattataaaaaataatgcatgaattaataaataaacgcaattaatatacagtagccaaatatatgtataggtacctgtagctctaatggttttagagatgaggagagagttaggctggaaaccaatgaaatcaaaggtgccatctccagaagcgtttaaaggaactctattgtcgtatctgtatacagctatatgctttgatggataccaagttatatctccaaattcatttttctttccatgttcaaaccatctctcttcaatcccaccatcctctgtgaaattataccttatgcttcttttaaatcccttctctactgacaactttacctgttttcttttttaattaatttattacttaaatcaataatattcttatcactaattaattataatttatcgatgataaattagttatcaaataacgatacgcaccataacaaattagctggctccatgttataataagttaaaaaaaatatatatataaatataatagagaaaaactcaatgattgagcgtgcataatgtaaacatatgtctccactaattcccatccacactagctaattaataattaaaagagtaatattgggacttgataacaatactaaaaacaataatacattttaacaattctcatacaaaaatatagattttttgtaaacattttttatgtataaaaaaattataaattaaattctttttcttaaagaataaaaataaaaactatatatttctttttgagaaatactaaagccagtgcttagccaatcgcaacgcaacatgttgagaaattactaagcaccactagttcttaatagcaatgctcttttttttacatcggtataattgtgtatttaaaattttatttttcaccatataaattatttaaaaaaaatcataaattactggtataccaaccatagcatctataagaatgttattaatttttattattaattagtgtgtgtaggtgtaaagaatgacagtaattgttaccttagagataacacccaacaatcccaaagaaactttggcagcatcaaggagaggatcattggcctctattctgatgatcttagcatacccttcagatggcttggccggaacaaccatagaaaccccaataacatggtcatgtacggcaccacctttaccccaccaagagctcccatgggctccagtactaataatcccaccaacactgacgccttcccagtacggtgcagccaccaaactcagcccaactctttccacttcatctatcagccgccgcagtcccacgccggaatcaaccgtcaccgccatgttcttcgtgtcgatttcgatcccggaatcgtagttcttagtactaataaggaaatttggcccttctccagatcccgggcatgccagttttggtatggtgtgtgagaatttggagactactttgagcttgagtttgttcctatttgcatgggccacagctaaccgaagctcctcttcgttttttgggtacgtgacatttaggacatggcagtcctttcggtctccccaggcaccataggagttggagagagtgcagtcaccaccaccgccgcctccatcgttgcattgaatcggattaggcggcaccatggcgagtgctactgaaccgggatcggaaccggtccagatccatgtggtcgggttgataattattgggataccaactatgagccataaaagtattagagtaatatgcggcattattattattatcattacaaacacaatattttgttgcctttcttcaccatatatataaataattttttgggagatatttatgtgtacccacaaaatcgtgcaccttaatataaaaaaaaaggaaacttaagaaaattttaacaaattaatctcaatatttttttaaaattttctttttattttttatttttttatttttttgaaaaaaacagcgtaatcatacaattaataagagataatagttagacctcccggtcattacaaaacaggttcccccaaaaggaggagaccggaaaggatccgtacattttgtgggtaaacgcccacttagctacattataggcaacatagttacaagttctactaacattcataaaattacaacatataaaagaatgagaagacttaatacaaaaggagacatagttctcaatagcccaatgggactccttcccattaagagcattgatcactagtctcgagtcactctctacaattacaaatctaaaacctaaatccatcgccgcagtgatagccaaacaacaggccgctgcttctccacataacacatccataaaatccaaccgagccatgtggatacgaaccaccctacccagatgatttcttactacagccgctatgaacatactctccagtcccattctaacatcatagttcattttaatccaatccagaggagttggatctcatatctccctcaaggtcagagtcgggctaggcacaagagaagcacgtaactctgcaaaagaagtgcaaataaggacaatacatttcaaaacatcagggggaatattattgtgtacagcttcattgcgcgccctctagatggtgtcaacaacaatcgaagcataaaggaagacattctcagctcggatacccctatttttaagatttcaaatgaatttaaaccagtcccaaatactgataccattgtcacagacagggtaaatgccccaaggtgagggacgccacaagtgtagcgccacatcgcacgaaaataaatgttcaacagatttctccctcgatccgcataaaggacatctcatatcctcaatctgaaatcttcttccaatctctaatctaacagggagcgccttagacaggatactccaccaaagaatcttatgtctctctagtattttactattccataacttgttccaaagcgacgtagccacctcacagtgacgagctctttccgtaccctgagcaagatatgccgatttacacaagaatcgtccattggcctccaaagtccacacccatctatcctctccctatcctgaggggtttcctccttttaagactgccgcaacagttttctgataaaaaatattgtttactttgtgaacatctcatatgccagaggttgtaaggaggtcagccactcagttattgtttgtcaggatgtcacccattggtttcgggaggaaacctttataatgaggtatccaaggatccctccagatgctagtatttctgccattagccaccaattttgcattggctttaaccacatttttccaaaattaggaatcagagtctttgtatctacagcagagaagatccttccctcttaaatatttggcctccaaaattttataacataaagactggcatccagtcagaatcttccaccctcacttggccaagaaagccaggttcatttctttagttttccgaaaacctaggccttctagagacttaggaagacagagtttatcacaagctctaagatggagcctatgattcccctgctcaaaaccccaccagaagtccctaaccagaccatcaatctagttcacaagtcgatcagagagttttggtagtttgcatggcatagattggaagcgacaggcccacagacttaatgagcgtaacacgacccgctttagacaacgtctttgccttccagccttgcagtttagaggtaagactgtcaaggatgaaattgaagttcgcatcttttttgcctagatctgaagagaggcaggcctaagtacttaatgaccccctccggagaatcaatgcccaaagcttccttgatacctctcctcatgccattgggggtattattgcgaaagaatattgacgttttgagcttattgaatttttgaccagaccaagaacaaaacttctcaaggcagttccaaaacttttaacattattatgtgaatattttaatacctattattttagttatattttcataattttttaaattatgtgtaatttttttaggctaattagtaattttttcttttgaactttgacatgtactaaatcgtgccccctgaatttttttggccgttaaaaattcctcccgaactattgagattgttaaagtta

SEQ ID NO: 116612 - DNA, 1439 bp, Cannabis sativa
taataaccggactaaaagtctccccaaaatctatccctagtctttggtgaaatcccttcgcaactagacgagccttgagtcgttgaaaagaaccatcagcattccatttaatcttgtacacccatttgctgccaacaatattgtaatcgggtgaaggaggtaccaaataccaagtcttatttttcttgagagctataaattctgtgtgcattgcattgttccaccccttgtgttggagtgcttcttgcacagatgtaggttcacgtaagctgagatcaacacctgcagtatttagcagtactcggggtttgaatattcctgccttgccacgagtaaccattggatgggaaggttggacatgagcaggtggaggtgatgtatgaggttcacggtcaggtgttggtgttgtttgtgttgtatcggctatgggactgacagcaggtgggctgtgatcatttttcaggttctatatctgaatgagaagagtgagctacagacattggtgagtgagtttcagaaatagaccatacctgatcgtgtgccgaaggacttggagctggtggttctgcattggattgtgaagtcagagattgaaatggtagattaatccaagaatgaggcataggaacagttacatgtttctcagattgataattatttagaaaacctgagacaaatggaaattctttttcattaaagatcacatgcctagatatgtatattcttccatgtggactcaaacatttataccccttatggacttcactatacccgagattaacacatttaattgagtgaaattggaacttatgtgtttggtaggctctaagacaaggaaaacaggttgtgccaaacaccttaagaaatttataatctggaatttttgcatgcacatgttcaaaaggtgttttattttgtaaaacatgagagggcagtcggttgatcaagtacacagctgtctgaaatgcatcagaccagtactttaatggcatagccgcttgagccaagagggttaaacccatctcaactatatgtctgtgcttacgctcagcacggccattttgggctgatgtatgaggacaaggatgataaaaaacaatgccactgctattaactaactcagtaaacgcttgatactcaccaccccaatctgtcctaagcttcttaattttcctatcaaattgtgtctcaaccatggctttgaattgaacaaacgcagcaagtgcatctgatttatttttcagcaagtaaagccatgtatatctgctataatcatccacaaagtggatatagtatttgaagctagtatgtgaagcaattggtgccggaccccatagatctgtgtgaataagatcaaggagtccagctgctttagaatgagaaatctgaaatgggagagcatgagacttgccaaattggcatgcatcacagaaatggat

SEQ ID NO: 116613 - DNA, 2051 bp, Cannabis sativa
aaatacaatttttaatatttgtagtggggctatagcccccacattaatatacttgggtccgtcccttaggacaaggatgtgggtggctgaggttctggttgagaacaaggagagtctgtaacattttattgggaagcataagcatgaaaaaatgtaaagaaatcaggtgaaacagaaccatttaacacaaatggaaatatttgctcatgaaaaatgacatccctagaacaaaacattctatttgtattgagatcaaggagtttaaaggctttcatcccaatgggataacccatgaaaacacaaagagtggctctatgagaaaatttagttcttgcagcccctaaagtagaggcatatgcaagacagccaaaagatcttaactgttcataactagggactttggatttgagtatcttaaagggtgatttgtgttcaaggttaggggtaagagttctatttataagatatgatgtagtacttgtgcaatctccccaatgtgacagtgggatatgagactgaaaaagcaaagctctagcaacatttaacaaatgttgatgcttcctttccacaataaagttttgttgtggcctttgtacacatgaatgatagtgaataatgcttaaagaagaaaacaatgtagggaattgaagttccttagcattatcagacctaattcctttaacttgtacattatattgtgttttaactagatgtaaaaaagttgggatggctatttgtgcatcagatttgtttttaatgagatggatctatatttagagcaatcatcaacaatggtaatgaaatacctaaaaccttcaacagtttgaatatgttaaggtccccaaatatcaatgtgaagtaaatcaaaatattatttagaaatattatgattgctaacaaaagacaactttctttgcttggcaaaatgacatatggagcaataaaaatcagaacaatgggaatactgaaattgcaaagcttaattcattgaatggttctttacacaagaagcatgaccaagcatataatgccataagatttcattactgatttttcaattagagatagaacatgctatagggtttttctgttcaaacaagtagtaaaggttgctaattctttcacccatcccaatcagttaattcttggtgatatcctgaatcatacatatagtaggaaggaagaaaaaagaataattagccgaatcaaataaagcataaacatatatcaaattatgtttgaaatcagggacacaaagtacattgattagaataatgttggaaattttaacattgccaacaaaagagactttagtattagctccatttggtaaaccaacagaaatgatcttagcattattttgaatagagaaaaataaagaaggattggagcacacatggtgtgtagcaccagtgtcaatgatccaactagatttagggacaaaagaagcaataccatatatgtttgacacaacaggttgctctggatgttgaggctgaactgtagtttcttgtattttctatgctagcattgccatgagcttttgacattgtgcagctaagtcatgctcctctattgtactttcatttgtgtcattccctgttatgtaattagcaaacaatcgaccttgctagttccatggtttattgggtgttctcttggaaatttgccatacaattgatgtccaaggggtatccatgaattatgtaacacttaccaatggtatgtccaggtatgccacaatgagaatacacaggatgattatcatttttgttgtcaaaataattgtttccatgatttgcatgtgtattcccagcaaattgctctgtgttatcattagaagactggttattttcagtttgaggtataacaatccctctctgtttttcctcttggattatactggcataagccttgttcgcatttggaagtggatcttggagcaagatctgagatctagcactaaggtacgactcattaagaccaataaggaactcaagaactttgtctttgtcctaatatttgttggatttattttaccaggatctaga

SEQ ID NO: 116614 - DNA, 3171 bp, Cannabis sativa
  modified_base (46)..(61): a, c, t, g, unknown or other
  modified_base (2950)..(2950): a, c, t, g, unknown or other
  modified_base (3138)..(3138): a, c, t, g, unknown or other
agcaaaattttaattaatcacaatttccataaacctcgttgattannnnnnnnnnnnnnnntacgtttaaaaatcacgtaacatgcctagactagttagggtgttacaaaatacataacacattgccttacaataaatagaccacatcactgatttttacgttagtgtaaatttgatgcagtcataaaccaagggactaacactttgaatcatataatcacaaatatattctactgtgatgacatcactataaatgtgaataactctatgatctaaatttaataaaatttaaatattaagtaatcataagttatttttcgttttctttatttagataataaatgaaattacatagaaacagttttatttagggcataaaagggttggcattctcattaaatttgagataaatttttctttccaaaaccctaattcgagaagaaatctaacaagttcttaacttatttgggtacaagagcactaagacttgaacataaagttgaagttttacaagaaatagccatacagagtgttatatgagtgctgaccacaccattgttgtagtactcacccaaacacacgaatactgacaccggagaatggtcagtgcacaccaaaggtaaagatcccaagagaatggtggagaaatagttctctacaacatcagtgatcactcaaaaaatgataggagccactaaaagaagtacttgtgtggtacacaagtactaaccattcctccatggttagtactcatgtaaacgtttgggcaaatgattccttagggtttccaagctcaaaaccctaaaacatatctaccaattctcaaacaattttcaaagacaacaaaatccccaagaggagaagcaatgtgagtactgaccatgaaatagtgtcagtgctcaccccctgcaatagctacatgagtattgaccaatcccatggtcaatactcacatatggtgagtattaccaaagaggagcctcatgaagcttgttacacaggtattgacacctttttagggaaaatactcatccaagcattgccctacatgattattgaccttcctttggtgttactactcacccatcatgccattctttaacgtagaagccactttaacacttcctcaatttgactctcgaaggaaaagcttctagaagagtttcaaagcataaatatcattgaaaatatgcaagatattagatttgaatatttttttctttattattaaatgtgaaagtgtgagatatttttaacatttctttgaattgtgggggaatgggttgcaaactctaggcctgtataagcatcatgttggacctagggaaagggaccctcaactgaatagaacctctttgacttgtttttgatctctgtttcattacctcatttacaacttttcgaatctctatctattggttcttttcacttagaacaatttttccaaaaacactaaacatttttctcatatcattcagtctaatctcaccataaaagaacatgaattcgttgacattgtcttctaaaaccagtcaaatagaagcacttatagagattttattgtagatcttgtgtattgtaattcactcaagcacattcttgagaacaagactatagtgtgtttgagttctgattactaaaataataagtagacatagctccattataattgtgatatatggagtgaaataccagaagtcgttacgtcatttttttacagtttatttctaataaccatggtctcagtccaatctgctttttgttacgatcttctggttgacgaaaaattgcgtcaataagtgtctaacaaattttgtcttgattgacattaatatattttatatatacccaatagtatttagtgatttgaatattttattcacatgatatataatcaattaattgtaattaattgatttagtatatcaaaattaatattatatttttggtaaaaaaaacattctgattaatggtcatcatgatattaataatacaatttattttttaatttaattgtcaaaatattcttacaattatatgtggcagagactttaatgccaatataaatattagatattggtcccaaactcctctaatcatatttattctatcaatcaccatcaaagagagctagtgagagcttaaaagatctaccccgctaattcttttctctcttattttgcagattttaagatctacatgttagaggaagttatatgcatcaatagttggaggcgcataatatcgatccttcattttgtatatgttgaatctatttagttatcttgcatatattagaattttttgatttattttttttaataggttttacaaaattatagtttaacaaatgaataggatgtcataaaaatatcaataacataaagattacaatttattgtgacgtgtgagtgcctttttagttacaataattttttttactataacaaaattaattaaaatttgtatatatttttagataaaattggcttcattaaatactatcttataattttaaatttaactaaaagttgacatttaatcacaaaaattagcaaaagattttagaaaaattataccaaatgacctcaaatcataatactatgtaggtaaatatccacatttcaaaacttataaagaaatgacccttttacactattattattcatattatctttttgccacataaaaaaattaatattttatttttcagttttttttttttcaaaattagaagcaaattacttaaagattatagtacatattagttttgttttaaccaaattattttgtaagttttgttttgttggtatatatattttattgtacagcatgtttttgttttattgtatggtacattattagtttttagatgatatttattttttattttactatgtataatagtgatatataattttatttgcataatacaaatattttaatgtangtacataattttattggcatgctacatatatttaattattcttttttatatattttaattgtatgatatagtatttattttaaataatatttaattagtttctattttaaatatattattccagaaccggaattccggttgtgcaaccggtctgccggttggaaaattttcaggaaccctagattttntcgtttttatgttatttgggatattgccatgct

SEQ ID NO: 116615 - DNA, 647 bp, Cannabis sativa
taattaattattttcatgctaataatcatgtaaacttaggaaaccaagtatgatagcaccatgtcttaagatactttctctctatgcccaaaaagtcatgaataattaagaaaataagtaataatgaatgataataaaaaagagaaaaagttatgaagggtagtttagtaaattgaaatgattaaagtgtggaatgggaatttacttttttggggggctttgaattttgaaattctttctctcttgtcttttttaagtgtgaagaaagaagaagtagtagtactgaaaaataaaagaggaatcaatatcatgcctgccaaagcaaaaagagtgatgagagaagtgaagatgggattgggtttgtaataaaaaaagaaaaaaggtttcttgttctttgttcttgttgtttgatattttcacaacttcaaatgaaacttgtttgtttcttctcttcttctctttcttcacatttttctattatcagttttgatcctataactaacttgttcatgcaaaatccaaagaactcaaacacaacaaggtatgttctttctctttcttctatcaacattgctgcctctgagttttgatcatcatcatcatttttataactatatatatgtatatgttttgattgtcaatgtatg

SEQ ID NO: 116616 - DNA, 869 bp, Cannabis sativa
gttagattatagttttataatcaaacatacataacgtacatgttagtaaatctagatcctagtaaaatatttccaataaatactccacggaccggatctccaaagttgtcttgcaagatcatacttaaaaaatagatgagctagagaatccacattgacattacataggacacagctctgagcattcccaaaaatctgatgcaaacgattcccaaaaggaagagtatccttgcctaacttccataggaaaagcttgagtttttcagggatcttgtatatcgaaataagtttccataaatcatttttaatagccagccgatgtttaatacaagtcatacaagcaagtttagtcgagaacgatccatcacaagattctctccaaaataacccatccctagagccaaggggtaggcgagggatcaaggccacaatatccccaatagaaggaacaaaataacgttcaatttgttccagaatccattcaccattagcaccattaagcaaggaactgactctaatgtttttctcacgaactcttagattgaaggcaattgaaaattggtcccaagagacacctagtatccaaggagcatgccaaagatccaccatagagccatcaccaataaggtacccagcttatttccaaataaggtcactggaagctaaaatccccttagcaacataggacataccatgacttaaataaggtgtaacacatttgttgaaaagtttatttcctccatctctaagcacttttgcgtttggttggaggtaatgaaatggaatggaaagaaaaagaaacaatcttcattctattcctttgtttggttgcatattaaagtgttggaatgtcattataatagaatgac

SEQ ID NO: 116617 - DNA, 2333 bp, Cannabis sativa
tattaggtggattaatgaaaatttaccaggtgtacacttgtgtcaccgtggcagtccactttagcacttaacagaccaaaatagacggaaagagtataggaggaaaacgattgtggagtttgggaagtttagccctaattttttcagtaagagggttaatccgtaacgaaactcaaaatatagaaagtttggtcgcaaattacccaaaaaaaaaaaaaaattaataataataataaaggcatgctacaattatatttgggtttccactcacatctgaaatcaatgaacgaaccacaccattcaagttacgtaagctcgactaccaagtgttagaagagattttcctcttgatcttagatcattgggaggacttctgccaacaacaatagtagagataccaatacttatttagaagagtcattttaatgtgagaaagatgttggatcattcagctgaagtctcttaccattttgataggccaatctttctggggcagtcttctagactcaatgctaggaagcttgtgataattgaagatgaaggtttttgtttggtaaaattgatacccaagtatacacaattgaaacaagtaatataatgataaataaagtatcgtttccacaaagatttattatcaattaccaatcaattaattctttagttctatttgattaataaaaattgttagataaaaaataaaataagacaaagatttaaaatttaaaaaaaaacaacaacaataataaagacatagattattaagataccaactatcatttattttacttgtcaaaaatactgcattagaacctctatctaagaatatcttatgaaaaatttgattaaatatgcttacattaccttaaaaaatttttcaacatatgacaactttattgtttttcctaaaataccttccccaattacatcaactcctctcttcccagccaaaatactccaccaccaccattttttttttcttctcttcactcatttatacactacaagctacaacactacaagctcccatatacgaagcatcaatgggtaaataattccttttttttttttttaaatcttttttgttgttgttatatttaatttagaatgttgttttgttgcttgatctgtgggttgttgctgttattttactattttgtgtgttgtaatgttgttgcctgtgaattctagattttttctaatttgtgctttttttttttcgcctggtccgatggggtccaatgcccatccgatggtgatccgatatgctgtgaggttggatgatagggataaaggcccgatggtgacccgatggagggtccgatggggttaaaaaagggggttggggtaatttttttagtatggtccaatgggcccgatgttagtccgatggggatcagaaaaatgggtttgggacaatttttgtagtctggtccgatgggcccaatttgggcccgatgttagtccgatggaggtccaaaaattggatttagggcattttgttaaatgggtccgatgggacccaatggtgtccgattgttggcccatttttggtccaacatggttttttgactttatttttaacgaggtcaattgcagctaggtacaatttctaaatatgagaatgcagattgaagatgcctcctgtcctttatgtggggtgggtgaggacaacttaacgttccacttttggagatcttcccctggggcattatgctggttattaattcaagtgctcgagtttaggcttagatcaaatttttatgggacctgaagtcaaagagtgtcagtatagataagtggtttctttatgctatgactatggtggatacgatatggcgggcccgtaaaaataaagtacacaacaataatataagtagcattaaatattatattgactctatcactcattgcaattgctcttgttttttctccttctcctctagctgattcagtttgctcctttggtctccacctctgcaatattagatcaagattaattgtgatgttaaaggatggagtgagaaaatgtgtgtggcatcattagatagagatcacttgggaacagtttagtagcaagttgctaccaataggctcaacttttttgatctctttatcggagaagttgtaacttgtcttttagtaccggagatggtattctttgaatcaccattttgtgatgatagagaacgattttgaaaccgttttcaaaatgctctattgctaaataatagaattgaaaattacaaatagtgatggtgatatcgtaattgctttcttttttctttttctttttttttttgttagttggacaatatcaatagggaaatttgatt

SEQ ID NO: 116618 - DNA, 2617 bp, Cannabis sativa
aaataattaatttttttattttaattttaaatatttattacgtggactaattaaactgtgccacatgtacacagtgtacacatagacatattaacctgtcacttaacactcaaaaatgaatggacagggataagtgctaacagaacttaagtttgtgaggttttactaccaaaattttagaattgggggttagttaccaaaacctgagcacttaaagaggttatgccgcaaattactcttcaaattataatatttttacattaagcttaatcaatatacaattatcattaagaataataaaatttataattccccaaatcaaacaaaaattaattataatttttagtaaatttattatttaaatgggggcttaataatatatcatttgtttgatgtaatttttaatttaattggtgacttaagcctacttctaattgagtggtataaatatggtgtatttgtatattttttagcacatccttataaaattaaactccaataatgatgtataatttgtacagtttttttttttgataatttaattatcaaaatattttttttaattaatgtgaatatttattgagaaaaaaatattattttcttgtgttattttttgtgtgtatggttgccttttttcttttaggaaactttggttaatagctgtatttttctttttaaaaacttttcatataagagaagaaattctctatatagaaagtttgcttaagaaaaattgattttcctttttgttagttgataatttttgttttgctatgtatatagcagatagtataatcttttttatggtaggtattgaagatcttgatcttatttggaaaattttctgttttggcatgagatgcctttacagagtgcaattttgtcgctgcaaattaggacattttttttagaaaaattttgtacaactaagtagacatgtttgtggatatttctagggtttctatgttctataaatatgacctagagagcagtcaaatgtttctcacttcttctagtttcattttacatattttttttatctatgtgaggtgagagtttcttttgtaagagcctagagtgttcagctaggttttagtacgtccttgtttattgttcttacactattcttagaatagattgaagagtttaattgaataagagaagggtcttccagaaaagggtcttcgagagaagacttatcaaagtcttttttcagaaggaagtaagcactctcacatcaaaagatgaagggagttcgctgtttggtggtgtttagaaatcatattggaaaagtaaataacaaaggattgtggcaaagctttagagggagtctaaacttatttaagttaattgtatttgtaattgtttgagactttactaattgatttcattctctgtacatgaccctatagactaggagtatttgaaagaatactgattccacgtatatttctcttatgtcaagtttatatattatgtattattatttttgttctgttactgcaaatttgtgttctgtagtaaaaaagttctaatatgttattgcagatctttacagtcacattttctttactattattaaagaaatttattggcatacgtaaaattggaattttttatttggtatcagagcgagacactaaactattagtgtgatcctttaacgtttttttgtctttttttggaatatgtcattttttttttgcaaaagaaaattccatttctcatccaccacttctcaatgattttaactatatatcctcattagaaggttagaatgagggtttatcaagtcccaatatgacaaagcatggagaataattctttcaagatgatttaatcccattgtaatagatttcaaaattagtaattcaaagttaaaaccattaacttgaatggtctactgaagatgataagttaattatctgcttacaatagtaaaactttacatgttatatttaatggagtaggtgaaggttttattatgtttatatcttcttttgaatctgctaaaaatgcttggtaaattcttcaaactcagtttgaatgaatctctgatgttaagcgttcttggttattatgcttcagatcaaatttgatggtcttagaatgtctaaaaatgaaaccatgtctgagttttatgaaacattgtctgatattgctaatgaatattttactattggtgaaaaactttatgaatttgttcttgtcagaaaaatgttagagttcttgtaacaccccactagtttaggcgtgttaacgtgatttttaacttaactgtgcagctcgttactaatcaacaagattattgaagatcgtgaatatttaaaacttcgtttaactaattataaataccaaaataacatacttgtattaaaccgagatccagttttacaaaatatttacaaatatttcatagtgcatgttacaaaagtttgtcgcctagcgactatacaaaataagccccgctatcccaaagacactatgcgccagcctaactgcccccaacatgtacaattttcatctgctgctctcacggctgctcaaccttagccttatgcccttaccaacacatgcaaacaaaatctgtgagtcgacagactcagtaagaaaagca

SEQ ID NO: 116619 - DNA, 1500 bp, Cannabis sativa
  modified_base (46)..(58): a, c, t, g, unknown or other
  modified_base (1318)..(1321): a, c, t, g, unknown or other
ataatttctaattagtcacaattttttcacttttagtcacaagttnnnnnnnnnnnnnaagtaagattttttgtagtgccagtattttcgtgtcgtgctcggacgaactttatttttgctcgaacataacatcttgtagccttgagaaatgtgatatttcacccctaaaaattgttgtcaaccagccagatttttaagctgatctttaacagcggtcagtcttcgccaataccaacttccatgtgaaggtggtttttaagaccaccagtcttcatctttgatatacacactatgcacccagcgaacccaaagatttttttccttgttagcaatagcccatacgtacttaaagagtgttgcaatagtccattctggtatccttttaaagccaacccctccagcagccttggattgacaaacagagtcccaagcaataagtcccgatccttgaagcaaatgttgtcctttccatagaaaagcacgacagatagcttcaagttccttgataacattctttggcacgattatgatttggctccaataggaatgtatagtgagcataacagaattgataagaacagctcgacctgcaaaagataagttttaagtactccaggcattgattctagctgtcattttttcagcaagaatcaagcattccttacttgatattcttttgaagcaaatagggatgccaaggtatcgaaatggcatctcttttttactgaatctcgaagcatctacaatgcgttgcacttctctatcttgcataccacaacaataaatggttgatttagaagaattcagttgcaacccatatgaacaagaaaactactttacaaactttggaggaggtaatagatgcttttgtattcaccatgatagaataaaattacatcatctgcaaaactcagatgatttattttcagatttgcacacctgtcaaaaaacttgaaatctggcttagactttatttgtcgcatgattctggatagatactccattcaaagaacaaaaagaagcagagacattggatccccttgctagagtcctctttgagcttcaaagcaactatgtaatgagccattaaacattaacgagaacatgggagtttacacataaatcatgatcaatcttacaaacttgttagggaaattgaattcccaaagcatttcttccaggaagtcccactcaattgtgtcgtaagctttttgttaatcaagcttaataatgcaccctagtttgagtattttcctcccaaaatgtcgcgtgagatgttggtgttggaatatattttactacgatctagatttactannnngtatgttgtttaacatcctaaatgtaaatttttaaaataatgtaatttaaacacatataaagttttagagaccttatagtgggtgcagcagaaacaaatgattccttccgctcagatctctaacccttgtatcctctttgtagcagagtatcaccaagatctgagcccaaaacttcttc

SEQ ID NO: 116620 - DNA, 2399 bp, Cannabis sativa
  modified_base (26)..(46): a, c, t, g, unknown or other
tattttcactttttcaattttaaaannnnnnnnnnnnnnnnnnnnntgttaccaaacgccaccttaatttgtatgatgattcttcaatcaataatcttttttttactacaatatttgcaaaaatatatttatttgctcttttgtttaaataagaaattgtatgattgatttttttttttttgtacaatattaattaattttctgagtaaagttcaatagaatagttactcttagtataataaaaaaaattatagcaaaactattataaattgaaattcgatagagtttgatagtttaattatcaataaacaaaatacaaccgcacgcgaagcgcggtttgttttctagtatataataattacaacattacaaaattaaagtataaaataataggataatattttaatagaggtataaaatataattttatgtagaggtattaaaaataattttatgtagagttatttttttttaatatgtgtcattatttcattttatgtccatatttaatgtaatttccttatttattttttttttttataattatttataaaaaaaaacactatcattctttttgtcacttctttcttctttttctctccctctttctcgctctctaaaagttttaaaaattgctcctcaaaggacccaaaaatgtaacaaaaaaactaagaactttcatatttcttttcaaaagaaaaatggagtttgagattcaaaaattttttaatagcgaagtcaaagaacaatacaaaaaagcttttttttgtgtggatatgatcagagagcagagagaggtacaaaagctttttgtgcattgttctttgacttcgccttttaagaatttttagagagagaagaagaaagaagtgggggagaagaatgataatatttttcacaaataattatatataaaaaataaataagaaagtaatattaaatatgaatataaaaagaaacaatagcatatattaaaaacatgactttaaataaagtcgtttttaattcttctgcttacagcattatccaaaataataattatgagtttgatcatatatctataggaaataaaatagatataatgtaattactcacatttagtacttctcataactcgcaaagcaatttctgtacctataaaataaataaaaaataatggtcaaaattaacaaaatataatattactaaaaaggaggagatattggatgaattaataatatataattacttacttgtccaatgtattggaatatgaaaacattcaacgttgtcatgatgatgatgataatgatgttgttgggcgttgtttttgaatcgacatcccatgcgtttggcttcacaatctctacaatcaggtgtggaccacctcagtgtaacaaagtcgcgatttccctttaatcccgcattgtaaaggctgtctggaatcgatcgagtgtcgtacatcttggtgcaatttttgtaactgcctcgtattacatcaatctcgtgatgagaaggaaccaatctgaattggtggcaaaaccgatctgaagagcaatggaagagagtgtaggttgtgtaatggttgttgtgagtagggttatatttgaattggaatggaaagttactacgattggtactgttggtttcctgaaggagaaaaagtgtggcaaggcaatagtttgggtcatactctatttggatttcctgtgaagcatagtttatgtttcttacgtaaaaaatggcatcaagagttgtaatattcagtatggtatcgttataataataataataataatcctgtgagcaggatatggtgaaaccactaccactactactactactactactagtgtactcatgtgttttgaaatggaaaggtaatctaatcggcggacccttctccgaacaccttatcggagatcctaatcctaatcctcggtcagctgcaacagctagaaataatatgagcaagacaccatgagagaataaaacatctactactttcaccatcgccaaaaaattacacccttttgattgttagttttatcacaaataattataaattgtttgtaatgatgattgagttcataaaaagaattagaaaataacttacaccagcaatatatatatatagacataataaattcttgaatatgtgtctcgattattgtaatttaagagggacttccttggtgttaattgttgaccaataacaagtgttgactctaaataattaaatattcatattctttgtatttttttaattaaatatatttatataatatttaaaaagttataataatttttttaagaaatttggatgatatgatgaagaaataagacaactgcaatcaattacgagaaaattacattctatactttttttatattgtcctcttttatttttaccctctttt

SEQ ID NO: 116621 - DNA, 2512 bp, Cannabis sativa
ctcctgtaacagctgatttgatttaatgaactacatcttcctttcaaaaaaaaaaaaaaaatcaaatttccctaaataagtgatacaatgaggtgtcaaaaattttaatatagtagaagagtgttatattatttataaattaaataatataataaaattaagattaaaatgataatatattatatattaataagagattaatatataatgtatgaggagattacattgtatgtgatatagtgtaataaacacacaatttgtaacatttgaagagttactatctaaatatgggatttgtaatttatgaactaaatacaattaagtgtatgtgcatatgggagttatgaaatcaaatgaaaagtttttaggtggtaaaaaagtgatatattattcatttatattatttaaatgggtaatgaaatggtgatgaataagttggcttcgagtgaagtattaaaactcaaaattgaagctaaaaaaatgtctcaagtgacatatcgcctcttattgtacgacagacgacaggcgacatacctgatgccatgcgatattgcctctattttttctaataatattatatgtatatatataaattcctccaagcatcattgatctacttcatatcattgattaatttatatctattttgtggtttgggggctgtttaacatagtcttaatttatgaatagtcttgttattatatcacccctagctccttgacactacacaaaaattgggtgtgtaacgaggacacttataccgaggacatttgtcctcgttatagaccctgttttttgtagtgtgagtcatgttttgcttttctccatttgaggtgtttgtcgtttgtccgattaatttttaattacaaaaaaataactacttttaatgataatattttagttacaatatgaatgttttgtgactaaatgcaactttttagtcacaacatgaagttacttgtgactaaaatataatatttagacacaagttgttactaatttagttttagtcacaataaatattgtgactataaacacatttagtcacaacaatttgtgatttttgtgactaatacttttagtgtcacggactttttagtcacaatacaagaatggtgatttgtaattaatcactaatattttacttttagccacaaattttgttatgattaaaaataaaaaaatttaagattttttgtagtgaatgggtagttttttgataagttttctccatatattaacgtacgtgtggccttatcttgatagagggttcaatcaatataagcaaaaaagcccctacacatcttcatgcatgcattgaattattatagggtgattatagtagcagacgtgaggaaaagatgcagaaataaccaatgttattaccgccccaccaacattagaggctgttttctccaatccttaatcagttaattggtactgataaaaatatgttgaaaaaataaaaaataaaaacattaataagaactataagtagtacgtagtagtagtataaaaagaattagagtttaattatggacaattgtagttcaaatctctcttatgtcttattcttatgataatactcacaaaaggcctaaaaagtctaagtttggcaccgaaattttggactgtcgaccacctgatatgataaataattacttatttcttccttcgatcagatgtcatataaaataataaaataataagcccatcaaatatatatgacaaaataaaaatatcactacttaacaaattgtacatttcgtttcaaaaaaaaaaaaaattgtacattttttattatttatattaataactaataaataattttatgatatgtatattgacaacaaataattaattaatgataatattttagtattaattacattaatttggggcagatttaaattttagtataatctaatttagtgtacagcattttttttaataagaatttcattaacagagcaaaaactcaaacatgattgggtaagtcagcagctgcccttaccacagagggacaaaatttcttccaaatagcattggctttagactttaaaactgacttagcttagaacttgtgccactttgttattgttagtttccctaacagcaaaacataaattcaaacgatcagaaattgaagataattgttggtgtacaccattttagtgtatatatataatttatttatttttttgtttaggagaggtgtatatataatttagtgtattttttaagtgaaatggagaacattccccacataaaatggttgtcaaagaaaatataaattcagacattatatatggttccaccattacggtacactaaaaaattcacacgtatatataaaattataaatgttccacacataaaatacgtacgtaatatttttacaacaattaaaaaaaaaaaactttatgcacatataataattataggctaattaagatttttgctcttaaacttttaaggtcattaaaaatgttcctgaattattgagattgtt

SEQ ID NO: 116622 - DNA, 1803 bp, Cannabis sativa
  modified_base (1761)..(1768): a, c, t, g, unknown or other
ataccaaactaaggatattcatatataaatttttagtcctaatgttatcacttatcaggttgtattttcattgtttaactattaacataggtgaatttgagtaaatatggtgaattttttctgtgacaggcaatgatgtgtcaggagaagttgttgatgttggagcaggtgttaaaaatttcaaaactggtgacaaagttattgctatgcttaaccctcttgtaagttttccctatctactaaatactattaagatttttgttcacttgattttgtagaatattagaattctacaaccttatttcttgtggccataagtaaaagcaatagactttctgataaaaatccaatctttttctaaaactaatctttgtgcaaaatgcagattggaggtggactagctcagtttgctgcagccaaggaaagcataacggtcactaggccacgagaagtgtctgcagctgatgctgcaagtttgcctgtagccggtctaacagctctccaagccctctctcaatctgctggggtgaagctcgatggaagtggccaaccagtgaacattttggtcactgcagcctcaggtggcgttggtcattatgcagttcaactagcaaagcttggcaacacacatgtgacagctacatgtggggctcgaaatgtcaagctcgtgaaaaagttaggcgcggatgaggttctcgattacaagacaccagaaggggaagccttgattagtccctcgggtcgaaaatatgatgcagtaatccactgtgcaacagacattccttggtcaatttttgagcctaatttgagcacaaatggtaaggtaatagatattactcccggacttagttccatggcaacttttgctttgaaaaagcttaccttttcgaaaaagcaattggtaccattatttctaaatcccaagggtgagaacttggattaccttgttaagttagttaaagaaaaaaagctcaagacagtgattgactcaaaatatcccttaaccaaagctgaggatgcttgggctaagagtatggatggtcatgcaacagggaagattattgtggagcctaaatgatatgatcagatgaaatttgagtgatttaagggaggagaatacattctttattttattttattttatgatgaattaatgtaaataaaaataagctatagacacagcagaacaatatactgattgtctggctttatattttactatcttgatcttgaattactgatcatgattcttagttttatgttattttggggggaaatttgcctaattaacatcataaaattgtaaaatttgcaaaatgactacattaatggtcgcaaaagaaaggttttatagttgcacagtgtaatttgctaataaaaattttcatgggttttacatatttttcttgaaaatttattgtgaatggatttgttttctttcaatttagtaaaggtgaaagaaactattaaaattgaatgccaaaaaaaatagtttgtgaaaattaataataataataaaggttttttttaaaaatatttatttaatattttatttataattttacagcttaaatttttatttacaaaaatataatatttaaatttgtttaaaaaaaatcaaattataaaatacaagttttttaaaaaataacaaaataattaagaaataataataaaattaatctcccaataactataaattatataaaccaaacaaaagataacgtgcatgtttggcattataactaaaaaactgttttnnnnnnnnaaaaacagaaaattgttttttgaaaacaatttggc

SEQ ID NO: 116623 - DNA, 2048 bp, Cannabis sativa
  modified_base (26)..(68): a, c, t, g, unknown or other
cgtttttcataaacctcgttgattannnnnnnnnnnnnnnnnnnnnnnnnnnnnnnnnnnnnnnnnnnaaggtagttagggtgttacactttcactccattacgatacactggttcaccaaatacatcagtttctacctacataactcacactcgggactgaaatcttcctttactgtagtaacatttttcaccaattgacatagagtatattttgtccatccctctatctatatgtttctaatgctcaagacagttgaatttgacatttcaataatacaggagaatactctgtgaaatctggctaccatctagctgagttccttgaagaagctgatctgtcttcaagctctactaatcaggctgcttggtggaaatacttttggagtatgaatctcctttcgaaaatcaagatttttgattggcaagtgtttcacaatgcaattcctactgttgcatctttattctctaagaaaatcatagatttggctgcttggagcctttgtacaaatgcatgggagtctgttggacataccttattctgctgcaaacatgccaaatatgtttggcgatctgcaggttttttcatagattatgcagcagcttataggatgaagagtgaagatttcattctgcatttatccaccactgtttctaaggctgatatggagaggattttatgcacaatgtggtttattttgaatgatagaaacaaatttattcatagaaaatcaacacaatctccttctcaaatttgagcaaaatctcatgcttatatatgcactttcagcagcaggcttcaaaccagatatgctcaattgcttcctcttctggtgtggcatcacatttaccttggcagccccccaatatccaaactaaaaatgaatattgatgctgcttgtgatgtttacaaacataaaattggtgtgggagtcatcattcgaaattctatgggtcaagttgttgttgttctctctaaaacacttattggaaagtataaacctcagaaaatggaagctaaagctttgtctactgatttagtttgggctattcaacacaactttcaagtggacctcatagagacagattctcttattttggctaattctattaatagtctttcatcaactatttcccgtttcaagatttggtgattgatattaagaatcatttgtcctatttccctttcgcttgtatatctcatgttatgagagatgcaaaccaagctactcatggtttggctaagcaagcattagtgttggaaaatgattgtatgtggtttgaggaaattccctcggccattttctctgttgttgtaaatgacgctctttaatttatagtatcagtccttttctcaaaaaaaaaaaaaaaaaaaaaactatatgcagtgtagtaaattagtcgcaaacaaaatgataatgtgaccatttagataattttcatataagtatcatgccagcaccatgtatgtaattaacttttaaaaaatactataattttttttaatttagctttatataattttttaattattaattaatttttagtttaatgatcttttaaaaaatataaatttttaattttttagttttaaattatacatacacaataatacattgatgatagttgagaaaaaaattctaaataaaaaaatgcttatagggttgaccatgatctcattttatttgttcatggagattggatcctgttagaagatattccatctcgaaaatacttaattattcaataacatattatattcccaaaaaatagtaaaaataataaaggttttctcttctaagaaaaataaataaataaataatgaaaaagggattttttcaccaatatatctaaaactaattttacttgcaaaaataccttcaacaaatttatttgcacaaatgttgatgtatcacgtcagcataaatactgaaattcaaaattattaccaaaaatggaaaaaaaaaaacttgaaaaaattttgcttccaaaaattttagagcttgtttggctgtgttttcagttttcagtttttaaaattgtgttttt

SEQ ID NO: 116624 - DNA, 852 bp, Cannabis sativa
cttgttttactctgttgaataatatgaaagataattcattttttcaccatgtttaaaaataaatacaaatttgcagcatattactttttttttttaaaattgagggtcttctgtgggctatgcaaatcaaaacccaagctagtcttgtaaaattttatgctgtccttcgtagggcagttactacctatttatttatcaggcaagattattgattagtattaaatgcagatccctccagaggatattcagtgggatggtgctgatttggttatatcgcatggaggaaaccacggtggccatggtcgtggccacaagaaaccctcgaatcgtggtggtgccattccaggttctggaagagggagaggaccaagtaaggtgcagccaaagaaagattttcccccaacacaaaatgggattgcaaaaaaagtatcagatgatattgaattacttaacacggatgcattggtcaaggaggtatgtatgataaatgtatttcagccaaatttgttggtatgttgttttctgtttacttagttacactcatttatttttcaggtggagactgttttcagtgcaaatcaccctgatccttttgagcttgaaaaagcgaagaaaatgctgaaagtaagacaaaatctgaaacatacctgttaactttctccctagagatttacagatttgtatgttatctttctctattgcaggaacacgaacaagcattgattgatgccattgcaaagcttgcatattcatctgatggtgaaagtggtaatatatgtgtagattaattttccttttattgttaactgcattcattttttcttcattggaacattaaggtgacgtttagtt

SEQ ID NO: 116625 - DNA, 1733 bp, Cannabis sativa
gagtgagaatattaatatttaattcatttgtaaaggtgtatgtatttcaaaaatattattaaataataaaaaataatctaatgcacctaaatgtaaactattattatactacttcatatatgctagatatcattcatattattatatacttttagtttggttttgatcattcaaaatcaatgatttttctaaaatttcaaaaaattcatgcgaacatctcaactaccctctagaaaagagtattgttattattagatacattttgaatgatagagtaaaaatgtatggggtttagggtcagagaggaatggtcatctactattctttctcttttggtcaacttctttcgtcttctattggtgtgtgagaggtttgtttgatgttctgagtagtcttttgcgtttttgttggtttgttccgtctgttggtgtgtgtttgtatgtttggtgatcttgtttttctgtgctccttgttcgttttgtggttgagggtttctttgtttttcagtgtgtgttgtcgtgtttgtctggtgattgttcttagtgtaaatcagtggctttaattcaagtttgagcaagtgggtactttctgctacttgtgtggtgttcttggccatcaaagaagaggttgctgtcttgcctcacctgtgatgatcatgaatagcgaggacaagccgtttccgttgttcagaccttggctttccccgtcctctgcctatggtgatatgcttttagggtttgaacgagttatggcccgtggtctgatggctccatctcagaagttcaaagctcgggcgtctcctcatactcgggcggttgacggacggcgcggaggtgaccgttcgatgcctcctgggttttcctcgtcccgtcgttttcatctttctctgaaaacgactgctcggcctcttgacgatactgctactgaggaagctttgcgggtggcgtggctccccatggcttcatctgagcaccatgtgcacggtcttccctttccttgtaataaggccgtgggaagtcaggtggctggtggaaatgtatttgaatctattcctattttggtgagtgaaggtctcaatgcctcaaagaacgagttaattttgaatttggtcaatggggatcccattgtggtggatcatggtcaacatgagattgtgccgttggctttcattgggcctgtcactaactctattggtgtagtggggccacatggggctaataataatggggcctctatttctaagtttgttgggggcccagatctggttaataatgaaactactttaagtgagaaggaccacgtttgtaatttattgggccatcaggagcctagagttgctgaagagaattgtttgatccctcctattgggcatgaggtcgtggatagtgttggggaagaaagggctttggctgattcttttgaagcccaagagaaagtacttcatgatcttaaacaatttgggacattggatgtgtatgagataaagagcttggggggtgatattggtgtgatgactacttcagaaactaatgagaggacttcgcctttcaagaaaagaaaatttgaaggctctgcttcgttgtgcaccaggccacataaaattgtcagaacgcacaagacagtgtatgatgaaccttctgaggatatgtcgagctcacctagctattctgaaggaattatgaagaaccctttggccggttcatctgtgattgaagtgttggaatttattttac

SEQ ID NO: 116626 - DNA, 1862 bp, Cannabis sativa
atacttgacaagtaaatccacatcctcagctgtattaacaaggtagtccaaaagcaccacataatgggtgatcatgcatatgtaaggatgataattgtaatggcattgttcaaaagcaactaagtttcgtagtagggtttctgtgctgtcatctacttgtaatattggaatttctaaaatgccttgagagaatgtgaattggatgtcaagcaaattttctcctgctttcgccttgaactttactccagcttgatgtagtttttttgcacttgggaggtttggagtatttcccatttcgggtttttgcttcaccaggaaggcaaagaattttctaaagagatcgacaaaatgtactgttctgtaagtattcggttcaggcccgtcattagagatcgacaaaatgtacagtccaagtattcggttcaggcacgtcatatcttcaggcccgtcatgtggatttggtgcacttgggaggtttgaagtagtttccattttggaactttgctctagcgggaggacacacattctgaataaatctacaaaatgttgtgaactatgactattagagtgtccctcccgattaatggatactaatggcatatcctcgaagaaagaatgggcaagcttagcggttgaaataggttcatcatgacataaatcatttggtactgggttgaaaaggtgctcaaagatgaaaaatggcagctgattctcaagcaacaacaaatcacttctgatgtcatacaccatccatggccgattaaagatgtggtcgtgaacaaggtctattcccgttcgatacttaaaaaccaacaatatctcaatgatgaagacagcatcgagaagaacaatctttacaaattcatcacttgaaaatggtatagtttctgcataacaactccgcagttcatattctttctcttttatgatatttacgtaatactccaattctttaccagtgcgtagaagataattacgtaggtacctcttcttatggtcttccattggtttcacattttggttgccatggtgaaatgggcctatggaaacaacttgtggtgtgtaagccttatcattgccatcccttaatcgcttgggaactctgtagatacagcggtctttaaataagagaggaggcctgtctagctctgatcgtagagaattcaggggagaatatgactggttttcatctacgtttataatgactgcttgaattgattccctattttcctccattttaattacttctttgtgtttgttgcaaacgatgactgtcacttggaagaaacaacaacacctggtaacaaacaataaataatagatttaaaattgtagaactattttctaatttcccctataaatcaattcatcatatatatatgatcgaatataatccttacatatttggtacacaaataatcatatatacactcaaatattgacatggtatacatataatattgtgtgtaaattgtcattgtacatattaggtttattatgttatgtcattactttgtatccttctctcatattttgattaacaaattttatcatagcttggtcatatccgttgaacaattgttcacctcgcaaggccgtctcaagccggtgagggactgatgaagcgcctggggtgaaatctaacacgatgctctttttatatacttaattttaatataatattggtttgatatttaattaatttaaagtattttttaataaaatattaagttcatagtgtataactattaaatggtgaggggggatgggaaaaaaagagagttcatgggttcgaacctaggaccttgaagctattaaactattaaatgattgtaaaataccattacgctacactaaaaaaa

SEQ ID NO: 116627 - DNA, 1851 bp, Cannabis sativa
taccaggacctccaacacacacacatccacctatggccacttgagctagcctcaagtggttgacgttttattgatattagtaaagaaggtcaagtaatgcaagtatattaaaaaattagtttgtagaattgtctggaataagttgagcatttatgattgagtccaattattgtaatcatttttaagatatactatttatttttcctaagtgaactttaaaagttgaacttcaaggcaattgagctgtaactctggttcatattgcaattgaaattttatgagtagtggcaaagcagtctagattggtaatgatggcttatagtttgttcgttgtgtgtttgtttttgtttgtttaacttaattcttactcgaggatgagtaaaggttaaatttagggagaatttgttaagtttatctttaaatagtaataatgtataatttttcttcccttaatttataaatattcaataattttgtttgtttgttaagtcgtaatttttaaattattttaataaaaagtaattattttctttttattattaatgtgattgaatcattgaagattaaaagtagttttttaaaaaaaaaggaagaaatgaaatttaatgatgatgtactctctcattataataaattatatattattgtttattgagatttttagaaactaattttttaaaagattaagctaataaaataacatataaatttaacgtgatttaggcgttaataagtctttgtccacgagacaattttataaattatatagcaatgagctttttacagctttatagtattttcaagttgtgatttttgaaccctttacatggaggagataatgtcttatttataggcaaacttccttaatcgatcggacagatcctgctcgtactagtttgttttttttttcctaataaaatagaagctcactaattggtaaaataaattatttaaacattattttgagctattgagtctggtaggtaaggccctactcctaaaagcaatctaccgtacggagtgtagtactgttaacaacgacaggcaaggtcaggcaccattgttggaaaaaggaatggcgtaattgaggtgcacccctctaaaagttgatcttatttttatcgtgtgccttttcagagtttagtagaggggacatattttttgatttcttgggatcgtgtcagaggcgtgcttacctccaggaccataaactatccaaactgtcctggacaccctttcagcttccagtcccataccaatataattataatatattaatatttactacacattgtattaatttttttttgaaaaaacgaaaaaaaatttatcatcattgtaaaaaatatgtgttcaaaaaaataaattaaatatatgtatctacatctacaaaaaaatacacatataacaaaaaaaaaattgtcagaaataaactaaaaatacacacgaatataaaaaactaaaaaataattgtgcaacaaaaaattaatatgaaaaccacttaaaaataactaaaacacaacataaaataacaaaataaatacacatatatacaccataacaaatgtacataaactaaaatcaactaaaaaataattgtgcaataaaaaaatacataaaaacaacagattaataattataaaacaactatagaatttatctaaacaatagcatgaaaataaatataaaataacaaaaaaaaaaaacagttacaaatcaacataataataataataagacatcgacatcgttgtaatatgcgaattattcataaattaactttgaataaactacaaaacataaaaaaaaaaatactactttaattaatcatgtaagagagagaaatatata

SEQ ID NO: 116628 - DNA, 857 bp, Cannabis sativa
  modified_base (746)..(766): a, c, t, g, unknown or other
acgagatacaaccaagcctttgagtctcccaatatcttcttcttatttcaataatctagataatgcctcagagcatatgagaaatatgtaaggggaaagacggtctccttggcctaaatctcgttgaggaacgattgatccagagatgtcaccatttataagaaaagagaactggttggtatgtaaacatgtcataataagagagatccatcacactttaaacccattttacccatcacaactgctaagaaagacccttcaactcggttaaaagctttacttatatcaagttaaagagcagcataaccctttctactacgtgttctatgttttaaactgtggataagtttaaaaacaacaagaatattatcagtgataagcctatttgtgaggaaagcactttgagtctcgaaaatgataagagagaggactattttgaaccaagaaactaggatttttgagatcagcttgtagatcacattacacaaacttattggatgaaagtcattcatggttttcaacttcttaatctttggtatcaaagtgattagtgttttgttaaaaatagtagggttacctccttcattcagcacatgtaaaactacttttattaccaaagatccaacaatatcacaattggttgataaatatcgctgacattccatcaagactaggacttctatcagcactcatgcttttcaaggcatcattgacttcagatgatgtaaatgttggaaattattttnnnnnnnnnnnnnnnnnnnnnacaagtatgtttattaacacactaaatatgaactttctcaaacgatgaaataaacacgtataaagtttaagaaacgttacattgggtgcag

SEQ ID NO: 116629 - DNA, 1309 bp, Cannabis sativa
aataatttccaacaaaaagatcacatgaacttggtcaagtgagtttcttactagtccttgaatatcacagtgattttggcagcgtgacagctcttatgaaagtctggcctcctccaaaatggtgatttggatccactatttacaaggaaaaagatgtgttaatgttatattttttttttttacataataacataattaatactgattgagtcaatcccatgaaatcttcatatatccatgattcttgcaattccatcattataggccaggctagttgacctattcatgaggaattcagttgaaggaatgaattaggacattttcctttgcgagagtaaatggccaggcatttatttagcatgataactctttggttgctcggcggattcaatatatatatgttccatatccagggcttgaaggctattggaaagacttaccttgcatatcctctgcccaccatatttcgagaagagtatttaagcatccttttctcgtccaataacttttactcttgtcacctgtcacattatttcatgccacatcatcaagtttctttttgaataatagaaaaatgaaaatatagaaataagaatgaaaataagaaagaaatagaattaaatttaaaatacataaaaaaattataaaagaattctttaaaaaaatttccatcttgcacgattggtctttgtttctattttaaaatagaatagttattcaaacaaaataattaaaaaactaatccattggagatatatatttcaataatttaaaatgcaaccaaacaaaaaatagaataatttttttttcatttctattccattttattacttccaaccaaatgccaaccatgagccaaacaaaagttacaatatattaaaaagaaatagtatttatctaagagtccagtgtgacatagctttaactgcatttataaaatttaaatcgcattgagccacgtacatattttagtacattgttgtatagtataggtgtagggccggctcaagggtggggcagcaagggcccacacccaaggccccctacctagacccaaaacaccttttaagaaaaaagcctcaaattcctttattaaaaatattttttttttaatttttactattatttataaaaatgatataactatttattttttttttttaaaaaaaaatagctaatttatttcttaagatatttcatttaagggagattatatttacacccccaaaacttataactacaccccattactaagtttaccccaattaaatattgtttttataatcacaccccatcacatttactaaat

SEQ ID NO: 116630 - DNA, 1572 bp, Cannabis sativa
tcgccggccgattcagcccgagacaactcacccaaccatttcagcaactcgttggaatcggaaacggcgccgaagagctccgtataggacaaatccctccatgcatagttggtgacgtaatcccaaccggccgaccacatgaatctccaaaaccctaagcccattcctcgctccaatttctccgccatggtcctggctcggttcgcgccagagatatcgcccctggcggcgcgtaggttcgccactcgagttaagagcgtgtgggagagggagaagagtgtacggtactgtgtgtaggagattgattccgagaccggcgcggcggtgaggagaaggatggcgattaaagctagggtttggttcgccattgatatcgtcggaagatcagagattggaattggaaatttgagctgtgaagacactgtgcttgtttgggtttctgggaattgggcctaaaatttgggcctggatgtcattgtgtttgggcctactgatttttttgggcccattattccaaaatgccatctgggcttttaaacttgccaacagaattgtgtatttaaacttgaaaaaattgaaatgggtcccaagctttggcccattttacaaaagttgttttatggagatatttaaattttatggtttttagggcaaaaatgtgtaaaattatggttattttaaaagattaatttacggcataaatacttaaatttaaattctagtggtagataaatacttaagtttaacttttgacggtaatagctaagttatttttctgaaacttctgtagatacctgactcttaagtgtcaatttattatccatgtgttatcaggtatctacaaaagtttcaaaatataacttaggttttattatcgtcaaaaattaagttcaagtatttatttacaaccgaaaattaaatttaagtatttataccgcaaatataaaaaaatactgtaaaaagtaagtaaagttaaaaaaaatatggaaaatgtaactagttaacttaaagagataattgtaattacctaaactattttctaatttctccatgtctatatttatgcacacattgtgtaacaactcataaaatgtgtcatttccacttgtttaaactatttttcttattttttttaaatataaatttattttatcaaattactttcttaaattagttactttcaaatgtgaataattatccctcccataaacaaaaataattatgcctcaaagtagaataactctaatcatgtgcgcacactaaatggaagattggattaggctattcttaggccaattaggaattatgatctatgcaaaatatgcattgtagtggaacatctataggactcttcttaaattaatattattgataaacaattcatacagccttaaactgggctaagatgggttaagcctgtacttaaggccaattttatttaaaaacatataggcctttttgtttttttaagggaaatttacgtggtatactaatttttgttatttttttacaaaaatactgtcaggtggtattttttacttttttactgtatttttctataagtttcatact

SEQ ID NO: 116631 - DNA, 2825 bp, Cannabis sativa
  modified_base (35)..(46): a, c, t, g, unknown or other
  modified_base (1259)..(1273): a, c, t, g, unknown or other
gtacataaacaatcactgaaacagtaaaattaaannnnnnnnnnnnaaagtccttaaatttaacaatctccatattttggggggaatttctaacggctaaaaaagttcaggagtatttaatacatgtcaaagttcagaaaagaaaattactaattagcattgtcattatgattatttatatattataaaaaaaaaacatatttattatatataaagggatgaaaaaaaaagacttttatatttatttatattttaaatgctaactaaattaaaaagatacttagtttaaaacttaatttttcctttactttaagtagtgtagtagttgaaatttgaaagttattttgaatttttagtattaatcatgagtgtaaaacagatacctacccatgttaaatagagtaattaatttttcaaaatccaacaaaatattatttactgatatattgtttttttcattactctgtctcagacgtgtaagagaggctaagcctaattaataaatagactctctttatagtgcacagagccccatcataacaaacctacactcatttgaaaagtcaccaccatgtaccaataataatatgacacgtgtaagcctcagtagtctattcatatatgatctcaggtgtaatccccaaaaatttgcctcaatctactaactaataataagtatattagctaaccccaaaaaaagctagagaatcattattattattattacttattattattattataattactctaattagtctaattagtctcaatctttattgatctcctttgacttaattatgcagctttggacagtgactcggatatttagttacacaaattatgccccattgggaaatgaaacaattcacattgattaataaaaaaaaaataataatatttttgcatgacaagagaaaagaaatagtttttaagtaatattaatactatttttattatgaaaaatactaaaaggtattagtggtgcttaatatttttctacgtgttaatatcgttattagtctaattaaatatcgggtctcatatagtttaatataataagctaattaagatttttgtctcctaaacttcaacatataccaaattatgtcccttgaacttttttagtgttaaaaatctctctaaactattgagattgttagatataagaacttttatctaatttcattcaattttactatttcaatgattatttatgtactaaatcatcctcctcagattttgatatctaccaaatnnnnnnnnnnnnnnnttgacatgtactaaatcatgtctcctgaactttcatccatggtagactttttttactaaaaattcaataatctcaatagtttaagggcatttttaacgactttaaaagttcatgagacataatttagtacatatcaaatttcgggggataaaaattctaattagccaatataataatttttaaagagtatgagtggtagagcgagcccaacaatttagtgggggcaaaaaaagtttttttgaagcattaataaaaaaaatataatttttattgaaaaaataaaaattctataagaatagaaataaatacatgtaacagtaaaagcaaaaaaaatataaattttatggggataaatataaaaaaaaatatgtatgttatcaaaaaaaatatataaaaatatgcaagaacaaagatgaaaaattatttcatttcaaaaaaaaaaagatgaaaaattatttttatgagaaaaatataaaatacgtgaaagtttatatacaaaatttatatgaataaaaaattgaggcggccaaatgatcccacatatctccttctctctactattgggagtatcactagccaatcgcaaaacgacactaaaaaagtgctaagcactactgaaatccaataacaatgctcttttattattaggttgaaaattgaaaattgtatatgcgatctattgtgagaactaatatagttttgttttttcaatacttaatttcattttatgttataatatttagaaaatactttgccgattctacatccaagttccaaagtcttaatattaagttgaaaaataaaacgatttgtatttatttttcaacttataaattttagtctttcttagctgcttgatttgtttgatctaatctcattcttatgttatatttgatttgatttccaagtaatttaaacttttcatacctatcaatatatttgtgtatattgatggatgagtagaacttcccattcaacttttctttataataaaaaataaaaaactaaaaggttatcataaaaactataagctaagtctacaatatactcttctaaaaatgtgttttggtaaacctctaatctgttacggtatgtaggagaaattttcagtccaatttttttttatatgtatatgttatggttatttaagatcacctataaatttttagaaaattttgaataatttataatactaaaataagatttaaacagttatttactgcgcgtataagaaaaaaatatttgtgcttgcaacacaatatgtaaatttaatttttgatattataaattattcgaatttttttaaaaaatttacaagtaatttaaaaaaaaaatacaaggtacacaaaattttttggataccaaaaaagagttaaaaaatctaccaaaacaatcttttaaaggtgtacgtcataaatttcaaaaactataaatctttaactaaaatcactttaggttgcgtttggaaagccacaatgtaattagatttgtgtgtaattggaggtaattatacaatttgacatgtttgtctgaccatataattacactgtaa

SEQ ID NO: 116632 - DNA, 3701 bp, Cannabis sativa
  modified_base (3623)..(3623): a, c, t, g, unknown or other
tgcactaaaatatttcgggcaatttttagatcattatacagacacaatatgcactttaatattaataaatatccttcaaaaaacaaaacatttttatttgtagttttaaggtgttcaacactccatcgttgacattttataattaattaataatttcagttttactaattaaaagggacccagtatactaatcttataaaaagtcaaaaaaatataaacaataatttatatcttgggataaaaagttttgtggctaaatgtattagtcacagtaattataatttgttgtaattaaatgtgtttttagtcacaacacttgttgtgactaaaaataaattcgtgacaacttgtatctaaatattatattttttacaagtaatattttttattgcgactaaaagtcacctttaatcacaaaaacaaattaaaaatttatgttttgactaaaacagtgtcactaaaaaaagaagattttattttgtagtgcaactcttgtgatcgctacttgccattattttggttcacattatttataaaagtagtatcatctcctttttgataaacaaaaagagctatacataatattttggtacatattttatatataatttttatatatatgtttgtgtacgtaggtgctcacacaattggagtgacacattgcccattagtgttccggaggctgtacaacttcaccggtaaaggagacaaagacccggcactggactcggacttcgcggaggagctaaagaaaatatgcccaccgcctgttgccgtaggggcgaccacagtggatttggaccgccgcagcgctctgaccttcgacagtaattacttcactggtcttaccaataaccatggtgtgttaacatctgacgctgcgcttctcaacgatccagcctctgccgccctcgtcaaaaagttcggcagcttcaaaaagttcaaggatgcctttgctaaatccatgattaaaatgggcgccattaatgttcttactggtaatgatggagagattaggaagaattgccgagttattaactaattaattatatatgtttatatttatttaatgttttagtaataagtaagataatctatgtacgtacgtataataatcacgtacactaattaaacgattttcttcaatgactaatttagtacgtaatctttgttaatctgaaagttgttgaatgttttatatgtatgtactcgatcgaatcagtcattttcgatctgttttaattataataagatatcattaatttgatttatatatatattatttatacttgcaattggttagtatcttccactaattaattataactcaatctataacatttgtagttatttttttttttttttatgaacaaggaagtattatattgctcaaaatatgattgttacaaccagcgccggcgggccctgaaatttaatgggtcataggaaaaaaaaatatttttgggccctcatttaaaaaaagaaatgatatttttcaaaattgataagaaatgtgtaattttaaaaaatgataaatttttttttggcccctaagctaggtgggccctaggcacagggcccacctacgctggccctagttacaactaaatagcatccccattaagggacctataacaaattgaagctatacatatatgtttgaactaagaaaatcattcacaaaatcactccagttggtatccttgaggttgactttttttggcgagatctatgctactcgatttttcactgttgtttgtgtctgccttactatcactactgcattttccatcttgacattccatattttgtcatttctagcctgccaaagatgatacaccagacttgctacggctgttgccaacaattatttgatctctcaattcaccttattaattgagttaaggtgactgcttgtgccttctaattcatccattttttaacttcttttaagcactccagtgagaattcgcattcgaagaagagatgtccattagtttcatgttattgcttacagaagacacattcatcttcttccaccatgttgaatttttttaatctgtctcttgtccttagcctgttcagaatagccagccacagtatgaaactatgtttaggtgtatttaaccttccctaacttcttgatcccaacttactctgagttgaattggacatagtagcttgtatccagctgctatctcgtatggtgcttgagtgaaaacttcaagttgctaagttgttctttggcagcaacaacttatttttcttgcatgtaaaatctcttatctctttaatgtttcttagttagcaaaattaaaagattcaacaaagaaacaaaatatctgcactaaaaattaattaattaatattcaagaaactaaaagtaaagtatgttagattaaaatgaaacccaaaacatatataaacaatgttatgaatatatggaataaagaatatagagcgaacatatatgtaaatgagagggtcgaaatatatctccagctattaatcttgattcacaactctagatcttaaaaaaaaatacgaatgagtactcggacttccagactcttactaactctttatagagtaactaaaatacaaaaattgggcaaacttgggtactgaccctatacactactacaaaaagggttttatcttcaattttgcatcaatcaatgcgtcttgttaaactcattgaccgacgcaaaagtcaactcataattttttgcttcgcttggtcaccgtagcacataattatcaattagcttcggttataactctaacactaaaataaaaactgaagcaaaagatgaaatttaaaaaaaaaattatatgttgacatttagcgtcggttagaatttgaaacaaaaatgattcacctctatttatacccaacgctaaaagtcttagcttctatttataactaaagctaaagggctcttattttgtaacatccccaaactcaattaggtttcctattttgatcgagcagtagagcctcttttctctctctccgccctaacgctaaaccctactgatgccacaccacctcattatgcactaatcctagctctctctttctctctctgccccaaaccacaaacctcatcgatgccgaagaactcttttttgctctctcctcacactctcgctttctcctcctttcgggcctccttctctcgctcttttctcctttcccaattttctctattgctccgtcgggttgtaagctcatctcttacgtcaatgggcaattctacttctactttattgtcaacacgaggcatcactaaaacctatataaatatatacatatatggaaaattcaatatgtgtatatatatatatttacatgtataaattaatttatggtgaatttttgttctgtgttggttgctattttttttttctagtttagtttctttcttagtttttccttgaaaggatttcttagttgctttataaggattgtttgaattttatgtattaatcaatgttgggattaaactcacttaacttgtcaagtcagtatgtctatctatttgctcatcagatgaatttgaagaaagttattatttataacagttggctaaaataccaacttaaagggaacccaccancaactataaataggggttcctctattctcaaagggagttctgagttaagagttatgatctctaatctccaaaagctca

SEQ ID NO: 116633 - DNA, 1055 bp, Cannabis sativa
gtacacgtggacagtccaccgtgacacttaactgtgatttttggacggatgtgtgcagagaaaaacggaaccagggttaaggtagtttagtcgctaaaaattcaatttttgtagttaagtgttacaaaccataaaatttaggtggtttagccgctaatatctctatataatattacacttacaaagagtggagttgagatccaaagaccatttgcttctcaaaacccgagagaatcggagcaacgaaaatggctccaaaatctgatacccattcttctgttacaggcgtcggcgactcttcttcctcctctatcgatctcctctttcacgcactccgtctgatcccgtttgaaaaagcactcattgactaaaaagtttgaatctttcttctaaacaactaatgattttgttttcttgggaaagaaaactcaattgggtgggaataaaagtaaaagaggagactttttgataaaaagaattaagttcccagttgattggagccaaatcagaaatttctatggcagagcaaaaaaataaagaaaaaggtagtttaataagtttgaattcaacaatttttagttggaaaatttgatttttctatttaatatagaaaacttttattttgcccttttaaaagggatgtacaaagtttaacacgtcgaaaatagagttcaaacagtgtattgcatgcgtggttaatttatttaatacgattgtaaattaattcgaatttttcaaattttgtaagatatcttaaatagctctaacataaacgaatatgaaaaaaaaaattagactaaaaaattattctgtacatagaaaaaatcaatatatcttttttaaaggggtacaatgtagaattatgctataatatttatatttatgtaaattttatttgtttagttagaatttcttaatctgattttttgtttaaaatatattgttcaggtaagaatataaggaatcactttatattaaaggtgttcccgttgcgggtggtgcgatttttgacttttttttttttcaatttctcaaaccgcacccgcaccgcgaaa

SEQ ID NO: 116634 - DNA, 1278 bp, Cannabis sativa
acaaataattttttgttgtaattaaaagtcacatttagtcacaaaaaatttatgttgtgatgactaaaaagttgtcactaaaaataatagttttttgtagtgttaaattaacaaacaagatataaaatgtccatgagtattattcaacatatatattgaatcaactatatgattaacaacaagtcttcgatcaaacattaaagtaaaaacaacccaagattgaaaatagggatgatacaaaaaaggtcctatcagttttacttaaattttaatttggaccatatctattttaagaaattatagaaagaaacatgtgtttataaaaatgataaaaaatagtctcctgtcacacaatctcagtcaaatctcatgatctgagcttaaattaaattttaagtaatttggaaagttaattgttaaaaatagtcaacagtctatttgaaagaaattttttaccaaaaatatatttagagaaccatttttttcaccattttaattattagagggtcctttttattattatttttttttaaaatagaagcttcaaaatcaaatttaacaataatactggaaacttttttatattattcatagaaaataataatacttttacaaaccatgaaaaagaaaagttgacataacagtataaatatatatatatatatatctcataattctatatcttaatttatcttccaatcatttctctggtcctatcccatcatctttgtcctccaatacaatatatctttttagacatgagcttttaggaaccaattaacataataagttcctaacagacttaactgcctactagtactaactagaaagtgactaatcttatattctaatagtaattacatagcaaaagtaacaataccctttacttttaatatattttataatgataaaaataaaattagctaggaagatagtttggtcaatacacttctgatttcataaaaaaatagtacctttacaactcatgttcttggggatatattccagtagtagtccgtatctaaaagttgaggaatactaataatttgatccacattctttccttttaatctcaaggcatcacttatatcatctttagctttctccaagctctcacacatatgtatttcaaatgtgtcacgtgtgtttttgcatttgtccaattcagcttccaactcttttatccttgttaaaaattaatcctccacttacactgatatgaagtccaagtacaacatgaacacaaaggacagaaaaggaaatacatgcaaatcccta

SEQ ID NO: 116635 - DNA, 2265 bp, Cannabis sativa
atttataaaagtttaaagtttaattaaaaatttaaatttagtacaatttttgagaaactctttgattagtaaaggcgtgcataggaattagaaaatcattgaagcgtgcctaatcaagtagggcattacgaaaaaattctcccaaataccaaaataaataggggtgaatcggtgcatcttttttaggagtgtgcattgtagaatttttctatattataatactctttaaagaaagttgtaaatttctgttactaaatgggttgtttactttagtgaaagtaattctaagatgataataaaaaaatgcaaaatcttaattaattatatattttttgctcgcccttctctttttttttttacatgaagtcaagaagggtccttgcaaggctcccgttgggatccttgtaagagggtcctcgcaggggttccttgctgcagggtttccattggggtccttggcaagagggttcttgttggggtcctcgaaggagggtccctactataggggtccttgcaaggcccttcggcataggagattgagttttttgatagcattttcactagtgtcttttaagacctctttttgattagatgattcgtccaatctagatttttcttgcaatgagaggagctaatccttgtcgactttaaaaaaatctctctcccccttgcccttcaagtgggtagcgttattcatagcgctagccacttgagttatatcactctttttctaaacagaataaacattcacacaatgaaataaatctaacatatcataattcatttcacctttataagaaaagggagttgaaaggtcgttgtggtgatctcataattgattacatcaaaattttatgaaaaacgtgattaaactaatggggttgcctaaagggttacctccttgattcactacaaactgaagtaaaaaaaacaaaaaggatatcttaagtgctttttctcattggtaatatttcttaagatgcttcgcattccatgctcttggtacctgtgggatatacttaatgtaaggtaccatctaagaggcttcctcactctttaccttccatacttgcacattctctatagtcggttttgccaactattccactggtatccattccatggcttcaatgtctagggtggaggctagcttagcaagtacatcagcgttggagttcctctcacgtggcacttgttcaataatgtaccctttcagatattctaggtagccttttacccttgctagataatcaaccattctcatgcccttcatttgatactcccccttcacttgacaaacaacaagttgtgagtcgctatagatgtgcatccaccttactttcaactccctgaccaattgtagactggttaatagagcttcatattccgctttattattagatgcctcaaagccaaactcgatagcacaatacatattatgtaatccaagggatatcattatgacatcggcccctaagcctccatcattttatgcgttgcctacatatagactccatacttcttccaaatcttgaactccttctccaactactttcatctcctctctcattacttagtatccagccaataagtggtctaccaacacttggttgttgattggcactctcgagacatatgcaatatcaaattggctcagttctatagaccatttcaagagatgacctgaagcccatatttttgtgtcgtgctcaaactcatgtcgtggtttatttgggctagcccatttttcataaatgggtcaccccttttttttatatacgaacttgaattaaggcttcactttttcactatttgtttataattaataagttaatcgctaaattatatattttttttataatttttaaattttttatataattatttaacatattttatacataatcatataaaaaaattaactaaaatgattaaaatttgaatatttattagtatatacatatggattattattattaccaaattataagaatttttaacgtgttgtgcgtttggactagtctatttgtgtttacatgccgtgtcttcaggcttgtcgtgttgtgtcgtgcttaagcacattttttttgtcgtgttgtgctaatttgaaattttgcatcgtgtcgtatccaagttcatattttttgtgtcgggtcgtgctcatgtctcacgggcttgtaccagtttcataccgtgtcaaaaagctcggtctgcatttacagtaccagtgatgaagatgttggaatttattttactaggatctta

SEQ ID NO: 116636 - DNA, 1351 bp, Cannabis sativa
tttttgagaaagacaaaaaagtgatatttaatcatacaaaatgtccttctcaaaaaaaataaataataaataataaatcacacaaaatgatgttattaataaaaatttatcactagatatatagccttttctataatattaaggcccaattaacttcactacttatttttcattaattaataaataacatatagcaataaataagaaataaaatttaaagtttgtttttatattttaataagtaattgcattgttatattctatagtttattaaatgtatgtgcactattatatgataaattttagattatattaaaataaaaaataagctttattatgcttgattaataatcttattgtattaattattattagtgttacagaagtatattataattgatatttgtgtatttataggttttggtatcaattccgacgacgatgaaataagattattttagggttagggttgggacagatattataaagttaggactagggttggaaaaaccgctttaggattagggttgggaccgacattataaattacaactaaatgcgacattatttgggactttagggccagagatagaaatatacatgttacctatagttcataatttatagcaattgatataatcaatgtagttttggttcaaattaacttttaaaaaaatattatattttatgagtatgacgaatgataagtaatttataaaaaagaaaaattaataattttttttctccattttaagtattttttcatgtaataattaatatagttaattaccagtatgggacttaaaattataatttgaagaaatattcacaaaattaattgtataaaaatatttaaattctcttcctgataattaatttgtcaagttttgttgaagtactaaacatcattactaatcaattaattaatattgtgcataaacatgcatgtagaattgtagtattaaaaaattaggaaaataatccaaaaatagcctaaattgatagagacattgttgaagccaaatgacagcccccattagatacagaaaatgacttgctattctttcacttgagaaaagggataaacggactcgtttgtgcttatttctgacctcaaagcaacttgtttctaaagtttgagaggttagttttagatgtcttttagaaatgagttttatagttaataattcgtttagttcatatacaattacacttgcttcttctagtttcaaattttaatgatgaattacagaactttggttgaaatggaaagaagcacactacaaaaaattttacttttagtcacaaaaaaatttgtgactaaaagtgttgagaatcatagggtttcatc

SEQ ID NO: 116637 - DNA, 1492 bp, Cannabis sativa
tatatatatattttgtaaaaatatagttttttgttttttttttcaaaaaggttattttatgagaaaataaaaaaaaaaaattgaaaaatatgagaaaatcaaataagggtaattaagtaccctttgttattttttttccatatttttttaactttttttttttttttaaattttctataatttttttttttccaaattagttatatttttacaaatttatactttaaaatttataaaaagccaaattttatctcttaaaatgttcaacgttattataaggtaccttaccttgacactatttaatttgtgcgattaattagtatcgagtcttatctcatactaatcacttgtctatacttatttataagttttaagtgatctttcaatatatgttgttgtcaaagtttgtttaattacttttttctttgactttgttgttacaaagagtatctctatttataattagtaaaagtacttgcgcgaagttatataataaagtaaatacaaattttagtcgtatattttaaaagttattggtcgttaaatactaaaattataatttaattattatatattacaaaataaaaatataattatacattgagtttaattataataaaatgtttctataccctaattttaaaactctctctttaaatggacaaaaatagtgttcaaagattaatagcttattaagataaataatttctcattttctcaaagttgtataacattatagtctttttttttaataaagtaaacaaattttcatattaaattacactaataataatatgtgatattataaagagaattgttaaaaaatactactagtgtctaggaccttctccagtatctgatctcatataatttaagaaaataatttttagaaaatatcaataaccaactgtatggtactacttaaaaagtgttgaacactatcaatgcccaataacaatactctattataaagcgggccatttaacactattggtgtctaataatttgaatatttttattagagaattgctaaaaggcattactggtgcctaacacattttttggtgtcataccactattggtgtaattatgtatcaagtcctatataattttaaaaaacaaattttagacaatattgctaaccaatcataggacgccacttataaaaagtgttcgacaccactgatatccaataacaatcatcttttattattatcgaatgaaaggtcctactttgttgagataggtttttatccgttaggaatagtcaaagatgaaatgtgagtccattttgttgagtagtgagtacaaatattcaaaactgaaaattacatgcttcaatgcaaaatagacaaaatattagactagaggcaacttgggcataatacattatacatcatgtaccatcaatcaatattaagagtttagaagacacaaacattaccttttcaaaaaaaaaaaaaaagacacaaacattaaggtggcgtttggt

SEQ ID NO: 116638 - DNA, 1053 bp, Cannabis sativa
aggtattaatattaaagctaactattttccaaatagtgatgtcttaaaaggttaaatgtggatcacatgcttcttttgtttggaggagcttaaattgaggaaactaaattattgaattaagaaaagagatatatcaatcagatgacagttaatcgattacatggtgaagcttcacatgtggaaattagccagctcatggctgcctactcattccatattggctcatacctaggaaaattccaattgatctaagctgccaaagatgttctaggggagtcaatgaaaatatttttcatgcactttgaagatgcaactcgataaaggaagtacggcgcaagtgtggcttcaaacataaactaaagagagaatgaaaagatgatgtgctggcttttctaatcaatgagagatccatcgaaatacctagaaatgggagcctcctggatgaatcaagatttaccgttaaaaggtagtatcctatactgtgttaaactaattaaattttaacacgtcaattaattttttttataaaaaaattaaacctctaataaaatcaacaaaaataattaatatattttatataaattagattagttgatgtgtcaaattttgataagtttaatacgatatgagacaccaatttttaacaaataatcttgattctccctggatgaggtgttcaaaataaatgttgacaccgacgttaagactagctaaataccaatgtacaaactacaaagtattgcccctacttatatattctccaataattatttttttgaacatagtttaaatagccatacttctagtatacttttgtgtaggaatttgagtctttttctaactttgccctacaccaacattaaagtaatcaattttaaacaaggtcagtttcgacctttcccagtccctgacttttcaaagtctgcagagtcaaaacaactccattttgccttagacaaaaccaaacactcgagaagcttcctaatcacaatcactctgccttatgtttaacttcgaaaccctagtagagagtttctctctgagaaactcgaa

SEQ ID NO: 116639 - DNA, 3166 bp, Cannabis sativa
acatatcaaaggtgaaaatgaaatgatcttaattagatataaacaccacaaatgatacaacagtttccccaacattctaattttcttaattagcttcaaaagtatcaagtctgccattatgatagccatactatatttttttaatcgttattatctgtattattattgttattgttcttgaatgagatccatgatcatctactttggtcattagttgtttaataaagaaaatttacaactattacgtattttaatatatgaaatcatggtttttagaatttttatttttagggattatatgtttggcatgatcagtactaaatattttctgattttttttccctttttgttttgacttttactatttttactttgggaagattggattttgctttttctatattgtattactttgaattgtagttgtcgattgtccagaatccagagcaaggatctggtttgttataaagttatttcatttcccaactaatcttataagcccattttttagggtggttcgacaatgcttacatgtaaattaaaattaataagatgttgaaaataatagaacaatgaatttgaggatataataaataataaatagaagaaacaaaaagaaccctttacttttgtgatttccgattactagatataatataaacaaatactaaaaacagccttcttaaccacattgtttaggatgtgattattcacaataacttaataataccttggccacacaagtgaaaggagtatagaacaataatatgattatttgacagagacttagctgctagaagataagaaaccatcgactttggcattatctttaccagatagaaacttcatgcaaattggtggtttaatcccagcaagagcaagaattgaagcaggtaaagtccatatgccatcaccacagattaaacccgaagcaactgccggtgcaaaagcctctgccttggccttgtttatcttagtccatatgaacaagatcaagcttccaatacacatgtcaatggcaaagtatgatcctatgtagaatggtattgccattgccattgggattggaatgtattttcctttatcctttcctatgaaatccttgatgaggttaaccgcaatggctataccgaagaaaatgtaacaaagcaggaggcaatagcgtggcagagagccaaacccttctactccaagtatggccatgtttcgatacacaacagcaaatggagcaggatatggagaactgggctttccgaggttatcatatgcattgtaaaagagccagaagacacagggagaaatgatacaacccattgctgttccaataacttggctgaaaaacatggagcgtggcgaagctagagttaggtaaccagtcttgaaatcttgagtcaggtcagaggctgttgagactatgttcatcatgactccacaggctgctagaccagcaagaacaccaccatttgacgcacctgcccatgctccaattgtgaagatggcaagttttccgtaggtagaagcaagggaccaatccgtgaggccacacccgtatgcattacagaaagccaaggcaggagcaaagatatagattaccactatgtaataccatttgagttgggggaatatgtgtggaagagtaccaatggagatggcagctattgcaacatagcctccaagagcaaaccatactgaaatttggtctttcaaaaacagttgtgtgcggcgttggtcatcaaaggatggctcttctttagtgtaagagggacgatctgccactggaagagagctgtctgccacatctttttcttgcagctgattatacaagccagaaagggttcgggtcagcaccttcacgaagttgtatagtccgtcgcccaaaattatggcaatggcgataaacacctacaacaatgtttggaatttaaaatgttagggccaagaatgcatattgtggttcaactcaatacaaaatccaaatatttcaattgaaaatcaccttgtatccttgaagggcatgcatattagatggtttgagtttttcatcgaaccaatcaccctttctattctctattagaggccacatgacaccccaagaaagaattcctccaagcagcactgatatgttcacaatgtatgggcaaatcattcccactccaacatatgttgaagagaaatcaaagtaaaacctgcacggtagcatgttgtttagtcattaaagaatgaaacttttctcaagaattgcaaagaaattaaattctgtacacaatgtacaattctgatataataaaatgcatcagtacttgttctcgtatgccttcaatcctagtgtagggaaattagcaaatccacaatcatctgcagcagtatagaaccattgaaagaaaccccagaaaaaacttaaggagaaaaatttgcccaacgttctcacttgtttcctacaagtgtgaaaattacagggggagaaatcattaaatccaacacaatcataaatatgcatgcgtcaaaatgaagaaacatgcgttggagttccttactttgctaacttggctccttcaggagtgtggaaactgttaatcagatgagcagttgcagtaccacttgggtatgtcaatttgaagtcaatgatcatgatctgaaacaaaccacgagatataaaaattagggatggaaagaaaaatgaagatattatggtgataactacataatcaaatatgtgtaggcagcgtttaattaaatttacagtagaaacatgtaccttacgaagaggcaccactgagaagagaccaagaaagctaacaacaaaaagaaagccaattatccatcccaatgatggatttttgtaatcattggtatctgaagactgtttagcaacactttcactcattccaaagaggtaactcccaaagcctcctgatttgtttgaaaaaaaaagatttttaatcagaacaggacatgtagtgccaacttaaaatccatatactaacaccaaatataagccattatgcaaattacattcattcagaattacatgaagaaaagtaattcatagatgcaaaactataaacttcaactgaaaaggaatgtggtgaacattttataaattgcttaacaaaaattcaaagtttcaccagtttccataacatccaaaaagtatttcatcgctgga

SEQ ID NO: 116640 - DNA, 1456 bp, Cannabis sativa
taaatacaaaaattttactttgtgattaaaaaatgattaaaaaattagattaaaaaattaaattaaaaaattaaaaaaaaaattaaaaaaacaaaagtgttaccaaacggcacctttatgtacaagctcaacagtatatttttaccaaataatttgggaaatttacaaaaatactgaaatttgagataaattttacaaaaatactgttacacggaaagatttacaaaaatactgtgtttttataaaaagaacacaaaacagaacaactcaaaacactagtaaaacaactaaaaaataccagtaaaacacgaataaaaacttagggaaacacaatatactgcagtatgaaacttataaaaaaaatacaataaaaaagtaaaaaatactatctcacagtatttttataaaaaaaatgacaaatgttagtataacatataaatttcccaataattttatcaagaataaccctataaattttattagtgtaccctatattgtcctacgaaatctactttttctgcgacattcttactacatgtttacatcatgtataattttataacatatttatactaaaagtattacattacgtaatttttgtctgttatacaaaataattaaaaacttcttctactactaattatagcatattaaaatattaataaaactcataagacctaacagaataaattattaaaaatatatatggaggaggctattcaaagcctaaatattaatgtatacattttttttattattattttggaagcactatgacccctcaactctatatgtgcctcatgtaaattgtatttttagttaaataagatataattaatatatgttaaattgctcataattaaatgtgttataaaacggttgtaaacatgtaaaatattgttataaacatgttaataattaattaaattgataaattaaataaaattaaatatataatgagttggaatgtattttagttattattattattattttttttgcacaaaataaatggattagatttgtgttttacatttatttataataagtctccacagaacaataatttatatgaccaataaacatgaattctccttcctaattatacgacaatgactaggaaacgacaacacttcactaatatactacaaaagtaaaaacgactactttaaaatgaacaagctagcacgaccgtcataatatgtagtactaattatttaaaaccgtacaaattataggcagtactatatgctaatgtaataattgattaaagttgctgtgaagtttaagcaatatttagaggaataagataaaacgtatattttattactaggtagggacccatttatttatgaaatttttacattaaaaatacaaaatattaattttattatcaaaaaactactacacggttacccaaacatttatacccttttcttttaattttttacatttg

SEQ ID NO: 116641 - DNA, 4178 bp, Cannabis sativa
  modified_base (3841)..(3849): a, c, t, g, unknown or other
acccccattgtgtagccactggctagccaaccattagcaagagtacctatggttggccatggtacaacacttcctcccttaggggagggaggcgcatagagattgctttttgaccgacgaggactgagagcgggtggaaacacccaaaatagcgattcaagaagtgagatcaatcactttaggcatctagatccaccaaactctagcaactggtgtgatctactcccaatcaacacacaagtgacaccagttgaccgaggagtcatgggcggctagaccctgcccaatgcaggtctggccgaccaaggaggcatcacaagcgacaagaccctaccctttaccggtctggccagaccctgcccaatgcaggtttggccagccaagcacaacaaccaggtgtaagccttgccagcctaggaaaactcttgaacctgggaatggccagccagggtctacagggcatggctgatcttcaccatatagtctcccaatttttttttatgttagtccactcccatgggttcagccttgtatatacatgaacattatattctgaaaagattagtgcacttgcgagcataaatattaaaagacttacttttagatacaacaagtttttggaggcgttgggatgagttggaaaaaagaaattatctttctacgagataagtaacattcttctactagttattttatttttattttcactaacatcttgaagaaaaataatgtgtaaaaaaataaatgaaaaaagaaagttatatatataatatattatatatatatatatttcatggtagttgatttcattttgtgtctccttaccctttttctctctctttttttttttttatttttatttttctcttggtagttgttgacattttgtgtctactacatacttgatagttgagtgcaattttgtttactattatccatcttctctggtgatggcattagtgcatcctaaaatttattattattattatggttagtcgatggtattttttcctcctaacatttatataactatctactattgctatcgtaatttttttttatatttattgcatttatttagttgtaaatttatttatttttcttacaaaaatacttgaaaaataattaaaaacaaagcttgttctttcaacataagcaatttttacttaaggaaatttgaaaaagttctcaaccacacttaataattatcctagagagtttttattaagttgtaagtaagtaaaatcaaataggcttgggaacaagtgaaacgaaaaaaaattgaaaaatttaaaaaataattataatatcttcatgttataagtatgctttgtggttgtagtttctgactgatctttcacatcaaaaatttgtttcttgagattatttgtgatatttgtgacattgcatgcatcgttgacaacattgttcaaaacatcgtttgataaaaagagtagtaactttaggtaaaattgaatgtgttttttgaaagcttaagcataatagaataagaacctaatattgtgcaagaaaaaatgctacttgaatatttttcacctatttcatctaatttcaaaccatgcattattttgcctactactaatgccacttattttgaacataaacctccaatcattcaattgttgccatccttttattgtttagaaagagaggatccttacatgcatgtaaataatttcttagatatttgctcaactttttattttcaaatttttttcggatgaatcagtcaaacttaggttgtttcttttttcccttaaaacatagagccgaagcttggttaaaatcacttcctacaagaaccataactacttgggataaactttttaataaattccttgctaaattttttctcatgtcaaaattgataatttaagaagagaaatctctgaattttatcaaatagataacgaagaattttatgaatgttgggaaagatttaaagatttattcttaaaatgcccccaccatgtttttgaaaaattagcacttgtaaaatatttttatgatggtttaactccctcaaaccgacaaatgatacaatctatgtgtttatcgagatttttggaaataaaatatgaacaatatgaactaaagaaataaataattaaaagagaaagagtaaaaaaagaaaaatagttttttgtgtggttagggcattaattagccttagtccatgagtcagtattatttagtagctctctagtttcaaaaatcctttgagaatacaaagaatatacgttctcaagtttccctgagcaaagtttgcaagggagttcaacgctttatccattggattctatgggtatttatagtggtaggagaattacattctatttcattttcctctattggggagtttacagtaaataatacacttatgctgtctcacgaggtctaggctatgaaggagacgatctactagatagggcgatcagatatggtttgatttggtcaacaccgtgtgctttgattatgggaaatcaatctgtgaattaattacttaatattctttctaggaagtttccctactaatcttgatatgatactatgtgtgatctcacagttggagttttcttatttatgcaatggaataaaaagggaaactagaaggtcttccaagaacatgctgtctcgtcccttcggtcacatggtatcgaacatgcttccagatactgctcatcgaaggggaaaagttttatgattgcagagccgagatacgtttttgaaaggacttattcaaatgggcttggcccactttacctttactatgggaaccgctgatgggccttggatgctgacctgcactccacgtgtccaatgctagaaatgcgaataacattcacccccaagcttctagaatgttgcgtatggtggaagctttcaccactacattaatatggacatgtggatgttcaaagataaaatcatgaatttttgagtgctattcgaccccaaaggggatgattttaagattcaacccatacttcttttgaaattatgttttcccataaacgcttagtgacgacctctctttgtactgccccatcagtcacggatatgtccagtgttgtctcaccaaaccactacttcagatcctacccaatacaccaattttataaaatcatttcttatgcccagaagaaggtcatatagaaccctgaggtgaagggaggatgtaccaaataacttgagaagtgtcaccacttttccctataaatatggaacaaatgtaatagaaaagggggagaaagaaagagagtgagaactcttgataggaaaaaaactctattataataacaatattacatagataaatccaagtgactcgtagactaaggtcaattaacacctaaactacgtaaaatactttttttacacataattaatctttgcttattaagataggtagttactcaaaatttcggtcacattaattattaaaaacttcatttctattttacattcatctcaaaatgataacaattgtgaataatattaactttcttttagctcataaaatataacttaatatatttttctcaaatttaatgcaataatttatagttatagtactcttacaatcagataattataccaaaaaaagtgaaagctcctccttgctaaaaaaacttaattgggctattatttttacattatcgataaagtaaatttaatatgaagtgaagagagggaaaacacacagcacaaaagcaacttgcaatgaaaaagttaaaaaaaaattattaaaatttgattaccctattgtaattttattataacatgtaaaagatatgaaacataataataataataatannnnnnnnnataataataataataattgttattcgtacttttgtacgaatgacacatggcattttgaagaaagagattaacttaataatttccaaatagaaatcccctaatacaatcttgtcagagagaagcctattggaactaggaataggttgagatggaagagtacacggaagcctacttaactctaccttagcttcccaaacgcagaattaacatcctaaaaacgaattctctaagggtttaagaaaaccttacattgattgcaacggaatataatgacaccttccattcaagatctctatgttgggctttgtgccctaaataaatctctattt

SEQ ID NO: 116642 - DNA, 779 bp, Cannabis sativa
  modified_base (488)..(488): a, c, t, g, unknown or other
agatttaaattaagccacacttttgaaaatttatagattagtaataataagtttataaaagcacacacgtggcgttcctgagggtcagggcgttacattttttgtctttgtagctattttacattaactattctgagtgctcgcggacacatcatttacctttataagttcaatcattcatatgctcataacacttacattttttatacatttccaataacattacaataatatgctaaaaaaagaactaaaaagattactctatcattttaatattaaatttatttacaattttataacgacacaatcatcgcttttaatacatttaaataaaattttgagtataaatatttttccttcaaaagaacacacaatattccttaaacaaataatgtagaaaaaatctaaaaaaaaaaccacaatctcaaataaaactaaaaatactggcttaacacgtaacatccacctagtatatatataaatatatntatatatatatatctatctatataaaggagaagtacgaagcagtgacataacgctctaaaatctcttcaaatacatctatctattaatttttttttaattttttattcaatttataaatatcaattcattgacctccataattttctctttaatttattaatttactattttttaaataaaaatcttcttatatatatttattttttttttataaaaaataccctatatttggaattaccccatatattatttttttaactattttttctttcaaatttacggtttgggtt

SEQ ID NO: 116643 - DNA, 4323 bp, Cannabis sativa
  modified_base (969)..(969): a, c, t, g, unknown or other
  modified_base (3405)..(3406): a, c, t, g, unknown or other
  modified_base (3473)..(3487): a, c, t, g, unknown or other
  modified_base (3601)..(3613): a, c, t, g, unknown or other
  modified_base (3989)..(3993): a, c, t, g, unknown or other
  modified_base (4173)..(4181): a, c, t, g, unknown or other
acctcagaataaaatttatttttacgttgtttagactaatgagattgtatttcacaagtaacaagattattcacaatgtcagcataccaaggcagagaagaaacatacatcaattgttcatcaggaaaacttttggtgataggggtaggctctttactagtttcaataactagcctagataagtgatcatcaacaacgtttttcaaaccgctttttatcacgaatttctagatcaaactcttgtaaaagaagtatccaacggattaaacatgattttgcctctttctttgataagagatatcttaacgcaacatgatcagaataaataattattttagatcctagcagataagacctaaacttttctaaggcaaagactacagctagaaattctttcttagttttggaataatttaattgagcatcattcagagttttgctaaagtaggaaataacatgtggtattttatcaattctttgccctaagacagctcttatagaataattagaagcatcacacaatattatttcaaaaggaaggttccaatcaggaggtcaaataatgggtgcagtagttagcatagtttttaatttcttaaaagaaatatgacaataaagatcaaaaacaaatgtattatcttttccaagtaaatggcaaagaggccatgaaattttgctaaagtcttttatgaatctcctgaagaaactggcatgaccgaagaatgatctaacttctttcacaatcttaggtggtgggagttttgaaataagatcaactttagctttgtcaacttcgatttcctcagatgaaatcatgtccaaagacaattccacgttttaccataaaatgacatttttcccaatttagcactaaactaatttctttacaacgaatcaagataagagacaggtggtgtaaacattcatcaaaagaagatccataaatagaaaaatcatccataaagattncaaaaaatgttcaaccatatcagaaaaaattgcaatcatacacctttgaaatgtggtaggttcattgcataagccaaaagacttgtgtcaataagcaaaagctccataagtacatatataagtggtcttcttaatcctcaggtgctattgggatttggttgtatcccgaataaccatcaagaaaatagtagtacttgtgaccaactaatctttcaagcatttggtcaatgaagggtaatacctcagaaaataatatggcgtttaattgagcatattttattaaatatgtaattatcatgacaaagaagtaagattatgattttacttaggctaattagtgagaattaataaatgattaaataaagcataatttattaattacagagattttattgcactatgtgggtatcgtagatatcatttttaaataaaatgttttcgggcctggcaaccatgggagctcgacggagtggtcagagatgccacgacaatataagatgaataaaatttgagttattctggactagtttagaattttaggttatcagtttggtggattagttaaattacataaatactcctaagtatataataatttaagttttgagaggaggggtagaatggtcattatgaaaggttaattctttttgtcatttaggctaaaatctagattataataaaggttatatgctgattatttacgaaatgagaaggacaacctagaaagttgagaaaaatcaaaatagcctattttcttcttcttccttccttcgaacccaagggagcagcagaccaagggatttttctcctttaaattcagtcaatttcagttgttcttgcaagagcttgtcgctgtccaagcattgaggtgagttatcttggtgttggtttagattttttttcaagtttaagttagtttttgtatgggttttgtgattttgaggctgtgatactaaattgagtttaaattatgtttattgatccgatttaggggttgcttgagtttagattaggtgttttaatggctgttatgtgtggagttggaaaaaaattcgattttaggatccaatttaggttcaaacatggtaaattgtgaaatttgaagaaatattgtgaaatggtgctttagatagattgtgttaatgatattataatgttctagaagatttcagcaggtttggtggagcttagattgggtttcggggtgaaaaaccagatttccccatggctacctagaaaagcagtcgaccagttttgtagactagttgtctagcagggggaaatctcaggttttctcctcgtgattttggtttggggaattttccaaagtttaatttagggcatttttaggggtatttgagttagtttgaaccattgggaaataaggtttgtctggttacgggaattagggtttattcttggaaatttgattaaggtatttatcgaattttgttgtcgtgacataggactaggatcgtcaagccttgtttacactcaggtctgcccgaacgcctgatttctggacttaggtaagaaaagtgttatgcatcatttatggttaaacaattttgattgttatagtgtcaattatgatcgatatctcgatatgtgtttgttgtggctccattatgatcgagggttggaaacagtgattaccgttatgagtaattactcttcaaactacagataggtttattacttattgttctctgtatcaggcaacaaaagtgacatatatagctcgtggataacgagttgtaagggtgctttatgaagcattgagtttgtgtgattataatgatgtgaaattgtataggcatattaatatgttacgtgttatgattgcgtacatcttgtcatagtgtgattacttggattttatattgatttttgatttagtcacttttcttgttgagtctctgtgactcgcgggtgcttaatagtacaagtaaaggtaagggcaaagttgagcaaccatgagtttaatgtctttgcagcaatgtacatatcagccgcgatgccatggctctagtggacaggatttcccttcttgaatgtattttgaagggtgaactccttttcgtaaagtcacttttggaaaagattgtaaatattttaaaaacaggaggtccccgtaaatattattagttatcttttataaaggtgtgtgtttgtttaactacaaatttttaactacccacacttttcgtataattaaaaaataataaaaaaattgtgcaaaccacatacgtggcctccctatggaacagggcgttataacatggtatcagagcagccaaggtttaaaaatcctaaagacttatagcaattatttaatgaaatgttaaattcttctcctttcgcccttgtgtgagagttagggggccgttagtagtgcgtacgacatactgcacccaaccctccctcacatgaacnnccccaattgtgaaggcccatttacattatttaaataattgtattaggctaattatactagtttaacnnnnnnnnnnnnnnnttagcaacataattaatttttaaataaatagaattaatttttcattggattatttcaaaattaatttagaaaaatacacttagtttaatgaaaagattctagatagtgatttcnnnnnnnnnnnnnatattttctaatatttaattatgtagaaaaatatgtttaagttaaaaattaatttgttaattaattttagaccaacttaaattagaatatttaaataaatttaattaaatagaaaattatatttaagcttgaattttttttaactttagatcaacttaaattagaataattatattctaattaatcatttcccacataaatttcgaaatacattttaaaagtagatattttgacattttttttattttaaaaaaaaatagattaagttaaaaattaattttagatcaacttcaatcaagtaattttttattattgatttattaaaattaatagactaaaatatattatattttaattagaaaattagtaattagtnnnnnaattatctagatagatattttttaggtagacttttggtatttttctagatatattttattaaatagaaaattaatatttaagttgattttattcaagacacttaaatatttgatatttttcttaagaaatttaattaaataggaaaatttaatttatgttgaaaattaatttatttaatnnnnnnnnnacataaattagaataattttttttttgtttttattttattttatttaaagtgatttcggaaatgtatttttatacattggatttcgaatttaattatatagttatagaaaattaaatgtgagttgaaaattaattttttaat

SEQ ID NO: 116644 - DNA, 708 bp, Cannabis sativa
caagttacggaccagggcccctacacctattgtctcttcttttgttgatactgctccatccacattgaacttaaactggtctaggggggtccaagtgatgattgtagtgacatcttgggcacgaacaggttgcatgccttgtgcttgcttatacgattggaggtaggctgtaggttcctgataagttatagaagtcgttcctgcaaatgtctaaacacaaaagagttcctactattctagattttccatagtatacagagaaacacttcaaaatcatcctttgctaattaggacttattattaattagtgcatcaaaaatattttttttccttttgaggctttaattagagatatgaatggcgtacctatcaaagcttttttgacacccttgcattcgacaaagcatgctaagaagtttcataatctagtttgcatcaagggcataaggtagtggggttaattttccaaaagtgcaagttttttgctataggaagagtattatggcaaagtttgtgggtaaagtgcttaattttggaaggagattaaggttctaaaggatctttcaccagccgacatcagagtcagggttggaaggtgctggtttcctaactctcttaattctcgtgctaagtggtagccagagttgacggtatagtgctgttgggttttgtgccctaaataaaaccctttacaatctgattagttat

SEQ ID NO: 116645 - DNA, 2420 bp, Cannabis sativa
agctctcatcttcaccctccataactcgaaatcgttctttcctgtaaacttttccaaattgaactttgcattaatttctcattgttgttccggatgttcttcacgcataaccacgctaagcttgcctctttaaaactcaagaacccgtccagctctgataccagtttgttaagaatgattgattcctatacaatcaacaacattgatccaagaacactacatgccatgattgaagagaaagtgcaaagaagagcattatatctcgtttattgaatataatagtaatgtatttacagtttggtgtttaaactgaattccagctaccaaaagttttcatgatgccctagttttcattcctccatcaacgaaaactattgaaaaacccgacccaagttcttgttttggacccccaaatattttacttgactataagagtagtattagacctcttcgtgttcaaccaatacaaactattgaaacacctgatctgagttcttgttttggacccctaattattaatatactcgatcataagagtagtattaagtctcttcgtgttcaaccaataaaaactatcgaaacacccgactcaacttcatgtgttggacctcttttttttcttacatgcaaaatatccgtatattattaattcattcatatatccattttatattgtgattgattttcagatgttgtattggtaataattgatcataaagccctacgttggagttatagaaaagcaaatttgagcaaattatatacgtacttaatttcatgggtcattgtatgcatggtcttagggttattctagacttattgtattacttttctcagtattttacaaatgattgatacatcatatttgcacagaaagtaaaagattagagcaaatgttcctaataatatttgcacagaaagatgtatagtactgaattaatgtgtcaattcgtgatcctttagtttaacattctcccttaagctgtgctgtggtgattgagcaaaacatgtttaatttacttttacatttcatgcttcaaatgatcatcaatttgttctggctgttttatttatatttttcaaaacttgctttactcttttttgtttttgatgtcggagttgaaacgttacaatacctgcaagatttccttccaatctttagcaaccctatttaagaaattaggatgagcatatatcacatatcaagagaatcgaaatggttttgtatctgtggtttgagaaggatacaccacaagcttcattaggcaatgatcaaacacacctttctgagaaagagtgactttattatgagcatatagataaaggtagaggcaatttggaaggaatttttaggcttaatccaagtatgaatatatactgacttaaggcttcatgataggttatagtttttaggtatattttatatgaaatattttagaaatgtgtttcagttgattatatttattttatgcagaattacgtttgttttctagttattttaggttaaaatggtaaaattcatatataatataaattgaaaattagaagaaacatgttaattaaatgagatgaatatgatgaatttatcatggaatttaaagttctaagatattatgggtaaaaattttaagttttggatgctcaacaagttatgtttgtgatcgaaaattaagtttgaagcttaaagctaatttttgactatgatgcattcatttttaggaaaatattgtgaataaaagttttagatcttttttttcagcttttcaaaatatcttgaaccgtcaaatttcgaaagagttatggctaatattattacgttgtattaggaagcttgctgcccaaaaaatgcctacctgcgcctcaacatagtccagactatgtcgcgatgcgcttctaaaaattcaacttttcaggatttcgtaaattggacacgggccacgacctccatgcctccatgcttagtataattgacctaattaaggtgtgggccactatcgcggacgccttggctgtgtgggcctgttgtgccaaggtgaacgttgagggtcgtcttcgggaggtagcccccattgtggttactactgatctagtttgctttcgtaataaaatcacttaattatcaaacaaaaaaaagaatagagatagtaaaacaatttgattaaacatgtacatctttcagtcacttgccctgtccaactagtgattaaacatgtcgatctttcagtcacttgccctgtttgtaatctacaacctgaaaccatcagccatgtcctcatctcttgcccgtttggaaaaagaaataatatcctctgttaatggcgtgcttagtacttctgcacaagtagctcttgatcactggaataaagctcaggataaaatttcgttgtcatcaatctgtctgaaaaacatcggtgatggcg

SEQ ID NO: 116646 - DNA, 4430 bp, Cannabis sativa
  modified_base (4312)..(4332): a, c, t, g, unknown or other
  modified_base (4381)..(4404): a, c, t, g, unknown or other
atccaatggatggaaccgatccaatccaatacatccattagatcggatcggatgactcaattcaattggattggatcggatgggtccaatgaacacctctagatattacacacattttagtatttctcacaaaaaaaaaacacaattattagtattcaaaaaaaaaaactaaaaaaaaaacactggatacttttataaatgtaaaaaaaaaaattacaaaaatacgaatttatattttttttatgtatgaaaataagaacaattatttttgctttgatgttatattatattatttaatacaacatgaaaataacgttatttctttaaaaaaaatatacataaaaacaattaaataaaaatttgtaaagaatataaaaaaattcataatatagatgaagttcaattcgtaaataattcattaattatttttataatgagaaatataaaaaagtatttatggtgtctagcatcatcgaacgtgttatatcgatattggtataattaaatatcaaattttatctaatttaataaaataatttttatgaaatatcattaatcatacgcaaggtaccacctataaatggtgcaatgctcttttataataatatacattattaatttttatacgtcaacaccacttggactaattgtgttaattttttttttttttttgagtgtagcgcagtgaacttattagggcttctctaacagttgatgctaatatgggtggtgtcagtaaaattgggcctatttattcttaaattattgacttttcaaagtaaaatactaatattgttgctcagcaagagcaccattcctatcattattttttattatttttttctctttcttcattctaattggctaattgaaatttttttaatatataaaataaaaaggtgagtactcatagttgcttgcattaaacttgcccttattgtattaattcatgacatcatagatgtccttagtgcccaaaaattgatgggtgcaccaaaataataacgaaagagattatctgttgggattatatgctttaaataaaacctattttaatataatcttatttattaattgtatatgtattttttaccaaaatatgtggcatgtaaatcaagcgccacatggtggagagtccaccatcacatgggagtattaagtattgctttatagattcctgaaccattttcttgagataggagacgtatctgtgaaggcttaaataaatttaaaagaataactaataacaccgttaaaataggccttcgggaggtagtatcctccttgatcatatgtcattcgggagccatccacacgaataacatgggttctaaagcaaactattgtagatgactagttcggtgcatgattaccctcattagaagtcatactgttctgacagtccatttatcctatggagatgaagtgacaactaatcttgtgttgtcccatcagtcgtatagaagacaaatattgtctcaccaaactcctactatggaagctagatagcacctagagaaaaaagggagatgtaccccttttcctacaagactcattttcctctataaatactcatagattgtaagtgtaaacgggacttttagattcacgaacacagtgaactcaatatattgtaaacagaatatactcttaactagagaacaatctcaccccaaataaaagtgactcgtggactatagttaattaacactggaaccacataaaaatatcttcacatacttacaattaatttttctaatactttattaagaaattgttaaaaaatttagtcaatattttggtacttttattgagagttgtagaaggctttcgtcaaaagaaaaacttgtattgaaatggtgttaacgagaaataaccaacgacctcctcaaccgcctgatggcccagcgcaccttgaggaagaagtagcctcttaagtagagggttaagaaggcgatactaatgatcctatatactcaggagatgaaaatgaatacaaagatcgtgagaagacgaatatgttgagctcttgtcattgaggtgacaagctactaagcacgatacagagttagcataaaagaaagaaattaataggagaatacaagaggccttggccgccatgaagaaaactatggcaaaggcaggtctcgatgtagatcgcgctctattccacccgcattcaataatgttggagaaggcccatcacaaccccaagaaaaccaaaaatggaaagataaagtacatagttctattagatacccctatgaagatactctgaaggataacccaaccttatgtcacagacatcattttgaaccaaaccttgaaaaacagaagaaatagaagactgaccagcaacaacaatagtagaggaagactccatctaaaaaaataacttatgtcaaaaataataaaacaataaataaaagataaaaatgaaaaaacaaaacagaaagaactttaaaaacaatggacaaaaaaataccttctcaacagtttgaacacaagccatagaagcaccaacatcaataaaatcatcattatcattagaaaatgaatcctaattaataataataaaaaatcacaataaaataaaaaaaaaatcgaagcaggacaagaaaaacaggaaaacaataagaaaataacccaaaataaatctctttcaaatcaacaaaaattcttgaagcatcaaccaatttatcatcaatttttgtgcactctagtgcagtagatgcatctactacatcttcattaagctttgtaccaccatcaacaacaacatgcacctcatcactttttaccttttcaacaacggacacacactgtccaccatcatctccacccccaccaccatcatcagcatttgggccaccaccaccagtgctgtcattgaaattatcaccaacatcaccatcacctttaacataatcatctccgagctcattgtcttcctcaaaattaatttcttcatcatcctctctttcaccatcaccaacaacatcaccatcattttctgaggagcgaagcacatcctctatttggcttgaccagaggctataagtagaacgcgaagactagaaaaaaaaaaggaaatttgaataaaaaaaaataatacaaaaataacaaaacaactacattaaaaaggaaacaaaaaataatacctcaataagagtatccatctttctgttcaaatcagcaaaacataataattcgctgctggctaagaacaagagatacatctttttttaaatcctcgtactcaaaacgagtaacatgctcatgagccttagacgatgatggaccaacttgatcaccttccacaacagcattgggcacagatttagagctgaattcttgattacctttacctttatccttaataatggaaggagtagtgtcacctaaaaataatcaaccaaattcaaactggttctctcaacagaagttggaaaaatattttcatgttgtaactgaaatagaataagcacaaaaaaatgaataaaattgaaataaaaatacaattcataaaaaattgaaaaaaaataaccctaaaacaactaaaaaacaaaagaaaacaacacacatatacctgctttaaaggccaattgaagatgatgcttttcacattgtccatttttagctgagaaactttaagcttctccattttaggccagttaagaagcctagggatgccaatgtttgaatacaaagtaatttttccaatgacatatggacatcactcgaaaaaaccaaacttgcattgcataaggaaaacctaacaacctataaaaactgccatccttatccttcttcttcacagtcctaatacagacatcaatcttgcccttaagagattcaatggttatctcaaaacactcattccccccacccatactcattataacgaccactatccacaatatcaagttcctcaatagagacaacctttttaggaggacttccgagcaagtaacactaaacaaaatacaaaacagccaacttgtctgcaagatcatcattatccctaaggttgttagcagtaaaggcaacttgaattgaattctgagtaatttttttattatcctttaaacagtgttcaactagcatattcttatcctgtttgaactgaaagatatcagattcaatgtggcaatctagacctgtcactaaggcaaactcctttacaataaatctaagaaacttcccagcaacagatacccagaattccatctcattaggttgttgaacttttctcaacaacagaccatgcaatacttacaaatgaataatgtgttgggttttgtaccctaannnnnnnnnnnnnnnnnnnnntcagatttacttattaataaagagcataaataacattttatgttgcatnnnnnnnnnnnnnnnnnnnnnnnntatatatataatgtatgaattcgatt

SEQ ID NO: 116647 - DNA, 2076 bp, Cannabis sativa
atgtgagattcccgcagcccaaagcctgaaggtacctgttcatattttttttcttcttcttttctttttgtttttggttttctctctctctctctctctctttgtagggtcatggatctggtcgggtttggatgtgggggacaatttgggattgagaaaatcatggcaatcagaggcgatggggtttgcttaattagatttaagtattcccaaaaaaatgagaaaaaattagaacgaagatgagatccatggtggtttcgccactaaatctgacggaagaagaagaggccaactgtagatgaatactgttgctgtggatggatcatggggggtggggtgaggaacagggagtggttgcgtgaagaagacgaagaagaaaagaaagaaaaagaaaaaaaaagaaaaagaaaaagaaatcatttttaaattatttatttatttatttagaccaataatatttcgacacgctacaatttttaaaaaataaacggctcaattaaaattaggactaacagacaaataaaaagtatgaccttgaggactattgtcgctatttctgaaagttggggactaatatgcatcaaagtgacctttttgggaacatctaccgcaaattttcctaatcaaaacttcaaataatcttcaaaatctaaatatcacaaaaaggagggatatctcatctctccaaataacttcttagttcatccaaagacgattcttttgccacaatggttgtccaatatagaggcaccatttttttgagggtggatctagactagaggcacgtttaatgctacgaaacattggcggtaatacttccaagctacatatttaattatacttaaccccacaaacttaatttttggtggtaaaactctttaaattcctattttgttttgattttgtacttttccatcgaaaagattctgttaagtgctaacttgaattgccaagtgtacacgtagcaaattttgagtggtccacacaatattaaataagagaattattccatatacaatttttttttttttttttttaaatttattgttagggttgttctgctggtttccatgtaggttgctatatgatttttagttgcgatttgggttatcctgttagttgcaatgggggtttttgtggattttcgtaaaaatacaaaaaaaattattttgaaatgtaaaaataaaaaaaatcctattaattattaaaatattataaaaaacattttaaagattataaattatttaagattaaaaaaaagaataattagtaattttgcctcctaaaatatacagattgttaaaaattctccttgaacttttacatttatagaaatttagtccttctgtcaggttccgtctcattattctgtttaaatgctgatatgtctttataaattagcaattttttttttttatttatttatttatttttttttttttataaattagcaactttgtctcttaaacattaataattatcaaatcgtaccccctcaaaataaaaatgagaaatattcaacattttttttagtaaatcttaaaaaattaattaagatcttaaaaaaaatcattttgaatgattaaaaaaattaaaaaacaaatttaaaaaaaaattaaaattttaaaactaattaagcgatttaaaaaatttatttagatattaaaaaatatattaaaaatataattttagtaaaaactaaattttatgagaacaaagttagtctattttatttttctcaaaaaatgtagatttgtttaagtaaacataacatttttaatgttcaatttctattttttttttcaaaataattttatatttttattgaattgttaattatttttctttatttgttgtaatatgagtttataaatataaatacgtttgatttttttttttttcgcggaatggagtagaggagttggtgggtggtgcgacctggacatggggcttcgacttaagatggacggagatctctcggggcgttctgtggtggattgggcatcaccaactgaaattccctattttaatattcccaatttaattatttaattaagtgattaattaaatgcggaa

SEQ ID NO: 116648 - DNA, 1863 bp, Cannabis sativa
gactttatatgaactattttaaacgcttcaacgctgaagtaacaaaagttaagaaggtccttgagtctttgttggtttgcatgttgattacatgagttttgcaacaaactcatttttggaaaaaactgcaagcacgatgtcctaagatgttggtccagttttttaatatggctgagccccataaggaaattgagaacttgctggtagaacttgagaaaaccaaagaaaaaggatgatccccagttctgaggacacgattaaggagtctgtgacaaaaaagttcaaggggcatagcccaaggagacacagtccagtaaggtgtcgtagcccaaaactagccaagtctctagcaagaaagaaaagtctcccaaagcaaaaaagaggatctcaatttataaattacactgaattgaatatgttccccacgatcatatatatgctattgaggaacataaataagtcttcaaaagatggctagatctgaacacccccagcttattggtagtatcggcacatgtgatccctctagtattttcaatttatatattccatttcccaccttgtgttgaattttgtagggcccttcccagttgggtcctataacccctacccccagctcttgagaggctgggaacactcttcttaagacgagatctctaacttcgaatgtcttgttcttaacttaagaattaaagtgcctgacaatcatgccgtaatacatctttatttggacctgtgattgctcctagagctcatagattaaatctaaagattcttgaagtagagtgtggttcttggttaggtcgtaggtttctcgtctgtgtgaaggaacagtattttcaactgggatgactgcctcgcatccataagccatcgagtaaggtgtgtgccctattgaagttctttctctgatatgcccagagaactctaggaagctcttttgggcaatgagccttgcaaacttgcagtttcttcttcaacctggtctttaagatcttgtttacaacctctacttatccatttgcttgcatttggccacaactgagaagattttaacaatttcgtgttgaacacaaaagtctgtgaagtgcacaatgtcaaattgcttcctgttgtctaatacaatcttatgcggaaggctgaaacaacacaatatattttttatgataaagtccaaggcctttttggaagttactatattcatgggttctgcttccacccacttggtgaagtaatccacatcaactatggcatatttgactcttccatttccagtttatagagatcccactaagtccattccccatacagcaaaaggccaaagactgttcatctgagtgatttttgttggtggagctcgcagaaccttagcatagcattgtcattgctcacatttctggacgtactcgatgcaatctttcttcaacgttcgctagtgaagaattttcttcaaaaggctcgacccgaaggtatggtctccatagaaaccttcatgaacttcatggatgacaatgcttatttcgtgaattttttagactctgcactcagtagtcttttgcttattatgtaatacatcggtagttgggctttactttcttctcgcactagtgcgacgcttatagcctgatctgacatgagcaaatataggtataatagttctccctcaactggcttggatagaattggggctttagtcaaatgttttttcagcttttggaatgcctcttcgcactgctctgtccattcaaatttcttgttttcgtataactgttgtgatattttgcacacggaagtgtacgtatcgttaacaagtagtaaactcaccacgagtgaggtcgatcccacaaggattgtagttaagta

SEQ ID NO: 116649 - DNA, 1851 bp, Cannabis sativa
attcccaccttttcttcgaacaatttccatgagtcttctgacgacaagcactttacttcaacatttttatcagcgtccatttcgcagcaaacttccatggaacgagttgtgaagacaagcttggatccatttacttttagattatttggcaaaggaatccctacgctttcaagatcaattctctcccatatatcatccaataacataacaaacttcttcttattcaagactttgaaaatgtctaaagctttctgttgacagcttttgttcttccatgtactctcaccaaaatacccaattttttctccaatctcattttgtatcttctcaagggtgtgatctttagacaccacaacccatataacataataattattttgagaactaaggaaattgttgttgattttcttcaaaagagtagttttccccacccctcccattccatacaatcccataatactcacactttcatcattgaattctgtccaaagatggtcaaaaactgattccaaacccacacttggctccactggcacttcaaccacaggaggtattggttccctttcagccaccacttcaaaagccttttcttggctaagcaaatcagcaatttcttctaacttcttacacacttttttcccaaacacatagctagtcttgtagtttgttgaacaataaccccaaaggctaagtctattgatttcttcagtttttctttgcagtagttctccattgactttattttcgatggtctcgacccttgaaagccatgtttgcacctcatccagccgtgtcaattgttgttcctctgcaagtttgactctcctaagtatggtatttttcttgtctgttaaatcttgaagaccatctgttaaagacttaagattatcttcaagcttatggatataacttgcttgtttagcactgcttttatagcaatgagtgacagcatcattaactgaattacatggcagagagaatgtgatacccattgctactttgaaaactcaggaagaatgaagagaaaggtcacttgcaatggttggccttttggtcttccacaaaaaatatatatataacaaaaataatttatgataaacaatgttgtgtgtgatgagtttcaacttgtatttaataaaaatttctatcatacctaacttaagacaagttgtattttaaaaaaaagttttatgtaccaattcaaaggaaaagacaaggaattctgagggtatgactatgatattatgttattgtatttaataatttgtacgtgtgttttttttgaatgctattccattccatgtatgaacatgcattaatatttaaaacttatactgtaaaaggatgtatgtaagttgtaaccaaaaactagtcttcatttcttcaataaataaataaataaaaataaagaagaagaagaagaagaaaaaaaaaattaatcctcgttcgctaaaatccttttctcaatgaagaaaattgaaacactctcaaataaatgagtgaaactcaggaaaaaaaaaatagaagaattgagggtgaaatctctattcttaatagttagttatacttaaccacctaataaaaaggttatgtaaaatgatcttaaatttaaaaattaagttaataaatgtctttttttaaaataaaaattaataaaatcattaaatatagtaaattagctaataaaaattataaaaatacatttattacatattaattttttaagaaaattatataataattaaaaggcattttacaaaaatactggatttggggtaatacttttcaattttactgccacacggcagaattaacatttatactgtcctccccttttttttttcttttata

SEQ ID NO: 116650 - DNA, 4262 bp, Cannabis sativa
  modified_base (32)..(61): a, c, t, g, unknown or other
tttagaaagttcttatttaggatgttaataannnnnnnnnnnnnnnnnnnnnnnnnnnnnntaaaataatttccaacactttttgttgttctggtagatcttctgggaacagtagtggtagtgtcactgctggtttgtgtagatgtgtctgcagaagaatgtgtagcaggtccaagattgttgtcttttgcattagaggggacatcgttgacagctgtagtagtgccctgaatatttgaaacaattgtggggtaatcacttataggagtgttagtaacattatgagaaggtagaacaactttaataaaaggatcaatgttagaagatttctcatttagtttatgaaaaggaaaaatattttcatgaaaaatgacatttcgagagatgaaaatttgcttatttttaatgtcatacaaacgatatcctttgacaccttgaggatatcccaagagaacataagttctagctcttggatcaaattttgttctattgacgggaagagtagaagcaaacataaggcatccaaaaactcttaagtgagtgtagttaggttcctttttgtacaaaagttcatagggagctttatttttcaaattcggtgtaggggtgggattaatgagataagcagcagtcataatgcttttggcccaaaatttaattggcatatgagcctgaaaacatagagcacgggcaacattaaggaggtgctggtgctttcttttagccacgacattttgctcaggagtatcaacacaagtaaaatcatgtaatatgccatgtttattgaaaagttccttgaaagcaagttcaggagcattatcggacctgaaacatttgaatatacagttgaattgagtttaaacataagatatgaactgaggtataacaaacaaagcatcagatttttgttttaaaagatagatccaagtgaatcttgagtgatcatcaacaagagtaagtaagtatctataacccaagtgagattgaacatggtaaaggccccaaatgtcacaatgaatcaaatcaaaaatcttacaagcaaaattgttattgtggggaaaaggtaattttctttgcttggctaagggacatatgtaacaaggggagttcttatgtatggcagcagtattacaattcaaggttttgtttaacaaattcaagtgtttttttgagagatgtcctaatcttgaatgacaaatctcaacagcaacattgaggatgggaaagtcagtaggtgtagaatcaaggatgtaaagaccattcttggtttcacctctcccaatcaccctcttgttgttcgtatagaaaattgatcagcagtaaaaagcacagataaagatttaggattaaccaaacaacttactgaaacgatattgtatttaaaatctggaacgtacaacacatcttctagcacaagatcattagttatactaacaataccactttgatgtgtcataatatgattgttgttgggcaagattaatctggtaggattagtattacaaatgaattgaaagagattgatatcatgacaaatatgcctagtagctcctgtgtcaataatccaggagcctttcatgggaaaattagacatagatgagagcacgatacctgaactacctgtagtgtttccagtgtccacatttgtcataccaggttgttgtgttgcaagcaagttcagcagctgtttatattgtatagcagtgagttgaggtaaaatagcttggttatctccagttgctttattgctgtcattattggtttgaatttgatttgctgtagcatccttggagttgttgtttttgttgtagccaggtggataactatgaattttataacatttctcaatggtgtgactgagtatattgcaatgggtacaaaaaggtctgtttttcttgggaggataagacttgtttccagcagcattatcctttttgatgctgctgttgtttttgtctccttgaaaggcaaaggccatactcgggtttggttctgcagcaatgttgttgttacttttctggttttcttcttgggaaacaagatgaaataccctgttaacctctggaagaggatccatcagcaagatactggtgcgaacttgggaaaaagaatctgaaagacccatgagaaaagacatgatgtactccatgtgatggtgttcttgaaatttcttgacaccaccacaggtacaaccattacaaatgcaagtaggtctgtaattcgagagttgttcccatatggtcttaagcttggtaaaatacatgctggtagtttgattatcctgcctcagattcatcaaactcttcctcaagttgtatatgtgaggaccatttctttgttgaaaacaaattttcagatcaatccatatggcagcaacggattcatcatacagtatgctagaagaaatttctttagaaatagagttaaaaatccaagaaattacaatattgttattcataagccatgcattatacataacaacatcattagccataggtttagggatggtaccttccaagaatcctagtttattcttaacagaaatggctaattgcatagccctactccaagacatgtaattgtcttgtccagtgagcaattgagaaactaggatgttacctggattatctccatggtgaaggtagtagggatcggatggatcttcaaggggattcctttgttgaacaatctcgtgctggttttgaattattgggtttccagaatttccaatcacagcttcagctacatcgcttccgtcttctggtgtactcgacattgaagaaggaaggggagaacagagaaaagaagaacaccgggactgaaccagtcacacaaaaaaaaagccggagaagtaacacggcaatggcaacggaagagaaaggggatcaggggaaagctcgtctttcccgctctgataccatcttacgaaaaggaaaaagactttattgaatgaataatcgaatcttacagaaaagaaggaaattaaaatataaaggctgagggtttatatacaagaggtagagagattagttagtgaaataagaaaagacaaagcagagcagctaaaacaatagctaattcttgttaatatgtcagaatagaggtggacttactgaatttgttgtagtttgtgaaaatttttgagagtggcttggctgcctgaattcatattgattaacagtctttcttcttggtaaaaacaattagatttatagaatgacatattagtagaggtagctcactatatatctaattaattagattgtactaatttttggagatgtaagagacatattttttttcgaaaggaatgtaggagacaggtaaaaataatttattatatctctaactggtttgcactaatttaattacgatgtaagtttgctatgttgttgtgtgttttgctatgttgttgtgtgtctttctgtagtattttctctatattaggaacagaagtcacatgtcatttgctcttgttataaataaatgtatagatttgtataatttcttaagaaaaaattattttttatataatatataatagaaataaattatacatttgtggatgctcctttttggagtggcatcttctacctcaaaagcacgaagtttaatctttcattaatgtttatacgaagtcatacatcaatgttgcatgaatataattgaaactgttactttatttcttttttataaagcatcacaataccatatttcatattatactactaaattaaaacacaaatttatatatataaaaagtaaaaaatattagctaacaacgcgcgagacgcggctacctttcctagtattaactattagaatctttttcactcatagtccctccaagttgtaggttggtaaattctaaaaaacccaagcaaaaatctttaggcttgaaataaaaaataataataagatcaagttacattgtacaaatatcctcgagaatagccaacttcccaaatatgcaggtataagttctcccatgctctccaactattaagctcataattccataccatttgatgacatccaaattttattaggacttatagaaaatttggaagaaaaaaaaacttaagcgagaagaagaataaaaagttttgttaccatcttcagtgatgagacccaaaaaattgcaccttatatatagatagtatgtacgttcaacttaaaaaattaaaaattgaaaataaatatagaaaaataaggaaataaatcaatacgggttttttatttttacattttaaagcaatttt

SEQ ID NO: 116651 - DNA, 1643 bp, Cannabis sativa
agaatattacgtaattgattctgtccagattcagtgaatataaaatattcatttatcagaatcaataatattattttatttccttaattagaaatattctaatagttattaccctggttcggaaaatccaagcactagttggctgagatttgttttcagtgcagacgaagtttgtaagtcgctgtgttctttactacttactctttaatccgattcttaaataataaagttaaaattaatcaatttaatcttgagcaactcggtaatttgaatcatgaattttagataagttgttctttcatatacaatgtatatgtattatattttgtttgctagctagtgcgctttacctagaggacaagtactacattatattagactaagggataacatatttgatcattatttctccacaaaatatacagagaattaatttaataaatatttatttatatagatgtttatagaaaaattgtagagcactatatttgtttatatcgatagagacatttaaaaaaattaaagtaatttttagtatcgaaaataataaattagaaatttaaaattgtcaaaaataatatttaaatattaaattatatatataattattttattttatacacctaaaaatgtgaaattaattaactatttttaaactctattttttcatagtaaattctgcataatttgaaatgaaaaaaaaaaatagataactaatatatagatatgtatgaaaattatataccaaaaataaaagtgctactaccatagataaaaatgacacctcataatactatataattgccaactatgcaatataccatgatgaagataagccagttgactacttgtcaaaactatacaatacaatgtgtaattaaattatatataatattgtcccttttaatcttatccactacttcaagttggcaactgaaatgaagatatttatatttattttattttggtgaaatggaaatcatgaacataaatatactaattgctatataagttatcattcaacctctaatggttttgtaatgaacaagtgggccttaatatctaaatacatttaaattaaattattatttctactttgaaaaaaggtatgcatggcatgcacttagtactatatgttttaaggataattagtgataatttttttttatattttatttttgagaaatgttaaagggtaagtgattattgattagcacattcttaagtgcatgtgaatatcattattgattcaattaagtattgagttcatatagtttaatataataatttatatgaagtattactagccaatcgcaagacaacacatctagaaagtactagacaccacgtgcttaataacaatgctctttatttttatacactaattcttttattttttttcagcaataccccattaattttatatttttttttataaatttgaagcattaattaaattttattataaaatatgctaaattggattatcagttgttactatttacactcgtatacatgtaacaataaaacttcataatcaataaaaataaaaggctaattaggatttttttttctcccgaactttaacatgtactaaatcatgcccttgaactttttttgccattaaaaattttccctgaact

SEQ ID NO: 116652 - DNA, 978 bp, Cannabis sativa
gttgttgttgttgtaataagacaaagttgtatgtggtttcttttcttataaattaatcatttttgtttttttttttttcaaataaaaggaaaactgttttttgtgagtgtgcaaccatttttccaacaacttatatacttccttccaattaataatgataataataataatattaacaacttctgtaatcattataagtactataaaattagattttatcatcgatttttttctggtctattttcatttaaaaaaatctcactacccaaaagtattaaggtcaaaacataagttttgaaacaccaaagacatacaagaacttatgtcttcaattattataaaacaatcgaatacataggtggtccatgtctttccattatttcataatatgcataagtatttattttaattgaaaaaaaaaaaaaagatatttataccctaaatcaaaggcactttttaatagccgtcaacccagcctaaactcacaaaactctaaaattaaaattttttaattaccattgtttaacactactaaattttcaaaccacaatagttatatccaaaccctatatcacacacactcaaaaaaaaaaaaaaacaataaaagctaaaataaaacatatattaaaattatgtatacctcaagctattgaagactcaaaaaatatagttccaaaaaataccgccaccgaaaaggtcttcactataaacttttactaattaaaaatggcacgtgcatgcatatataggaggtgatttcaattactagtgatagaataaaaaccacacccattgacttgaccaaacaagaaagaaaatgatttttctcatgcatgcagataaaataatggcaaacaaattagacaattaataattacaatgagacaaagaaaaggtagtagtgtggtgtattaattcttgtaactatatattaattagtctattaatatcaactagtttttttaattgaataaatat

SEQ ID NO: 116653 - DNA, 3941 bp, Cannabis sativa
gagagagagagagagagagcaataaagtattaaactaaagattagatgagatgaaaatattttaatttgatgtagatgtttttgtttctacttttttcttcttcaaaatagtgagactgagagagggaggggaaagttaacaaatagagatgatgagatagatttattatttagggtttttttttgttttttacttttaactaataaaataataaataaaaaatattagaatatatattataaatgggttacatacagttctgggttcaacccgacctatgtattcataaaagtactaacatgtgaactaggggtgagcaaaaaaatctaagaaacttaccaaaccaagtacactgaccgtccaaacaccaaaaaaaccgccttcggttaaaattgcctttgcacggccggttttagtgtcaatggcaaaccgaccaattaaaccgagaaccgaccgaatatatatattatacactatatatataatataattatttttgtacatatttaatatacaattttattaaactaattttacttctaatttttttatttgaagtctcaattattcattgctttattttattataatttaatgtattcacgtattatatacacagattcataaaataatacgagtttttaatataactcattacaaattaatagcacaaataatttgagcaaataaaaaaaaaaatattttacattatttatttaactaaaaaagttttgttcttaaattatatgatatttgatacagtactttaatttttttaatttctatataattatagcaaatttaagaacttatttttttgaaaataaaagctcggtttggtcagtttaaaccgaccacaccgtggattaaaacggtcggtttttttacatttatataatggtcggccggttttcagattataactattaaaatcgaaaaccgaattcggattttttgtgtgtaaaaaaccgaccaaaccgaccattgctcacccctaatgtgaacccacccgtatgtataacaggaccaacccgacctacctgtaatgatcgagtttttttaatagtcagtcgtacggtcgtgttgaggccaaacctagtctaaatttttagccctagtcacatttccacacgcatctccattcacaattgaagaataagtgcaagaaaagttacatttgaaaataacttgaatctatctctcatgaaacccagctttctcatcatatcgcacaagaaagaccactctactttatcataggccttagccatcaagtttaatgacaagactcctaacacttcttctaggccagtgtttaagagaattcatacattcaaaatcaatatgagcaatgtctatgatgagacgaccaggaagaaacacacttttgtaatgtcttttttccagcgattagtcaaggcttttgtaataattttgtagaagatattacaaagactaataggtctaaactcattaggccttgtggaattatccactttaggaatcaagaaaataaaattttaattaacctccttcaaatactcattcccattaaccacataaagacaagctaccaccacatcatcactaacaacatctcagtatttttggtaaaattcactcgtcatcccatcaggcatcaggattttattgggatgcatctgaaagaggactcttctaatatcctcaaccacaaaaggtcgaataagagagtcattcataaaaggtgtcatccttgtttgaacataatttagaacttttcaaaaatcatcatggacaatccaaattgaacaaagaagaaaaataattatgaagcataaaactcaccgcatctatagaagatatcatcacaccataatcatcttcaatccccgtaatgtgatttttctttttacgagatgaagcacacttatgaaagtaagctgaattatggtcaccaacctcgagccatttgttttttatcttggcgcccgaaaatgctctttctaatagagggtatcaacttgagactccaccttcttatacatgagccaagtttcttcgaaaaaagaaaaatcaagatgggcaagctcctttttcttagcttgaatattacgacaatgtcatctaaaacagatcttattccaactagacaaagcagacacatcactcttaaaattattcaccacagtagaaactaaagactctccattattaattcaatgatccttcacaagatccccacaatctacctcaaaagcctaggtggctttaaaatggaaatgaggttttctaaccagattgctatcacctcctatcgacagtgtggtaatgattttagtcaataaaggcctatggtccaaaatataatagctcatatgatgaacaaccgtgtgtgggaaattagaagtgtaatccaagttatataacattctatcaagtctctcctataaaatggaggaaccgtgggcattgcaccacgtgaaaggaggcccctcaaaaccaaaatggaaaaggccatatgaaaaaaatgcctcatgaaaactatcataagagccctaccacaagaaacaccaacttgttctctttattttctagagtttcattgaggtctcctccacacgaccaaggacccgtaacttccagcccagtgtgagttaaaagattccaaaacatgcctcgttgactagaattttgctccccatataagcaagtaaatctccactttggcccatatgccaaagacacaaacacatcaatatgatgccaagaatagttaataagattcacgataacatttgacatctagaaaagacataacccattacttctaccttctctctcgataataacttttccaacaaaaataacttttaccctcaaccattccaattgatgtcgtaaactaatggtttcagacaaaaatataagatctattttaaggtccaacacaagaatgtttaacgattgagaaaggaagaacatgtccatgagagtcttttgtgcatggctccatgcgctccacgtgagaaatactaggtagaattttattagtcaaagagaaattagtagcccaattcacatcacttttaggcctatacttattaagcctactaaaattcacagtcaattcattgagtaactgttgaaattttccattataagcctcatccaaaatattattatgctctaaaaaaattcctgattttggtaccaaatgaatggtaaagtccccatgcctaatcacaagagtgataggtgaaatgggttccacccaaaattgacattttactgtctcttactccatacaaggctcatgtaatatcagagaatcacaaattttcataatagtaggagacacgatcacatcttccttcaaaaatggcatccgtgattatagacttttccttactagaatttcttaaaagatcatcaccgaaaatttgtccaaacatttgaaaaatagggtcaactgccacattcgtaccagccacaaacaaagccattattctcaccaccacctccacctttacctctacttgatctgttagtaacgcctagaggagaccttttagaggcagcaaagaactttatcgacacatgagcttcaatctaatcaccataccggtaacgtggctcaccattcttcatgatcacacatactgggcactaacataatagatgaaattttatgttttataattaccaattaattaattaattgtagaataataatagtggtactaaaaaaattattttgtagctactgcatacaattatgtaactataaaatagaacagaaaacaaacagtacaaaaaagataaaaatatacaagattttcatatgtggtatcaacaatccttgcagattgttactagtctaaggggcaacgccgagagatggattcattagatagatctcaaaaatacaaagtaattgacttatgcataaatagactcc

SEQ ID NO: 116654 - DNA, 3256 bp, Cannabis sativa
cacttacattattcaggcatttaattttgaggataagtgtaagtgatgtggattgatttccttgagtagcttccccgtgtgtaagaaggattgtatagcatcgcacacctcatccccaatgtgttcccagttatcctgaaaaaaaaagagctgttgtatctgtcaggtcccggggctttgattttggggatgctaaacacgacttgcttgattttcactttagaaaattctgccaataaaccttgtgcttgttggttattgattaaaggcccttgattttggaagttttattatgggatcatgagaattaggttggattaaactaatatttattatgtatgttggattattaagttttaaattatatttttttaatatattattctttttaatataactagccatgctatatgagtttctcatattacaaacatattgaatccaaccgtagctaattccaatctcacatttctagaatcagcaatgaatgacggataaagcacgtcaaactgcttccaattttcaccatctacaggatgcctaagcaccccttcttgtagtcttttaaagtaatgttttcacatgtcctctgctaaatgcctagaactatagagccttctcaatctcagagtgactgaaaagtaccacaagactttatgtggcacatttttttctttggcactattttttttagattccccacaaataggacatgatttaaacttttcattctctttccaaaaaattgtacaattatgtttacatacatcaatagagtcataacctaacccaagattacccaatttcatcgttgcctcttaatgtaacttgggtagttttatccaaacaactcaatcaatatggtgagtaacatgccaaatgaatgattactccacctagcaattaagcacttgcatcaacttcaccaaagtattaagggtcaatttcaagtatcgtgggtacaacgctgtcgacatctccttaaacaaatcattgtacttatcaattggagtactatcattagtcgataggtcattgaaagattccattattctctcaatatatctggcaacacatttgtcatctcgtcttcgtcgttgtcttcaactgctattattgaaagtctccccatgataatatcatacaatattgttgaatgccatttatgaacaaatgcattctaatagcttttggtgtttggagtctgtcattaagccatttggtgtaagggcactttttccaacaggattaaggtggagccctaaatatcatttctgtagtagtgaactcatccataccttttctaaattccactaactgtttagtcatctagtttctaaagtccaatatatgctcctctatataacaaattatattcaaaattaaagcatacaaaatgtcttatacaatttttgatgttttaggacaaattataaactacttaactaatattttctattaatattatcaatttgttttaaattttttgacttaactattattttctcaaattaatttatatttcttattgtttatattattgcctttttaactaattatttattattctacttaaatattagtttacaattttttttcaattcaaatattttcaaattgtgatacatagtatagttacaaatgtgttgtaccttttaatttcctcttttatgcagtagcttttgaactcatctgaataaaattcaagaacattatctattcttaacactttgatgcatcaccctatttgtttttctatcatggttctccaaatgacaaagatttgaaaggctagattcttatttgttgattagcagaaacacccaaacttttcttcagtaatcatctatatatgcttaagaaatagttttctcgtcccagtgtttgaatcttggagggaccccataaatcagaatggatatatcccagtctctctgtagttgtatgcaactttttcactttgtaactttttcccaacacacaggattcacaaaattctaatgtgtccttgagaccacctttgaatactccttgtttatcaagttctgttagacctctttcactaacatgtcctaacctaaggtgccacattttaatgctaaattctagtgatgaatcttgtttattactggtgcagcacaaccagtaacagtgttaccatcaagataatatatgccatttctaagtttttccttgatgataacaagtgaacctctagcgactttaagagttccaccatatatcttgatagtataactatttttatcaaatgcactaattgaaagcaagtttcttttgagttcaggtacataccttacttgctgcaagattctgatttcaccatcatgcattctcatctgaacagatccaatacccttcaattgtgcatgatttttcgttccctagtaagacacttccaccttgctcttttaatattgtactgaagaatttcttatttggtgtcatgtgaaaggatcaaccagaatccaagatccattattcaccagagttcgtgcttgaggcaacaagaatatctgctgattcatatccatcagcagccaagtcagcttctccccttgacttgtttttcatgttttgatctcttttcaacttggctttgagggcaagacagtcatctctaaaatacctttctttcttgcagtagtagcattgtttccctgttgagtttcttgaaccagaacttgctttgtatccacaattttcatgatgattcttgctgcccttgcaatctcttttcatgcttctacctcttgtgaacagaccttcaccacttgattcgatcttatcatctctctttctttgaatctcctttgaacttaatgatgccttgacttctgtcatggtgagtgaatccttcccatacaaaatagtgccaacaaaatgttcgtaggcttttggtagagaacttaacagaatgatagcttgatcttcatcatcgattttgacaccaatgttgcataggtctaggataatcttgttgtagtcattaagatgtcttctcaacttcttggactcatccattctcaatgtgtaaagtttcttcttgaggtataatttttcggccagagactttttcaagtaaatctcagagagcttgttccataaccccaatgctttctcctaacttgaagcttctcttagtacttcatctcccaaactcaacaagatagcattgtttgctttggtttcaatttcattcttctttttcttgtcatcaatggctgctagagcttct

SEQ ID NO: 116655 - DNA, 1094 bp, Cannabis sativa
tgctagaagcttcattcaagtttggagcacctgagcacctagcgcccaggtcgacctagagttgtccctaacgccccagttcacatttattttcatcatggggcacttccaaccctaattctaaatatgttttttgggaacttttttcgtctacattgaacatgatgatacaagtgcttttgggaaacacttggagccatttggtgtctaagaagctcactgagtgcccaggttgacattttctcaacctgggccatttctaaggatttttccaaagaagtgtcctggatgtttctccatttcaatcaacaacaaagatacaagtgttcttcgggaggaaacaagagcatttaggggccaaaacacctaaccagcgccctagttgagattgaaccaactgtgaattgttttgctgctcagacacaaattctgttctggatatgctacttatcttggtcctgaatggagaagaagccctcatttacaaatttgaatatggtggaagcaccaaaatgatacctagggagcccagcaataggcacttattgtctaggctgacacctggcctggtgcgttgggttctcttgatcatattctagttttgtggaaagtcaaattcacacttttatatttcaccttttctacgaagtgacatctcgaagatttatcctcaaattgggtcgtttcgaaacacctgattttgcgaaagataaaaacatttaagaactagtgaacaacttcatcagaactaagaaattagctaaacgacgaaatcatatcacttagactacgaaaaatattactttggcacattttcccatgtaaccagcacccagggggacttcacgaaccttttcaatcgcatggttgtgaacctggttgttgggtgatgattaaccttttgttaaatagccatagcttgctggatactatattaattgatccgattcaaagtgcattggagagcacatttcaatatctatttatgcatgcctcacactcataactcaaatgtgaatttttgaagtcgaaaaatcacctccaacttagtaaagatattataatcttaccgctgtatctttctaagtcaatat

SEQ ID NO: 116656 - DNA, 2909 bp, Cannabis sativa
tatttttcaacttatccctaaaaaataaccgtagaataacagtgaaaatttaacacattacacagtataaaatttacacagtatttttgaaaaaaattctaccctacaataaaaataaaaaaattgaaaatctcggtatgtggtgtaaaaatctcaactaataatactattataatgtaatctttaaaatatatgatttgttaatttttctttttgaactttcatatttataacaatttattttctgtttttttttttctagttttaatgctaatgtgagcattattaatcagtattttttgcctgacactactaaatcacatccctttaaagaaaataattaatattgttactcataattcttaaaaagaacaaagtaggaaaaaaaaacatttttaataattaagaaaagaaaaatagcacaatttttatattaattaaataatttaatttttttaaaaggagaaaaaattaattgagaaaagattcaatttgatggaacaaacttggatattattctctacaaatttaggtttgtttaagaaaaatttatttattaacaaaaatttaattcacataatttttctttttttgtatttttttttattttttaagaaataaatttgtatatataaataagtttcatttttttaaaaggaaatctttgtttgttatagtagagttaaactttctagtttaatttaacacaatttattggacttttttataacttttaatgttttctttaagatatatgaatttttgaatgtaaagtttgaatctatttttctttaggaattctatgtttgtttaagtaaattaatatttggacttttttcagttttaaccaaaaaaagtaacaatattacaaaaatactttcagctggctaaataaacaaatatacatcttaaataaaaaaaaaattacacaaataccacttagacacaccttcaacctaggattcatgctacctaggcaacaatcgcgcaaccacgtaacaacccaacgcacccgaaacaaaaagtcaaccagaaagagaaccaccattaatttcgacgacttcacctgagaagatgaccataatcaatcaaaacatgagctgttttgaattcataaaaaaaagtgtagaaaaactacaataaaacactagggttgatcccttgaccttgatgaactacccgagtttcttcaagtatcgtagttttttagggcacgaggatgttatacagtttcctctacagaatataagatacaatgatgtgagcagttgaaatcggaccagagtctcttatgattattaacttatcatgtattttttattatttctaagttatttaccttgtttccttttcttttgcagaggatccatgcactattgaaatgagtttgttaaactcttttgcgaagaacatcaattcctacaccgataaggtgcggaagatggacaagaaggcaaagggcaagccttctagctcccgatcataggtcaaggaggtcgtgcctcccaccaacatagttgaagccatcgtcaaccctcgtgccttggaagttttcacttctccaacaatcttggtggcaccattaaaccaagtccctttggacattccttcggctcttaaggtggccacagaggtagagaatccatcacagatggtttccctagaagatgatgaggatgatgttgacgggccgatatttcctttgaaaaggccaccagagaatgttgatagggtcaagaagagagctaaggtggaggcagtgaatgacctggccactttgcagagagtagagagggagagagcagagaatgagaaagtcgaaatggagaaggcataaaaggaaactagaagacaaggagaggagggaggtaaggctaagggagtcaaggccgagcaaacccaagaaatttagtaaagggagaacttcatcaaacaccattttctttccaatcacaccattccatctaggcgagagggaccgagccttgactgaggagagaaacaaatcatcctctacagatacgaatggggaaaaaagaggtctacaataccactagcttgattgttgcaaagaaaaatattaagaaggaagccaaaggttcagaatccccttttgtttttaagatagttgatcggaaaatggctatggaagggtttcgagtcaaggtgggcagtgatattgccctttcgctgcggaccttctctaatgtgtgtcaacttccatgagctaactaaaggttgagaggtcggccatagtggccaatgatgacactgtgtatctatcccaagcccttcatcactaggctgttagtgtaagtgtcctaatttataactttgactttcaattccctgatattttgccaattttccactaaccctttatctttaatttttacatgatgctcaccttgccgaacgcagtgcaaaagcaacagtcagaatgatacatgagcttgaaagccttaaggctgaatatgaggcgatggcaagaagatcaaggctatggtagacttggcaaaggccaaagcctaaaagactttgagagcaccaaagctgaactggtagagctcaaaaagtacactgaatgggtggtggccaagaacaaagatagctaggcacgcttccaaacaatcgtagaccatgttgttaaagtccagcttgattagggtatccaagtcgtaatctctattgtaaagacggagctccaagtagagaacatcaaattgtttaaggaggttcaagacttcaaactcctttattagaaagctcgcaacataatcaccaaatttagaaagagtgtggtagagtgttgtataccaaaatggtacgttttacatttatcaactcgcaagcgcacgaatctttattgtagtatggagattgtgaagaacgaggtcgaacccatggga

SEQ ID NO: 116657 - DNA, 2277 bp, Cannabis sativa
aaaaataatacataacaagaaggaaccttgtagaaggtaaatgtataataagaaaggaaaagaaaaagagggtcctgcttaactcaattgactacaagaattgaaggctcacaggtcacagctacagcagcacaagtaattcacaattccaacaatgagtattctgactttcttacattatctttatcgtcaccaaaagaacatgtattgcagcatttgaaacaattgattgcaacataatatacacatgtaagattgattaccaggcggaatatacacaaatagtacattgccttgtgacgaagtacatacaactcattgttggtggtgatcactgacaactcaaacaacggcagtgcaaaatcacttaggattgcaaattaagagaacagagcactgaatgtttacccgctgatttatggtctccaagataaaaatgccattcaattaccattgactatcatctaaggccatcaatcaaattctccatttcccttcgcccaaacctccttccctgagaattagcatctttacatcttgccgcaaagtaaaaaacaagccaaacaaccatgaagtaaacttccacggtagactgaaaaagcttggcaaaagacttgccacaaacccgagccaaaacccacctcacaaatgacccacaaaatacagcttccaaacatttgatctggacagcttggttaaacatggtggatatcaaataacagccttctttaacaatttccctcccactcttcctcgaatcaactatggcaatccaagcatccacagcgaacacaaaagccacaaatgtatccaacaggaaccatgtaaacaaaaaccctgaaatctccttttcaaaaccacgaatccatggagacataacagagaatggcataagtttcaacctcacaaacagcttgaaaaatgaatactggtcttcaatttctccaaaataccacaaaccaagaagctgagtcaatgcatctctcactgcccatctcattagaatgaacccagatagcctcttaagccctaatcttgacccatcccagattagaccagcaaaagaattaaacctccctaatagatcattaacaacagttgtgaaaacaatgcccaaaacccaagaatacgttactagaaaccctagtattacccacccataagctgcagataagaaactcacaaggaagaacaacaaagccgcgtcacgacggccgagctccaaacccttaatgaagaattgcaaatccacaatccgatccgattcttcttgatgaccgttctccaatccaggcgatacaccgtctttcttctcctcttcttcgtcgtttttctcgtctctcgcttcggttctgaatgtaaccccataccgaacaacctccgaaaccctaatcccattatcaacaaccagatcagagaaacccatcttcggacccaagctggtgaacaagacgatgctagcattaacggaatctttccgattagacccaaagagactccgatcatcgtcatcatctccagagaagaagtcatcgtcgagggttccaaccctagtgagatgaagaaatggtcggcgacggtggtatcggcgaagagtcgcgggagagggagaatcagatgaggaggagcgaagacggttattctggtgttggtttccggcgaggtcgaggcgagagaggagagacttcagagaagggtcacgatcaatgaaggaggtgacgaagtgggtgccattctcgacgactgtacggaatgagaagatgaggattgagagaaagaggaaggtggcgaggttagtggtgaaggtggtggtagcttctctgagaagctgagccgtcgtccgtaggttgctcagccgtgggtggtgatggtgctggtggtcgctcatggcgccgcagctgcctctcccaatatcacccccaaatatatctatatatgtatattgtaacactttcacttttgggggtttgaattaattttgtttctgattttgatctgattccaaaggctttgttcggtgggttttttatttttttggtagagagagatatgaattacaactcagaaagaagaggttggaagaatgaacggagagcaagtgggaatcacgcgcttttaacatgggccatgtatcatatacgtgtgtctattatttatttatcaaaattaccatgagacactaaataaatataaaattatttcacaaaaacataaaaataacaaaaaaaaaattacaaaaatacagttgtatgaaattttaaatatttttaatatttt

SEQ ID NO: 116658 - DNA, 1466 bp, Cannabis sativa
  modified_base (1435)..(1441): a, c, t, g, unknown or other
tgtggatacgacatatagcccgtttactaccgcgaccgcagtgtaactaattgggcgacatcaaccaccttatatttgaatagcctctcccaagtctttaacctatttagaatagccagccaaatcataaaactatgcttaggagaattgagtctagaacatacctcattacaccattctatcttgtctttaccatgttcaaaccaacagtagccaatagaaattctatattcattattagaaaacaaatgtggctgcactacctgcttgattttgtctctgatttccattatttttctccaataccaactgctgctctgtggagccttatactcccaccagtcaagatgcttgatatatacacaatgcacccatttaacccacattatctttctttttagccacaatccatacatgtttagccattgttgcaatattccatgtagcagcgttcaaaagtctcagacctcttgcctttttaggattgcataatttctcccaagcaatgttacctgcccctgtcatcatatttttacctgtccaaaggaaaattctgcaaatagcttcaatttccttgatgatttttctaggaagtatcataatttgactccaatacatgtatattgtgagtaacacagagtttataagcactagcctacccgcaaaagaaaggttcttaatgctccaaaccttgaccttcgcagtcattttttgtgcgaggttgctacaatcagtagcagcaatcctcctagtacagatggggggcccctagatatttgaaaggttccttttacctggaaacaccagacatatccaacacccttcttatctttatttcatcaattccagtgtaatacaaagtagattttgctttatttggctgtaatccagatctgagggagaataactttaggccttgcatcatttggtagatgcttttaaagtctcctttacaaaacaacaacacatcatcagcaaagctaagatggtttagcttaatttctgaacacctctcataaaagccaaactcctcttatttccaactttaatcatgattttgcttaagtattccatacccaaaacaaagagcaaaggagacattgggtctccttgtctcaaccctctttaagcttcaaagaatccatgcatagattcattgaacattaatgaatattcaagggttttgacacaagtgataaccaaattaaggaaccttcctataaactttaaagcctgcaacatttcttccaaaaaatcccaatctaaagtctcataggccttttgcagatcaagcttaatcatgcaactgctatctgtgacacaggctgagatgttgatgcaagaatttactaaagaagaaatcaagaatgcagtgttcagtatgcctggagtaaagagccctggaccggatggtttgttggaaattattttaccnnnnnnntagatttactcacaagtatgtttat

SEQ ID NO: 116659 - DNA, 1665 bp, Cannabis sativa
tttaatttaaacgggtattggggcgggtatggggtgaatttaagaagcgggtataggggtgggggagcaatccccgcactcgccccgccccgtttacatccctatttggtggagaagatggcgaggaccttgaaagtttatgtgtgaaccaaataaaggagacgaagccatttgtatttttcttatgaaacattagtagcgatagcgataagtgttgccatgctactctaaaacatcatccctaagaaaacaacactgttttactttaaaatatttggaagcctaaccacattagcatctattgtgtttgccactgcttattaataaacataccactgcagtttcccaaaaaatttaaattattagcggcgatattattacactagtaacgaccgttgttgttgctaacattattaattaattagcgcatggcaacaatatatcgtcgttacatgtacacctacatttcccacctatcttctcatattattatttgcaataatttacacattaatgcgtgtatgtcgtcgctattaatttggcaaaaataaaaaaaaaatacaggattttgatatttagtggcaatatacatctagttgttgcttgcaataacatcatcgtttgcggagataacatgtcgccgcgccacttgtagcgtagcctctttattatcgctcgtagcgataatgatgagaagaatataaataaaattgaggcctagggttatatatatatatatatatataaatgaatgtgactttacatctccgttatggtccacttaagcagggtgaggcaccatgatgtataagctgtcatatatagattttgtgagcgggataatcgaacttatattactcctgtaaattacatttcccctctgtattgttcccgaataaggttaagatccaatatatattattctctaattaaccacgtacattttccttttcgcttttatataacttccatatgtattctatatccatatgtatttatttctttttttaagggtaatgtagtgaagactttgtacattactttttatagatttgtgtactgcattatataaagtgaaaaataataataacaattagaaaacacgggttcgcacaggcataagtgtacattaatttcctttgattaattatttttatggagatatgttaatagaaactacaaattagacctacttttgatgtcattgatggccctcgctcatctactttcgtaacagttctttgaattctcttaagagattcaacaacgcaaccaccactattatacctatatcgatgcattacttcttcttgtctatggaacatgctaattaatagttatggcatgccaaataattaagaattaaaaatgtaatcccatcttaacattaaaaaataaatagatagagatatagctaataattaaagttcaagctgatcatattgttatacttatatatgcctgtgatacatttattgcatattttttatgtgcttgatttaagatttattaagagtactatctatgaagctaacaagattaataaaaaaaaattcaaaatccacgtaaattttttagacaaataagcttataaattataggctaattagcaatttttcctcccgaactttgacatatacctacccctgaacttttttagccgtt

SEQ ID NO: 116660 - DNA, 2346 bp, Cannabis sativa
attgctaattagtcaaactaaaattgaggatctacaaatatttttcctaaaaaaaacaaataaaaacaaaaaccaaacataaatttgcacaataaaatattaaaaatattaaagcacaccctaaattagactataaaaatgcataaaaataaacataacaaattctcccaaacttaacatttacttgttcttgagtaaagaccaagtaaaacaaatgaaaaagaaaaacaacaaacacaaaatggtaagccaccattgccatatacactacattgtcttttttctgaaatcttgaatataatttttaaccacattttgagttcaactacctcaaagttcaactttaaagttcaatagagaaatacataataggactcacaaatgactacaaaaatttgaactccatcatatattctcaactcataccaaacaaaaccacaatctaaattttcactgtgcttgaattatataaccttctccactaatgtcaacaacaaatgctttgaaaccaaaaagactttaaaagattataacattaggcttaggtaagtgtagatgaaaaagttatttaggctcaactatactataaactttttacattccaagcaactcacttttatcctaaaactatcacatttcccacttaaatacaatacactagagagatttacattattgcaatccacactaagatttattattatttttttacttttcttctcttttcttcttttcttttctttttttatttttaaattgaatgagaagaagaagattgcaacatattaaaaatattctctctcaatctttttaagctttctcaaaacacaatatcccaattacaatttttacctaaacttatttgtaactcatgatatagctaggacaaagaaaaataataactgggtcaattttttttattatctcaaaaagtgtgtattaaaaaattcaatttaaggctcaaaataggtaaactagggataatcacaaaatatgatagcttaaaaggcacaaacgttccaaaaaaaattgtctatattagtttcaaaggataagtcatcaaagatgtcgactcaaaagccaaacaatacaaattctatcaatttcaaactatcaaaccaccaaccctagtcaagcatttataataaaattcaaacaattacatttgttaaacatattaaaaatttacccacagatgttttaaattaaactcgaaaataattgaaccaagcatacaattattagcaattttcttttaataggcaaatctatacaaaatacacaaaaataatggcttactaactaacacagacaacaaaaactaataacaaactaaaaattgaaaattgtaatatgcccctccttaaactaaatatgcacattgtccccaatatgaaactaaaagaacaacggaagagaacttacctaaaaatcacgccacatcagtatggcagaggtggtggtggtgatggccactggtatatggtgtctatggggtcggatatgtgaaaaagttctccacatctgggctcactactggccaactcattcaattgatccacctgatcctctcattctcatgtcgcaagaccataaagttattgaaattattgttcatgccttgctaagcctcaaacatgtactggttctggacaatgagataccatatataaggattaggaccaccactcccaacaggcatagggtcttcctgagtactgccacctgcttgatcatcatgctccacttccatattcacagcttcttccttatcatcttcatccaccacagcttgcttgaccttcttacgacgttggctaggagacaaggatatggaattgggtaggattgttcttcacaaaaaaaaaaaaaagcaaaatagcccccttgaatttgtcatctcaaatccaatatagaggaacctcatgcttgacacataaatcaagaatcaaggaagggtgccccaacccacttacattgcgtaaacgcgaaatgtcacacaaactctcgaacattttctggccaatattgagtgggattcccttcataatgagacaaacaatgagaagtctatcttttctaatattagacaatgagtattggggtaaatgggagcactaacaaagtgagccaagattagattcagctagcacttccacaaccctttaatctcataacctgccatgatccactcagctccctcataggccacaagatcagcctctttttcccaagtgagctccctgttattaaacaatttagtaacatcattattaagggtaagagaaatgtgaggaatatcatacacatcattaacagttgcaacagagactggagcatcaaata

SEQ ID NO: 116661 - DNA, 6308 bp, Cannabis sativa
  modified_base (6266)..(6271): a, c, t, g, unknown or other
aaaatacatgttaacataatcacttcaaaactcttaaattgataactaatcagattgtaatgggttttatttagtgcacaaaacccaacactacccaatttatcaagaattctggccgccacaaatgaatgagtggccccagagtcaattaatataaagaagtaagagtttttgaccgagagctgacttgtaacaattgagggagtagcttctgcattatcttgggtaagggaaaacacccttgctgtagcgggctttgttgctgtcttctgctcttctttcttgagctgcgggcaatccctcttgtagtgtccaggaaaatcacattgaaaacattctcaccctttacgctcacccagatgatgcttcttattgttaagacattctgggtaagtatatcgggtttcagaaccactctgatggttgccacgaccttggttccctcagaacctcttgttttaacttgagtcaccaggtgtacatggtgcctttcttttctaatcattggtcgactcactaccacccctatcattaccataggtaggaggagcggtaactccaccaacaacttgtgtccctcgggactcttgaatgcactcaactgcgccctcatctctaagtgcttttcccaccatttcaacataggtggtgttatcatcgattgtggtcattaggtcgtgtttgattttagggttaaatccatccagatacttttctttcttactgaagtcagttggcacaattcccgaggccaacctaaccaatctatgaaactgggttgtatactccgtaatggtcatattctctttctaattcagcttagtgaattcttttctcttcgcacttcgaactacctcattataatactttgcattagataattcctgaaactcttcctatgtaatggtagtaacatctcgagtaagagccaccatatcccactagaccagggcttcttcctggaattagaatgtagcacaagccactctgaagttgccgatgacacccataaaatttagaattcgtgtaataacagtcagccactattcatcatatttagacctcccagaaagactggaggtgtctgcttatggaacctttcatagaatggttccatctagtttatagcagcaaccgggcctacctgcacaacagaggtaggagccacctgtatttcaggagcaggcattgtaggagcacgctgctgcctcgtgcgtctgatttctttgtcttgttcattaattctatcttgcattgcgacaaacctattttcccaatcctagacagcttgcggtgggttaacatctccccgaccgcgagccctgcctcttaggcctgtgcctcggtcacatatatttgggagaaactgaaatccctgaccgccattggattcgaccgaatttccctggcttcgcgtgttctgcctggggtccattctaattgaacaaccttcaaaactaagagctagcttggtcagatcacgatcaagaataatttactaatttccgcttattttagaaattaaaacttgcgcctattcagctatcaggctactaacatccttcctatctggcttttcttataacacacaaatcaagcaaactactaaagcaataaaagcttactaaactgtgagttgagcttatctctgataataatgtacatgtcgtgacaatcttcaaaagacaacctggtggctctaatacaaaattgtaacacctgactaggttaggcgtgttatcgtaattttatattaattatgcaattcattgctaatcaaatggtttattaaaagttttctagaatagttttaaatatcaaagtaaataacatatatatatatatacataattgggatcccatatttaaaatatttacaactgcgttacaaaatatttgatacaaaagttttcgtctagtgactatacaatatatagcctactatcccaaagatcgtatgcttcaggtctaatcgcctgacatgtaaaatcttcatccgctcgcacttacagctgctcaaccttagcttttcccttaccagtacatacaaacaataattgcgagtcgacagactcagtaaagaaagtataatcataatcataaatataacccgaattataatgaggcgcccattcaaccaactataaccctatccccgcgtcaaatgtggtactgagtctagaacattcgtacaacagtactattgagcataatatcagctgatacttggagctctagtcgtactgatgtgatagtgccaatcagtacttgagccaaacatacatttatgtgtatccactacaactctacgtatatttataccgctatgaatgtaatctaataggctttataaatatgcacgctaaacatgtaatcacatatgtatatcattatactaatcttaccttgtttcagaattcaagtgtgtcggtcaacctaagtgaaactgctgctcgccgatttataggcccctaagtcataatattcgtaaaactggagggtgacacgctaaattactttttggggacttaaaataaaaaataaaaagttcattatcgatgcgtaaaatggaaataccctaaatatcataaaattaggaaaatctagggtgccctaaaaagcttcaactggtagaccggttcccaaccaaaagaccagttctgtggggtttgtctggggattaatcgaaattctggttcctacaggtccataatgaattggtcgaccgattcagtacaggaatccccaaaaactacaaaaacacctcaattcgaccacaaatcaaaccgaaacttccagagtacctaaacagtccataacaaacctaatccaagcacaaactttgttcaaccacaaaaaaaaagcaacaaacccgactagaatcaacttaaacaactataaaacaacctctacaaacataatcatcataaaattaaacctacagaacccaaatcgtaaaaataatgcatcaagactatatttttccaccaaaagctcaaagaagaagagagaagagccttacctcacaactaacttaagctgctgcagctcaaatcttcaggaaatgatcaactaaaaggagaaatcagctgggtctctatggttcacttgtgaccgaccaagagagagagaaaaaaattgatttttttcttaattttcttctaattcatttttccttcaaattcaatcaacagtaagattatttctaaaaacatatacactaatcaaaaatgggctagctgccacaaggagaataagccacctaacaaaaaatcgaaaagacaaaaataccctcgctaatgttttaaatggctaaatgacataggggtaaaatggtccaaaatctcaaccccaccaaaccccgacagtctaaatgtctatcgaaattgccccattattatcaaaatactaaactatagtaaaaacatgaaatttcatatataacataaataacacaccttgaatttaaatatatctccataaattcataaagcaacaaaccaaatcaaaccaaaacttctagagtacctaaaaagtccataacaaacctaatccaagcaaaaagtttattcaaccacaacaaaaagcaacaaactagacttaaatcaacttaaccaactataaatcaacctctacaaacataatcaatacaaaattaaacctactgaatcctaaccgttaaaatcatgcatcaagactaaacttttccaccataagctcaaacaagaagagagaagagccttacctcaccaccaacttgagctactacagctgaaatcttcaggaaatgatcaacaaagaggagaaatcagctgggtctctatggttcacttgtgaccaaccaagagagagaaaagaaattgaatttttttcttaatttttttctaattcatttttccttcaaattcaattatttccaaaaacttatccactaatgaaaaatgggccaactgccagaaggagaataagccacctaaccaaaagtcaaaaagaccaaaatgccctcgctaaggttttaaatggctaaatggcataggggtaaaatggtccgaaatctaaaccctgccaaaccccgacagtctaaatgtctatctaaattgccccattattatcaaaataaaatactaaactataaaaaaaaaacatgaaatttcatatataaaataaataactcacctagaatttgaatatatctccataaattcataaatcgaaattagaaatctaattctgaattaaatcctaaccatttgctaactttcatattaaaattaagtggtcattagaaaagatgtttttagttttgatgtcaagtagtgtgtaagctttcatgttttcagggtagcctttgaatatgaaggccctagcacgaggggaacatgagatgcgtaggctaggcatctaaaattcaagagatgtgcatactcaagtgcttaattatgcatcaactcataggaggttttctcttgtagaaggatatgtgttcagttgagaaagtatacagcagtttttaccatgtaactccaatagggtaatggtaagcagggccatcttaaggtgttggaggcctagggaaaaactaaaaatgaggccttttccttttacaaaaacttaaaaaaatattaattaaatttggacactatcaattttagctcttctatatatataaatatttttttatcatgtaaactaactcgataaagaaatatttaattagtaagagtatttcatttaaaattctatatattttagcatttttggaaaaacaaataaaaatataaagtattaaaaagaatgtaagaaaatacataataaatattttttatttattattaatactctcattttttttaaaaaaaaaaacataaaatatatgtatgtaaagctatttgattcttaaaataattaaaagcgaaaagttggaggattgaacctatcaactctctatcaacattcccatacatactaattgtgttgtaacttctttaagaaaataaatgaattaaacatttatatatatattatatacatagtttttttcatatatataaatacataaattttaatttgtgggcctccaaaattgtgaggcctggggcctatgccccggctgccccaccctctggccggtcctgatggtaagttggattaaaatgacaaagctctagccacatttaaaatgtgttagtattttctcactaccacgacattttatagtgttctacccacacgaattgtaattgataacaccttatttagcataaaaactagtaagtgttaattctttggcattgtctgttcttacagatatgatgttgcttttgtaatgtatatgtacaaaagtgaaaaagaatttaatgataagaggagcattagattttgctcgaagtaagtataaccatatgttctagagtggtcatccacaatggttagaaaatatttgtatccttcaaccgaaggtatatgacaaggtcccaaaatgtctagatgaattagatcaaaagtagctttggagaaattattatgagatgcaaaaggtaatttcatttgtttggaaagatggcaagtaggacacctattgctactgttgtaatcagtagaaaaattcagtttttatttattttatttgcaatgagtacagatggatggccaaggccagtgtgcaattggtctttaattggttgtacattgtaaaaaaactaaattggaagcttgaatataggatgagtcctactggatgtagtatagtttgccaaatctttcagctgtctcaatcgtcaatgtgtgagaagggtcctagatgtggcaatagttagagggggtaattcaatgtcttaatgttctttgtctttcttggtggacaaccatggaaaagactttattaagggaaggacagggatcaagaagtaatatttgatcatgaattgtatgataagattcatttaaaccctttatgaaattccacgacttaatcatggttgagattgtcttgagtttgagctgctgttgtacatgtgcaattgattcgatgcctgagttgattaattttgtcccacattactgttaacttggtgaagtaggaaataaaagattcatcaccttgatgaagatagatcaaggtttcatttaattcaaagatccaaggacctttgccttagttgaatctattgttaagaattgtctacatctcaatagcggtatatgacaaggtccccatgttgggtttttgtgccctaaataaaactatttcaatataatcagatttnnnnnntaataaagatcagaaatcatttttatgttgcatggtt

SEQ ID NO: 116662 - DNA, 1048 bp, Cannabis sativa
aattacattctgctgctgcagacgtatacagttttatatttcgtatatttctgtaataattattggcatttgtaaaaactcgatttttcatctagaaatagtgtatttgtttaaaacttgtgtataaaattaaactaagggtgttgtaagaaacgtgtgtatgattcatgtttagaaacgatattgtcaaaaaaaattaaatactaacaataaaattataaattaatggtgcatttaaaaagtcacaataaaattaaatttgagtctagtagtataagtcaagtatacaatttcacatatttgttaattgtgaatcttattctaattgtcaagatctttcatttattttttacttgagactaattatttgtttatttattttgatggaaattagacttcaataacaaagcttgtctaaaattaaagacgatgattagcgggaacaaccttccactataaacacaatcaacattatgaagagagtcacgaaccaaagcatgaacaactttatttgcagatctcttcacaaaaaaaaaatagagacataatattcaaaattgagaccgtaaaagacaacaatatctaataataatcccacatggagagaccatatgctttgaacaattcacatctttaaccacattcaaataatcagatttcacctcaacaatggaccaccctttccttttaatcaagctcagcaccccgaagcttccatgatagctggcttaaccactcccttcccacttcgttggtccgcctccaccacctgcccagttgaattacgggtcacccatccaaaattgtgacttccctcagtctcaaaaatagctccatcaacgttgattttaatcttgaaaaatctagtttgacccatagctcaatatcatttgactgaaaattatcatgcaatgctagaatttgaaatttattttgagtggattgccattgattaaaagtaagatttaccaatgaaacaaactcatccacaaaaggagctttttaattctaaactacctcattccgggtttgcaaaattgcccaacaa

SEQ ID NO: 116663 - DNA, 3022 bp, Cannabis sativa
taaaagaattagatatttagtagatatttagtctcctagctttgtatataaatatgtattattctatgaaatctatacacaattcgaatcactattttctacaatatagatctatttagataatgcttatgtatgtatgagatatgtatgcttggataggaatatgagaggtcaaatgacatttcattttgttttctttgttcttcttcacctgttgtatacctactacatcacccaccatatatagaaattcctattttgtctaccccagtctacagttcacaatgaacaattgactgatcaacaaaacatatggacactgaatcgatttgtaacttcttcgtgctaatttaagtaaaacttagtcaaataaacaatgtaatactccaatatctgtatctgatatgcattttgaaaaatatatgatgcatatactctcggaataaagcgacccttttttgagagatattaagctgacttgtcatttcatttaaacaatttctttagtagaatacaaaatttaagatgcatgagtaaataatccataaaacatacagaaactttccataggctaacataataacttaacaaatcaaaagtttagttaagttcttctctaaagaactaaaaatcaaataagtagcaccaatggaccatcttatggtgcattgcataaattattttgttcataacttcataaataaaacattaaagatatgatgagttatatagcaaataatcagcaggaaggagctggaaaaaatcgaaggcacacatcaaatcaatgtagagaactgatgcctggcaaaacatttcactcagcagtgctcttctcttcttcattactaatcttgttagttgcattttcatcattaacaacttgtaaatccggatagttccggtggttgagagagtgcaaccatagagccaccacaccttctttctgctcagtcaatgcaatatgagggtatatatgcttcattttgaaggctaaggcctcttgttcatactctttcatcgatacctcttcatgagtgtctttccacttttggttatatgatgtaaagaaacactcatccaagtacaacccaacttcaggggcagttggcacattcatgttaacatccttttgcagggccttctctatcaatgactccggggcacagttcctcatcactgccacagcaagcccaatcagcttccttatctgatgaagcatgaagctctgtcccaccacctcacacttaacaaattccatgccttcaactgttactacagtgtcagcattgaacgaaatgatgaagcgcacagctgcagggtcttcggcttttgttcgggtggtaaagttgtggaagttatgagtccccacataatggttcagaattctattaaacctttctttctcgttctcaccataagagaaattagtagtggcctttgcagcattaccctcgttagattccaagactccattttgaaccttgttgcttccagcattcccactttcgggtttaatttcgtttatggactccgaatttggattactggcattaccatttactgaagaaaagccaatttcgtcgctaagcgcagaaactacctcagcattctcagtgttcgacgaaatgtcaagctcaaaactcgaaccacttaactcataactacgcttgcccattaacccggcaaccttgcgccccctctcagagcattcatgacacttaaagagctcattccctgatcccaaactagccattacgctctccctattaggatgcgaatttggatcaagagcaaacacaggaataagatagacataccttctccgatcacagaactttttggcgttaaacgaaccagtcacacgcttgtagccaaatattctaatctgcggggaaagattcgcattcaggcggtccacaaagccgggtggatccacgtagaaccgtccggagactacttgccccacagcgctgacgcccttatcggtacgggccgaccgagcccaatcatagcgtttggggttgttacgatcatgttccggaacggcgccagcatgatagagtccttcctcaagatcaccctcgatggttttggcacctgggtttttctgcataccttgatatccgacaccgcaatatgcaaagaaaattgcaacctttcggcgcttgtatcttgggatctttgtctcttcgcctgtagcggcagcagcggcagtggtgtgttcgtcatcggaagtggtggtcgtggacatcttgagcttcttagagtctggttcttgttccggaggaggcggtggtggagatattgtggtttctgtattggggttttccattttcagcaatgtaagaagaagaagagcttatagagttgatactccattaaaggtccgatgtctgaactgtgtttttcactctacccttacaaaaccctagttataatttaatgtaattatttgacattttttaaaatcttaagaaatttataatattttatatagtaaaaaaatatggtttaatagtttattttaggagaattactttatatactatattttttattttattttttaaaatttacgatttaggtttttgaagtgatttctttggtagtttctatatgtgtttttatacgattttttgttgcgatttaaattgcttgtaatacgggtttctatatagaattctgtaaaaatataaaaaaaattattttaaagtgtaaaaataaaaaattcttttattttataagaaaaatatgcttagaaaataaaattgagataatttattttgcatgatttaaaaaaaaattattttacatgtacataaaatacaaaaagacacatgtacaacaatattatttttgacaatttaattactctaaaaatttttaaaaaaattacataatattttaaataatattaatatccattgtcatataaaaaattaaaaataaaataattaaacactaaacgaaaaaagatattggcggctaaaccacctgaactttacggtttgtaatagttaac

SEQ ID NO: 116664 - DNA, 1448 bp, Cannabis sativa
  modified_base (1381)..(1390): a, c, t, g, unknown or other
ggaaaaattattttgtcacctaacttgccaaaaaaggactttacaatatgaaccaaatttcagttgaaaaacttatatgacctctgaagaatttttgaaattagtctgccttttcagttttatttgtacaatcattattaatttttggaaggtcctgatacaacttttcatgtgcctatcaacagtaatagagcaagtaagagtactgaatttacagtaattgagcttgagcaaggtgagagagagatgaagatgaaagatggaaaataatgctcaactgaataaatggagatcaaaatatagagaagttgaaaagaaagagaagaaattttaataactaactcctaacaacctctaactaactaaagctgtaaacagctgaaaaaacaaaccatcaataccaacaatttgttgtctaatcattttctattctaacagagtaaatacatgaaaaactgatgtgtctattttaggcctaaactcttatggtttcgttcttagacacttcaaaatacgatattgtctatctttatacacttatgatcctttatttttaaccaatgtaaaactttagttgcacacacaacaaaatttataaataattattattatcaaggtcaaggtttgtaaggagatttaagaaacaggttacattgccataatgacatttcatgtattgagaaactggttactgtgcaataatgagatttgagatatttgcaaaattttaataacttgtttttatgatatattaattactaattagaaatttaccaaaataattaataaagaaactaaaagacaaaaaatagagtaatagtcaaattcaatatgcaaaactacaacactaaacccacctcaaccataatcaaaaacaacaaaaactacttcctaaatcaatctcgaccatgaccaaaacaaaaaaataactacaaaaaatgtaattgagattaatcagtgaaaagtaaccattaaaatcaaccataataaataaaataaccatagataaaaaaaataaattaaaaaaattaattgacaataatatgtgaaaaatgaaaacgaaaaatgcgatatcgaacaaatttaacacaatactaaaattaaaaatttgatacaaacttctcggacattaactattcaaaacagttactatcactaaaataaaatattactcgaaaaaaagtagaaaatagaataagaatattcgccaaagttgttttgcaaaaatcatcaaaaaaatcattggaggtgttgttgtcacgagtaagtcacaaaaattagacattggagttgttactagtgttgcacgttcgaatctgatacatggaaactagttatatttatcatctagttaaaacttgttaggttttgtgccctaaannnnnnnnnnttcaatataatcagatttactaatcaatataagatcagaaattgcttttatgttgcat

SEQ ID NO: 116665 - DNA, 1242 bp, Cannabis sativa
gccggccgtagtggcggttcagataactccactaaaactccatccgctgccacaaacgacggaggagtttctcgccttttacctcctcagcctccggctctgaagctttcttacaagtgcagtgtgtgtaataaggcttttccttcttaccaggctttaggcggtcataaggctagccaccgtaaatcaaccaattcatcctccgatggcggcgcctccgccgctgccgataacgtttcgacttctaccgtttcgacatctgtccctgtttccagtggtaggacccacgagtgctccatctgccacaagaccttccccaccggacaggctttgggtggacacaaacgatgccactacgacggtggtagtggaaatagtgcttccggtggcggcggcggcgttacgtcatctgaaggtggcgcttccagccagagccatagtcagagtcagatcagtcaacaacggggtttcgatcttaatatgccggctttgccggaattctggcctggttttacaattgaagtgaacaacaagaaaagtcaactttccggtattgaccaagaggtggaaagcccgttgccgatgaagaaaccacggttgtctaatcaggaagagttcggtgtttcacggaactgaattaattcatcttaggatttattttattatataatgattgattgaagaaactacccttttgtattttattataatttgtttgtgtacagaagatttattcatttactttattagtctattactcttgattttacaaatatattcaatttatccaaattttagttcactataccaaataccattttaattttacatatgatgtaacgattagcttttggtagcaatatttaatggaataattttaatttcacagccaaaaaaacgtttctttaaccattgcacaaataaattatacaaaaacatcacttgtttcaaagcaacaaccaattccatgtaatttttggttacctaaaatttgataggaaacttacttccatgaaggaaaagaggacaaaaatagtacgaacgaagtttccttttcccagctggatctttaatactaaaatattgaaattggattagtattaaaatcttcattcaaggtcaaaaaagtcagggtcaatattgtatttgtaattcgttttaattttttttagggaaattttatttacaccccaaaaagttctaaaggcacccaattttgataatttttattttatataaaat

SEQ ID NO: 116666 - DNA, 1088 bp, Cannabis sativa
gcttttggccaaactacattggattggattgcaattaggtcttgatgatcttgatttttttgttgtaatattagatgtttttggtgtaaaaatttctctaccaaaaaaatgattgttaatattattagtactcgaaaatatagagagcgatgacgatggagcgaaatggcgaacagccatgcaatgcattttaatttgttgtaataattaataataataatatataaaatattttttgggatgaaaacttttacttgctttgtgttgtatttatatgtgttgataatggagagttaggctaaaaacattaattaaataataattattgttgttatagatgtgtaattaagtcttttccacttaattagtttattatatttcttttttattaaatagtagacattaattattgttgttttgtttataacctacagtactgttttgtaactaataataaaattaaaataataacaaacatggtgatcaattaattatcttcactgttttataaagacacaaaattaattaaacttcatgtggttatggatttaaatctctttctttaaattttcataccaaatcatctaacattgttcatcattatatgttattctagctagaaaatgaaaaaatttgtataaatataaaattaatacaaaatatataaatatgaattgtggactcgatatatatagctcatcaaaacatcgatttttggttgactcgccaccgggaaaaaacttaaaacaagagatatatattggctaagtttggagtgatcacgaatactttattggataatattattccgcatagattaaatataaaaatattaagctatttataagaacatgagttacttcactcattattaattgactttgagatagagtccaataattcttgccatagtatcagagagtcataccctcagtgaacattcgaaacagaaaaaaaagtatgctacacgagatccgcatagtgcaaaaatatagtgtctaacactctcttacgtgtcaatatcgctattggtccaattacactacaacaaaagatagtattaggggcgataattttaggggcgacaa

SEQ ID NO: 116667 - DNA, 3045 bp, Cannabis sativa
aagactcttagttattaatcaaggtcttatcaaacttaacttatttataatgatgaggtaaattgcttttgggattaatttacatatatttagaatacactataaaaaatcttacttttagtcataataaaatttgtgactaaagtgaaaaaattgtaactaattataaatcataattcctatgttgtgactaaaaggttcgtggctaaaagtattagtcacaaaaattacaatttgttgtatcataatacttattgtgactaaaactaaattagtaactaaatactatattttagtcataagtaacattttgttgtgactaaaagtcacgtttattcacaaaaaattatgttgtgactaaaaaattgtcactaataataataattttttgtaataatagcgtaatataattctttggtattttgatctgcattagttaaacaagactatttgtagtacttgttgaatttagagtttggttggaagaaataaaatttccattatagtttgtagcttttgatttcgatacaataaagtgcactacaatgttcctatagcatgtgtactatgtaaataaaaatataagaaaaaaaaatcaattatttttcgatttcatttgagtttcagtactagcatattgttactagctatttgattttttttttttttgtttactatgattaattaattaattctttttttattaaatgttattgattgatctgttattacttactttataatttagccaagtactatgtttctatatatcgaatcttgattgggttattcacatgtatttgttatattattaaaacttagtgttcattgaaagatttcaagttaacattattacattctcttaaaacaaaattaaaagagataagttatcacctagtcattgataaaataatgaattttgttattcacaattttgtgacttaggattaatttatatatgtttttatttgttttttagatttttagtttacagtgatgactcatcggtattttgatatacattagtttgaccaatgcactctttgtaggattatcaaccatttcacttccataataataaaaacattattttaaaattgatttggacacaacaaaataaataaattcctataccaaaataataaaattaaaaaaaaaatacataacacagactttgtatatcctaattttttttatgagcttaattgagttcataattaaggtcaaatatttcatcagaaagagaagcaagatcaaatatttcattagggaagtgactgaatatcactttcattacgagaaggagcatcagaggaagacgatgttatcgacgacgatatagtattcaagcacatatagctcatcttcacttgcaatttttcataaagatgtggtaattgaatgcatcccttttcgtattcctttttaagaaccatgacaacactattagtaaaaaatttcttcatgaactccttgcaacactctttaccagcacaaagtacagttttttgatcagagccaaaaatgacacttgactcgtcaaacttaagaacataagcctcgttgcaccctcgaaacaatcttgctccaaacgaatcgaaaatataacaagcatgaagttctaatttcagtacaaagaaatgatcatcccagcccacgatgaatactcttggctctgttgttaagttctttgttatggtctcccacatttcgtctaaagagaaaagatccttcaatggctcgaacttttcaacccccaaaattcccatgatagatttatttgcgcaaatagagagtggtttaataccagcatttaccacggtctctatgtcaaagtgaccatagtaagaagtttcagtgcaaagtactcgccattcagaggagccttggatgattaaagattcaaattgtagccttgtggggattagattcgggttacagtgaagccaatgagagataagtacggctatcacggaacaagcaccctctcccgaagcgaaggaagcaaataaaacttcaacttttagcattgcttctttattatgactgaataattctagtaatgaccattctgttaactttggctcctgtgatcataatatatataccaaggattcatgaataaattatatgtacttaatttaaaacttattcataaataatgtacgtataaaatgtgttaaacagaaatatgtgaatgttataattagctagctaggtatagtactgttaatgaattttgatatatgatcataactaattaaaggaaaaacagatgaacaaacaaaaacgttataaaatgactaactgatgagaattgattaatgttatggttcttaaggttttaaatatatatagattgtaaatttattgaaataattcattaattatttttagtagtattcttctctttttttctctttctagcgatattatattatgtaattgattaatatcactcaaaacaagtacactaaatattggccataaaaacacataaacctatatatttatctaatatatatgtaatacttaatatatttcactctctctataaagtttatatagtaaaattaaccgatcagcatttttattactctctcactatttcactaaaagaacaaaaaaaaaaaaaaaaaagagtattagagaacatattttattacttacgtaggtttgcatggatgatggcttctccattttttgttaatttaaatattgattgtagtgaaaactatatatctacttctcacgttgcagaggaaaattattttctttttcttctaaatcactctgattagaattacgaatactttcgatcgccacaaaaatctaattaaatactaattaataactaagcatataggatactattattaatttattatagttgtaatcaaattaggtttttctttgatatataggataatatattagtttttttttttcataaaatgatcatgtatatatatattaggttattttagtatatactaataagtttaggatattattataattattataattcaaattatgaggtta

SEQ ID NO: 116668 - DNA, 1524 bp, Cannabis sativa
  modified_base (1445)..(1451): a, c, t, g, unknown or other
tctgtttgtgaaaatatgcttggacaccttgtgaattgccaaacctcggctgagatctgggctatcttctctcaattattcgcaactcgatctagagccagattacttcaacttcgtaatttgctttagaccaccaagaaaggttcacaatctgtggaagaatacattctcaagatgaaacaatatgcggattcttaatctgctgctggacaccctctctctgatgatgatctcgtgttgtatattcttgaaggactaggatcggagtacgaagccgttgtggttaatctcacatctcgaacagagtctctcaccctccaagaagtccaattcatgcttcaaagccaagaaatgcgtattcagcagctcacttctgactcccttgttaacattcaagctaacacagcttccacaaacttcaacaatggaggtcgaggctcttacaacaaccgtggttctagagtgccatatagagggggcagaggaaactttaataacagaggaagcagaggaaattggcccatatgccaactatgtggaagagctggccatgttgcaattaaatgctatcacaggtttgatattgccttcactggcccaccccaaagttcaaacacaacctctcaaccctccacaagtgactctccccaagcttttctcacagaagcaggtccttcattaagtacaccagacttgagcaatgcttggtttcttgataccggtgccacgcaccacatgacaaatgatactcaaaacctgtccacagctgctgattacaaagggaaatccaaggttattgtaggtaatggctcatctttacccatttaccatattagtcatagtttagtctcaacaaaatttccttccaaaaatttagtcttgcaagatattcttcatgtcccatctgtcacaaaaaatttactcagcatctctcaatttacaaaagacaataatgtcattcttgaatttgataatttgtgttgtcttatcaaggacaagatcaccaagcaggtccttcttcagggccatctcagtgaaggcctatacaaacttgaagtgtcttctccacagtccaaagctttacctcaaaccagtgccaatctactcaaaccacaacccagggcctacaattttactactaccagtaaccccgttcaagatcaatctcaaactgcatctatttggcactcaagacttggtcacccctcacatgttattttaaataaagtcttgtctgtagtagttccaaatcagaaatgtaaacaaatttctttttgtgatgcatgccaactaggcaaactacacaatttcagttttaaaccttctttgaataatacctctatgccttttgaacttgttctttctgatgtatggggaccatccttttatagctctagtgaaggttacaaatactacttaagtttaggggtgtacatcaaaccgcnnnnnnngcccgcaccgcaaaaaaatgcggtttgaaattcttcgcggtgcggttgcggtttgaatttttcccaaaccgcg

SEQ ID NO: 116669 - DNA, 2512 bp, Cannabis sativa
  modified_base (219)..(221): a, c, t, g, unknown or other
gtgagcgtaacacgcaagtctatgtcaaatagacaaaaagtataatggcattatttttatatatgtgaaatgtatattgtgattattgatatttatattgtctgttgggcttggctcactcgtgctcgactgtacaggaaagggtaaatcagtctgtgatcagccatgagtgcgaaagcttggcagtgttggtgcatgttcgggccacactagaccaannnggttggggtctaccagtgattgtattttgtaacatctgattttgccgcttaggttggcacgtgaagtaaacttgtaatattttgtgaaaaatgtatatgggatcccaaaacttgtatcttttggtttattgtaaagttaaaaatcatcacaagttatattttcattctattgttaataaagtttaaatttatctgttcttatctttctaataatcccagattagcgagtttagggtttctatatcggttgtcgagcgtgcctaattgttagggtgttacaatattcatctccaaatccacagataagtgcataccgttcttcaatgtactttgagggaatcacaagtttgaatggacaacaaaatgcgaaacaaccttccaacaattggaagaacatctagtgaaggccccaatactgtccaaaccagttgatagaaaatcgttgtttttgtacttggcaatgtccaaacatgtcgtacgcgtcgcacttgtgtgagaagaaggaaaggtacaacttccaatgcattacatgagaaagagactactgggcaaggagtccagatatcctatgattgaaaagctctcctttagcttgctaatagcttcatgaaagttaagaccttacttttaggcccacgccatagggtactaaccaaccaccttcttcgtcaagtgttggaaaaaccaaagtcatcaggaagacttttgaagtgggcaatggaattgagtcaatttgacatacaatatcagcccagagttttgattaaaggtcaggtcctagctgacttcattgtggagtgcactgggataaatgacgaccctgaaacatcgaccccagagagagaattctggagattctacattgacggagcgtcaaatgagaaaggctccggaggtggagtcatactaatatctctgcaacacctctagcttcagagtgcacttagattttaacttgaggcttccaacaatgaagcgaagcacgaggctttgattgctggtttgaaactggcaaaggaggttggttctcaatacatcaaattgtacagtgattcacatcttgtggtcaaccaagtgtctggagagtaccagacgaaaggggagaagatggctagatacgtagctaaaattcgagaattgttgcagcatttcaagcattattttgtaaagcaaatctctagggataagagagctttcacaaatatgctagaaaaactagtagcagatccaaaaatagaaaaatatggactagtccccattgcatacataataactccaagcacgaaaacactgggggtctctgtcattaatcattcaacttcctggatggccccaatactcacatacctagaaacaagcacattctcagaggatagagctgcctcaaggaaaatcctttatcaggcccccaagtatgtaatcatggacgaaaatctataccatagagggttatcgatgtcgtatcttaagtgcattgccagaatagaaattagcactgtcatgcacgaaattctcgaaggattttgtggagatcacacatcaggacctagtctttccaagaagatcactcgtcaaggctatttttggcctaccatgaagaaggattacattgaatatgtccgcaagtgctagcaatgtaaatgctattcaaaggttcccagagcaccaccaacaaaaataaccctcatgaatagtacttggcccttcacaatctgtggaattaacttagtaggatcacttccaaccggcaaaggaggagtcaaatttgccattgtcgctattgataattttactaaatgggtggaagttgaacccatcaatatagttacttccaagaaggccctagacttcgtgattaagaacattgtgtgcagatacggacttccacacaagatagtatctgacaactgaaaaaaatttgatagtgatcagttcaccgacttttgtgccaagcacgaaacaattaagagttcttatgctgtagccaaacctcaaggaaatgggcaagtggaggccatcactaaaattctaaagaccactctaaaaaggaagcttcaagcttgcaaagcacactggctagaagaacttcccagtgttttttgtacctacagaaccactaatagaacttctatgggtcacactccatattccatgacctacgggtgcgaggctgtaatcctagtcgaatccacggtacctacacatataaggggtacctacaacccaactcagaatcatgctctacttcaagaatccttagatttaattgagaagctccgagaacagtcaca

SEQ ID NO: 116670 - DNA, 4356 bp, Cannabis sativa
  modified_base (1811)..(1817): a, c, t, g, unknown or other
  modified_base (4311)..(4312): a, c, t, g, unknown or other
taatattttaacttcagttatgaataaagagaatcatttctattatttaagtaattacaaagccttactctttaaaattacttaagggtcatttgtgtatgattaacagggatttatttggaaatacatgatataatgcaaacccacaactttaaaaaaaatttaaagtttttggtcaaacctttctggacgagaaagggatcaaaccatcataagtttttggtttaaacctgtgtgacgagaaagggatcaaccatcataactttttggtttaaacctgtgtgacgagaaaggaaaataaaaaattataaatgagatataactcataacttgcgtacaaagctgaatattaacggttcacgcaagatcggaaagtattaaacgagacatcgagatgtcttgataaaagtacttaaacctagtgaatggatagataatctaactattcatacaagcaatcaaaaatgtacaaagtgacaaaatcattaaaagtatattcaagtttgcttaagacagactataactatcattgcgaggcagaattgataattgctcgtaaatcaaaagtctagtagattactaactacttaaataggaaaataacgagcaatggaaagactcaaaagtactttgcatttgatcaaaatatagttgtttacattgtgaatgaaaacgcaagcaaacacaaatagattaagctcgaatgaaaaagtacaaggcatttaagataagagaaaacccaagttggtttacaaacttgtctttacaaaaatgccaccaggggcaaaccattaagccattttcctaaacaaagaatacaaggttattcatggggggctggtgaattcgagaaagaccgtctacacgtagctcgagaaagaccatctacacatagcacgagaaagactgtctacacaaataaggactcgacctttgcatagacctcattctctacatcagaagatcccatttcctgcagcagagacctcatcccctacggttgagacctcattcccagtcttgggaatttataaatgccaatgattggttggttcagagatgttcttatgcaagcttgggtcttgagccatttgggttctttagtagaatccatgacctcgccaactaggattaccttcttcctggattccttgtcagcttgagagggacctttgaactcgctctcaaaatctacgttcatttctgtagagacaaagataaaagatcaatgaagcaacaatggtaaaaaaaatataataatttaggtcagaccaccattcacgaaggatgatgcttaccctaaaaaatctcttgtgaggatcgcccgtaacgatcaactgtatctccttggtttgggttaattaaaagatctttagtcttggaatccttcgtttctaatttaaactgagttttgaagtttttgagaacgtatggagaggaaaagcggtaggtatattctggtgttacgagttttgagggataagtttctaaacatggatgggacatcttagcaagaaaatgacaatccaatttctggatgaaactcatcaaaaaccaggagcgtatggaacatggctaaactaagccaccattttatacttagaacccagtaacggtaaggccaaatgttaggaaatccaacggttgggattgaggtagaagatgaaaaggcagttcatgaatgctaataatgaccctcaaaaccatgaagccgttaaaattgagggcatgcgtggtcttgaagcaagggattgtgacgaatgtaccctatgtaagcatttaaaaagtactttttattaaaaagaactttnnnnnnngcaattgttatacccgaaattcagaaaccattttaatggaggacacgtgtcaagttaaggagaatatagatcgatgcatgtagcggtagttacatttaatagaataactcattaaatgcagaagtgagagagtatatttacaaattactgactataagatcctatgcgagataaagatatacaaattgttgcctcacgtattaacgagaaaccatacggcattggatgcacaaggcaagacatcaactttgttgtgcctgggaagacgtaagcgatgcataatgaatgtgaaaacacttagcatataatatacaaactaagtataacatttgtgcgaacccaagaaactaatagcgaggcgcttatctcgctatcggaaggcatactcctgatactttcaccaatcagcttcagatatcttttagtgaggttagtagtcttggcaaatcagttctcgagtagaagctgacattcaaatgatgaatgttgacgtactctttgttattaagaactgtgattgtcaaaatgaagcgttatgccttcaagcgaagaagcaacgaggcgtacatcatcaacctcagaaagataggggaaaagctccaactcgctatcaaggtcattggtactgagttcctgtcgagacatcccagaacgttaagacttaaaacgtgtttaatacacgatcattttgacccggtaaaagcggatttataatcacaactgtgtgatttcaaataataactgcatttatactgcgtgatatgtaatcaaatcccacgattttaggtgagaatttttgtaaagattacattcaactctgtaattaattgcctgactatgtaattataaatagaggcaagttatactgaaaaggggacgaaaaattcataagaaaaaaggcttttagaaactatcagaaatctaataagattgactcgtggactatgcaaaattttaattacaaaactgcgtaaaaaaacctttgtattcattttcttttctttactgtttttatttttctgtgcaagtttatcattcaggctcaaatttggttaacgaaaatctgcgttaacgataaccctgctgctttcaacaaaactttaattactctaattctaaagatcaagaaacctcggtctatgaaggattttcgaccaattagtttgtgcaacgttatctgcaagataatatccaagatgattgttctcagactcaaagaggttcttccttccgtcatctctgaaaatcaaagcgtctttctccctaatcgtctcattacgaataatgttttggttgcttttgaactagttcataatctcaaacatcgaacgaggggacctagcagttttggtgctctcaaattggacatgagcaaagcatttgatcaggttgaatggtcgtttttagctgctgttatgggaaaaatggggtttaacatctgttggatttctctcattatgaaatgcctacacaccaaaaacttctcctttcttctcaatggatcgattactggtgtcatcacacctcagcgaggacttcgccgaggagattccctctccccatatctttttttaattttctcagaaggtctatcctgattactacagtttgaagaaaatatcggtcgtcttaaaggacttgctttctcttgtcatgctccatcaatcactcacttgttttttgccaatgacaaccttcttttttttagtctaatgatagatcatgtggggcaatcaaacgtgctttagatatctaccatccagcttctggtcaagatctcaatttggaggaaactgttatgtctttctctccaaatactctgaatagagacaaacaatcttttcaaaatatcctctgaattcctattagtgaatgtcatgagagatatcttggcctgccagcttactctgaacaagacaaaaaacaactgtttggagatatcaaagagcgtatttggaagctcttgcattcttggaatgacaaacttttttcaattggtggtaaagaggttctgttgaaggctgtggttcaatcgatccatacctatgttatgcgctcctttaaattaccatctacgtttagtcgtcaacttgaacagatgatgacacaattttggtggggtttagatactgaaaagaagaagactcactagaagaaatggaagctattgtgtagaacaaaattggatggtggtatgggttttagatcttttgtccacttcaatcaagctcttcttgagaaacaagctaagcgtattatccaatacccaaattctcttctcagccgagtgttgaagggtcgatattttttgaacaatgacttcatgactgcttctcttggccgatcatcctctttaacatgccaaggcatatgttatggtcgtgaacttttataaaaaggattaagattaaaagtgggtgatggctctcatatttcttgtgattctaacccttggataccaaggaatacactttatgtaaagcccgcttagttnnatttggaaattagcagttaatcttgattaattatgaaattattt

SEQ ID NO: 116671 - DNA, 809 bp, Cannabis sativa
gatgatgatgatcgtcaatggaggcggtggttgttgttgatgatgaatctgagtcaaactcatcatcgccattgaggaagaatgatgagtttgaagaaacgatgtcgttgttgatcgagtattgcctttgcatcatctattcaaacaaatcaataaagaatgctgaaagaatcaatggtacatttaccaggaaaaatctcagagacacagagaaagttttttatgaagtgagcaaatggtgaagagtaaaaatggttttgtctttttaattatttattttgtttttatttttggagggaaagagagagaagtatgtgagagttagttaggcttgaaagagagagggaaagtttttctatttttttcttctttcctattttacccttactgttatatttcttttttacactttaatgaagggtattttggtcttcttaacgttttttttattggtaaattgaaaataataggttgaggtgcttggcttggatcttgttgataataataatgataatcatatgtaagagttaattttagtctttccattatagtagatatggtgcttaattaattttggtaaaattattaagtgtctcaaagatttagtccagtccaatggaagaaaaaaagaaatattctaacttattgaacaaaaatatatactatgtttgtattaatttactagtaaaatttggataaaccatgtaattatctatataaaactaaaaatcttagggatttttacactatatgtcaaatttagtactttttttacatttttattcatgtttgattttttaaactttttt

SEQ ID NO: 116672 - DNA, 1098 bp, Cannabis sativa
  modified_base (1059)..(1062): a, c, t, g, unknown or other
gaaccatgcaacattaaatgttatctgatccttattaactactaaatctgattatattgaaatgagttttatttagggcagaaaacccaacagtttccgcatgaaccgactagcttcatggtccaccaccatgaactagccagagtgaagctctgcccttgatgaactggtcaagcttccttcaaaagagccatgaaccgaccaggcttccttgaaaggagccatgaactggctatgttcccttgaatgaaatcatgaactggctaggttcccttgagtgaaatcatgaaccggccagggtccaaacaggcccccaagtgccgaccaggtccatgaacagatccaaaacatatttcatcaagattcgaactacgttcttcatgttctttgaaacccaaagatcaaaatgtctaaatgaagctcaagattcaatccttttcatcaaggagttgcacattatatatcctaaagctatctaacagattggaatgcctagaatctatcctaaagtatggcattcaagaagttcatgaaagcttgaaacttaacaatggcagaagttcaaagaacataaaagagaaagaaagcttcgaacttacccacagggaagaagcaatgaagattgagctagtccgcgcaccaagtgtggatgtcaaaaactcgaaaaaattacaaagaactccaactcagaagggttttgctctaaagagtctttgagagaaattttgaagttcaaaggtgaaaagtgaatagtgaagagaataatgaggcgtatatagtttctggaaattttccccaaaaaaaattagtggggagttaatgccataaaattaggcatgcatggggaagatgtacaaccaagacattatttcccatatctatcaccaaaaaatttaataactatgatgaagtcacgtaagacgaagagtccactattgggttgtgcatacctgcacggcaaaggaagctacaaatacaagacagacaaaaagtccctacccgaccagacgctcaaacaaggacttgggggcaaaaggtgttggaaataattttaccagnnnntagatttactaccaagtatgttggattaacaaccta

SEQ ID NO: 116673 - DNA, 2331 bp, Cannabis sativa
  modified_base (738)..(744): a, c, t, g, unknown or other
ttctgacacacatattattttattgttttcataactggtttttttttaagttgttcaaaattgagttttaagttttaatttttttatttggttatttgagaaaacttcaaatatattttcaacactataaactattcagtatttttcaaaatttacagaagtggtgttgtaactataatgaacaccactatgaaaaaaaaaattaaaaaaaaaggtattttggcatgtgtttttggatgcagaagttagagattataattggacgttataattatcactcctctaaagtgtgatatttattatattattttatataatatgatattaaaattatatatttaagtaataaataatttagtgtaacaaataatattggtcaaatataaagttacaaatgtgtgaataatgatttaaaatcctatatattgatgatcgtaaaaagttgtaactctcattttctttcactcttaaattagtaaaaaatgttactaaatttattgaatgtaaatgaatgatagctattgaaaatataattgttggagacttgttttcattatttattaagtatatacactacaaaaaatagttacttttagttacaactttttaatcacaaaataatttttttatgaataaatatgatttagtcacaataaaaaattacttatgactaatacagagtatttagacacaacttgtcactaatttacttttagttacaacaagtattgtgactannnnnnnatttagtcacaacaaattgtaagttttgtgactaatacatttagccacggactttttagtcacaacataagaataattaataattagtcacaaattttgttgtgactaaaagtaagatcttttgtagcaataaatggttcaaaatcaaataagagtgatttaaaacattttaaaaaaaaaaaataacaaaagttaaaaaaaaattggtaaccagtaaccaattactattttatcagcatatcatcatatagtgtcgttttgggatgtttctaacagctccaaaacttctaaatcacccaattaaatttataaacacctcattaatgattaaaaatagtcaagagctttatagtgatcatttatgctcaaaaatggaaatgaaaattttataccatttattcacttgtgatacacttattgaattcacttgttgtggaatcttgtgaagatatatatcctcattcttagattttacggtaagtatacaaggcttgaaaaatccttaaaagaatttctagagtttcactaaagtgtattttgtaatcttattgtaatacattcatatattttgtgtatttgcttataatcctcctccctatattctcttgtactgaaaaaatctccaacaatattaggctaaattatctattttgaacagcatcaacttgaaattgatcattattatatttttagaaggtgtggctgaaaactacatcccaactgtactactgtaaaggaaaatcttatatatattattattaagatgtacaattaatgtgtcatatttttcttaacactagaacatatagtataactcaaatcgatcaatatgataacagagaaggatatatatatatatatagtccatcaatatcatgatcaatcaaaacagaaagagataaaattgtcgtgtcgtgtggttttagagcatgataaagactctcattattaatatattgcatgtgatattggtctgatcaatgtttttgcctagcttagcttctacataaagatttttcttttatataattatacatgttttgggaaaacaaacttcttgtactatctttccacaaaaacaacaacaaaaactttaggctttttattgttacatatatataatcaaattatcatgtatgtatatgaatatttatagaaatgatgttttcatttttaagcacttgaaacaaatatcactcaattattataagagaaaattaagcatcttaacaactttagaaaattttaaatgatctgggtcagaaatatgatacaaatgatcagttacaggtaaattaatttcattattgtaaaactatctattttcaattagagataattttacaatttcacataattttatgagaaatgtaagtaaatgaccttatttctaactttatagatagttaatgtccattttttaaaataataaagcaaatatctttttttattttttaatacctaaaatacccttcattagataaaagatattgtatattttattcttttaatagaaattatgaaaaacaataaatcaaaacctctcatctgaatttttgtcaactattttttcattatataaaaggt

SEQ ID NO: 116674 - DNA, 2209 bp, Cannabis sativa
  modified_base (2075)..(2088): a, c, t, g, unknown or other
tgttgttacccaaatcattgtagtaatgttgttagtggttcagtatgtttggccccttctaccaccactactactactactaataaaccattgtcatcaatattgtcactaggtgttggtgatgaatagttgaataattatatgtatgtatgtatgttatgtgtgtggtttttgaattgtaataagaaagtatcactacttatgtattagggtatatgtcaaaccatgttattataatgtggaaatataagatgtatgcccaagttggtactttcacatcaataaatgcatatgtttgttctattggttgagatatatttttcgtttttgatatatatatatatggagaaattgtatgatatttaaatgatgatgtatattataattataacatgaaagattttgaataatttatagttgtgaaaacaaggttcaaaacaaacaactgcacgtacgcgtattagttttgtaatttgttattattgttgacataatttttcgtaagctaatcgaaaaagatcgtaaaaaatatagtcaaagccttagagatcacaacatagtctttcttggcaaacaaggatggagacttcttgtacgtcctttctctttggtattaaagattttcgaggctagatactaccctcatggctcttatctctcagctcagttgggtcataatccgagcttcatctagcatagtgtttgggaggcacaaagtgtggttcgtaatggggttaggtggcagttgggggacggccaaaacattgctgtaaaaggagaaccttggctccccttggaggataacctgttcatcacatcagttaacccagatctcgacacggctgtggttaaaaaactgatgctctccgaaggtggtggctgggatttggagctcttgaatgacttgtttaacgacagggataaagctgccattcttaggattccgctccaacaaagtccggctgtgagtgaatattattattggtttcatgaattaaacggcatgtacactattaaaagctgcaataatttgcagcagaaattaaatggctagtggaacggttgtttctaatttttggaatgaattattgcgcttgaagatgccactgaaagttaaaaatctgatgtggagagggtgtacgaattgtttacctactatggtcatgcttctaacaaagagagtagttgttaacagtttgtgctcagtttgtggtcttaatgatgaaacagctatgcatattctagtcacttgctctctggttgtacagtgttgggagaaggcaggtgtgacgacaattttaactactgatatgacttttctcgactggtgtagcagcacttttcaggtgtccaatgctgaaagtcgtggtctcattgcaactctttgttgggtgatttggggtgcgagaaatgacaaagtatggcaaaataagtcaatcaatgcctcttatctttatgcatttgtggttagttaccttgcacaatgggaggccactcaagctcctagtttggagacttcacaaactagtttattaccaggtgatggtgttgagcgatggagtgcccctaatactaataacattaaggtaaatgtggatgcatcaatatatatggttgtaatcaaggttatggctttggtattgtggctaaaaatgacaatggatttctggtggagggtacgacaagggctcgtgttggagtggttagaccaaagcttgcggaggcgatcggtgttagggaggcgctaagttagatcaagcaaaaacaatggcaatatgtgatccttgaaactgactgcctagttgtaatacaagcaattcgaagcaacgttgacatgatctctttatttggtcacgtgattaaagattgtaaaaatttgtttgtcactttaaaacatgtttctatctcttttgttaagcgttcggccaatttaatagctcattccctgatttgctttcttatttagtagcagagtttgaagtttaataaatttagtttcttcaaataataataataataaatacaaattgatgaagagctggttgtccccactattattattatattattattannnnnnnnnnnnnnttattattattattattattcctacaaggaaatatatgggtcctctagcaatattttgtgtatgaaaaaccactttattgggggtaataaactttacatatcaatattgaattggtctaga

SEQ ID NO: 116675 - DNA, 1370 bp, Cannabis sativa
atcatctataaaaatgagtatattttaaaaaaaatatgaaaataaaggtgtaaaaattaaaacatataaagtaaagtgggtatacaataaaattttctctttgaaactaaacatttttatttacatcaataataaaaaaaatactagataatataccatagatatttcaaaatcaacattaatgaagggagtaataatccatatttaatgtgcatatattagtttaacacattaattgagttggcacatttatattagtttaatacattatgggacaccaatttttgacagataatcttaattctgagagttgtgataacatatattactttttttatttgaaatttactcttgaaaaaaaaataataaaataaaaaaaatactatctaatagtataaaacaaacaaatatatattaatatctaaaaaacaaatatatattaaataaacacaatttaaaaagatattagattctaatctaataaaagatgactcctttatatggaagtctaagaataattccttttaaataaataaacacatgaaaaataggagttatctaaaagtcgtatactcgtatagctttgaaaccctataatattaaacacgcccgtacgttaatcatggtataattaataacccgcagtatagtataataatagtatgattaaaagcaccactaagtgataatatttttttactttatttttcaaaatatattatatttttttttacaacacttttatattacaccatacaccaattttttaaaatacatcaccaaaaatttattttttaaaatttaattatattttcttttaaagaaaaattttattatatttttattcatttcaaatatatatataatattactatatacatgtattattgtacaaaaattattattacaacctaaaataattaataaaatatataattgatatatttgcagaatgaatagtattctataaatgcagaacatgaatagtgtatttaaaaaaaattaaaatgaataaagattttagaatatttgttgtacatgtttttagtacgattttttaaagtttctcaaagaaaggtgttgtgagtactctaatatccatatatatatatcatatatactaagatgttacgtgctaagtcacgtatgttaattttattttaatttttaattttttttaatatcataattttaaaattaataatattcaatatagtgataatcattgaaatttgaaagcatagtagtgatttaaattaaaacaaaaattattgttatactttgtaatagtaattaaaaaaaattattattcgttaaatttatcttcgcaattaatgaaaatgctaatctggttaaactatcaaaacatt

SEQ ID NO: 116676 - DNA, 1280 bp, Cannabis sativa
accggcaatcaatgaccatctgatgaaatccaaaacaaataaacaaaaaatatattattataataattataaaatatgaatttgacaaatgatctatgatgattcaatctagctactaagatttatagattaggtgatagattcagggtgttcctaagtatgtctggctagatagatatatatcatgcatgtaattcagtgagtatatgagaattgatggtggaacaatcattcaatcgttcaagattcaactaagtgaaggaaaattacaagaaatctcatccatgcttaattaagatgggtattcaatcaaggtaggaggcctcttgaaaagagaaatgctaagggcatcttctggtgccaagcacacaacaagaagtacgtggcatactgctattggtgcaaaattaatattggatcctacacattttgatttaataaataatataaaaaaattgctataatgagtgttaggtaccataaaattgcctaatagaaatgctctctcgaaaattatcgaagggtcaatggtaatcataaaggggcgtttcacgaatagtgtttatgttttgcaagaaaactttcaccacgaataacatggctttagcagtgtcaaaggctgccaaactcagcaataggttgttagactttttatttagtacatttactttttattcactttattaaaacttgcgttgattgtatagttttttgttgtattaacccatattattggtgatcatagttgatgggcttaggatacaagagaagtgtgagttttttcagttaactcaaatgacttgggtacaaaaaagcagaagaggtttagaagttctcaccaagaaatgactatctgaagatgatgtgattcaagatttggagttttttgggcagtactgtgcattttaggcaaatcaacaagagtcaaattttgtactagctagggtacacacattataaaaccaagggcattttgtattatatcttaatctttgaatgatgattactccatattggtttatattattaagtgtcaagaataaaacgatagctggagaactactctagttgaaaatcaattaattgtcaagaaaattagaaagcttagaacagataatggttaagaattttgtgttgatgtactcaatagctactgtaagtaaattggcatttctaggcacctaaccattacaaaaaaatttacttttagtcacaacaaaacttgtgaataaaaataaaaaagttgtgagtaattataaattgtgattcttacgttgtga

SEQ ID NO: 116677 - DNA, 957 bp, Cannabis sativa
tctgtaaataaaatcaaaataatcgtaaaaatgttcaaaattccgtgaaaccgtatttttgtaaattttttgttgtttttatgttttcgtgaaataatcccaataatatataatttggaattcatcttcggcaagagcactcttcaccaaggtcggccctgagttgaaatgaactataggcaaaaaaaaaattgagccttactataaagataaatgttatttttaaaaattattaaaaaatatttatattttttaaaatgtatttttttatttgggcccctaaaatgaatgagccctaagcacggacctagcccacctatacttagggccctcttcacatacatgtgatatcatataaagaaaagagagcaataatttattaatatcattaacctcctataatttttgagttacaaatttaaagtatataaatatatgtatgaatatatataattcggaaaaaaaatatatatatatatataaataatttggtggttttgagatatttgaagaaaattattaaaaaaaattaaaatatgatatttggagaaagataattttgacatgtataagtatgaattgctttttaaattgtatgtaaataatttttttaatcaaaataaataaaatgctaaatattgagataattaaagagaaatagatagaatatgaaagtatcatattaccgcttcatatcttagttttatatgtatagatatatagatgattaagtatagtttaagaaataataatagtttacatatataaatatttttctcaattaattagtcaatcaataattataaaactattaaaaaaataataagaaaattaaagagtgaacaaataaagataattagagagattttagaataatatgtcaccccctcatatttctcttttatctttatatattaaaagtgtctatctaacagcatttcttggtttaacagaata

SEQ ID NO: 116678 - DNA, 2222 bp, Cannabis sativa
gtcccagtttatgcaagctccattggaatctcactggattgcagtgaaacgaattttaaaatacctttcaggcacacttgactacggtctaaaccttcagagatcatctcactttgatatctcagcattttgtgatgcttattgggcttcggaccgtgatgataggaggtctacaagtggctactgtgtgctatttggttccaatcttattgcctggaagtccaagaaacagcagaccatatcaaggtcatcgacagaggctgagtttcgcagtcttgctgcagttgcagctgagattacatggttgcaatctcttctctctgaattacaggttgtttcctcctcaacaccaacagtttggtgtgacaacttgagcactgtcatgcttgctgcaaatccagttctgcacgctcgaacgaaacatattgagatagacctttactttgttcgtgacaaagtcctacagaatcagcttcgagtttgtcatgtccctcctcaagatcagttggctgatacactcaccaaggctatttccagcagcagatttccttttctaagggacaaactcagtgtggtttctctatccacacttagtttgaggggggctgttaatgatagcatttagcatcaattaatagttagttactttctgttaattagttggttagttttctattttgctagttgtcagtttaaccaactctgtaactaattgctttgttcttcttgctgtatataagttcttttctgttttcttgtaaagtaattcattcaataataaagaatatctttcttctctctcgttctctctttctctctaaactcaacagtactcttcatgatgtattttttctcttatgttctaagaagttgtaatgggatagctcatagttgggctaaacataatattttcattaaaaaaaatattgtttggtggtcagataatatgtattccgtctatgattgaggatgaatcttctaattaatgaaattctctttaagccctcatttgagggttttcgtttcataatatttgttaatgctgcaaaagatccttttcaaccacctattaccaaaaagtatactttcatcaactttacttacacttaaatgcatcctctttcagtatttggtgtaagagatatgacatatccatttaatcacattaattatcaatgaaaacaaatcatgctttctatgacttttttttatgtaactatgttttctttgacttaatgattgacataaatggaagaatattttggatattataattatcattaataaatgtattaattataattgatttttatttttaatcaaaatttgaatattctacttatggttagtatatcacacacattaattttattactcaattttttatattaattgttgaaatattctaataattaattataacagaaattaaatatcttacttatataaatacagggtaatggtcccaaacttactgctcatatttgattcttattttcattttcaattgtgctagtatatgacacattaattttagggttaagatgtaaagtgaccttaaatctaacaattaagttaataaatgtcttttttttataaaaaattaacaaaatgaccattcatttaaaaatttgatgataaaattataattataaccttagataataaaccctaactttctatcttattctcattttcttgtgtccagaccactcgtctctttcttctccctccgcaccaagtctagaccatctcgcctctacttgtccgaccgccaccccttgagtattaccaccgtagatcgtcatcgccccttgccagtttccatcgcagatcttctacctttgtatttgctacattttcttcagtttaatataacatttgtatttttacattcccattataggttattttttaaatatcagaaaaagagttcaatgttatactatattttctatttggtgtgactggattgtgaaggaattgttttcgttatattttctacattttctctgtgttaataatagtcttgtttgccaaaaaaaaaaataatagccttattgccattattaagctttgtttctgtcagaatttttaaactattctgacttattttatatgggattatatatgaagaacgaaaaacagtatattacaatatattcatatttcagtatattactttaatagtgtggtatattatttttaggctaattagtaat

SEQ ID NO: 116679 - DNA, 1226 bp, Cannabis sativa
  modified_base (1098)..(1116): a, c, t, g, unknown or other
  modified_base (1160)..(1162): a, c, t, g, unknown or other
cccaggcggtgtggaattgcacagcttacccggtgtttctccttacggatcacgggactactgactgtcacaagtgtattcttaaatagaagttctactgtatatatttgtatatttatgtaatattgtagatcactaacaatcatatttttcacatctcaaaatgaaagcagtcagcagtcattttttttttttttttggttttcttttattattatagttgttattaatttctttgggtaagtgataataaatcaaccttttgaatgtgaccaaaatggtcggtgtagtacttacaaaactcctttctcccattcaactttcttatatgtgaaaaagaaaataataagcaaaagaccggtaaattgtttgaaaaaactcattaaataataataataaaaaaaataaaaataataactgataaataacttttttctttgttcttttaagttgttttttcttacaatatgggagatcttatatctaagtaggagggaagaaatttcaaactaaaggtctttatatgtttagtgtttacacatattaatgttctctttttcacttgacttctttgataagactgccaaagttaggtatcatgtatttcacttgagttaaatattaaatatatatagaaatataatatttatatacatacattattcattatttatacatattaatggatggaagataaaaggggaaaaaaaggaaatgaagaagcacatttttttttttaatttaagcgtttatatattataacaatacataatttgacatttgaatccaaaaccttcaatacacacttttctatgaccaattaagctagtctcaagtgattaagaagtgtatcccttaattaggaagtagtataactccccactcatgatgatcaaaacatatataagccctattaaattagacatattattgtgttttcaaattactgagtactcatttactaattaaagaatttactgaaaaacgtaaataattaaattattcataaataaacttaaatacataaatgtatagtgtattctgcgatctctttgataaagttgctagattttgtgccctaaataaaactcattttannnnnnnnnnnnnnnnnnnttaataaaagatcaaaaattattttatgttgtatggttcacatnnnttatttcatgattatatatgtttaatatattaattctattaagtccagaatatatagttattca

SEQ ID NO: 116680 - DNA, 1033 bp, Cannabis sativa
gtagagaatttatgatttataattccttttaatggtctatattgtaattgtaattatgattacagtaggcattctaccatttaatttgttgaacgatctgcaaataaaattgtttactatttaacgtgtaacgcttttcactagtcgtgtttttcagagcataatttgcctcctgaattacatgctatgataagggatgaagcttcattttaatgaaaattttatctttattaaaaaaaaatcaaaataatcttattcaaaatttttttaaaataatcaattacacgtaaaaaaaaaatagtatgtaaattattcaaaaaataaataaatattatttgaattttggctatgatttcaatataaacataaaaaaattaaattagggggcacaaataatgtcctactgtaatttttttttgtatacgtgagcacgatagtctaggactgaacattatgcgggttgactgagtttcgagtttacaagctttgagttcacgggttttgagtaaaagaatgaattcatactcgctcgttcacgtgttgagggttggcaagttcgggttgaccagatcaactcctaaattttatatagttttttttttttagagattatatagttatttttgtatattttatttatttgtgaaattaaacataacaccttaatttatattatttagaggaaaaaacattagtttcaaattcaaagtacaaatatcaatccaaaccaaacaattaccaacagtcattcatcaaacttcatgttcatgataataaaaacttaaaaatttcaaagtctatcctctatagaccgactatagtctcaaagtacaacatgaatatactaaatttattctataaaaaattatcacaccacaatacaatttatattttttcagagcattactacaccagtagtcctatcactacttagaggaagcaccttgcgattgaatagcgatattccaatcaaaaatattacattaagttataaaagatgcgatacttaattgtaccaatagcgatataacac

SEQ ID NO: 116681 - DNA, 2175 bp, Cannabis sativa
aaaccgtagtcaatccttattagaaattatccacgctgagaaataaaatctgatttcatccttttgtgcatgtagtcgtttcgtccatcttggagacatcttagcaccttttagttgtgtttccaaactctattcctcaacttgttgtctctgagttccttatgtcgagttagcaatctctttatcattagctccctcagattctaagaactcaaccgcctcaatccctaacacctctacttcgagtctcatcgaataagtcaaatctgaccctttcctctttttctttagttacgaacaactagcaaccttcctcaatcatggtatccctaccttagcactagcgaagctgagaggaaaccctatccgtatttattattattactttcaaattttaaggtgtttaaacgttttgtgcattcaggttagtctatttgtactaatgagttgtgctttttaagattttttgtgttatgttgtgcttaattccaaatttttcatgtgaagtatctattttgtgttgtttcaaaattttggcaagcattcaatctcccatcccaaaaattaaaacaagtttttaactgaaccaccactggttaccctattaagttaactaatatttttgggttgataaatatttatttataattttatatgtatataatatgccacagtagtacttggtcagtggccacctatatatagctttcttctcattattccctcattcttacacataatatatatatagagagagagatgggtataagagagggtttggatgaggtgaagccagctctgatgatggtggttgttcagattgcatatgctggagtcaatgtgttctacaaattggcagccaacgatggaatgaacttgaaaatcattatagcttatcgcttcgttttctccactgttttcattcttcctcttgctttcttcattgaaaggtaccattattaatttaatcatctaaatacagttatacactggtttttttttttttttttttggataatttatgtaaatcttttgacttctgtactccaattagtctttgctatttaatttgttttatgtatattatataaagtttgtgttacacaatttttcaaaaagaaaaaaaaaaaacaaatatttgtgatacaatatgtaaaattgtggtgataaaatgaattaattttacaggagagataggccaaaactgagttgggcgattctttttcaggcatttttgtgtgggttatttgggtaagtacattccactcaatttgtggatttctttacaattaactaaaataaatattataaaaatataatatttaattgtattttaaatatttttaccgattatgggtttattttaaaaaaaatatagatattgttcaacatgcattcatattatgttgtattcacctaatttttataggtactttttcatttttatacttgaaaatagttttttttacatttttacggaattaggtatataaatccctattacaactagcactgcaacttaaattgcaacaaaaaatcgtatagaaatccttactgcaactagcgctgcaaccactttagaaagtcaaactgtaaatttaattaaaaaaatagtatatggagtaattctcctggttatttttttttttacgttttttatgacttttatatttatattatgttgagttggataaatatgtttagtgtgatgtataaaaaatactatgttaggttatatacatacgaaaagcaatataattaaagaaataatgaaatctttaaattttttttaaactagtccgtaaagatatttaaaaatctacatgtatttgtatacacattttatataatatatattgatataaattccacccttgtgtgtataatattttatacatctagattagcttcacccatattaaataaatactacaatcacacaatatatataattgaagataaaatttgtaataatgtttttttaagcgatattatagaaaaagttgtttaaaattggtaaatctttaaacataatatagttttgattgatataatttacaattattacatctatatgtatattcgaatttgttcaaaaaaaaatatgtatattcgaatttgaactttcaattatttattttttcaattaagagtacttttttttttaaaaaaaaa

SEQ ID NO: 116682 - DNA, 1920 bp, Cannabis sativa
tttttatccaatctggggggagggttccagttggggggggggggggggtgtcggggaagatataggaatagtagaatctttataatctgcataagagtgagcaatatagtcaatacattgattcacactatccattctattagtgtgtaccttatcattctggacctgccaaatcgtgtcaattacaatagaggcataaaggaaaaactcatatgtatttatattcctgccttttagattccacaaaaatttcacccaatcccacatacgaattcatgttcctgtaacgggaaaaataccccagggaaaagatcgtcataaatgaaaagccaggttgcaatgaagaaatacgtgcttaatggattcttcatcaacaccacaaattgggcacatactatccactatatgaaatcgcttaagtaaagcttccttaaccggaagggcatttgagaggatgctccaccacagcactttatggcgttccatgatcttgctgttccacaatttattccagagagaaggggcaacctcacagttagggaatcattgaagtgcttggattaagtaggccgttttgcaagagaaacgaccagatccttccttcgtccaaatctaatggtcttttccttgacccgaagggttaccccctttttagaatgacaaccactgtctcacgagtaaataagttattcagtttaattatgtcccaactacttggtttcgtcaacagctctgtcaccaaagtgtatgagcatgagtgattattagaaacttgtgggtagaatacgttgccatgtgtgatccagaggtcctcccaaatgttcgtgtccctaccatcagtgatagctttacaggcccctctcctaaggatatcattagccttcaccacactcttccagaaccaggagtctgaggttttagccttgcatctgaggatattctgtcccttgaggtatttaggtttgagaattctacaacataacaattggcaccctgtaagcagcttccagccctatttagccaggaaggtctggttcatctctcttgtttcctaaacccaagtctgccccgagatttagggaggcacagcttgtccccaaaattgaagtcaatcaatataaaaagaagtaaacttgccttatataggtatgattatgtagctatagaagtcaatcgtttaggtaagtttccctatgagatttggatgattgagtccgtctatgagctacaaaatataagtatattgtctatcaatacttatactagcttctaggttagttatatttttcactgctttgtattttaattcatattttatagcaagtagtgtttgttttataaaggagaatgtgttcaactctacctctatttttatgtctttgtaattattttgtgtaatcaaacaagtcagcaaatgagaagaaaaaaagtgcaagccgtcaagaaaaggttgttcaagtcttgtatcaagtggaagtaaacactcttcaagttgatcgaatggaattcgaacactgaaagttttagtaaggtttatttgtcaaggtagaatcactactacaagaaaggacttttaatcccaatttttacgggtatttatctcgattcttgctaaaataagaattgggatatatgctagtgggataaaaagtaggggtgttcattaaaccgctcaaaccgcccgcaccacaccgcaccgcaaaaaaaatacgacttgaaattctttgcagtgcagtcgcagtttgaatttttcccaaaccgcgcagtgcggtgcggtttgcggttttgaatttttaatatgcggttcaaatcgcaccgtaccacacatgataaaaataccaacatttatattaatttagtctaatatgtgaatgtccaacctaaaccccactaattattgtattgttgaaacttaaattt

SEQ ID NO: 116683 - DNA, 1502 bp, Cannabis sativa
aaaccaaacaacaaaattcagaaaagagaattgggagaaacaaacaaaagggtgtttgggtaaaaaatcagaattgggactctgatcaaaataaagaaaaagaaacaaagagaaaaaaaagagttgtaggtagagtgaggaaggagtgaggcggcgtgatgaagaagatgaatttcttttttataaaaaaaaatatgaaatatatatatatatatatatacatatacatatagaaaaagagaaagtgagaaagacacaccaaagagagcacacaccataccacaccacaccaccacagtgatgagtgagagagtcagagatatacagagagaaagagaaggagagagagctagagagagaaggtcactcaccaaacaagaaataccaaaactttggcttccctttacataatcgtgcatggaaacgggaaatagcccaaatgggtcgccacatttaatgttgtgaattttctctctcttctatatatataggtatatatgtatataaaaatcaaaactttattataaaaatcaattcttttgtgtttaaacaacttaaaaatcaaaactttattataaaaatcaattctttttgggtttaaacattagaaaaatcaattttttattctgtttcgaatttaaaaatgggttttttattgttatattattataatacacgtaagacttggtctctgtttatcctaatacatccaatattaccctttattgtatattataaacctatatttcgattatttgattaattagtttttgttttaaaaaactttaggttgtttgaaagaatatctttgatttgaaattcaaaaaattgatatttaacagatttttagttatgagcttttttttttcgaaacacgatttatggttataactattaactacatatactatattttacctcataaaaaaactattatatgttttaaatatatttaatactttaaaaaatatttattatacttatttgtgtatatataaaaaataactatccctataaaatgaccattgctattaacgatatatttttttgaataatattaagtggcttgtgttctacattacttgaaaactaaatatattttaataatgtgttaaatttggagtatagcagaaattatgtctaatttgttgtagaatatagggtaatacaaaatttacatcataattatccttatacttatttttatgtcatttttcttattttataagtttatttaattataatattaaataatactaaaatttttatatttttaataaatattaaatgagcattaattattgctcaaaaaaaatgagtattaattaaggattaaattttgggattatgagttaaagtactctgtacagagtattgttagtaggtatcaatggtatttagcagtagcaatacctaaggtgtcatattgttgtttcacataatttaatttagagtaatttatagcataaatacttaagtttaactttcgttataattaaata

SEQ ID NO: 116684 - DNA, 2564 bp, Cannabis sativa
ttcatatttaggatgttaatgaacatacttgttagtaaatctagatcttagtaaaatattcccaacaggattgattaacatcaatttctattcggactcgaagataggggccctaggtttctttgagtgaagttgtgtccacttcaataaagcatttgagaatttcaccaagctttcgagctaaagctcgtgactgatgaagaaaagggattccgaaaacttgaatccaaaagggtgttgaactaagcatatcaacagtgactattgatctggcttcaaggggggtcataataatgagtttgtaatcaaaatgccaaggctggctaataagaacatgcctacgatcaccaaagcaaccaaattccacagtgaagaaatttggttccttcaccaagacattaatggaatatcgtttgggccacatttggtgaaggcattttttgaaagcatcctcgttgaattgacgattcgttagcagcttgaccgcaaggaaagcagagggctcttcccctgtatcttctttaggctcatcaggtatctcagagagggaatggattttggtttctgtgttaatgagattaagagcaaagttgagagtttgagagaggtcttccatggcaaagtcagtcaagaaagggatggaaaaccataacaaatgtgtatgatagtgggggagatgaaatactcgggtaacagagaagtgatatatgatatgggatgggcaagaataaactgtttggggggatatttatagaatattgttataattatgttggagagtgtatcggctacaatcaaggcaagtagtgggcttcgaaatgattgtcaggatttgcagcaaaaagaattaatcgaacaccactgagataatattatcacaatatgcaaaacattaaatgagggtctcttcaagccagggaaattaaagctcgattgtgagtttctgtcagtgcccctaaattcttccaaatgaagcctggatgggatgaaggctttaatgatcctagggcaatgatgagtaaccagggaggtaattaaattctatttttggaaagaaagtgtcgaagtgcaagggggaaagtcagtttggatagaaattgggtcgattagcgatttgaacaacaaaattaatggcagaagtgacataatacggggagttatggtggaagtgatgcatacctgctcgaggaaggtttaggtgcgtaatggcagagtagcatgtgatgattgttgtgtcgatctgttgatgtgcgaagccattaacggcgtgaaccaacagtcttcgattagacattaacggagagcaacagatcccgtacagacaataatgatgcatgccgacaacgactgaagcatggtggctcgcgaagaaaccctagcacagctcgaaggaagagtccagaagatgtatttttatatcttcagattgtacaattatattggcactatgcctagcaacaaaaacttcaaggagagaggacagaagatcagaaatgtcacatattaaatctaaaaacaaaaaaaaaaatctcagtcaaagggcattcaaaatattggaaaatggaaaaattaggggaaatgttttaattaaactaagattttattttccacattttttgtgagaaaagtttgagaaaatgggagaaaactatcgagactgcgccttctccaccacaccacctagatctaaatctcttctccactatgccagatcgtcgctaaccagcctttcacatttttttctaaagtttttctttctttccacattttttttcttatcttttcctcacttttttctttctcccaacaaattctcacttccaatcacacctaagagcatctgaaaccatttctaaacacactccttagataaaatagagagtgacttaaaaaaatgagcttcatagctctctataatagagaatggatagggagctctctaaatataaaaaacttctacttttttgctaaacttttttaataatattttaattaaaaatattattacttttttattattttataaaaataatttatatttgacaaattcaaactataaaatattattaaaataatcaactaaaataagaggcaatgattgaaacaacactaataaaaagtattctttattttagcatctccaatggttaaagtttggaggatggttgcttatgtggattgcttatttgacaaaacacaagaatgttagagtatcttcaatggtagggctattcatataaaccgaaaaaccgcagtttaaatccggaccacgacaatccgaatcactgtaaaccgtaaccggagaaaccgtttttggtggtttggtcaatctggaccgtttacggcataatagttcggttgcggttcgtaataaatagttaatggttaaaccggatcggaccgtttataataaataattaatctacatatattttatatatgactatatgtagaattttgaacttttttgtatatgaaatttttattgcatgaattttagatttttatgttatatttgacttttgagaatatttttatatcattatttatatgttatagatcta

SEQ ID NO: 116685 - DNA, 1306 bp, Cannabis sativa
catatttaactacaatcctcgtgggatcgacctcactcttggtgaatttacttcttgttaacgatacgtacacttgcgtgtgcaaaatatcacaacagtcatgtcacgtgtatgttgtgttcgtgtcgacaatatatccagcagtccaacatcacatttaacagcggaattggatggaaatagtaaattattaacagaatacaagttttagaaattttttcgtaaaaaatacttttagaaattaattactaataaagtaaaaattttagagattttacctaaaatttaatcaaacaagaaagaacatatattcttgacaaaaatatttgatggtataatgaaaatgttagtaaatgatccactgtgatcaattttttttttcttttttttttaaaaaaaaaaattgaatatgagaataaagttattactaatttagtactgcttaatatccatctaccaagctcgacagaaataattataatatcatatataaagtatcacttttaaaagtttaaattatggtgaacacagcgtattaatgcaatttaaatttaaaatgtatataattgatgataatttagcaatattgataaaatttgagtctaaagtttaaattataaaagatgagcattgttgaaaataaataatactaatttaatttgtattttgatataataaatagtactaaacaaatatttataaatatgctacatatcttcctagtgttggttaattctattaattgtcaaacttcaagccttttttatttttaagacttggtggttgatattaaaaattatttatcctgcctcatgttcaggaaaatgctaattaaactgctcacagtttagctaaacaagttttaatattagataatgattgtacttaattaaaaaaaaattcctctgcctactaaaatactcgaaattcctaacggtttaataccgtcaggtaaagaattcctgatggtctataaaactgtcgcctatatgagcgtcgtgaataccgtccctatagtggatttcccaaaaaaaaattatccccttcatcctccttgaaaccaagatgggagtttcatttggccttaagagccctgaagagtcgagatttgggccatgagtctgtcgaaaccacaactttgagatctccaacgatttgtgaaatataaaaatttcaaaaataaataaatctcaaaataaaaataataataaaaaaagttacgagaaagagtggacgagatagagaagactgaccggtgctcgtggtcgtgcgtctgtctttgaacaatagagagagagagagagag

SEQ ID NO: 116686 - DNA, 794 bp, Cannabis sativa
ggctctcaaatcttgggataagatttgctagtcgaaattgtcagggggctttaacttgtggagatttgaacatatgaataaggccctccttgcaaaactggcttggtccccgggtcagaaagaggacaagccttgggttagatgtcttgtgagtaaatattatcaataagagagtttttggtctgtttctcctaaaaataatgattcatactaatggaagagtcttttggaggctcatggtattgtgttgaagggttttttgtccttggcgactagtggtaattccattgatttggacatagccatggatgccatggttaaattatttagaatttcattgtctgatggagagtctagataggagatgtttaactgcaaggccaattgcagatttatcctgtgagggagcttggaatagggagggtgtggatcaaatttttgaagaaggccttggaaggaagattgctgagattctgaggatcccttcaaatcatccagattagattgattggaaggaaagattgaatggtaaattttctgtcaagagcacttattgtgttggtcaaggttttagatttggtccaaagagagaattatggaaatggattcggaatgatgatatacatccgaggatagttgtgctcttgtggataattttagatgaagttattccaactaaaaacaagctgctattctgtaaggataaagaatgtgttgggttttgtgccctaaataaaactcatttcaatatatcagatttactaattaataaagatcagaaattattttatgtt

SEQ ID NO: 116687 - DNA, 2307 bp, Cannabis sativa
  modified_base (64)..(64): a, c, t, g, unknown or other
aaaagaggtatgtttcaattaaatataaaagtagatgtaaacttgattaattgattaataaaantggtatttttcaacttaccccactacccctccagggctaatctatctctttgagatattaattaggggttttaaaaattatttacttaaatatagttgaccaatttatatagtatttttttattttttagatatttttatggtatttgatatactatatatataaattagattttttaaagctcatatttaatgtgtttatttatttttaagaagttttatttgtctagtgctggaaaagttgctagagtttgctgccgatgtcagaaaagtcgtcggaattactacggacgctaaaaaatcatcgaaattgacattgttactaaaaaaatgactaagaaaccgatttcttgatgaattattagaattattgtactatagtagaaaatcctacaccaaattaatgtaactattggaaatagtggaagtaaacactcacacttgatgggtgttcttaattaagaaaatgaatttggtcatagtcagctcacaatgcttggaacctgcattactgaagtttcctttacctgctgcaatattcgatcttggtaaataatttttgtaagcctattgaggcacggtaattatattagtcttcctcttctaatgtatagatagtttttaatatatactttagtttatttaatggagtgcaaaaaaaacaaaactgtattgtattgcttttgtactatagtaatatgctttataaagtgttccaaatgtacacataataaaaattgtgtcaactgactttcaattatgctatgaaggatttaaggaacagattcttgaactgttctgttcagtctcaaatcacaaatgcattgtctttctagttttacataataactttagtacttaataagaaaagttatgggggcgtttgcctgattaagtgatggaggaaatgggtcaaattttgcaaggaatgcttggcaacagcttgctgaaatgatcgaggagacggctatggagcgttatagctcacttctttcagaaaacattcctggggtgcatacaagatgaatctggtgtaagcaatcttctgttttgtattttaatacttcctagtcaaaaaacatttaactcctcacttttgtcaccctagaaatcagaaaatccatactccaaaaaagacttaggaataggatagtccattagacactgtatagcactaatttaatttcatgtaaacaacaacgagctacaagtaataagcttccaatggtcttctgctaatagttagcagtacataaatccaatatcaccaacaccgagtatcgacttctataacaaggtttctacaattttcagattgcttctttgtatcatgttttcttcttcatttctttaaagttactaacttaatattcaacaaggaacaaaagaaaagggcctaggggttagctgacatttaagttgtaccatatccccttcctaaagtaagttagtgaagctcttcacatacctccaggcagataagatacgatgtgttagctcttattcagaatttcattcttttagctgggccttgatcaatgatcggatcaacggaaggtggttgtcgtgcctccccagcttgctgggtttcagggccattttccgattctgagtttgtaagggggacgtagccttctggaaatggtggcggtggaggagctggcggtagctgcataaatgtgaagtggcctcttagaatcagatttgttatgacagtaataactggacacaacaaactgccgtttatataataaatatataaatacactaagtattagaaacacatgtaatgcatgttcgcaactaaatctaatacaattcaattatattttttaaatatatacaatttaatctaattttaaatttatttataaaaaaaatatctaattaattttattaaacaataaaataagtaaataaatttatatattttaaataatataattaataaatttattgtaaagttaattaaaaaatagaattagcatttaattcaaattaaaactaaactaaaataaatttatataaaaaaaaaataattatctaattttgttaatatttttaaattaaatttaaatcttcaaatatttttccaaaaaaaaaaataattaatcaattgatttaagagttaattttaaccattactttaagggggcgtttggtacgaggtgttcaaaataatttgattatagggaatattatgaaggagaatataattatagggaaatgtgtaaactgtgtttg

SEQ ID NO: 116688 - DNA, 7613 bp, Cannabis sativa
  modified_base (2726)..(2735): a, c, t, g, unknown or other
  modified_base (3176)..(3176): a, c, t, g, unknown or other
aaaagtccttaaatctaataatcttaatagttcagagagaatttttaacggccaaaatggttcaggggcatgatttagtacatgtcaaagttcgggaggaaaaatttctaatatacctcacttgttgcgagtgctcttagttataattttttttttacttaatttagttatttaattataaaaattaaagttaaaagtcaatcattcaacttaaacaaatgcaatcccatgcagtgagaaattagtaaaaaaactttgtaaaaaagctaaaattcatcaatatataattaactaggtaactaacccacactttgtgaggtgttgttcaaattttataatctttttatacatatatattttgtacttataattaagtgatataatctaaaatataatattttaatatgtatattataaagaaaataatattattaaaattagaagtacaatttgctatttttaaaatatagagaaaaatgacaattttgtgacaaatataaaaagtaatggaaatgacaaaaaaaaatgcatgtgttttgataagaaaataaatgaaaaaatatcagcttctgaattcaattactgtgcatgcgactgatgatgtagttatttttaaaagactatttggactctatttttttaataaaaagaaacaattcaaatcgtccctctaatttataaaaaaattatcatttaagaaaacgaaataacaaattaataaattttgtgttacgagttttaaaatgatatttaccatttgtaaaatagaaaaattatatttatacttaattaattataatttttaaaatatagtcttagtaatgaatttatatattttgtaattatcacaaataaaaatgagcttaatatttattacaaatcaagtaatctttttttttattttaccctaaaaaaattatattactttttactatataatttataatttataaatttaaataatttaatgtagttctattgttgacgtgatttttcatcaacttaatctaaaaaaataattaattagagaataaattcaagaaatgaagagataaatataattaatgaacaccaaatatttttacatgattttgcagttcaaatctacatactccacgagtcaatattatttatgagttttggttgtgtttacgatttggcagaatttctatcaatcaaaattgttttcctcaccctttgagtgaacccctatttatagaaataggatggtgatcactcaatcttagctttgtaagaagttacaagtgatgggtggttaatttccacgtgtcacgtacaattatacatttagataagtgtaaataactgtttatatttaaaacgcaaaatgtaatctttgacttggtcagaccatgttttgtttgtgagcagaagcgtttctgagtgtgtaatacgaggagatgtaatatctttgtattacaaccagatacaagatccttgtattacgactgactacaagagccttgtattacgactagctacaagatttttgtattatgatatgtttaatgtttaactaaataacataccgataatgtcgatatatctcacctcagtttgcgaggaaatttagtaatttgcgagcaaatgagtcatcttcgagcaaatttagctgctcaatacctcagtttttgtcagagtgtaggaatgacaaaaatttttcatatattccaattgttggcctcttctgctcggtactcataagatatatagacataattagtgtgccagtatatatatatatattcattaggctctcatgaaaatttgatgcagagaactttctgagcagttttttggacaactcatgtttgtgtgatataacaacaaccataattgttaattatgaacatgttgtgttttggaaatatgagcgaacaagagtttttcatttcatcattttgtctcactttggctctgtagaatatctttatatatataacctttatatatatcatttgataatactgaatagttatcaagttaacaaatcaagtcacttcttattttttatgacaataggttatctagatcgttgatttcgacatttctcccatatatatatactcccatgcatttcaatgtagtacatacttctatattttttatcatagtacatacacccaatgcatcaggtcatagtacctactccaccatgccatcaatcatgagaaacacacaagataaaagcttcattagtcaaatgtatttgcccaagcataaacgtgagaatctttaaatgtttctcacacatggttcaaagcaagtaacacccatgtaacaccctactagtttaggagtgttatcgtgattttatattaattatgcagcttgttgctaatcaacgagtttattgaaaatcatgaataattaaaactttgtttaaatacttataaatacaaaaataaataatatatataactgggatcccgtgtataaaatatttacatctgtttcaagtatttgatacaaaacttgtcatctagcgactatacaaaatatgatcagttgtcccaaagatcatacgctccagacctaatcacctcgacatgtacaatcttcattcgctcactctcacggctgctcaaccttatccttgcccttacctacacatgcaaacaataactgtgagtcgacagacttagtaagaaaaatcatattcatcaacataaatataacccagattataatcaggcgcccatacnnnnnnnnnnaaccctatccccgtgtccaacacagtactgagtctagaatgttcatacgataatactatcgaccataatatcaacctatactaggtactctagtcatactctagtcgtaccgatgtgatagattcgatcagtatctaagccaaacatacatcaatcggtatccaatataactctatgtgtattgataccgctatcgatgtaatctaacaagcttaataaatatgtacgctaaatatgtaaacacatatacgtatcattatactaatcttaccttgtttctaaattcaggtgttccagtcaacctgagtggaactactgctcgacgatttacaggctcctaaatcacattattcgtaaaactgatgagtgacatgcaaaatcactttttggggacttaaaattgaaactaaaaggtttcctatcgatggataacatggcaanaccctaaatattgcaaaaatgggaaaaactagggttcccgaaatttctccaaccagaagaccggttcccaacccagaagaccggttctgtggggttttcctagcgaccaaccaaaattccggttcctacaggtcccacaacatgaaaaacatcctaaacacctcaatttgatcccaaatgctaccaaaccttccagagtacctatttacaccataactaaaagaattcatgcaataaaatcaagaatcaaccataaaaatacaaatcaccattaaagagcaaagcttgagctccaagctcaaaccttgcccaaacacaacccaagccatcaaaccactctaaatcagctcaactaacatcaatataacctcaaaattcaaaattaaacaacttaaacaaccacagaaccctaattaacaaatcatgcaacgaacccaacttgaactttaagaaaaataaaaagaaaggagctagggaaaataccttggattgaaacctacaaaatcctactaaacactcttaattaggctgaagaaacccttaaatggatactggtttttatagagagagagagcttgaagagaaaatgacttcttgattaatctaatttctaattaataaaagaataaaacttattaatataattctctaataaatcataacttaaactcagatcaattacctgacaaatatttcaaatggcaaaaagaccacttgcttttgcctaagccaaaggtattcttaccacctaggggtattttagtcatttcaaaaacctcaaatagttctgacattcaatgtatatctaagttgcccagctattactaaaatactaattcataaggagatgtgattttatcggccgaacatcgcgttccgatgttgtcgggcataaaatatgaaaaatataaaattttatatataacataaataacacacctagaatctaaataaatctccatcaattcataaatcgtaattagaaatctaatttcataattaagccctaattatctgctattttatcattttaaaaacaagcggtctttacaatcatccccctgttaaaaggatttcgtcctcaaaatcgaacttgaacaactctggatattgagccctcatatcagactccaactcccaggtggcttcctccaccttattgtttctccaaagcaccttgagcaaagctatggtcttgtttcgaaggactttatcttttctgtctaaatctgaactggttgttcttcatatgataaatttggcggaagttctaagctttcataactcagaacacgagtgggatctgaaacgtatttccttaacatagagacacgaaacacgttgtggactgctaaaagtgatggaggcaaggctagacgatatgctaccagtctaaccttctcgagaatctcaaaaggccttgtaaacctagggcataaattgccctttttctcgaaacgtttgatcccattcatcggagacactcgagaaatacatggtctcctacctaaaattctacgttctgcgcttcagatctgcataactcttttgcctactctaagaggcaagcattctagtcttaatcttttccatagcctcgttggtctactatactaattttgaacctaagtattttctttctccagtttcatcccagtgaattggagatctgcacttcctgccatacaacatttcatagggattcatgcttatagtactctgataattgttgttatatgagaactctatcagtggtagatacttgctccaagagccttcgaaattcaacacacagacacgtaacatatcttttagtatctgtattgtcctttcgaattgtccatcggtctaaggatggaaagctgtactaaacttcaatttggtacccatgccccgttggagactctaccaaaattttgaggtgaacttcggatctctattaatggacttcgaagccccatgtaatctcactatttctttcacatatggaaacactgtaaaggttgttttcactagtagaaaatgggcagactttgtaaattgatctaccacaaccaaatagaatcatacttccccgtggttctaggtaacccaaccacaaaatatatggtgacatcttaccacttccactcaggaagtgccagtggctgtaataaccctgcagatctttgatgttcagccttaatctgctgataggttaaacatcaagatataaactataacacatatttctgcatcccgtaccactagtagaaagattttaaatcccgatacattttggtagtgccaggatgcagtgaataaggagtggtatgagcttcctcaagaatttcttttctaagttccgcaccacctggaacacaaactctggttatatacaacaacattctattatctgacacagtaaaatctttagcttgaccagctaaaatctcctctcagatcttcaccaattctggatcaattaactgagcaattttaattctatctaatagatccgattgcaatgtcaaattattaagttttcctacaacaaactcaatacctgatcggaccatatcatttgctaggtgaggtgagatcttgatcatactagtcacttgacggggacccttcctactaagggcatctgccaccacattagccttcccagaatggtaaaggatttcaaagtcgtaatccttaaccgaatccaaccaacgtctctgcctcatgtttaaatctttcggggtaaacaaatatttgaggctcttgtggtctgtataaatctctcacacttctctttatagagataatgccaccaaattttcaaagcaaaaaccactgtggccagttttagatcgtgagttgggtatctctgttcatatttctttaactggcgggaggcataagcaatgacccgatcaggctgcccatacctagtgcggaaagcagtctttggaatgtccttgaataccctattcattaaatccagaaaagttgtcaaagaatcggttagtccaaaagacataaccaggaattcataatgcccatacctagtgcggaaagtagtctttagaatgtcctcctctcgaattctcaactaatgatagcccgatcagagatcaatcttagagaagaccgtcttcccctgaagctgatcgaacaagtcatcgatcctaggttatttagttcccggcagtcaatgcgtacatgtgtaaagatccgtctttcttcttaaaaaataacatgggagccccccagggtgacacactaggtcgtgaaaaccccatatcaagcatcccttggagctgaatcttcaattctttaagttttgctggagccattttgtaaggtacctttgaaaatggttctgctccaggtgctaaatcgataacaaaatctatttctcgctgcggtggtaaacctagaagttcaccaagaacaacatctagaaattcctgaaccaccttgatgtcttctgggcgaattgattcagaattaattgattcaggttcggtggtatccaatacaacttccagaaaccctaagcatccatcttgtaagaaatctctagcttttagtacagagatcactaaaattttgggatccctgaaccgatcccataaaaataaatggtccctaaccctcgggttggaaaatcaccatctttcatttacaatcaatactagctaagtacttggacaagaaatccattctaagtatgatgtcaaaatccgctaaatccaattccactaaatcagcactcaactctatatcctcaattctgatcggcgtagacctaacccaccttagagataactaattctccgccaggcagtaagcttttaaaccctttgtcatagctatcatacaatctacccaacttatcaaaaattatggtcgccacataggaatgagtggccctagagtcaaacaataaggagaagtaagagttgttgatcgagagctgacctgtaacaactgaggggctagcttcttgagttgcagacaatctttcttatagtgtacaggtaaaccacactagaaatattttcgccctctacactcaccttgatgatgcttcttacaactgcgacattctggataagtgtatcaggtttcagaaccaccctgacggttacctcgaccttggttccctcagaacctcttgttatgatttgagccaccaggtgcagacgatgcctttctcttctagtcaatggtcgagtcactaccacccctaccataaccagaggtaggaggagtggttgttccaccaacaacctgagtccctcgaaactcctagatgcactcaactacgccctcagctcccagtgcctttaccaccatatcggcataggtggtacttgttggaaatattttaccaggatctagattaactaccatgtatgtttcattaacatcctaatatgaattttaaaacaatgaaataaa

SEQ ID NO: 116689 - DNA, 918 bp, Cannabis sativa
cggcaattccagcttaacacattcataatgcttggcgggtctgtgacacagaacccgccccaacaaagttttttgttatttctgaaataactatgttgtcctcattactcatattcggcccaatggtctttgtttcagcaactctttttctttttgattcaaggaccatcaaatccccatccacatcatcaactatatcctcacttatagcattaattctctccatatttcctaatgacaatcccgaatgaataccatgggctttatttccattaatatccaaggcaatatctctgattcctccatccaatcccactgaatgtggaaccgattgaaacctcccttgattctcgcccacagtagcgctcccagccgtagtgcctttctcagttgagttcttgcccgatccttcaccggaagtctcccctcgaatcaacagaccttggcgaagccatttggacccgattgtgtgctgtctccgtttcggcatagctttcaattctagactataaggtttcttcaacaagtgagatggtgtgtcaaatagtcttgggcagaatttttctgaatgtcccagaattccacagatgaaacaaaatgttgggagatcctcatatttaaaattagcatagcatagctctcctcctttcttctctaacttcattcttcgtttcaaaggaatgtcaatacgaacagaaacacgtacccgaagatagtcacgccatattcccatgaaattgttcttgtcggcctcaatgaacatgccgatgtagtttccaatatccttaaccacctttgctgacatgaagcccgttgataatccatgtagttgtatccaaaaatctaacttatcaagaaccactgatcttggattctcccccgctttcagttttgagaaaattaagggaaccctatcaa

SEQ ID NO: 116690 - DNA, 5244 bp, Cannabis sativa
  modified_base (32)..(39): a, c, t, g, unknown or other
  modified_base (218)..(220): a, c, t, g, unknown or other
  modified_base (4981)..(4995): a, c, t, g, unknown or other
  modified_base (5186)..(5210): a, c, t, g, unknown or other
aatttcatattaggatgttaaaaacatacttnnnnnnnnatctagatcttggtaaaatataatccaacactagtacacctaaagtactttgagatccaaacagatcgccaacaagtatctagagatgagtgatgtcgaatatttctagaaactctagctgaaataacccaacaatagtatttcaagctggccccaggaagatttaattcttgggaagnnntctcccgagagttctatatttagttctctgctgcaagataaataccttcacaactggaggatcttgtcgaaataaagcaaaaagaagatgaacctttgaaggactataattaacggttcacgatgtaggctgccaaggtgaaaggcctgatagaataaggccgttatacatccatatttagaggcatcctaccgttgagtgacttctagaaagatattagtagaatctcaactaagaacatggaggagttcctagagcaaggtgatggcttcataaagtttgaagaagctgtctgacaaggcgagacaagagggtaggtcaatgatgaacaaacatatggcctcatagtgccctaacaaactgtctgacatgccaactagcatagacgatctctgtcgattctcaaataatgagattggttgagggaagcgcaacaatgatggctcagaccaacattattgcagaaaagagcaattcaatgattcccttataccatgaagcccaagggagaaggtggggaagtgtacatgcttcactctcctaccaaaactcacaaagcaaagcatgcccagacgtcccagtagggaaagtcagcaacaagcaatatgaaggctggcctctatctccgaaggctggcctacatctctgaaggctggccaccatctccgaaggatgtcctccatctccgaaggcttgcttccatctacaaaggctggcctccatctctttccaggtgcataggcaggggcaggtgctggcaactctatccaaacctccgatggcagaaaacttaggggttttcattggcgaaccccatattccaggcaagaccagcaaagctaggaagtgctatgctcgaacactatgtcacgaccacaaaagtgactttttggcaggtgaagaacaaactctaaccaaagcttggacatccgatgatctctttctcaaaaggagatccttcccaagtcagttaccacgcaacgactccctgatcgttattgcacaaatctgaaatatgactgtggcaagatacatggtggacagtggagcctccttcaacatttttttcaaatcaacatatgaaaagataaggctccaacttgctgacttggtaccctccagtcaagtgatgtatgacctccttggctaaggcatcgcccccatcgggtatatcagatttcccctcactattggagaaaatccaactaccagaactttaatggcacagtttgtcgtaatcaatgttctctcaactttcaatgccatgataggctgactagccatatacagtctaaaggcaaaaacatccatcttccacctctgcctaaaattcccaacacgtgatgaggtaggatgtcaagaggagatcaacaatcttcatgtcacttttacaacttgaccttgtccaaataaagaaacagaagatgcatccaccaaatcaggaacatacaaacttcatgacagacttaggctggtactactacaaatcatgccctttcggggtgaagaatgcagaggccacatatcagagcttgtgaacaaaattttcaatgatcctatcagtcacaacatgaaggtgtctatggacgacatgtttgtcaagtccaaaaaggttgggggcatatggaggacctagacaaatgcttcattagctcaaacccagacaagatccaagcctttttggaaatgaagtcacccacaaccatcaaggaagtaaaaagccaagtaggacgcattgctgaactaagcagatttgtgtccaagtctagagactaatgtgtacccttcttcaacattctcagaagcaacaaaaaacttaagtggagaaaggaatgtgaaagtgcattctaggagctaaagaattaattggctcgaccacctgtgttgcctaaatccctagacaaagaagagctagacgtatacctaggagtcactgaacatgttgtgagtgttgtcctcacaagagaagaaggtggagtaaaacaccctgtatactacatcagcaagagactgatcgcctttaaaagttggcacccagtcatggagaagctaacccataccttgctctttgcttccagaaagctaaggccatacttccaaatacaccctataaatgtgtacaccgatcaacagttgcgacaagttctacagaaacctagagcatccggacgactactaaagtgaaccactaagactcggccaatagaaggtcacctctcaacagagcatggtcagcaaaggcctagctctcaccagcttcatggctaattagagaagcatacatccccaaatctctcaaagttcaggagaaaagtaggagccaatgaaaatgcgagaccaagaacccaagatgtacatttaccacttcccgatgtaggcatggccaccagggcacctgggggcaactgatgtatgaggcaacaaggtcagtttcaaagcttctaacaatgatgttgaacatgaagctttgagtgctggcctcaagctagcacacgaagagcaaactgaccacctagatatacaccacgagtctcaactagtcataggttatgtcctaggtgaatatacaactcaatacaagaagatgatggcctacttgagctttaaaatagctcaaaggttgtactaaaaggcaagccacgaaagatgacacacacagccaacacagtcgtgcgattagctagctgcgccttgacaaccaaggcaaacttagtacatgctccgttcttcaaagaactaaggccccctatatcaaaagaaatagacttgctagacaatcaacatggataaacctacaacaacatacctcaagcaaaaaccttgccaaaaagcagggattaggggatggttgtagggtatccaatccggcacagcataacacaaagaagtggtatcctaacaccgcctctaaggagtgttaccaaaaaagaagcttgacaaatattcacagaagagcgcaaaagctctacggaaattatgcctagggcaaagccaaccgagtgtagatgggatcaaactggaatatcagcctagcctccgaaaggctggccgatccagccgtcagtaggctagaaggccaaagaattaatgacttgaccacccatagcctcctccaaatggccatgtaatggtcgaatgttactggccacctggtcttaccctggccagcccgatccaccagttatctactcttatacatctggtctacagtgactaagaggtaaataaaatcttgctagcaggatcccttgacaaaagggaaagacaagagaccaagccaactcaaagtagcatggttggccacaaagattttccaaacccttcaacaaataaattgaggaaagaaattctttgtaagaggtttactccctaaagaatattccttgataacaaagatcctgcaccaagcatgttcgaaccaaattgagaaggtctgcaccatgttacaagatagcagtaaaggtgtatataagtctaacgagtacaatgagaacatggagttggaacttctacccaaacactgaaatggggaacatctcggtaagtactctcactagccaacttgtcaattagttcctctaacgtttcatcatgtaaaaacccataaaagagctagtacccattattttttagtatggccgttgtgtggtaagccgcgttggggtagccattacgtgatttcagaagcagacactaagctgtaagcttttgttacatgcaagaccaactatgtctaaaccactttctaacaaagattaacttcttaaagttattctttcagttccacatgcgtacaatgggtagcaccccaagaaaagtcccaggcaggtctgcgaaacttggtgaatagcaagtgaccaagacacctaagtattcatggttacttaggaggcacccacagcatacaatgcatcgaactaccacaaataacttatgaagagaaattttaacgcttagaataagctactaaacttgcctctaagtcgtgcaggcatactttggcttgacaaagtaaatccagacccttacatgttaaggccataagaagatagccaggatgatcatatttgcgtcataaaacgctttaaggctaaataatagtagtgtttaaaaattgagggcctataggccaaagcaagaacatgaaagccttgaggccgaatatgaaatcagttcacaagcatgaggccaaggccctggaaaaatcatatagccagaaaataactggtggagctcctttaggggccacgtatcgggctatgactaaggaagagttccttggaagttccaagctatattcagtcttaagttgaacattcgactataatatacttaccattaagtttcatacaaagtttccaaggaaaccacgtatgagactaaggttgtatatgttgggttttgtgccctatataaattttaattatatctgatttactaattaataaaagatcagaaatcattttctgttacatggttcacatgattgctttcatgattatatgtttaatgtataaattctattaaatccaaaacatagagttattcatgattatagtgttgtcaacacagtggaatataattatgattatatatttcaaagtttatgtcctatgattcgtcagtacacttgatttacactcacatgataatcagtgataaagcttacttacaccttagatacgtgctatgtcctttctaaagcattggtaaagtatgttaggatcagatgtatagagtatacatcagactggaccgatnnnnnnnnnnnnnnngatatcataaacttactattatatctatctaagtcaatatcagttagtggatcttaggtcaatagatcttaatcttgatatggttatgttcgatctcaattgtgtcatttatgttcttagagttgttcattaaagctcgcatgacctaatacttacgtattgggaatatgataatataattgagtgggagnnnnnnnnnnnnnnnnnnnnnnnnnaacttctataagtatttagaagtaaaacgatgat

SEQ ID NO: 116691 - DNA, 1626 bp, Cannabis sativa
  modified_base (27)..(29): a, c, t, g, unknown or other
acccatctaatgtaccacggaatacannncgtgaaagtacatcacgggacaatcatatcccagtaattttaatatcatttattacataaaaatatgtgggatacattaatattgaattgcactaataacagcatttcacctctcataatacttgacactttaatgtgtctggtaccttttcttctttgtattattgttaagtcgttcctcacacacgtattgttgagaatataaaggataattgttagttgtaatggttaatctgttataagagtcttagttagttaaagttagttatggttgttagctagcttaacaagtgatctttattaatatctcttctttgtattttgtaagaacaaaacaatcaataatggaatacagtttctttcttaatcttctctcctctctgcttcacatgtctcaagttggtattagagctcaagttgcaaatcaatggcgtcctcatctcaagccatggccaaccaatcgattgtccgaacaacgatgtttgctcctcccctcaactcaatcgcaacaatcacttcttttggaggtcacaagttctcccaagtaatcatggctcatgatctcgagggaatactactaaatcaaaattggtctcagccaagaatccgtgaagctttagagtccacaaaaatggtgagtaaatctgaattcaatagatggatgtgtgtacgtagattaacttaaaaaggctctttatggactaagacaggcacctagagtctggtatgacaaactcgaaaatactctcatatcttggattttcaccaactctgtttcagatagcagcctattctttgataatcacaatatgtcttctatttattctagtcgatctatgtagatgatatattaattacaagtgctaacacagtaactatccacaaagtcatttaatgatcttcaaaacaagtttgcactcaacacccttggtctagtgagctattttctcgtcttacaagcaatcaaaattggtaatacaatttctttatttcaaactcaatatgcccttgatattggacacttcaaaaccatgcaccactccaatgtgtcctggctacaagttgtatacttctaatagtgaaccattctaggacccaactctataccgaagcacaattggctccctatagtacctcactatgacaaggcctgacttagccttttcagtaaataaacttagctagttcatgcaaaatccatctattgctcactggaatgcgtgtaaaagggtactcagatacatcaagggaactttacacctaggacttgtattcaaaccaacaagacatctaactctgcaagccttttcaaatgcagattgggcgtgtagtttggatgacagaaaatcaataacatgatcagtggctagatctagtactgaattcgaatacaggtccttatctacaactgctacagaaatagtctagacacaatctcttttaaataaacttggtatcactacgatgggtaaactattatttggtatgacaatgaaggagcacaatagcttgcctctaatcatgtctttcattccaggactaaacatatactgaagtaagggctcgtttggaacaccgtattaggtcgtattgtatt

SEQ ID NO: 116692 - DNA, 2977 bp, Cannabis sativa
cgtacgtagcgttctgacaaaacaaggtaacgacatacaaatatctaacagctctttgccggcgctatattcacagagttgttattaaatccttccattacacttctaaattctaacggtcacagagtttttttttatgtatatatttatatttttacccctataaatttaatttttattatagttttgccatcacatattataattttgtccatataaatttatatatattttttatctttacatattttacttgctctcatatatttactctagtctctataaaattaatttatatttttctttataataaaaataacatttttttataagtgtaatttttatcaaaaaaataaaataaaattgcccccctattatttgtgactggctccgccactgtctagaggtgctaggcactattggtagcaatattctttcgattgtattttcttttatttttttgtatttttcggtaactattaattaataactaattacttttctgtttatttgaccaaaaactaaaaaaaaaaaaaagtttcatcagttgaattagaaaaactaaaaaattaaaatttttaccgatatatatacacgcacacataaaatatatttgttaggttgtttttagtattttaagttaatttttaatgtgtttttaatttagttctactcttgtttagagcaattttacgcttttcatcttttatttttgcaaatttaaaatagaagaagattagaaaatattaaaggaataagatggaaaaaaaaagataaaaagatctcagaaataaataatcttgaaaatagagaaaattgagcgaaaaaataaatttgaaacttcaagcctgaattcgactatattctgattagattttggaaaaattcaaaacataaaagttctagatctctctttcatctttccagatcatcttgaatcgtccgattcctagcaatatcgaaagagttatggccaaaatacgatcagttgatgcaacagaaaactcactgcccaaataaaggggggcgcgcctaggcatggaaattatgcgtcgtgacggccccatctaatcctaagtaaaataggtttttttagcattttttttatcttttttagcattttttgactatataaatttgtatatttttttatttttgtcttcacatattttcatatttaatattctcatatatctattctagtctccataaaatttatatttttttataataaaaataatatttttttataagtgtaatttttatcaaaaaaaaaaattccctcctaatatttgtggctggctccgccactatctagaggtgctagatattggtgcccaatttatagcaatactctttcgattgtgttttattttatatttttggactgttcggtaactattaattaataactaattacttttctgtttatttaaccaaaaactaaaaaaaatcatcggttgaatcagaaaaactaaaaattaaaatttttaccgatatttatacacacacgtaaaatacattctaatagcatacataacctccatcaattaaataagattatataacgtgacacatcagcaccatatatcgtaatataaaaaaaatgattatcgaaatcaaaaacgaaaattgtcatttcgcaccaggaacacaacatctcctccattaattacgacagtaggactttgaatcagcgcatgaaacataaaccaagatggaaacttataaatttacttctccacaataaatcaccaatccaaaaccattttctttcaaaaaactacattaacaattaaaaaaaaatcattcacaaaataacaaaagatcaatcatgagtttagcaccaaaatcgttcatcaaactatctacaatatacttgaaaaattagagacgaaatcattgctaaataaatgaacaatcaacacttaaaaaaaaaattgatccaaaacttcatcagataaactctattaaaaccgataaaaaaaaaaattcaatcgtgaaccaaaaattacaacaaagcggcaaatcaactaaacagtcgacacacgattaaaaatctaaaacaaaaaagcaactttacatttcgcattgtgatcgacaattactaaattgtcattatcatcgtcaatgcttcatctttattgttcttctgatcactataatcccatgaccaaaagtttcaaacatgtaattttgaaattcattaatatacaaactgactagtataggaaacaataaaattgattaatatattttttaaaaataatacaatcttctcaatataacattattaatttgcaaatacaatattttttgaaacatcatatctggaaagaaaactttttacttacgttatgttgaataaaatatttaaccttcccataaattaaaagtgttgcacagtactacaatcatcatgtataattaactattcactaataaacaaatgcatatataaaattataattgtatatttttatttatgaaaagtatacatttattgatcaattatgaagattaaaaatgataatgtgttgaaataaaatcccatattaactatacactgtaaaataaaccagtacatttacaaagagtttacaatggcagtaaaaattcttatgtggcctcaggcctctatttacctagacaggttattaagttagttaataaaatttgttaaaactttattaataactctcctgtattcttctacaacagatataaaaggcaaaaaaaataatctcaatcagaacaaaacagcaagagagattcaacacagcagagatcagtacaaagacatcaacacagaaattaaaaaagcagaacaacacaagtaaaaacagatctggtttttcacaaggggaaccgactggttttttggggcttcttggaagaggcttacaatggtgtaagctttggaaccaaggtggtggttcggagatccaatagccaggggtgttgttcatgcattaaa

SEQ ID NO: 116693 - DNA, 2756 bp, Cannabis sativa
  modified_base (35)..(45): a, c, t, g, unknown or other
tttagggtgttaattaacatacttgtgagtagatnnnnnnnnnnngtaaaataatttccaacagttgctagctaagttggcctgtggctactgagattgtcctgtaccactgctgctattgtttgctcctgcctgtgagcttgtaaagttcttatcaaattgataaaaataatcatgggcagtatgaccgaaccttaaacacagttgacattggactctattgttcaaattaactccagatctgccaccacgattcagatggaaattgcctctaccagaaccttgtccattcatgtaaccttgctcatttccacaatttcctctgtttccaaactgattggcaaattgattgccaaaatttcctgcaccacggccatactgatgtttgaatcttctccaagcaagattcgcttccatcatagaatcttgatcatctgtcactatgttggcactgaggtccaattctttccctgatttctcgattcttgattcagatgcaaggagaagagcctcaatttcccctacagtgtactcttcaactcgagtattggtcgaaatgacaaacgtgtcatactcgctcgggagtcccttgaatatagcagccacatgattacgatcacttaaagtttcacccacggatgcaagcaaatcaacattctgcttgacttttaagaggtaatcattgagactcaaagttcctttcttgagattctgaagtttcgttcgaaactccagaatcttggatgaaacctgcagagtaaaatgcttttccaaagttgtccagatctgctcggtcatggaggacagcaaccacgacaccagtaattgatcttgcacctcccaatctatgaagatctagttcactctgttatgagcgcgatcatcctcggtaagaaattcagctggaggaggttccttgatgaatttcaaaagtcgatttcctctaatgacagcaagcacttgttgtttccaaaggaggaaattgtgatcgtttagacgaatagagatgctatgattaaagtacactggttctgcagaagattgagatctggtttgagctccattgaagctcgatccgttgttgttgattccagcagctacaacagtggccatgttagcattgaacgtaggaaaatgctctgataccatgttaaacctacaatccataacataacagaaagaacagcaagaaagaacaacaagaacgaaagaccagagaaagagaaaagacagatagaaagaaaatggagaagaaagaatctcattgattgaagagttgattacagcatatatacaatgagccaagctcaataaccaactaacaaccaaaggagaatcgactaacaaccaggacagctggcaaggaaaataacagaacaaacagttggaaatataacagactaactaactcctttaacatagagcatggacataataataggcatacctaattttgatatttatttccaatgataatgttgattacacttttttgatatacacatatggagaaaagagagctcggatgtgatgaacaatgctctttcattctctctacgccatagccacacccattccaccttaatcccaatcaagagcacaacttttttctttataaggaattatgggtcaattggagctacatgcccaatgtgagaaaatagttgtcatgactcaatgggttgactaaagacgttttagagcatgtccatgagcctcgagcgtattagtacgttatatctatctcattatggcccaataataataccatgcattaccaattatacaattattatatattaatactgacatggagtgaacaacaattaattattgtagtctacataaaatattctaacatcaaactgtagtgtagcggtgagcgtgaattttaaattgaaatgaatgcataatattgggtgttggcaaagttgaacagctgcatggaccatatcgtttgttatctatatgcttggaagaaagaaaaaatagtattaaaatctttaaaatgcacagctcattgcctatcaatcctatcctatcatatacttcaatttcatgatggggactaccatatgctattttaacttttagcataatcttgtgatcagctttaattaaatgttgaacttgaagatccttgtcttgttttatgatttgtacatatgtgttgcagaaaaatcacaaatttttatacgtagcgagaattgatcagaaactatcacctaatttaatatatctatccagctaaagaaaccattatttttaagggcttgaaatcatttagtctttgctttcatgagtctttagtctatactttgtagaattttgataagtttgcattggtgttttatattaatgtaatgtgtgggttttggttgcttaatcaacaaagtattacgtagaagagtaagcaatcttttttaatagaccatatatgaacacaaatcctataagtcaaatggaaaaggcatcattaggaagaaacaactaaaaacttatactattttttttacaaaagaaagaaacatgcaaaatgttggacttcactaataaaaacaggaatggggcctacaaaaggagtaggcatgaatgaacaagaaaaaagcaaggtgtggtttaaagaaaaaaaattggattgataagctgtacaagtggactattgtgtaactagactattgtgtaaagttctcattaattttttgaaaatttacactatatactattttttttttcaaatttattatatttatatt

SEQ ID NO: 116694 - DNA, 3942 bp, Cannabis sativa
ttactccaggataaaggacgatccaagtctattcttgtacatccgagcaattaaatattaaaaggaaatttatttgattttttttagaactcatacaggcagaaatattttctttaatacattgctattacattgcctatattattgattttttaaatagttgcataacagttaatttaaagttgtatgagatagcataaatattaacagaaacgtaaagcgttagcaacattatatttgacatgttaatatgaagttctaaaaactttcttattaaattgactaaacggttgaatcttaaacagttgctcaacagttgattaatagttgtataacatgtgttatacataaaatattaatgtaaaagattcaagtaatttctccaaccacattcctagatcaataattagacagattgcataataattatttcatagttgaaccaacattatatatatcggcataatcgagaaatatgtacaaatacataagtagaaaaatagcatataataccttgtctcaaacaaatatagtaaaatccgtatagtatagatttttgagtggtttgtttaacaccgcaaaacacaactatcaataatttagtttttggttaaattctttttattacaatcccccatacaatccaaagtgataatcaaagtgaactcttcaacactaaaacaaatgcaacgactagcaatgttcgcccaaaattttcttgcattggactgttgcacctctcttaaaagaataccatgaaccacttgagggtagagtttatacaatgaaatgtctacaaatttaccaaattgagtagcacaaaacaaagccttgacatttcttggaagcgtgacattgagcttctcaatgacactgtaagtgcaagtgcagccactttcgatttataataatcagattcagcggacttgtattctcattcctgaaatcaaacaataaaaatgtcaaagaaagaaaatagcaaatacaatgtaaaaaaaattacaatacaactattagtaaactattaacaaataactccatactaaacctaaacctaaaacaacacaaatatatattacaaaataaagtctaaaatgaatggaaaaaaatataacaatgaacaactatttatgtcgaaaaaaataaaaaataacataattttaataatattctaaatcagtaaatatagcactaatataacaataaaacaaataaaatatatgaaactctagaaccaattacatgtaaaaaaaaaaacttaaaagaaccgaggcaaaatttctaaataagggaaaaatgtaaaagaaactaaaacgaaaccttaagcacttcatcgacattcttcttccccttcttaaattctagtagagaactcttatcaccttcattcctcttcaacttcttcttgaaatgacgacatgatgttttgaaactggtattggatccaaaaccaacccatatgaccattgcttctgatagctccgaaaacccaccctaacctattgaaacccatcaagaccccctcaccagatccccaaacatccaatcgtcacacaacctaaccacccaaaccaccaacactcctgccaaacccctataaaacgatttgtgacatgttctcgaagaacaagaatactcaaccaggtcaccatcacaactacggtaggatttccaacaatcaaaacaactgtaagccaacacacgaaaaccaccacgaaatatagagcatagaagttggatccgcctaacaagccatagaattcacgaaagtagaggttgaactaagaaggaccatcatctatgactgtctcacattgcataaacattaccctccctgaccatagccacacccaagcccaaaaatatgttggcgagccctggccggagagggagctggaagatcaagaagtcgacagcagaggaataacctatcgctagagagaaaaccctagactatttttgtctatttaaatgtaaatgttttactttttgatttcttcaaaaatataatatgctggatggaaaaattaaaaacataaacactcccaaattttgtaaatttttcatttgtgaaagtacattaatttgcaaaattaacttatttttttattagttagaatcatcattttctataagcaaattgattttcaaatttaatttatcttttattcacttgttagtattttgataaatcatcttttaagtaaccattgacaaataggaagtgatccataaatatattcttaaaaaaagaatcaaatcaattgatgtttgagataaagtactcaagtactcatcaacaatattttgtttctcttttctgatacggcctaatatgatgctatagtaagctataaatatttattgagtaccttaggttccaaaaattaaaaaataattgtaagtaatatttcttccaaaactttggtgcctgatgagcaacaacctcaaagtaatcgctttaaggggaaataaaataataaaacctcaaaatcattctcttaaaaaactatccattattggggttaagaagtgatgatgtcaaggtgggagagaataaacacaatttggtccacccaataaagttaagagagccattatcattcaaaatatataaataaacaaattgatggtcctaaaggagttgggacttgggttgagggcctcgtttttcctttttcttttcttttttgttgctatgataggagactcatatgaaacaatgaagtgaccccaaataagggttttagatcaagtagggtctttaatttatgtcttttccacaaacacatagtgtgcatttcattaattgcgattcatgttagatcaaactcatcataaatgctcatagggtggtccaacacaaccaaattcttcaatttaattaacccttacccactcactcttattatatgggttgctccttgaagagagagatttcaaaggaatcaaaaatcaacatgtttcttttatgtttttaagctttaaacttgttttgaattggtaaatttgaggatgttatgacatgtttactaaactgtaactaaaattaataaatataagaaattaatgaatttaaaatataatataattgaagataatattttataatgttatttattaaactagtaggaattgaggtgagaattatatatatttttttatttacataactaaatggtaatcaaaatcttttaatttgactgaattgttgttattgatagaatttttttttctaatttttgaagagtatatttatctttttttatttttaattaataaaaataatataaattaccaagtaaataatattctttataaaaattgggaagaattttctttccttttttttttctccctagttttaatttatgtagactctactagtttctcatattacaaaatttaataaacaaataaattagaatcaatatcatataattaattctctttcccttacagtaagtctgagtcaaggttcacgtcaacatccaagtccgagttaaggttcacgtcaacatccaggtccgagttaaggttcgaacgttaggttcccaatcctaaactctttctaaatattataatacatgctaatacaaattagttgttatgtaaaaagtaacatggttcacattgtataaaaatttatggtcatagtaattaatataaaataaaagtttatccaaacatagtatttgttgttatttaatgcaataccgctcttatatgacctaccaaatctatatatatctataaaggatctatatatatctataaaggagaagtataaaagagtgacatggcattctaaaaacgttataaaattatttttctctcttctccttaattctctcatattattaattttttaataagtgcatatttattaattagattaatttaaatttctctccttgatttactattttttttttattttta

SEQ ID NO: 116695 - DNA, 2107 bp, Cannabis sativa
  modified_base (2068)..(2069): a, c, t, g, unknown or other
ttatgtaaaaatatttttaaatgtgtacattgtaacaattaatttttttttgcacattttttgtaattaattaagaaaatgtatacatttatgtaaaatccccaaatattatttattagttgatgttactaattatcactgttgtctttaaaaattatattaatagtttattttttagttaattttttttatacatattctatataattataaaattagaaattagatttattatttattgtaaaaaaaataagaaaatgtaataaatttttttaaaaaaatatgaaacaatatatttattataaaaagtaagataaaatgtacctttttatccgagttcttttataacaagtaggataaaaagtatctttttatcacacctttctcataaaaactgggatattatgagaaaatttgggtaaaatagtacttttttatcctgatttttataaaaagtaccttttttattctgatttttgaaagaacttttattctactgtcatatatctcggttattattttagcaaaaatcgtgataaaataccttaaaagtgagattaaaggcctttgcttgtactagtaaagaaataaaatagcagccttagcaaaattatgggtcactaaattagcagatcgtttaaaaaaaaaaatatttgggaaagtaacaaacaaatttttacaatcttaaatgactaaacaaagaaagaaatcatataatatacaacaaataggcatacccaatataatacaccactttctttcactttactttcctttactcacaaataaaaaaattaacaagaaatgaaaggtattttaaatttttttggtctatttaggagtttttccatgaattatgatttctgtattattgtactctttgaacttttcaggctattaaaaatagtccctaaactattcacaatattataaatttgtcattctatcaagttttgttagacgtgacaaagaaaataataacatagatgcttagccaattactacgtgagtgtcatgtcaatgtcatgtgtgtaattgatttgcaaaaaataatttaattttttaatttaattttacgtaattcgtttaatcattaattaatttttaatttaataattttttaaaaaagcataatttttatttttttaatcttaaattatacacgttacattgatgtgataattgactaaataatcatgttattattttatttgccacgtgtgacaaaacatgacagaaaaactaatttacaatattgtgaatagttcagaaactatttgtaaccgggtgaaaaatttaaaagacacaataatgcatatcatagtttgagaagaaaaatcatagatagcttaatttttttgtctttaatattaaaaaacacaaatgattattaaatacatttttatttttaaaaaaagggcaatgcatttttaattctgtggttaaataaattcaaaaattaatattttactgaacacaccaccaaacacctttttttatttttttgttttaaaaaagacaggaaagcatcttctgtattaaataatatttcaatgaatatacaacaataacacccactattaatattaaaaacaaaaaacaaacttttaatatgaaaatatatagttccactttttaaatttaatttttctttcgattgacctattgtcaatgaagattctcatttacctccaaaatatatttatattgatattaacttccaagttcattatcttatatttttaaaaaaaataaaaagaataatcataagtgttcgcagtgcggatgatacagatttagactattttcttaaactaaaccgtatatatagtttttgtaattttttaaaccgcaatcacaccataagatcttaaaactgcaaaatatcacaccgcaaaaatggggtgcaatttaggcggtttactctatcatcattatcaaacattaaaataaaaaattaaaaaattagtctactaaagtttgaacaattaaaaaaaaaatatttatatactaatcaagttattgtattgatttctctttaaaaaattatataatatacatatatatnnatattatatattatatatatatatctattctatatgtg

SEQ ID NO: 116696 - DNA, 2786 bp, Cannabis sativa
agaatatgaattagaagaaaaaagttaaaaatatttagtacaattaaagatataaattttatataattaaaataaaaattattaaaataaaatatctttgaaaaatttttgggtgttaataattttttttttttttatatgcaaagaaatattatagtatttctcaattaaaagaaaacttgaacacgaaattaatattaaaaatatatcatatttctcggaagaaacatgtcaatttagtttataatttaagttgagaaatcatataatataaaattataacatttctttattagctcaatcaatgagaggaactgccctacataccattccttcctgaagccggtaggaggcttaatcattcaccttttttatttgaaaaatacataaatgtatatgtaattttttacttttggatatattgggtcatgagaatcatgagacataaatatttaacacaattagagagaaagaaatgataaagtgtgaatgtacatggaagacgtggccctgtaagcatcacaaatgtataaattggatataagtcacaaatttgggtggttgtattgtaacttgtaatgctaaagccacacgacacaataataattaaattaatctctaaaattattatatacggtacgtattattatgggaatacaatatccaataatagaagatagactttctttttaaattaaagaacacacacaacacaactacatacataaaacttttatttgttatctttttacgtatatataagagaaaatacaatatcaaaacataaattaagttttcttgaagtatttcctgaatagtatcttatcagctcagtttactttatggccgtcctgtttctcgatcgtaagttcattttatgttgtttttagcttttagaataaaaaaaaattatcaagagtaactgggtaagaaataaaatatcatttttgaaagaaatattttatttataccctaaaaatttattagtgcattctattttaataatcttaattttacataaaatatatatataaatatattaatttcttttttatttttttttcttccaactcatatatcttcctaaaaagtatatctattaaataaaaattaatgatattttaaatattataacaaaaaaataaaataaaataattctattaaattttattagaaaaaaaaaaagatataaatgatttaaaatatatataaaaaaataaaattaaaattaacacaaaataatgtaagaaaaaaattcttaaaaaaatattataatagaattttaaaaattattttaagattaattttttaaaatattaaagtgtatttttcatttcgtgaaatgcaaaaatataacttttttttaattggaagatctattaatttgtaaacctaaaaatcgtgagttctaattttcgtcatttttttgagaaattataagtgcaagtaaaaattatgttttaaagttatgagtagattaaaaaagctaacaagcaaatgacacaaaataattgggctcgtttggtaggccgtataaaagtagtattgtattaaataataagtaacactatatttagataaagcaatctattgtattaattatcatgactaaaaattttaatacaatgtaagttgtattatttaatacataataaatagtccgtattagtttgtattataatatttacaaaggactcgaagcaggtttaggactatatccgagatctcggacccgtagtcagtgttggggacgaatttattgaaagtatattataactttatacaacttattaataaaaattaatactaaatataatattaaataatactaatattaatacaatacaacacaacataatatggtgtactaaacaaacccttaaagtgtttgcaacacctctcagagtaagtccaatagtggagtgagatgggcggttgacctaagcctcctaccctagttattcaaatcgtttttaagaagaaaagtatatctattgagtaaatatcattttggaccttgtattttgcaaaaattatcaattggaccctctattttgttaaatgacaaaatgaaccctatatttttcaaaaaagtaaaactaggaccctgagctcaattttaaacatttttttttaatataaccaactttaaaataatttttaacacgaacaaatacagaaaatgtaaccagttttatcataacatctctacattagattattattaagttttattttgataaaaagtcattccagggtcctattgtacaattttagaaaatacaaggtctattttgttatttaacaaaacagatggtccaatccaatttgtaacttttacaaaacacagggtccattatagtatttatcctaatttatttttcaaaagtattgtattttagatatatgccactatttaaattacaattcatttcttcaaaaaggccaaatttatttttaaaaaataatgctgctacatttaaatttttttcttcaaagaaagacaacgacaactagtttttcaaaaatatcatattttttatttttactaacatatacccaaaaagaaaaaaaaaacacacagatttttctttcaaaaaagcacagttaaatttttttgacccaagaccccaattatcttgggtagtcctaactaaatcttattcatttgttgtatattttttcagaaattatattgtatacccactttattttatttgttataatttgtactttaatttttatattctttaatatatacatacttttatagatgatgttcccat

SEQ ID NO: 116697 - DNA, 1587 bp, Cannabis sativa
ctattcgaaattgacatttagaggcgatttttttataaaaactttaggtatagaattgcattatactatttagagtcggttatatgaaattgcattatgtaaacgacattgggtttatttaagaaatgaccctatggcgtcagttcatatatatattaagaaccgacgacatagggtacacgtgtatgttgacatggaactattcaaacttttcaagtgctcaaatcatcccaaagattttactccacaatttttcccattaccatctctaaaactttttggggaccattaaagtaagaaaaatactaagggctaatttggaacgttttattaggtcttattgtattgtattgtattatattgaattgtattatatattatatttttatagaatactatattaaattttaatttatactaaaatattatatatttatagctgtccataaaaatattgcatgaaatacaatttaatataatacaatacaatacgacgtaataaccgaaacctaaaaagcatcatgtcttataatttaatataatatttataaaatattaataaccaatcataactactattgcctaatatcaatgcactaaaataaaccttgcacctaccttgaacgatcttctacggtaataagaacactgtgctatggctctttcaagtgttctccaccttccaaagagagtgtcatccaaaactgtgtctgtgcgccattatcaactttttttctcctctatttttacttttaattcattctttcaaaactgatctgggatgatgaaaaagtggacataattcaattatagaattaatgattgtcttctaatactgaaaagattactgtaaagagcaatgatgagcctgaggggaccgtcatatttgttgagaagaagctttcaagtatatttattatacttaatacttttttatcacagatagtgacatggaccaataattttcccaaaccaaccaacatatttgagatcaagaaagaatgtatgatgagctatggtcatgcttgatggtctatcgatcaattggaggatcgggaatttagtctctgcatgtttgtctatgtttctcgaaactatgttttattattattattatttttataaaaaaaaaaattgtgaagtattaaaaaagaaaaagaaaaagaaaactatcatatttgcattgctattttgttgtattcaacacaaaatgaatctggcgccccataatcacctcatgatggaatgtgtgagacataataatatgacactatttgttatacttgacactttaactatctctaatacaagatgttaatatatgtcattttaaatttggcacaaaaaatacaaagtattatatttactccagaatttatatgcataatagtatcttaagaagcaaattataaaaaataaaatacattattaaaaagaattgaatattcaaaaacaaattattagtgacaatattgtcaaaattttgtgttaatgcctataattaataatttatggcaaaactatggtactgtttagtaacactattgttttctaattttttaatcacaaaatgaagataaaattttt

SEQ ID NO: 116698 - DNA, 1579 bp, Cannabis sativa
ataaaaattataattaatttatttattaagatagaatgcatatatacacatatttaatttaaatacttataatacatgtttaggctctttcacattttcatatttctacatttgacacatatataaattgtaattaattaatattatatatcattaaattaataactccacattacttttaaaagttaaaatcactaaaagttactagtaatgctatatactatgttcggtgtttgagaagaaagctacatcttattagtaattgtgtttgatattttgagacactttaattgttgcttttattttagaattatttataccacgtattaaaatttttaaattttttactttttttttttatgtggggtgggattttttttaaaacaatactgtgtactttgttaattttttgttgttattctacggttattttttagttgttccactgttgtttttagttattctgttttgtattccacagttattttataaagacacaatatttttttaaaaaaaaatcgtgtcacagtatttttataaaaattaatcttaattctagtatttttataagtatccctttattttattagctactttaatatttaataattctgttgtatactataattgtaaagctgatggttttatgtagtactattaaacttaaataattaatatgtttaatttttatgtgatttttcgtatttgtttaagttaatagtaaaacttacattctaaaccaaaagtccaattaaaaaaaattaattaaattacaaattggatttaattttgtcacttaaatggattagattagaagattattttttctttaaatctaattactatttatcttggatttgagtataaaaaagttgaatttaattagattaatataaaaaacttagaaactaaaaatattgtaaatattgtaaaaaaccgggcgaagtgaggcttgattctcttgtatttttataatatgttttgtttcaaatagaatttctaagagagtagggtcgttatgataaaatgcatagtctaaaattcttttagtaactaaagctattttggtcatattattgaacattttaactttaatatggtcatcattataatctcttaaaaaaacaatttgtaaaattgatattttttttttttaaaaaaagtgtacaatccaaactattaattgactaaaacataagttttaaaatagttggaactctcataaaaattgtttaaatgaccatattttcgtaattttcatttgaatcccttagcccaaacctaaaaagtataacagaggcataaaatgttacatggactcttccactttgtgaggcccatgatgataaggaatatagttttcggaaatccacatgtagtgttcacttttccgaaggttggtaaccactccactttcctactgaaatttgcttttccaccttctcaccttatcattgctattaaaagattataaggccaaatatattgaggtaagttgaaaaattaccccttttattaattaattaattaaatttatctctaattttatatttatttgaaacatatatttttttatatg

SEQ ID NO: 116699 - DNA, 2985 bp, Cannabis sativa
caaacaacttcttcggctgtgggggaaccttttctcagtaatttcattattgaagaagacactaatgagatgcttactctagtcccaacggaatcagaaattcttctttgcctcaaatctatggggcatgacaaagcgccgggcccagatggtatgtcggtgggattctatcttcaccattagagtgtgatcaaacaggactttgtgaaaatggtgacctattttttcaggaatgcggatctcccctcattcattaacaacacaaacctggttcttatcctgaagaaggactgtcctactagtgtaagtgattatagacccatagctctttgtaatgtagcgtacaagtgcatctctaagctcttggcgttgtgattgaagcctctgctgccctccatcatctcaccggcccagtcggcttttgttcatgggagatttattgcggagaatacagttgtggctagagagattgttcattccatgagaagcaagaagggaaagaaggggttcatgatgataaagttggacatggagaaagcgtatgataaaatggattggggatttattcttaatacgttgaaaggtttgggtttccatcctaatttggtgaagtgggttgagaagtgtattgccattcatcagatgggattgcttataaatggatctgttcaaggcacaatcaagccaacttgtggtctccgtcagggagaccccctatccccggcccttttcattattgttgcggatgtcttatccagattaataacaacaagaatgttcgaggggcacatacaaggtttcaaggtttccagagatggtccgtccattacacatctgatgtttgctgacgatgtaattttatttgggaaagcttcagtcaaggaagctaaaggtttccttaaatgccttgaggattactgctcttggtcggaacaagcggtcaactatcaaaagtcaacagtgttcttctccaagggggttacatcggggcttgcgggggagattgtggggattctaaacatgaaaaggatgaagaacgatgcaacctacctaggcctccctctcttcagatccctaaacaggtcaagggaccttcggttcttggttgatagggcattgcaaagggttaggagttgaaagactaggctcttttcaaaagcagggaaaacttgcatgatccaatcggttggctccactttggcatcttatgtcgcggctactgaaccgattccactgaatattgcaagaaaagtagacaagtgtctcagagatttctggtgggggaacactgatgagaagcgtaaactacatcttcttgcgtgggattccttatgtcagtcaaaactcagtggagggctgggatttaggagtgttgaagcggtgaataaggccttcatgactaaatgggcatggaaaactttgactgataataccagtacgtggagtaaggtggtacaagctaagtactaaaagggaagaaacttcttgaatcttgaaaaacaagtaggcaaatcggggatgtggaaatctatcttggactcccggggagtgcttgagaaaggcatgtgtaggaaaattgggaatggggaatcaacatcaatttggttcgatccttgggtcccttctttgaaccgcacccccattcccctgaaggatgtctcacatggagtggcatgggtccatcaattcttaaatccaaacaacacttggaatgtttgaatggtgaaagagtggtttggaaaagaagatgctcaagctatcctgaatatcgaccttcctaacgataagattgacgactcatggataatgagatgttctcaataaaatctgcctatcggatcatcaaaggacacgattcgagttatgaggaggatatttggaaactcatttggagttctccaattcactctcggctgaagttcttatggtggcaggtatgtcgggatatccttcccacgaaaggcaaattggcttctattcatcatgatatacaagatatgtgtcctctgtgcaaggaagcctccgagaccactttccatcttttctggacctgtagcttcacgaaagctatttggtttagcattggatgggggattcgtactgagaattgcagatcgttggactggcagaggtggtttgaatggtttagacaagatcataatcgcccaccgaatgttctgtttaatgactggatgattacaaccttgtgcattatggaggtgatctgaagtgaaagaaatagatgggttcacaatgaaagcggcaatgatctcctcggtattctgagactgattagattaaaaatcaaagagcatatgatggtctccaatcacagggtgactgaagttgtgtcttgggcgccccctctagcgtcttgggttagctgtaacactgatgttgtagtttctccgaatggtagcatgctgtcagctgtaattcgcgatgaactagtaaggatcatctcaattacaacctgagatgtgctctttactaatcctctgattgctgaagctaatgctgtgtgcttggcagcagaggttgctctggactcaggtatgcaacgaatattattcctgtgataatctgtgtgtggccaagtcttttgcagcatcggctcactgcaaaggggattttaggatccaagcggctttgacgcggttcaatgaatgttgttccaagttcgaggaatgggatatttcgcacatttcttgtatttgcaactacatggcgcacaacattgctaagtgggtatcgatgcatcaaaaaactgggagaattgagattgaagatatccatggtgctgtgttggatgatttcaaagaatgagatccgggaccagtaattcgtttgtaattttctggttttttagtctgttttagttgggtagttattatcttttatgtattgctgttcttcctctgttggcttttccttttgtttgttttgaactcggcaagcttttgccttttaatgaatgggtgtcct

SEQ ID NO: 116700 - DNA, 830 bp, Cannabis sativa
tatgctgctaaaaataaatattaggttttttctgcttacaaacttaaaacttttagtacttatgccgctatttaccctaatatttatcatgacaactttcttgaaatattcctttagagcaaaagaaaaaaaaaaaaaaagaaactcttagaaataaagtggccttttcattttgtcttaaatattgattggttttaaaagagtttgagattaatttttaataattgtgtaaaaaatttaatatataaatggaatatatatatttgaaaggtaaatagaatttctattaataagtaaattagacatagtttattacatccagatattactcatcgagcagaatcaataataataagctaacaaagccatttacaataatcaagaaaaaaaaatcctaacaatatctttaactaaatgacctataagccgtcagctctgacatatcaaaagaatgcaaaaattgctagatttccatcctgaatgaacatgtaacagatcacacctatcagtggcaatcaaatatagatcttccaataaaaatttggtagagacacccaaattattcaaactagaaaaaacaagaataacatgaaaaaccatgctcaaaattattgatattgaaagtcaaagaatcacaaagcaagatgtcaaatgttaatggagaaaatctcaaaccaacatgtgcatccaaatccaaaaaagattgaagatcaaatagaggtgtaacaacaccattattaaaaataaaaccaaaccaaaacactaacaagaataaatagtggaagaaccaaaaaaaaaaaaaaaaaaaaaaaaaaaaaaatttttaaggg

SEQ ID NO: 116701 - DNA, 2119 bp, Cannabis sativa
catcattgtgtcatctgcactgccatcatccaacaccaactctatcccacacctatacgtgcaaattggtttaatatgggatatgggaccataagctaactgattcaattcaagacttaattaaccatttcgataaacacaacctgagactaaccttattaatccaaaaatgggtaatataaacttcaaatccaataaaaaatccaatgtctgacactcaagatacggttctacaacacatcgttctcgaaaatattttaacaaatcagtcattgattttgaaacacacaatctttttatgcaaagttttagaaaactgtatttattcaattaaaaaaaaaaaaatgttacttacggtagtcactgtaccattagttaaaattcaattttgtgtttttgaatatattcattacatttgaaaaaagaaaaagaaaaaagaatgatcctttaaatatttaagaggcatttgattaaatgggtattaaaatgactaatacgcagttcatttagagttaaaaaaaattagttaacccaaactctcaacattttcaaaaagtgagccattaaattctctttaaccactataccatcgaaaaacaataaacacaaaaacatcaccaaacatagtagtttacaaatacccaaaaatgaagcacttgaaaacacaacaaatttaaaaactaaagcaacagcgcatcagcaacaagaagagacaagcccagggcactagcctccctaacactagatctataacgagaaccttcggccaccccagcaaatgaaacaagccccatcgttgagacaacgagaaaagatccatccacccacttctacatacccaacccctagctagatcaaatgcattgccaatttgccatcaaacaactacctcatagggttttaataattgaataaatattacgttaggtgtgattttattttagaaaaaaaaaataaataaataaattaaaaactacctcgccagaacccagctaccacaaccattggagtagaatgcaaccactctaagaatccccttggaccacctaaaatacatacacggctatccataaccaccaacctccgacaactctcagccagaggaagcccgaacacccaaccagacaaacaatgtgtcgacccttagataaagagaagaaaaaatgtagaaggacaacccctatggcgctaaaacagcggaaatttcgcagctctgcgtgcctatctatttccaaccaagcaacgttattggaaattatagagattacggtattagtttagtccaatgaatatgtttcgattgtcttatattatataacactgacaattatgtttttctatcgacaaatgaaaagatctctactctgaattgagaagtgaagatgctttcaccaattacaatggttcaataatccattaaaaaataggagatccaatttcttttgttataaacgcaagccatttgagttcaaaatatggccaactaataaccacaaatggaaagatattcagccagctggcaggtataaagccttttctctatacagacacataacaaaagtactccgacaatgttaaggccgatcctaatagcacatatccaataattgcacacgtatattatatgaacaattgcatcagaataatacgaatatcaagcattgtaaatttaaaacaaatattatccacgaagatcaatgacatcgaaatttagattagggttcatgtaaatatctgtacatgtcttataaagaggcccaccatccgcaggcggattatgtggatgaaaaccacgttgctggcagtgtctaatgacagacatcccaccgggagttgtcaaccgaaagataccatgctttctgtacaagtaaaaataaaaataaaatttaatgagtaaatacattgagcaaataatggaactgcagtcaaaaccaaaagtatctagccaagtagcaacgctttaagctggtctttcttacctcgtagaatctctgggtgccatgacaattgcaactgattccggcaacattatctacatggaaattattattattattattataatcgtagaatacgtttcagtaaaagaaaagaaaaatggttatttaaaaaaaaaaaa

SEQ ID NO: 116702 - DNA, 3218 bp, Cannabis sativa
  modified_base (3185)..(3191): a, c, t, g, unknown or other
tagtttagggggcatttttaacgacctcaaaagttcaaggagcatgatttggtacatgtcaaagtttaggggacaaaattactaattagccttaatatttatcttgtttcctttcaaaaaaaaaaaaatattagaagaaaaaatattttaaaaactaatataaatatatatatacacataatttgtcctcggttttatttagatctggtcgaatctgacccttcaaaaatcctatggggtgaagtggagaaaattttaacaagtcggagcccatatttttatattgtgatttggatttcatttaattttttatatttttatatttttagttttgcaatttatgtattcttttatttgaattttcaacaatacaaataataattaatgcttgaagggaagaaacgtcattaatttgtaatgatatagcccaaaaaatggaaaagatgacgaaacttgtcgattgaaaattgagacgtactcaaaaaatctcatattatatataaattaatattttcttattttttcggaagatgatatcatacataattatatatgagcatgattaatttacgatatatatcctatgagaggcaatataatatataaaataaaattaatatctatatatatatatcttcttcgaacgtacaaataatgtaatattatatacacataatataaataattcagtgtccatcactctgataagaaaatggaaaaaattaaggacagatgataacatccaataattaataataataataataatattattaaattaatcaccgcgagcgaggcatgtatgcatttctctattattattatttttgtagcttaacaaattataagtttataaatacgggtctagtgaagttgaaattaaagtaccaaaaatcttaaaacaaaacaattatatatataataattaagaaatactaaatcatatatatatatatttattcataattaattaatggcgaccgaaagcgctgttgggaggcttcctattattgatttttcagtagaacaggtactgaaaccaggtacgcccgagtggaacactgtaagggcccaagtccgccaagcactggaagaatttggttgtttcgaggcacagtttgataaaattccaatacacattggaaaagccttatttgatgcactagaacaacttttcgatcttcctttacaaaccaaacaacgaaacgtttcaaagaagccatttcatggctatgtgggccaatacccagctgtgcctttgtacgaaagcatgggaatcgacgatgccaatattcgtcaaaatgttgaagcttggactactgttttatggcccaataatggaaacccaactttttggtacgtacgaaaatttttaattttactacaataattattataaatcttattatatatatatatgtatatgtaattaatttgaatatgtacagtgaaactattcatgcttattctgaacaattatctgagttggatggaataataagaaggatgattttggagagtttgggagttgagaaatatttggaggaacacatgaactccaccaactaccttcttcgagtgatgaaatataaggggcctcaaaccaatgagaccaagttgggtttgaatgctcacacagataaaaacattgtcactattttgaatcagaaccaagttgaggggttagaggtccaaaccaaagatggtcgatggtttactgtcaaaccttcttcttcaaactctttcatcgtcatgatcggagattctcttaacgtgagttcttactttatatataaaatgtacgtcactatatatatatagaaaaaaaaatgtagtttttgttagccacagcttttgtaattagtgcatgattaaattggtaaatgtaattaattaattaatgtgatattttgttacataggcatgggcaaacggtagattacattctgcaaatcacagagtaatgatgacaggaaatgaggcaaggtactcaacgggattgttttcgataccaaaggcaggttacataatcaaagccccagaagagcttgtggatgaagaccatcctttgttgttcaaaccctttgaccatgtcaaattccttgacttttactatacccaggctggtcaaacagccccatctgctctccactcttattgtggactctgatccagaatcatccctacaatataattataatttatgtatgtaccgtcgttttgttttgtcttaaataattatcttctccatgacatgtacttttttatgttgatctcaatgataaaatatatattatgtttgtgaaacatgtatggcatatagtattaaaatattaccaataaatttcttggtataaaaagcatttaattactagctgggccgggattcgacttgggctaatgaagagtttttaaacatgggccgtcttctacaaaaaaataaaaaaacataacgccgttgccggggatcgaacccgggtcacccgcgtgacaggcgggaatacttaccactatactacaacgacttatgttttctgtttagagagatcatttattaaattcaacaatagatatagtaagaataattctggaaaattttatatgaataaataataataatgtgaattgatgatgatgatgtggatggattttgtgatgtttcatcattatatagctttgctatgtactctattccatatatagtgaagtagtgataaaggaaagagacataatagaatccatgaaatcaacaataataattgacaatagagaaataataaaagggaagatcgatcgaggggtttaccgaaacaaaaaactctccttcaccatatatatataaatatataaaattgtatggccttagtcatagcccacttgttattgggtaaactaaaatagtggtgtccaattcatgaaaaggatccatgtgaacatgtctaatatttctaattaataatattctgtttcataactctcatcaaatcactgatcaaccaaaacccccatggtccatatccatattggcctagtgaaaaagtttgtgtactataaataaaatcttattatgtcaacacatttgtcaaataatctcacaccatatatattttccattttagttgtactgtatctaacatgatctattagggctcgtttggaacgctgtattaggtcgtattgtattnnnnnnnattatattgaattgtattttatgcaat

SEQ ID NO: 116703 - DNA, 2763 bp, Cannabis sativa
  modified_base (2725)..(2726): a, c, t, g, unknown or other
tagggttattaccctaagattttatatattatagtatatattgaatgtacgcatatatgtcaagaattatgtgtataagacataacttgtttagacgtaacatttatcattaggataaaccactgaaagaacgtaatgtatgaattatgtatatatggatagggttatgcgggcaagccataattaagttagactcgctaactataaccgagataaactctactaaggccttattgtaaatatatatgtgagcgtaacatgtgggtctatgctgcatggttatttatattgtcttgctgggcttggtttataggtgctctactgtgcaagaaaggttaaatcagtctacgatcagccatgagtgcgagagcttggcgatgcttgtaaatgttcgagccacactagaccaagcgggttagggtctaccaatgatgttttttgtaactctgattttgctgtttatgtgggctcgtaaaatgaacttgtaatattttgtgaaaatatttatgggatcccgtaacatgtatcttttggttgtaaagttttaagttgttacaagtttaattttcatttggttttaaataaagtttaaattttctgcgctaatccttttagtaatcccgaatgagggaattagggtttaatattcgataagtgtagcgtgcctaattgttagggcgttacaaaaaaggaagtgagaggtgtagtcgatgccaatgccaatatggaggccactataaagcagagggtgtccaaatctttggataaatccttggccaaggaaaataaggtagccaaaatggagagggaacatggagataaatacaaagacatgcactccaaggcccttacctgcatcaaaaaattggaagccaatgtgcagcaggccaagcgtgatgtggagcaggtcaagctcgatgtccaagagaaggagaagaagattaccaccttgtctcaagagtacaattggcaagccaagattatcgaagacaaattcatcaatgagactaatttggagtaaaaggtgaagtaccatctcgacctgcaatagaaggcagaggcaactgaagtagaggccatcaggaagactaaagaagctgagagcgaattggctacagagatgaaggctcatgaagattcccaatagagaatcaccaacctagagcgtaaaagctccgctttaaagggacatcttgaagagcaggatgctcaacacgacaaggctttagagcaaacctttgtccacacagtgtatactctcttacagcacaacaaaaccatgatcgatctcttggatgctaatgacagggaagaacttctgcctaagctgttggcactagaagaggcggactagttaaagagtgcacctcaaggatcgagagtagtcaatcttggaaccaccatctctgttggtgagaacatggatgaccctactcctctggcatctaagtttcctgtttcaactaagtctacaatctcagagggcctacctgatgttaaagcttaagatgcaccagtgttgggcaattttgctcagctttaattgttctaaactcttctttattttatttttctttttatttgggggacaagggtccccctttgggaatgtgtggagacaatatattccctagtcgtggggctttcttagtacttggtaccactcattaattccttagatatttgcattttacatcatagaaatttctaagtatttagcgcttctagcctcgtcaggttcttgttccaaaggcctgaacctttggttttttcgagtaaatacttagacatatactttttgtaaaaatatacttttgtagaaaggtttatttgaaactcagattgattaattaacctgaagcaattttattttttgagaatttaccctttcttggcattcatcacttacttttagggttttttcaaactcaactttttaattgacctaaatcaattgattttagtaacctgaatattatggtattcttatcctgaattaaccatttggtgtgaacctttattttaagtttacctagattaaccattttagtgtgtgacaattaattccaaatatacgaaagcaacgacttactttcagttccttgaggttccagttttgtcatacttccttttctcatatttggttaagtgataaataaatttcaaatacaataaggtagtggcttacttccagatcgttgaggctctggttttaggcagtacttcctactcttatatttgagtatttaatttagctattttctggtgaaagaggatatatatatattcataacagtagcatatgtgcaaccccccaagtgattaatagtcgagacttttgatcacttgttatatgataaaacttttaaagaccaaatatgaaatgaaaatccttctttttatttgaatggttctttccctgagccgtacaaggaaattaataaaaaggtaacgcaaaaatgaaaaggaacttgaccacccctagtttactaatagtatcggcgcaggtggtcagtgttccatgctcttggaattcttgttccatccactcttcaaatgataagttttatcaccaattttgtcagttacttgatacgggccttcgttggacctaagacccccactctgggctcttgagaggcaggtaacactcttctcaaaacagtatcaccgatttcaattggtcaagtaaataatttctaagcaaggcccaatccactaagtnnatggccggccacctattgtaggtattttaagttgatt

SEQ ID NO: 116704 - DNA, 3111 bp, Cannabis sativa
gtcgtgttgaaacccatactctttctctgcctctctcaaaagctggccaaacaggggatggttaaagtaaatcacaggaaccaatactctgctaaagtctccgtcttcttggcgcacgtaaaccgccaggtggcccttcggaacctccgtttgtttcttcaaaaacggttcgtgacccaactgaacataatccgacccgggtttggagctacaaagagatttagctcctttcgtgaggcgacgaccccaattgatgagtttcgaaatgggcttggacttgtaagttgacgaagccaagctcaatcgctggtacccggttcgaatacgggttttccggaggacccatcttgtgacacgaaaaaatcgtttcccgagcttgaagccgcgtattttcgccataacttttatttcgagagtgaaaaaagaaaaaaaaaacagagaaggctagaaaggaagagatgggtgatattgttttggttttacaatctgttgggtgaaaaaataatgagtttttggtggaatagtctgttgtctcaagaaaatggccaaggatcagcttcggacatggtaagacgaaagagagttaagcagccttcagagagaaaatctggtatatttgacatattactcgtcttcaagctgactattccaatggctgcaatagcttaacttcatcaaaaagatgtaaaacagagtctgcttctctctgtaatatctcttttgatatcgccggagagtggtggcgaaagagtagagaaagtagttgtcttctttaggtgtgtttgtatgtgttgattggttatatataaaggggttttggtgaatcgaccgaagaataaaaagcccaaaggaagataagaattttgagagagtcaaattgggcgaatagagagaaagagagcaagtggaaatctttattcttcggagattggtcgaccacgcgagtgtttaaatagaaacacagagaaagagagagaaaagtcaatggtcagatcaatcgacggtcagatggtgagccttagccaagtccagatagtgaagatgtataagataggctgaatttttttccatttaaattttttttagactattcacattactcttataatttatttcgtgtctaacaaaatgtatggttaaataaaaaattaattaaaattttaagaaactcattttttatcaaccattaataataaaatatacttttttttctataataagaaaactataaatttaaattacatatattatagctgatacgaaaataacacaccatacacccatgtttatggtaattggataaaaactaatttgataacacatcatacacattaacattttaatagctacatacatgtataaaatttaagattagaattagaatcctaaatagatatacacacccatagttaacggtttattgggtgatttgggtgttgactagtactctattagccactattaaggtactcatttgttatttgtctgtgacaaaactatacgagctctcacgtaactatagcgtgtcctcactcaaaggaaggttcaatatgaggcattcctttaccatgttggttccaagaaattgtaaagacggaacacgtacgtagccctttaattaatggtactttgtccttataatagaaaattaaaagtggtacttccatataattaagacaaatttatatattttttcaagggtaataaagacaagaactgaccaggtctcttcaggttgataactggtataactgctatgctgttacagggttctatttaatatcttgcaactgatcttttgctaggcacgtggccaacatgtggcatctttggtctatttattttatttttatttttaaacaaaactgtcactaacatgattacctgtttttcagtactatatatatatatatgaattgaagtgtgcctgtgtgtgcagagagaatagaaatatatatggtatcccagttacaatgcccataatcacggaaatacgtcagtgattgttaacctaataggtgtgaaaattttgccaatcaattattattattgttatttttttattaattattaatttcaacaaaatcatgtcatttcaatggtaaacacatcgtcctttaagatgtgttttagtaataaccatttgtcaatctttcttttgtagtgtgagaacaatgtataattggattcatttgaaccctacatactattcaaaagactataaattttgttggggttgtcccacaacagattttcaagtcttttcttcctgtgaaatcctaactgattcatactatccccacgttagttatctatataattttatgcactattgtatgtgtgtaggagttgaaaaaaaaaatcttacaataaattttttaataaaagtttgtttggtatagaataaagaagtattgccaattcgaatctatattagttatgagtgcgtattttgataatattatcgtgcttaaagatgttccgccacgactctcaaattacatatcatctcagcccaaaagattttttagtctgttttcaaaaatttaatccacaaaaaaagaatagaaaatatataaataaaataataattcgtaattattcccaaacacaaaaattataatgttgttgccttgttggtcaattcataataaatcaggaaaatatatgtatatactacgaaaataaataaataaataaataaaagttaattagaatttttgtcctgaactttgatatgtactaaattaaggtcgttaaaaatgtcccatgaactattgagattgttaaatttaaagattttttttccaattttagtaaaaaaatctgaatgaaaattcatggggcatgatttagtagttgtaaaagttcgagaggcttgatttggtagatatcaaaatctagagagcatggtttagtacataaataattactaaaatagtaaaattgaatgaaattaaacaaaagtccttaaatccaaaaatcttaattagctataaataaataaatgaaaattgcatgcttacaaaatatgtgcaaaaaaatttattatcattttctcatacacttttatatataattaaaaactttttttcaattttttttataata

SEQ ID NO: 116705 - DNA, 2673 bp, Cannabis sativa
gggaggagatgtgggtaaacaggtggatagtaggtagaagccacaaaaggccattcatatggaaggccatctgaactacgtgaagttgatgtatcaaatacatgtctagtctcttgctttagatttaaaatgggtttctctttaatatcaaaaaccctgattggtttctctggcgaaactgatttttcatcaatttcactattaggtaaagatttcttggtatcactatcttggaccccggaggcattggtgtccattgtatgcaaagaagaagatattgctttcaaatctactgtatgatttatagtttctaaggtattattttccgtaaaacttctatttaactgataacattctagtccaccattctcttgaatgattttggtggtttggtcatccacgataggtccacttacagaaccagatgaaattgtgtttgatggaggggtatcattctctgctgaattctcacctgaaacactctgtaaggttgaatgaacagacacgggacaagttgctgcctcatcttgagaaacaacggataaagaggaagcttccattagtggtcgtttacaattggaccattcaactggattcttgaagacatttactttcttattccctttttctcttctcttcttccttgtagcggattgagcttttccaacactaactgctttggcaggttcctgatgacaggataacaatcataaactattcaaaccatcaagaagatatgacaaccaaattaaacaactagtgcaacaatttctacttttaatgatgtatcgttgcagatatccttcccctgatcaacatcaggtgtcttctcgggctcatccaactctgacttctctttaccagacaatgtacatccaagagcctggcataacaaagagttaccagttaagactaactcttctcaacatgcgttgtctgtataagttactacagaaaacctgccaaggaagagggagcaagaagataccttgagatgtttttcacgcgaatcaatagtaacacatccccctgaaataagatttagcttctttgtattacgggtcctcccctttttcttattgctacaagcaccaacctttcctttggacttaataggagaggacttaacgttttcttctgctataagttcaagtttagtgcaatcaagcgaaataaccattagaaatcctcgcacttttctaagtataaaatcagaaatggtacaaattgaactcattgtgctgaagaaaagtttccctttatcatattcattatcctgacatagtgctgcagtcatcgtaacaatatcaagaagcacaaataaactactgaaggcattggataaggaagcgggttttccagaaagagaagctggaacaacatttgacccaaattcaacatcagctgcaagtgttgggatagtctttctcgtatttacagtagagtacttgtacctcattggtcgttccgctcccgtgttgaagagccaaagctcatcctccgatgcactagaagaagccttcaaaatctcacgacactgaaattaaaagtttcaaacttcagtaacatttcaataaaaggcatcataactaaaaaaaaaaaatcaatgaaacatgctgccacgaacaaagaaaacacaacacttcaaaatgatcaattataacagataccaaagatttcgctgattttcccaaaaccgcagaaagagtcttcctcctcgttgaagcatccaaattttcccaccagtctacacaacccttcttcctccaaaacacatttgccgccacaccggcagcactcactttctctttcaatttcacccctcttttcttcccattactactattaagccacgctaaccttaaagccacctctaaccgattggccacaaaagattcgatactgtaataccctttttccttcaaccactccaattcgacccaattcgaacccaattcattaacttcgcctctcaaaaaagctccattcgaaactacatccatggcctccacaaatcgatccaaattctcaaccaactcctcgctcacagttaacgtattcaaacatttcaccgacgacgaacactcctcgatcgtctcaccttctgttgacgaaaatagccgcgtggactcaaaaatcaacctctctgattggttcgactcggaaaccctgtaaagaagaccgtgcgacctcttgaagcagatgcttgggaggtcgccggagaggagatcagggaggacgatgaagaatccatggccgcgcctacgaatagtaccgagcatctgaaggagaatctgaatgaagttggagtcgatggccgtgaggtgagcctggcgctggtggagagtgagagatgaaaaccatttgaggatggaggacctgggattagagattgaattggaattggaatctgaaaggcgagagtgagagtggtagagagagatgtgggatgttagtttgtcaacaagttggttgtgagttgcgagcgagttcggaagggaattcagctctggtttcgacattttcgatgctcgacgttcgcctcgtgcatacagacagaggaaggaacagaaagagacccggagcactaaatcataaatttataaaatcagccccatttaattatacttttattttttaattttaaaaacagaaaaataggaatagattttt

SEQ ID NO: 116706 - DNA, 2168 bp, Cannabis sativa
  modified_base (2136)..(2143): a, c, t, g, unknown or other
ttcaatgtctatttggcattttaatgatgtggtcaattataactagtggggacaggagtggaacaggtaaaatgggacagatgatttttttcccgttttgctacccctaatcttttgtagtaattttcagtctccaatgactttttgttcatataaataccgtatagcaatacattcccgcaccaatcaacatgctaaaattagtagtcaacggcccgcaccatttaatacgtcaactaactaaatgagtcaatcatgccggctaatttattcgacgtctaaacgaaatagactggtgtaaagagtagtcaagagttgaaaatagtgaagcgaacctatcacaatcaccttttaaccagttttcattttattacaccagtctatattgctaaaattactttataataaatcattctcaccttctcaagtttttaagtttgtgatattctctctctgtgtttgtcatggcatttttaaaatgtgtagtagtgattctactactaccaccactctctttcattctaaatttaatcaatgtagaagcccaaaaaagccacgacaacataatcgaaataggttgttccttaacccccaacctaacctgcaataatagtcatgatcataagaacatcagtagtacaagacttagttgttggacctcaccttctggtctttttgcctttggtttctatcctcaaggtaatggcttcgctgttgggatatggattgttaatcaaaccgatcaaaccaccattgtttggactgcgaatcgtgacgacccacctgtctcctcaatggccactctggagttaacaacagaaggtttgtctctcagagataataagaccatgatcgaatcaaaagtcaatggtgctgaagacagcaacattacttcagctgctttacttgactcgggaagttttgttctttactccaatgattctatcatttgggacagctttgattatccaactgacaccattttaggtggtcagaacctctcctattcagacaatactcaattagtatctagcgtttctacaacaaatcattcaagtggaaaatttagcctccttttgaagtacgatggcaatacaaaccttgctttgtaccttgtaagcacctcagatacctattggattcctacaagccctggacgtatctatgatagattgtctctcaattttgaaggttctctctttctgactggttcatctacctacgaagatatggtttttgcaaatgggtcttcttcttcttcttcttctacttctttagcacaaggaaacagaggaaaaaatggtagtgttatctacagagcaacggtagatgacgatggagtttttagactgtactctcatcacagttatagcgtatcacataataacgtttttacgtcaaaagttcaggttgaatggtcagctttcaaggacaaatgccgagttaaaggtgtctgtggtttgaacagctactgtagtgtacaagagaagaaggtggactgttattgttaccctggattcgctttcatcaaccctatgctaagatccactggctgctaccggaaattcaccagagatggctgtaaaacaagaaaagatgatggagaaccggcttcgtccatgattaattcctacaatgttactcctattgagaatatgttgtgggatgattctgattcatactctgacttattaatggagaaaaaggcttgcagctactcttgcctggccgactgtgactgttgggcagcgttacatacagagggtcattgccgaaaatgtaagctgccacgtaagtatggtagattggatcaatctatgccagccacagctttcttgaagatggtacatttagggaactatagtttgaaaggccaggtgcccatgaattccacggatgtaactgatcaggccagaaaaagtacaatcctgatcattcttggatcaagtttgggctccatagcattcttctgctcactcttggctgtttcaggtttccttgtttataagcggagagttcatagttataacaagctcttaatggaaaattctaaattgggctttgctgaagattttgtattagaatatttttatttttggaaattattttctaattaaggaaatgattttctatttnnnnnnnnaaataaataattgattttctgataa

SEQ ID NO: 116707 - DNA, 3386 bp, Cannabis sativa
  modified_base (1594)..(1596): a, c, t, g, unknown or other
tttttttttttttttatgaatatctttgtggaatttccttcttcaaatttactttttctttttaaaaaaaactattcaaattatagtaaatatttccaacgacttccttagttgtatttcattatgttttatgtaattttctaataatgtagaactaatttggtaccattcaaaaattcttacaaaatatatatatatatatatatataaattttgactaattttagctaatgaaataaatatttgtaagaaaactatacattcttaatcataaactatatcaacaaattatttttttaaaaaaagaagagagtgcaactcaagatgaacatttattacaatgctatacaatcttatgataaattttgaacaatttcttacactaaaaatataatttaactttatatatttatactattaaagaaaaaaaaaaaactattactaattaaaatattaatgtaattttttatttttaggtgcaccacaaaattctcctatatataattagggtctatgtaggtgcacatcataattctccaatatacataattgagttttatgtatacatgcaggatgatatatagggtttaaaaataagtgcactcgcgtctgtattatatttatatagctatgattttatttttataaattttgatttatattgtatactcatttaaaatatcatgtaactattttttgaaaaagaaatttagagtaatttatatttttaaaaataagatttaaataacttgttttacagaaatattaaaaacaacaagtataactgtaacaatactatatttttggcgctaaaattatttataatgaaatatatatagaaactaaataattaaagtgtagattatcttataaaaataataaaatcataattatttatgtgctaaaaatattatagagatgtatattgtacaattaatttttaaggttcattcttaattgttttatatttatatgtatattttttagtaggaataattttgaccttacaaataattaaaagtgagagttaatacttaattatagtaataccgatataatatcttatactaatgttgaatataaatttcaacataaatagtattttttttctcaatatttatatatatggtcattaatattttgctcattcactagtgtgtgtatatatatatttagatgagtatgataattattgataagggtatagggtcagcaccgacaagaaacacaacccgaaacacaaagcatcttttagtgaccagatccttagttggatcatgtgaatttcctcaatccgtttcatcaacgccttctcttgtgttctttgtccttatttatttacttatttatgaacttttatttattattgcttcttttccgatcaaatgcattattttatttattaaaaaatatggaaacaaacatatctttattttccctttatatactttaacattatcttaaataaatattgacttatttatatataggttaccagtttaaggaagttatagttaggtataatactatacaacttaatataatcctacatcacacacacatacacacatgtatgttatatatatatatatannnatatatatatatttatatgagagatcgtattttgctagtgggtgtatggacattattattaggggtttagacaagtactgcatcgtatgagatcaaaacaaacaaatagtcaaataactcgtggtcatgcacgaaccataacagaaaaatggggacaaaaaccattcccaaagcatatgcatataatcatgttttgattatatatatagaatttatataaaatacatattaataatgtatatatataatatatattttttttctgaaagcaaaatatatataatatttttaattattagttcactttgttttcagttcccacttatttacttccaccatataagccatgatttctacccagaaaggattataataaacaaacactattctaagtgcattcatttaagtaattaatagaatactaataagttatacagccttaattacctagggattacctgcctttataattacggtaagagactgtcagtgttggtgcactgaaaaatctaggattttgagtttgacactaaaattttatcattatacatgagactttttttatagagaaaagaagacaccattttcaaatataatattacatgtatgtattagtatatatccttagtgaaacaaattaacgatacaaagttaaaatataattcattttaaaaaatacatactttaattgtgtgttaaaaagtgatgcaaatttattataagaacttttttatttttacacttcaaaatagttttttttacatttttacggaatatatataaaaactcttattgcaactaacgaattaacttaaatcgcaaccaaaaatcgtatagcaactcacataaaaatcaccagagaaaccactttagaaacctaacccgtaaatttgaaaaaaaaaaaattaagaaaatagtatgtggagtaatttctcttttatattgtaaatgttatatcaaatttggcatgatatttactatataaatatcatgcaaaatgtattattttttcatttactttagaccatatcccatgaatagtatatattttgggaaatttacaaaaatactaaattttaggggcaattttatatttatactgccacacgaaattttttacaaaaatactgtcgtcaccttaatttttttcttttatactgtacacaccccaaaatacatacgaagcgtctattttcaacacctacggtccgaactactagaacagctgaaaaataaccattattccgtcaaaatgtaagtattaaaaagttcaatcctagaacaataacataaaaaataaattaaaaaaaactgtaaaataacagtaaaactgcaaaacaaaatcaccaaataaaagcacaaaaaaatattatacatcaataactctttcgccagttgaaacttccataacatcacgagggggaactttcaccttaaatttttctccctttccttaatacattaaaaaaaatcagaataacaaaaaaaaaatgttaaaaaatataaaaataaagtatataatacttaacaccgaataatacatgcagatcacaacaaaacatataaaatttaacaaaatcagagaataatgaacaaaatctcaaatctaacactgaacatgcaaaaaaatgaaaaagaagcttaagaaattgattttttttgaagatgatagagatgagaaaagcaagaagtaatagtaaccactgttagacatttatttgtatagactaaaacatacatgattatgaataaagtgcggaattaataaatcatatatgcactataattta

SEQ ID NO: 116708 - DNA, 999 bp, Cannabis sativa
aattcccttttattttcagtgtatatttatattatttaccttgctcatttctttttctttttccctctgaaaattgttcttgcatgtttatataaatagccaaataatattaaaatcacaggtaaaattacatataaagtattacatctaaaagaaaatacttacaaatatatatactttggagtttttaggagtcatcatgtaccattcttgagatggctcataagataagatgtcactgcttgaccttttaaaatgctagaactattatacaatacaatttagctgaaaggatatggattttattttcttatgttggtgcttctttatttttggattcaatctagcatgattcaaatttcgtgaaacaattttatcagtaactaactatgcatatagatttttattaagtgaaaataagttgttattgtgattggaatgtcatttagtcgacttagaaaaaggtggtggtaaaatatttctagtgagctttaattgttaaacttctagtaaatctgtggtgatgtagttgaaggatttatccaatagattgatccctagaccaattatatcatttatagcataatgctaccatttctacacatacaatagtccatgatatttgactttgtgaacttatttattcgttagttgttttagaatctgtggtgtcatttttacacatacagtagtccatgatgaatctgtaatgtcatttctacatatacgatagtgacagttcatgatttttgacattgtgaaattcttcttttttatccgtcagttgttttcgtcaagagctttcagtaaaagttttgattggctactcaatctaaagtaatcctcctccccctaaaaaaaatagttcgatagacatataacatacaaagctaataaaaacattagtaatgaaattcctcgtgtagagaacaattaaagggtttcttaaggtacactattgaactgattttatatattaaagtatgcaaaaaaaaaaaa

SEQ ID NO: 116709 - DNA, 785 bp, Cannabis sativa
catcactagaaacttctcgttttggtgaattttcagcagtggacttgtgtttaacactctctgcttcggatttcattgccattttcaggtcatataaatcctcagataccttctctcctgaagttaagctatcttccagccattgatatagcagaaccctcttcccccaaaaataacatatcaaattcaatcacaacaacacacgcatacatatacatatatacaaaataaacactaactgaagaactcactccgtgaaatcgggccaagagatcaccatcaacctgttgaagaagagaatcggagttcattgaaaatatatgggtgatactttcagtgagacgtttttctacaatagctcccatttgcttcagcttctgcttccatatctaataagaaagagttgagagtaattctaagagaaagagaactcattctaaggttagagttaaatgtgagtacctgcaatcgacgtttctgaactccgttctcgacgaagaagacgaccattccggcgaacattccaggtccggcaggcggcgctgggccttgttctttgttcttccttttcttccgggtcattttgtttggggcgatggacttgggagtttcgattccaaagcccaatatcttctaacgccaaacaacatttgtaattatctcacgcattacacgtggcaccctgtcattaatttttataaacaaaataaaaaaaaaaacaatggtgaaaaactagggatgacaattatacccgtgggttcgggtacccacggatacctgctcct

SEQ ID NO: 116710 - DNA, 1021 bp, Cannabis sativa
  modified_base (914)..(929): a, c, t, g, unknown or other
gggattatagaggtcgaaggccaatcatagggctttacttgtaattactgttctatcctttgtatttagtcaaatatcagtgtaagtggaggtttaattcaacaaatatcttaaaaattattgttatctgtaatttcaaatagatgacatgtggatccttatagagacctattacgaatttcaggcccaatatgaataacttgatctgtccatccattaggaacggataaaactagacatatggtctggttctggcatcacttccatgaacacgaacaatggatcccggatactaatttcacacttagtaggcaaataacgtgaacttaaggagtatatcttcatggatcatccgtgaatgaaatacgaaggatcgtctctagatcactaggttacgttctcagaactttcccacgtggcacatctggcgacatgtaccttctttcgaaaggcacacaacaaaaatgaaattacttttttgggttgtcgctcactattctgacattctttcctcccaacgacggctcaagcctcatctgtcactgtcaacagtacgaccgtatacggaagacaactctactcaacttgggtctcacctaccctgctgattagctcaaattatatcaataaacaattgtatttacctcatcagtgcttttatactcaaataaccttaatgggtctggatcagtccgaccgatcaaggaaatatgcctataaatatggcattattcttcaatgcaaaggattgaaatttttaatgttcaaaactagaaaatacatttttttggtaaatcaataaactttatattgacatcaaaactcaattatatttataaggcaaagccaaacaaattagttacatgttctaatgagctcgatcatccaattttcactataaaaaatcttacttnnnnnnnnnnnnnnnnttgtgactaaaagtgaaaaaactgtgactaattataaattattatttttatgttgtgactaaaaggtccatggctaaaggtattagtcacaa

SEQ ID NO: 116711 - DNA, 1867 bp, Cannabis sativa
taggttttcagtttaccattgaatataaggcatgcaaggaaaacaaggcggctgatgcctcatcaagacaacatgaagagtccaaatcttggctacaagcagtaatgtcttctagttgttttgaattttgaaagaactgcaacaagaaaatttgactagcctgaacttgagacacattcacattcagctacaaaaaaaatgaagaattttcatcatacttggtatgtgatgatctcctttattttaagaacaagattgtgcttagcaaacgctctaacttgaaataggccctcatacgagaatttcatgattctcccattggtggtcacgctggaattcagcgaactcttctcctgttaagtgcaaattttttctgggtagggatgcgacaagatgtgaggaattatgtccaagcttgtttgacctggcagacattgaaatactctctaatagccccttacggcttgctgcaaccactccaaattccagaacgagtttgggaggaccttgccatgtattttatagtgggcttgccgagtttcccaaggtctcacaaacatctttagtggtcattgatagattcacaaaatatgctcattttggtgccttacctgaccattattcagccacaagagttgctgagttgttttaaaatatggtgatacgcctacatggcatgcctcactctattgtatctgactgcgaccctatctttactagcgctttttggacaaaattttttgagcttatgggcacaaaactacagatgagttctgcttaccacccctaattggatggacaaacggaagtcactaatcgctatgttgaacaatacatttgtgtttttactgctaatcaccccaaacaatggagtaaatttctttcttgggcggaataccattacaataccagccatcactctgccataggaatggcacccttccaggccgtgtatggccggctgcctccttccattccagcttattccaggggcacaacttcaatacaagtggtggaagaagacatattgacctgagatgaaatactttagcaactccaacacaacctccaacaaagtcaaaatagaatgcagcaacaagctaataaaaagagacaggacattgaattttatgtgggcgataaggttttagtcaactttcaaccatatctccaatcaaaggcggcaaaatgtctcaatacgaaactttgccatcgatattttggaccattttcggtgatagctcggtgaggaatcgctgcttacacagtggcacttcctccaggtagcagaattcattcgactttccgtgtttctcttctcaaaccattctatggcaacaaatctcccacaagttattagctgccagaatttagcatcgctaacaaaccactaatagtacacttggctatcttggctactcgtactattctactcaactctaaaccagttcgtcaagtgctggttcaatggtccttaagctcaccggaagatgctatatgggaggattttacaacctttacataactgtatgaggcttcacaccttaaggacaaggtggtttttgaggaggggagtaatgttagtaaagcccatgatcaaggcccaatagcaattaatcaagacctggtggatcaaagggtgaaaagttggtttgaaaaggcagcccaaaagcaagagggagaagcatcaactgcaatgaagaactccatgaacgagaatgagggagaagcagcaatgatcaaccaagagcttccagcgcgtgggaatcaagtgcgtgtgagacccaagtagctcaacgacttcgtgatgatagagatgttggaaattattttaccaggatcttagatctactagatcggaagagcg

SEQ ID NO: 116712 - DNA, 1739 bp, Cannabis sativa
cagtctgtcttctacgtccccccccccaggacattccttcttcttcctcaccctcgccttggtggaaaaaactctggcaccttaaaatcccacctaaggtgaaactctttgcttttcgtgctaccaactctacccttcccccacacaggaatctgcttttaggaaaattattcaatccccggtttgtgatcgatgtggaaacctggaggaatctatgtcacgtgtcctattcttttgtaagagcattcgaagagtctggaaaggtacggttttctatccttatatttttttcttcttctactacaattactttccatgatgttgctcacatgatctatgtttctttaaccaaggaagatgaagaatgctttctttgtattgcttggcttatttggaataacaggaatagagctcttagaagacaagtacaagatcggacccatgctatagtgaacttggcccaaagcttcctggcggactaccaattttcaacttcggctccaaagctccataccccttcacccaggcttcctcaatcacaacctggtctcctccataacctggacgcctcaagctaaacgttgatgttgcaatgcctcaagctaaacgttgttgcggcagtcgcctctccctacatagggggtggaaatgtggccattcttgaagctaaatctctccatacctccctgcattggtgtattgaagagaatttcccagtccacgtggtggaaacagattgtaaagctattaatgacgcattgaattgccctaaagaagatctttcgtgttttggtgactttataagtcaaatcaaggaagctttgtctcaccttcctgctgcctttgtctctcatatcaaccggtctgcaaatactttcatagataagttggcaaattgggcttcggggttagacgaagtagcaatttagattggcgatgacccttgcaatcttagtgattttctttccctttagcgggcaccctttccctaaaaaaaagtaacttacatttaatttgctttacataatgcatgcatacattagtaacttacattacactataataatttcattagatataaattaaaacgttttctatttcatcaaaagacttcaatttttttatttgattttatttttacactctaaaaattctatttacattgtaaagactaaaagtcactctctattttacttacataatgcatgcattaataacttacattacactataatgatttcattaaataatagtagaaaaagactaagaacagggagaaatagaggaaagaaaatgaaaagcaatctttattgattgaatgaattaaaatgatacaagagaggagctatataaatagttgaagtgaatatatgagtataaccgacattcaataacagaaataactgaattacctaaccaactaactatcactaataggcccccttaaaatggggtatagaaatccttaacacccattttgaaaacaatgtttttgaatggagttggaaagagtgttttggtgaggatgtcggccaagttattttgagatgagacatgattcatttggagagttccattgttgatctttttctcgaactgtatgacagtctatttcaacatgttttgttctctcatgatacaccgggttctcagcaatgtggatagtgttaggttttatgccctaaataaaattccatttcaatgtaatctattttattcaacatcaataaagaaacaga

SEQ ID NO: 116713 - DNA, 2280 bp, Cannabis sativa
aaactgcagcatttgtttcgtgtcaatacagatagtgaccacaggtaaaattacacgaaaagacagaagaaatgcatggaaccaacttcatagagctgcaaaggagaagaaaacaagacctttttaccgagcggctaataagaatggtctaatgtatgcaggtaagaaaaccatgcacccaatttttgtttttagtctctataatcacaacttatcttcctccattaaatttggccattcttatatttcaggaggacttgatgaacctatacagcgaccttatgtagaacgtgattggcggttcggacactatgagatggaaggccttcatgaccctttgagtcgcttatcaaaactcattcttggacccttatccctcataaggaaaaagaagaagcatggaggaagaagaagaagaatatgaaccattggttcttcaacctcttgagctgagtgtttgattattttactaatcatatctcttgcttgacacttcttgctcttagattttgtaaccatttgaatttgtcaccatgctaaatgtgtgcttattgttacccttcaattgattcaattgcttatatctattttggaagggttgtgattatctatttttaaaaacatagtaatgcaataaaggaacaagattattttaattttttttttcattaactaataatatttattcattattgttttatgttgagaaggtttttttgaagaagaaacgggtatggagattaatttagtggcttaaaatatgttttgttgggggtcatgaaaataaaaaaaattggaatagaagtgtgagaataataaagagaggggaagttttatttgcacctgtacatcttattttaataattttgaatgatggggcttcatatttttctattttagatgcgctatgtagtagggtgttgaaggcttcatattttcgtaacgagagtgtgttgggagcgaaatgtggttccaatgcttcttttgtgtggaggagtttagggtgggggaagaaagtgataataaatagctatcgatggcggattggtaatggaaataatattagggtgttagaggattcttggctttctaggcctctgcttcctgaaccattatatgtggttgatcttaaattggccaatagtgaatattttgatgaagatgatgctacccttatcctttctcttctcaactttaacattgagattgaggacaaagtttcatggcactatagtaagaatggagaatatgcaccaatcaattgatcaagcaatagtggaatagtggagaaatctataaaaataagaaatctcacataaagtgaaatattttgtatggaaggtggtggataattggctgcctactaataatattctggctaaacgtggtatttgttctgatgtgaattgccataggtgctacaatggagttgattttatattcaatgcgttatgggattgcaaggcaaacaaagtgtactagaaagtttgtggacttaaaaatgaggggagaatgtgttaacctatatgatgagactttgaacactttgttacttggaatatttggtatataagaaactttgttaatcatgggtgtatttcactcagacaagaggacatggtggaatggtgtaacaccttcattgtagatttttgtagagagaacaaaagtggggctactgctattcaaaggaacaggatagtttggaagcctcctaatgcaggaatggtagagattaatgtagatgcgggtgtgaaaaaagatggtggctgttctagaataggttgcatggtgcaaagggatacaggtcaggttgtatgtgcttcttttattgtcttgccttaggagcactctccacttcagcttgaacttatggctattcaagcaggtttaagcagatgggcattcaacgtaagctaccacgatttagcatcaagtcaaactgtttggaaactgtcaatttaatccaaaaaaaaaaggaagatggctgtcgagatgttgattatttgctagatcatattagaattctcttattgtatgatgatattgctggtattggttttatttataggaaggctaatggagctactcatgtattagccaattatattttggttcacaaagttactgctatttaaattggggttgttctctcttgtgcaaatcaagttattcaacttgatatgttgtaactagggctgtacatcggtcggtttgggcggtttatcctatatattttctaacccaatctaaagttcgggttgctaaaatttaagtgca

SEQ ID NO: 116714 - DNA, 1052 bp, Cannabis sativa
  modified_base (32)..(35): a, c, t, g, unknown or other
ggtgttaataaacatacttttgagtagatctnnnntcctggtaaaataattccaatagacctatcccccccttaaccaccacacgaaaacccaaatctaatgtttcaaccacatgacaattaacccctcttctcaaagccacacagaaaccccctactataccaacaacaaggatacacgagacatttgaaaaacctagtcgcctagtaacgtgcctcatcgtttccatatcaactttagtttcttaaagaaaaattaaatctgcatcacagttgcaaattaaacccctgagggttctctctgccacagcccttcagaggccccgacagttccacgctaagcacctcataaagacagtgggagcatgcttacggccgcctcctcgccattgccaaaattttgctcctattctactataacgtcaacacagtttgcctgtatatcattcaaattgcttgtagacatcgatttcccagcatcttcaatctctctctttttcctaccactccgagtcttaactccagagttacgttttgtggagctattcttgtatttccctcgcgtcttcctaccacgccccaagcatggctcctcactattatccaccactcccatacagaattgtctctcgccattgatactcgattctccttcagcaacttctaatctctctggaaatggtaggagactatattttgtgacagttggataggatgaaacaagggatgggcctcgcgctttctattcaaaaattttaattaaatctaatttaatctaagtttaaattttagaattaaaagaattttaatgaaattaacataagtgtagaaatcttttataagttgctacttgtaaccatctccatcactccctcggcctcctataatgtaaaccaagcgtccccctcctccaccgctcgtttcatgtcatgcatcgccatattatgttgggattttatgtcctaaataaaacccatttcaatctaatctgatttgttaccaataaaaggttagaaatcatttatgtttacatatagttttcatgcttatggt

SEQ ID NO: 116715 - DNA, 2283 bp, Cannabis sativa
  modified_base (2209)..(2212): a, c, t, g, unknown or other
ttctttaagggcttcagctttagccatatactctgcctctgttgaagacagagcaactaccttctgcaatgtttctttccagctgacacagcctccaagtacagtgaacacataacctctgagagacctccttgtgtctagacacccagcatagtctaagtcaacacagctagtgactacttcttttgtaaatgactcatttccaaactttattcccaagtctagagtgccttttatgtacttgagtatccatttaagggcagaccagtgttgctgtccaggatcagccaagtatctacttaccatgctcattgcataccaaatatcaggtcttgagcaaaccatggcatacattaggctccctaccacattagcataaggtatgcatttcagatctttctttctcagttttgggtaattgttcttttgaaagtttgaaatggtgagctaagggagttgagacaggtttggcatgttgcattcaaaacctgtttaacaccatttcaaggtatctcttttgagacagaaaaatggtgttaggtctgtttttcttgatgtcaatccctagaattttcttggcagatccaggttttttatttcgaactcaacattgagcttttctttgagtttgtctatctacatacaataatagatagatgtgcttattaaagtagacacaagggtcatacctgctttgacagaatccaatgttctttatgaactcatcaaatcattgcctaagagcctatttgaagccatatagtcatttgagtagtaggcatacttaattaggatttccattgtcaaaaccttctggttgtgtcatgtagatcttctcatcaagtttgccatgtaaaaatgttgtcctaacatccatttgatctatatatagatcatactttaatgtcttcgccatcatgactcttatggatgtttgtttaatagcaggagaaaatatttctgtgaaatcagtaccttctttttatgggaagcctttggcaacaagcctgactttgtatctgacttctcgtttgtaggtttcatcttctttgtgcttgaacaaccatttgcaccttacaagcttttgaccctttggtttgttaaccataatccatgttttattgatcttcaagaataacatctcatcgtcaatggtttggttccatttcttgctatctttacatgtgattgcctctttgaaggtttcaagttctgagttgtctagcttttgtactgctggaagagcaaaagctgtgaaattaacaaaaccaaatctgacatgggctgtgtgtaccctttttcctctatctctagtgagtagataatcatcagcttcaatgtcagcctctacacccataggctcttcaacttgagcctgatcagcaccctactcattaggtatctgatttgtagagtctgaattcaactcaaacccaacatgtttgacactagagccttcatctaattttgctttagtctttgatttcattgccatctcatcctagacaacatctaggcttaatagacatttcttgtaacctggttccaaacaccacagcttgtagccttttacatcttctgcatagccaagaaatagacatttcaaagctcttggttgaagtttgtcctgttttatgtgagcatatgcagtgcatccatacaccctaaggtgttcatagcttggtgggtgccctttccatttttcttaaggggttttgaatcctatggctgcagatggacacctactgatgagataactggctgtttttacagcttcaccccaggatggtctctcaagaccagcactgtgaagcatgcacctaactctatcagtgagtgtcatgttcatcctcttagccaatccattttgctgtggattcttggggactgttttgtgtctgtcaatgccctcttttctgcaaaactcactgaatttgttagaacaaaactcaagaccattgtcagccctgagtttcttgactatttttcacatttggttttcaacaagctttctccaaggaacaaaagtgttgaaatcttgatccttgaacttgagtaagaacgcccaaacttttctagaaaaatcatcaatgatgcttagaaaaatcatcaatgtgtgttttccccaaaaatgtccaaatgtctcactttacattaaaaaccacatggggaatgtgtaactgtaatacccggaattaagaaatggatnnnnaaaaccctaactagataattatgagttaattgaggaattatattattatatagttcaacatatgtgaaatt

SEQ ID NO: 116716 - DNA, 2688 bp, Cannabis sativa
aataataataataataagatgagaaaatgaattggctgtgtacctctaaattatttagtaaattaaaagaaaggaaacgaattctaaaatataaaataaaaattataaatatctatggggaatattatttgccttgtgcactttattttaataatttttatttcacataaaatatatatctttaattatattagtttttttttattattttattcttcggtagatattcttaaaaaataaattacttttttaatattacaacaaaaaaaattaaagtaaaaaattatataaaattttattagaaaaaaaataataaaaaatttgtacatgatttaaaaaaaattatgaaaataaaattaaaataagtaataagattaacacaaaataatgcgagaaaaaaattcttaaaatatattaagagttatttttaaaaattagtttaagtttaattttttttaaatattgtagtgtacttttcattttgtggggtgtaatataatatttactataatatctatagtactttgtttacttgtgttaactcaaaattttgttgacctaaatgaggctcttaatagataatgatctaagataattatgattaggaaataaataatatctatgaaagcaacaaatttttatgtaattttgtagttaaaatctacatactccacgagtcgctcttacttttcaattttctgattacaaaatacaacttagcataaattctctcaggagagaactaatcatctcctttacgatggttttttccactatttataagagtttcctatgacagttattctttatgatcttacctaaatgatagttcatgaaacatgaacgtttctcgcgtttcatgttatttttacatgtggaaatagttatgttaaacatttttaatatgaataagattaaataacctccacatttgatcttatcttctgttatttatcgtcttttcttccttgtgaatcacatgaattgacatatacccaccgggatgcttctcgtatttagagtggtctgttgaacattcttctcgtaaggatttaccccaaatgagattttggataatttttgtacaatccttatatgcaatctttttcaacttgtatctcttgtgcttcttgtgatggaagcatttgattataagctttaacaataaatgcttgtcttttcaactgaatcttgagttaatcaccttaatttaattttatttgatcgtacggtgcttataaggtagatattatatttgtatttaaatcttttaaagtcagttttgccataatcaactaaaaagaggaagtgtagagaccgaaatcccccttcctccttccaattatctgtgtatgccctctttgctatttctttgaaaattttgcaactattttctcaaaaacccaggaaacgctatattcctgacccttagattcgtcgagctcaaaagaaaacctcatctagttcatcattaatctctaatcacagtatgttttcttcttcccttgacttagacttatatgatatacttctttcctgaatctatgattttgctaggttttttaatttggtttgacttaatttaggtttttagggattttttagatttttataactcagcttttttcaaattttttggagttttttcgacacattctcatttttcaaaaggaaaagatgtttttgtctgactccgaacctgaaaatctagaatttttagatcatgaaattcacttttttcccactttaccctacaaacaaaatcttgaaatccttaaaacaaaacttgaggaaaacaatgagaaattcatgaacacgctgagaaactaatagaccagatgtctctactcgatttagacatgttgactcaaaaatttagacacagatatctgggtcacacccgcctgttagattgacgagaatgaattatgagtcaagtataagtagagaaacacatcaatttatagtaattcattctctgcattgtgacagtaatggagctgcgtctacttcgagttttatttctcacaaaatgaattatagaaaaatgtctgagtctagatgctctaatttatagagagaaaggctctgaccttatggctacattttttaacttaaaaatgtgctagtgtagctatcattttataggtgaaggaggccctattaaatgggaataaaataatccaaaaaaatatgaaaaaatatacttaggctatttttgattgtagatgatgatctaacaatcaaacttaacttctaaagttgatgatcaatttttagagttcgagtcgcgccagcgggacccactctaggtaatttacagcttaaattcgtaactccctttggggtaaaatttggagtcaatagcttcaaaattatgattgaggagtgagacatgacttgatagaaaaattaaatagctttaaaatgaaagttaaattgcataaatcagatcaatattgattgacttatggccattttactgtaggttgtcctgggcccagggcccaggttaacatccagctcatccccagcaacaataatcctcgtcagcttgaaaggttgcacttttagtacaaaccatccaggaactataatactcacaattcttttggatttgtacaagcgcttattcccagacgaataaccaagactgacaataacctatctgaaagtacatctctggta

SEQ ID NO: 116717 - DNA, 1055 bp, Cannabis sativa
aatggaagacagtgaagggaggaggggtttacagtgttaacactatagtaaggatttggtttttggctttggttcttttaaggaaaatgggtgtttgagaatggattgagtactacaagtagggtcataaactcactcaaactacacatataaattgacaagccaaatgagaatgaagagaaggaagcaaggtgggaagcttccttagttaccaaagctctttcctttttcttttttccttttctttttagggaggcgttgacacttttcttgagacccctttggtttggcctagtgcaactcacacacgaggggctcaatcctttatatcaaagaaaaaaggaaaagtgagtgtataaatgtgtaaacttgtatatataatatgagatacttctataatacaaatacaaatgtatctctatctgttttggtatttgagaaaaaaatttagtttaatttttaacatcttgcaaaattttgaaggatttaaaaaaatttaacacgtcaaaaataaagtttaaataatttgttacatatgagattcttttattttatacgcatgtaaattatacagtttaaatcttattttttgtgtgttaaattttgtctgaatgttgaatatcttaactcacaatgaaaaaaattctcttttagtttttctctaatatgttgcttttcttatactcttctatatactaaatttttctcacaaagtgaaagtagagaagagagagtagttgactatgtgagtgagtgagtgagtgaaaattcttaggcattggattcttaaggaccccaaaaaataaaaatacaaactttattaattttctttaaaaaaaaaaccaaactttattagtcactctcttttcttttggctataacatgaaaaaaagagaaaggagaagaattgggtaataccccacatcacaccaaaaccacatacatttgttaaagttttcatttttaacatgtaatgtcaatggggttttgctgctgaccttactaaaaagcaaaagcaaataaaacccatttctctctctcttctctttctctct

SEQ ID NO: 116718 - DNA, 1585 bp, Cannabis sativa
agaacgcatttttgttttacaaaagcaaaatttttaaaaacaaaaattttactttccttttgtgattaaaaaattagaaaataaaagtgttaccaatcggtaccaattaacagacaatctatcgttttctttaacatatattgaaataaactgtcatatttcatgtttccaccaaggaacaagttgcatagttgttaacaaaactattagtttcaacacagatttaatcactcaaagataagatgagactgcaaaagattcattccacattttaaagagaagtattaagagtatcttaattttagtgagctgttacttgttattgttagtgagctgttagagttgttagttagttagtttttattttaactaaggtggcgtttggttactaagtgaaaatggaatgggaatgggaataggaatgagaatgggaatagaatggaatggaatttctattcttttgtttggtaaaggctatggaatcaacaacggaataagaattattatgtttggtattgtacggaatggaatagaacatttattattttgaccaaattaccctttactcttcaaaaataatatctgttttattaaattaccattattttataaattgaaaaaacaaataatatttttagcaaacaaatatatttatcacgtgatgagaatatgcacaattttaaatttaattattaaaaaataaaataataaaattacatataaatatctaataattatcaacacaaattttttatagggcaaaatggacttttgttggtaaggaattagctttctattgattttataatggaaaagtaaatccttagtttaggtgatttgtaattctattggaatgggctttcaagctttaataaagaaaccaaacacttgattgggccatcttaaggaaagataagtccattctattgtccattccattggccatcttaagtactactctagtgagcttatatatacagctcacttactctgtattttctcttctaattgaatcaatacaattattttcctctcttcctttgttcttatcttcttctagctaaaaaccttttagtgttggcaccttgagttgtcactaaaaaagcaagtttgtatagtagtgtaaattatcttggaataaaaataataaagagcaaaaaattagtgtcacgaccgcttgagagagccaactagtttgaccaccgtttacatatatacatgtcattatatagcaaatatgatccattacagattacaaaatctacacctcatcgtaataatacacaaaatacaacaaatatatattaaaaaaaggaaaatgccattgccgcccctctttttattgagaaccatgcatatatgataatgtcaatataggtatcgagagttggctgtttagggtgagtacgtaagttttataaatctactcattattactgaatcaaattgccacaacatggtatatggtattgctattaggcaccagcctagcatcttttcgacatgttgcgttgtgattggctagcgatattccttaaaagctattatattaaattatatgtgacccgatacttaattggaccaa

SEQ ID NO: 116719 - DNA, 1727 bp, Cannabis sativa
  modified_base (1666)..(1681): a, c, t, g, unknown or other
aaatcacgtaatacgcatatgctagttagggtgttacaagatatgtttgatacaataggctaatcagattgctgagattgttgagattgctgagaattttcttgcatcttttgtgttagtatagccataagcctttgacattatgcagccaaattttcctcttcaatcatcccctcattagtatcattccatactgcaaaattagttgatgatcgctcaagttgatttcctggttcaggaatctctcttggaaatcttccatacaatcgatggtcaggtggatatccatgaactctatagtattttgcaatagtgtgcccagagataccataatgagaacaaacaagtcgattatcagatcgatcatatcaattattagggcgattatttcctcgattgtcttgtgcatttcctacaaattaacctgaattctcaataggaggttgtgaagtttcagtttgtggaataataattcctctctgtttttcttctttaattatgcaagcataagctttattcacatttggaaggggattttgaagtaagatctgagacctggcattgagataggattcatttaaaccaattagaaactcaagaactttatcttcatcctgatactcttgtatgatcttcatagcgctacaagtacaaaccggttgtggcctatattcctgtaataaatcccataatcatttaagacgagtgtagtacgaagtaacatcactgggtctttgtgttaaagtctgcattgatctctttactttaaaaactctaagactatttttttgatgaaatctctcctgcaattcagaacagattcgagaagcatcttctacatacgtgatactattagctatagtaggtgaaataaagttcaagatccatgaaattaccaagctattgcattaaatccacgcatcatagtcttcatcatcttcatccagagctagaagctttccatttatgaacttaactttgtttctagccaacaatgccaccatcatcgatcttctccatgaactatagttatctacaccagtaagaatcttcaggaccagagatgaagatgcattgtcagcatttgaaagataacaaggaccgcctggatcattcattgaaaatttgttattttcatcaagtgctgaaaaacgattcgaatgttcaacaccttgattacgattgttgcgagtttgattacctcctcctcatgccatggaagaacagagtaaaagcagaacaagatgaacaagaagaagaagcgaaagcaagaagctctccaatcaggtggctctgataacatattagttttagagaaagaagtgatcatagagaaaaagagagaatgaaaaatgataatgctatgtttcattgatagggaagaaagtagtacaaaaatgtttatatacagcttcagacaactaaaaccagctaacaacttctaactaattcttaacagactacaacaacttcctaactgttactccaccttagtaacaaactttaataatataaaagttattcaaacggtaaaaataagacaaagcttacacttatcttatacttttagctataagcaaaagtaaaagtttagccaaacaaatcatgtctctgctactataataaagggatgtgttatgtgttggaattattttaccatgatctnnnnnnnnnnnnnnnnatgttgtttaacatcctaatatgaatttctaaaataatgtaaataa

SEQ ID NO: 116720 - DNA, 1597 bp, Cannabis sativa
aatggcaaaagtttttatcataccaagaatattctgataaaagtctagtgacctttccaagttctcacacaacactccaacatggtggacactaacaactccgtaatctgcatattactaacaaacaattaattaagcacttctcaaagccaaaaaaaactataaatatatatatattggaaaactagtagataagtacagagaataaggatgttgcaatacatagtttaagcatataaaaaatggtcagatcactacaactacaagcaaccgcccacccctttattctcttttagcgctttaatagtttaaaccacagttctctccctctctctttgaggaaaataaacaaacataaacacacaacaatatgttctaaagacaaaatattctctgtacttcccaacaaagaagaaaaggataattccaaaaaccaaattcataaacaaatctgttacttttctttggttctcacatcatggacctgctagtcaaattgaatcagaatcaaacaaagaatccaaactctattgtttaattttctccaaagcaccaaattttaaataccccaattttgattacaatagaaatttagggctaaaaatacaacaaaaggagttaccattgctgtcgttgacttgaacagattgtttctctataacatctccttcaaaagccaccttagctttagtcacgaaacacagcccatgacccttaacacttctcaaattattctggttgaaaagtttggatggtgggttcgtagatgtgttcttcaaacccctggggtttacctgaaacaatacaaagggtactcaaatgactgaaaaatcaatacatagaggattcaattggtgcatctgtgtatgagaactgagaaatattttagttaccttgggttggagaagaagagacggaggtggagtgagtagggaagccatggaagagcagaacctgaaatgggttagtttagtttagagttgtagagccactcgtgttgttcatggctcccaatttttagcaactaagggaaacattatgagccacccattcactgtttccttagtttggggtgcttatagtaaatatttaaaatattgggattataatgtgaaatactaatacttgaggggccccccgttatatcaattttttttttttctttttttgaaagtcaattttatttgtttcttaattagcaaaaggtttcattttggagtgcatcaaataaatatcaaagaagaaacaaaaccatgagttgaaactgtctagaaaggtgaaatagagacaatacaatgggcattgagagccattgtcacactcacacatttatcaatttttctttttatttatcaaaatttattcacactatagaaaatctataatgcatcctctaagggaaatttgattttctatacttacatatacctaatatattttatccagggccatcttataaatttttgaggtcctgttctaatctttaaatttaggcccttaaaaaaatacaataaaaaactaataatattttcaaatattattatattacgattatataatttacaatattaagcaccaaaaaatttaaactatttta

SEQ ID NO: 116721 - DNA, 3518 bp, Cannabis sativa
  modified_base (2739)..(2745): a, c, t, g, unknown or other
tagggcacaaaacccaacaactccatcactgattatcgaccaattaacctctgctccacaatgtataaatccatttcctgcagcctggtcaatcgtctcaagccaattctatgctgtatcatttcaccatcccaaagtgctttcttgcctaaccgcttaatctccaacaacatcatcatcggccaataagtcactcattatttaactcaccgcaagcatggtaaagtgggttggatggctctaaaactcgacatggccaaggcttttgatcgtgttgaatgaaacttcattaggaaggtcatggaaaaatttcacttcccatcaaacttcaccaaccttcttttaacctgtctctccaccgcatccttcaccttttctatcaatcagcaacttcttggatccatcattctatcttgtggcattcatcaaggcgttccactctccccttatcttttcatgttatgctctgagggcctctcatgactcctcacccaaaaagttcatcaacgcctcccaaggaagcacactcttggcctaaatattgcctggacagcaccaaacatatctcatttgtttttggctaatgatagcattctcttcagcgccgcctctcctgtagctaccacccacatcaatgaactccttcatgcacagcctggccttgggtcaacttgtcaattatgataaattatcgctctatttctctccaaacaccactgacttgattaaaaatcagatcacttatttgctcaatgtgcctattcgagactctgttgagaaatatttgggactcccttaatcttttggccgcttaaaaaaggaagcctttacctaccttcaagatcgcgtgtggtcccatttaaacagatggaattccaccttcttctcaaaaggaggcaaagaatttctcttcaaatcggtggttcaagcgatactgtcccatgcgatgacttgtttccaattacctcactacttccacaaaaaaatggagtccatgatggctcaatttcggtggggaggaattgaccacaacaggaaagtacattagaagagttggtcctacctttgcaaatctaaattccatggcggcctaggtttctgatcaatgaaagctttcaatcaagcaatgtaagccaaacaggcttggcgcattcttcaggctccttcctctcttgttgcccaacttcttaaggcccggtactaccctcattctactttccttgacttcagtaaagggcaccatccttctcttgtttggaataacatttcttggggcaaagcactcctcttgataaggttacataatataatgggtaatggtacctccgtctctattttcaaggatgcctggatcccgggatacgggaaactaccctaccttcaaactccaaacatccttgacaggaccgtgtccagccttataacaaccaacggagaatgggatatatccctgattcaatctatattcccaagaaatgtttgctaagctatacaatccatcccaatccttcgctcacctgcccaagatcgactctattggtctcacactccacatggaacctacacagtaaattctggttaccatcatgcatatgacattctccaccaattttagccttcaccctccattacaactaaccaagaaaagtggtagaagttgatctggaatatgaagatacctttgaaaatcaaacattttatctaaagagtataccatgatgctctgcccactagtgtgaacttttaccaccgccaaatagtgagatccccactgtgttgccgatgccatagccacgaagaaacctgaggcacatgctttgtttggctgttcaatcgtccagaaggtttggaaattaacaatcattcatgaaaatattagtaaactaaaatacttgctttgtaatgatactttatatgtctgtactgattaaagacttttagttttttgtatgtatactctagaaaatttggcattgcatgaatgaattactacataacaagctagttcaagacgcccctctgaccatccaatggacaaaagattatttgctccaatatcaacaacataatgcagcgaaaacaccacacaagattcaagacgctagaagtccttcattccattggcaaccagcacctccaggccagcttaagctcaatgttgacgccgctcaaaatattcaaaaaaacatgttgggctttggcttgatagttcaaaatcataccacaaatgtcgttgtagccttagctattccttggagaggtgttcaccaaccagttatgatggaagcatattctcttcaactcgctctcgaatggtgtcaaaagaactcacttatgattcaccaaataaaatctgattgtccaattctagtagatgttgtacttaaaggttactccaataacattcatctgcaagaattcattatcaacattaatagcttgccgtcttcatttcctcaagcttcgattagctatatccctcaagaggctaattatgccgctcatagtctagctaagtaagctctaggcttagaacaggaggctattctctgatttgagcaactgtattctctttcttgtatcttgtattttctgagttttttcttaatggacagtttcccttcaatatatatatatatataactgtacatgtttagctaaacatgctctaataatagttcagtattttacctcaacatcaacaacaacaacaacaacaataacaataacaataacaannnnnnnaataataataataataataacgggagcattttttttgataaatcacaccaaaactttaacattgaggagcactaccaaaactttatatatattatatatttttttaaaagaacacttgaatattatttgttttttctatttaaaaaaattgtaaattctccaatttcttttaatttttaacacattatttgatatattttaacaattttcataaatttttacatataattcgatataattatatatgatcttaatattgtcgaattattcttgacaactattggttcaaccttgctagacgttcttgtgtggatttgaaaattacctttggatgctggcaggctgagcttgatgtagacgatgccgtgtatgctcagagtggccaactgaattttggagtgattgtgagagacgagtggggacaatatgttcggtgttcactgctcaaaagatgtgttgccaaaatcccgtaacggctaaactaatgatcctattcatgtcttgagagctactgtttgaacgccattttggctatcctgctgtggcacgattgttttgcagatgacattattgatgagaatacctacagttttatttatttttgtcagtttgttccaaataaggcaaaacttaatctgcgaatgatatttctcgtttaacctttagctggtgtttagttgggaggaatgaaaatatgagaatagaaatgagaatgagaataagaataggaatagaataaaatttaaagtgtataaaaaaattgataaaagaat

SEQ ID NO: 116722 - DNA, 3417 bp, Cannabis sativa
tttgacacttaacagctgtcttgacagtcacggtagcattaatcttctttatgcttcctagaaatcaccttggaggaaatcaatttccctattaaagttctcttaacactatctttaccgacatccacaaaaactgcctcaagataaccatcatcattattatcgtagtcaaatgaatagtttaaagctgttcatttatcacgatccatgattaaaaaacaagcaactcctataaccaaacttttacacccagagttttgaaaaaccaagatgtcaattcaaatcagagagaaaatattttttgtaagattttttttttccatttctctatattattagactttgtttgcgtgaaatcttaaaatatgctagaaaatgggataataatattgatttcgtatttgaagatgcttgaaagaatggaattgtggaaagagattatgtttaaattttaatgcaggattttctagcattaaaattttaaatttatcacatatttatattagtagttgtgtgtgcatgtgcctcgtatctaccaaaaacaacataagaatatactttctattgagaactacatttaaaatacactatcagtttagtgtcttggtcctggtaagtgataggaaaagtttacaattaattcaatacatatttctgcaaaacttttactatataaaaaaagatagaatctgctggagacaccgaaattaagtgaatcacatctcgaacgtctaccaatcttaatatattataacttacattgcttctaatatagaactaagaaatagtaagtgattaattaagttctgtgtgacagatatcctgaaggctgaagtaaaatactatattcttaccttacaatttcacaaacaaaacggtcacagcaaagagttcttaattctcaaaactaggtactaataaccccttataattatcatattatatcttcctggctagtatatatatattaggattgacccatatctttggctttgggacccattagataacaccatcactaccacgtactgtaccacacatcacaaaaaaaattcacaaatatttgatgattaggtcattaaactaaataaaaattaaattgaaaaataagagaaagtaattaacacaacacaaggatccaacgcacgctcacacagtatacacaatcacaaagcatggaagcacagcccttggattaaacaccaagagctcttcctcgtctagtctggtgtgggccccattcccgccacgtcccaataccgagtcaaacccaacgccgtcatctttctccacgtcgtccgtctcgcacccgactcgacccgccacgacccggcataccaacatggcccgtttcacgttcatgaaccgaaactcctcctcgatctcttccgggatcgccacgtgtgccctccagctactcgacagcgtggaaattccgtccaacttgggtgagaacccggatttgataatcccacaaacgctacagtactggtggttacagatccctgagcttccactcacacccaaatcacataaaaacgtcgaacagtgaaacctcaacagctcgttaccgtccgcgatgcacctctcgtcacgtgacttctgaacggcgccgtttcgcgcggccttggctttgactgtctctcggtactcttcgaatcgagtcagtatcttggcgctattgtggatcttcagtaccctgtggataatcgggctcttatttcgggtatcgttccaccccgatttgaatatgattcggactatgtttttacccgaatcgccgtcgtagagctccgaaacggcgtgcttcatcgtcaggtgctgttcgaggagatggggcttttggaaaatctcaccgcatgccgtacaggggaagatgtcgttccggagtgggaagaagagatcgctgtctcccgctgctatgtcagattccgatgacggcgaatgctttttccgaggtgctgcttcgacgacggcggcagaggattgatctgactgttcgggattgacgagggagacgattgagtgctgggatgatcgcggaggcgtcgaagggtgtgtttggatacaggttttacgggatttggccgaaaagattcctttgatataagaccaagaagaggagagagctttctgggtttttcgtttcttggagtgattaccatggctttggatgtggttgtcggtgccggtagtggggctggtggagaagacaaagcaacccaagttgagaaaaagaaggaagaaatgagagatgagcttggttaagagtgaagatattgtgggagtggccattaaagttaaggtctgattacttgcattgatctaagtagctagcttgctaggccatgatgcatggagatcgaagagctagagacagtaaagagaaactcagtaatggaagaatgagaagaaaggaaaagctaaagagagaaaaagtagtgttaaaagggggctacgtatgtatgtagatggtggagggaaaaatggaacgagaaaaagaagcataaagccagagagtagttgatacgcaaacttcataccgattctcttattttttttttctttatttaattattctccgctgcgtgtagtgttatgattattccatttccactcttaaattatatatattattatatttgtctatgtacgtacatagagtgggatggattaatggcaatgatcagttgagaatatcatcatcaaaatcgtgggatttacagtggtgaaactttcacttataaccttaattagttggacaacaatattaatgttaagagcattgctatatttgtcctgcataaatatataatatttatatatatatatatatatatcgacgtgatatttgataattgattattttatcatttaaaatggagtattgctattaaaattttaattataatcaacactatataccaagcattatggttaacagttttttacaatatttattaaattaagacatgtaaaactttaagatgccggttaacatttctccttaaaatatgtgacttgatattgaaattaatatacctataacaatatactacctcttgtatttggcactggaagagccctttaccattttctctaagtaaaaacatttaaggtataaatacaaaaataaagaacataaagattttaagtgaaaattgctttaagctagggaaaatcataatgcattggccttatatattctttttgagtttgagcatctttaaccatctctctaagtacacactgttaagtgagacatatgaaaattgattctctataatagagaataattgataggacctatctaaatcttagtaactttctgtttttttgataaaattttttaatagtattttaatcaaattattattatttttccattattttataaaattaatttatatttgataa

SEQ ID NO: 116723 - DNA, 1163 bp, Cannabis sativa
ataaataaaaatctgtcaagtcattaatgagatgtattgttttgattggttagacagaggaatggacaggttatttggacagaggatccgcttccaagatctagtgttagtgttagtgttagtgttagggggaagggtgaaaatgtcattttgagtgtgaaagtgatgagaagaagtagtggtattttgggaaatgcaactcaaatttgggtgtggtttacttttgacgaattggtattgggtgggtgggtcttacatcatttgtgtactaacattatcaaaacttttcaatttttagttcattagagtgacaggcccagagatcgcccaagattgactcatcattacggaattacattgcgttgacctatttttacttgctttttctttttacccttttcaaaatatcttaatcaacatccttcatattcatatattaaaatgtttaaaaggcatcaaatttttattataacagctatagacaaattttacagcttcttcctctcccgattcgctttgggtattgggagttgttcatataaatatatatattcaaaaagaaaaaaaaattatcatattgtgttgattaaaattatgataggaaggaacaatttggttatatatatacattttaaatcgttatattttattactttaatatgtttacagtaacgagtataactatcgtattgttcaggtggagaatttataattagttttttcagagaattcaaatgaataatttcaacaaaatattttaattttttttactatgttcaagtttatatatttctttatttgatatatttctttattagtatagtattttatgttcatttccgctcaacttcctacttagtaatttcaaccaagttgaaggtggaattggttgatgacctacgccatatttttcaacaaaatctcacgtggatttgtttttggtgacaatttagtttttaaaatattatttaagttaatttaaatatttaatgtaaattaaaattaattttattgtgcaatataatttttatggataatttgtatattttagaaaatgttttcataaaagagaaggaattctctatgaaaatattgaataaaattgtttatttatggtgtaattagttttagggcttttttttataaatgtacaacaaaaataa

SEQ ID NO: 116724 - DNA, 3372 bp, Cannabis sativa
caaaatgctctacaactgaccaaatcaatacctgtgacaaagctcaccttcgaacaatggaaaccccgcataactttttgcagaaatcaaccccggtatatactgatgctgtaataattaactgaatgtcaaaaggggccaaattgtttctccaattgggtatattttatttacacagcatgaataataggcagaaatcataaaacaaagtgaagtaatttctcactaagataagtaaattaatattcagtagaatgaattaaggataaactgagaacctgttggagttacgacttgcttctcagtgaatggcaaatgtccaagcccatgctccacaacctgagagttgagttaaaagttaaaaaaacatcgttgtaagttcatgagtaacgaaataatgaaaattggattgccaaaatggtaaaagttggagactaccagtcgaataagccgatctgaataaaagacaaaatcatgctttgatatttctttatcccgaatcagtgtatgcattcctcttatctgtaggatcaggaaaccagataaaggatgataaagtgtcacacttgataatttttaaacatggtagactcaccacctctgttttaaaggcacttctacttagcaatattcgaataaaagttagccataaaaattattaatagaatcataactctttctccaaaattaccaatcttaaaaatttataagtagaatcattagcccatttactatattgaatgctgaattcaagggggaaaaatttgtgatattttgtttgtttaaaatactaccaagtgataattagtgtagttcaagaaaaaaatacttggtaaaaagaaatctaaattttcaatttcatgaataacatagacattgtacctgaaatgttgattggataacatagacattaggatatattttgcataggtcatgctggccaagctttgtgcgaatatgttgcacaatcaaatcaatggcaacatgattatcacctccacggggaatgataacatcagcatacttcttagatggaagaacaaaatcatcaaatgcaggcttgacgaacttagcatactgcacaatgaataacaagtttgcatcttaagattgaatatgaaaacactatataagaaagtgaaataacttgaatctaacagcttaatgtttttctgttattgagtgaagctaaagggaccatttacttagttgcaattatcatattcgacattcttagtcatttcaagcttctttaaataagattcctaagtggcatagtaattttcttaatagtctttaattaactgtcttgtgtgtcagtttttaaatatcacaatatgttgcactgtaatggttttggactaattttcctctttctttaaaaggtgaaaggaaatacccagacctacttttgcactctcaggaaggttctattttctaaagaagttttaattttcgatcttctttcgccgatacacctgcaccagaaggtttgcagtccttgatcaagccaaccaaataatttacacacacaatgcatctattatcaggagtttcaagatatctctctggttaactgttccattcatctagaaacaattgtgtaaaataagttgggtttacagttcacctcactattaagacaaatgtacataactctttcgaatgacacatccattcaacagcacataacacagttctaactaaacacaaaacaaatatacatgcatatgtgacgaaaaattacctgttcaagaacagagtttatgtccctacccctttctactgtgtctctccttattctacgagcaagccttacatcagcatctatacacacaattgccaaaaatgcagcagtgaagcatagaacagaaaaaatagtaggcaaaacactttctttaacaatgtcttaagtaagagctggacttaatcaacttgataataactgacactgtatagttaaaattccaagtaccatgagtaaaagaatagaaattgaatggcaatagcaaccagacagaaagaataaaaacctgtgtcaacaaaaatcttcatattcatcagactgcggacacgttggtcatggaaaaccagaatcccctccaatataataacatcagaagcattaacctgaaatcaatgattacaaaagaagttaaaagattcatcccaaaaatgtttgcaccagtaagggtaaacctatttctagtacctgtcgaaaactatctgatgatcgacgatgtttcttaaaatcataaattggaacttgcacagaatgcccagatttgagcttcttaacacactctaaaagttgctcagtgtcaaaagcatctacagacataacgaaagcactgtgcaattagcaaaatttgcacacaatattctcaccaagaaaacccacacgactacagggctatataaattgaatttaaaacaactccaaatgtataaaatgagtaccaggatgatcaaaattatactcatgaacacgctctgattcttcaggagtcaaaccacggtaaaacgaatcctacgaaaaacaaatgacgaacactaaactaatcacaaaaattactataaaatagtactaattaacaacaattaaaagataaaaaaaaaaaaaaacctgattaacgagcacaacacgatgatcatgaagttgttgaatgatcatatcacagacggtagtcttccccgaggccgtacctcccgaaacacctaatcaatcgatgataaaaatccgtaacctaactatgcaaatgacgaaaccgaataaaaaatttatgaaaaatcaaatgtataccgatgacgaagggctgcgttggagcatcggcgtcggtgaaatgagaagcagcggaggcggaagaagcggaggtaggggaagaagaagagagaaggccgtcgaggcggagaccagagaaatgaggaccagaagcagcttccatgacatagtcaatgggtttggtgtcgtccgccatggtttcacagaagaagagaagttgaaattgaaattgaaaagaatcagaataagaatgagaattgaattgagtggtggagaattacgaccctgcgttttggtgaacgatccacaaacacaaaacaaatgttacgctacagtactctggctgctgctgtgtttgcctacaacaactactatttttttatgctttttgtcgtacgtttggtttgggccattaaaataagatttttaagcgaaccaattcaatagaatatgctttgaaaaattaatatattcttttttccaaaaataaaaatatgtaagaggctaattagtaattttttcctttgaattttgacatgtactaaatcgtgcccctgaattttttaggccgttaaaaattctccccgaac

SEQ ID NO: 116725 - DNA, 1569 bp, Cannabis sativa
  modified_base (1543)..(1544): a, c, t, g, unknown or other
aaaaggttgaaacactggccgttggaaccaagtgcttcagtaacacaaccagcccctaaaagtctaccacaccaaatctctaagtaaggaacaacaaaaaaggaccctatttacaattacagtccttagcggcggggatgaattttaattgtctccgcagttaaaaaagtatgataaaaggggggatcttctaaaaaaagagaagaaaccaatgaatttaaagaggcctgctggaggttctaggttggatgccccctgactgggaggaagaacctgcaccaaacatctgcccaacagtctccatgtaaagatcgtgaacggccttcatgctccgtaagaagcgggccttgtgggcattctcctcctccagctgctggttcgcctgctacagacccccaatttgaaacctagcatcaataagctcagcctggaggctctcgttggcggcacgcaggtcacagttggcaactttgacttgctctagctacgtcaccagcacgccagctttcgcagcagtcctctcagttagcagtgccacctgttaaaataggccaagtcaaagaggcagaaatatcggaacatgggcaaaacaaacgaacaaaaaagaaagaaaaatggaggtaaacttaccccaactacctattgtttggaaatatgggtcagtgcgaaagtgtccacattgctgcaggaggcccaggtatccatttgcagttcagaagcactctaagccaccaggtccagaactttagtagcaaaaggggtagcctctctgaccatctaataagccagcctcttctctaaggcctgacctccacggttgaccccgcagggggtagatcgtgcatgtgatctgtaatctcggccttgcagactgctaaaagtacaactaccctgctgtagacttccagcctttctgcctccaagcgccccttcaatgcctgattcgcctccctctccttctccatgatgatatggtcgaatggaacgacctttatggggaagggaaaccccactaagaatattcttgacaaggccaagggacaagatcaaggctgacccagcctcagtgggggatcgtggcactgggggtggacccccatccaagagactgacacctcgagtctactttttcctagcataattgccacctgctgagttagaagagccaatttttttccattgcaattttactatacttgctagaagttgatacaacaccagaacaagtcagctcattgtgtgaccccaaaatcgttgaaggcaactgacatgggcctagtattcataaggtggacacacccacacaattccatcaaaactctacaacatgtaaaccgagaagaaagcttaccagttgtcaagagaaatttgaggctggtacagtgtcctcgccgacagaactaatatcaaaccaagaaagtattagaagagtttcgcaaggcatgagaaaaactctagtttgacaagaagaaaaaaattgagtagactggaactattgctaaaggtatttaatggacactcaatgtgacagtcagtagtcccnngatccgtaaggggaaacaccgggta

SEQ ID NO: 116726 - DNA, 2454 bp, Cannabis sativa
tttttttttggcaagactttaatggttttatgtgtgtatatattaatggggttttcattagaattggcaacataggtcacttgggttgaagcttttttccaatcccattgtctgtaagtatttcgattttcagaaagaaaaaactaatggggtcgaagcgtgagaaagaagaagatgaaaaaggtataccttgtgattttcttatggagattctttcaagactagatgctaaatctcttaagttatgcgagtgtgtctctaaatcttggctctctctgctacgggctccttattttatcgatcttcacttccaccatcatccacctctacctcgcctagttttcctccatgacaagactaaaaggttcgttcactctttatccatttgtgattctgaaacttttgctgagatttcttcacacaaatttccctttattgaaaagggtacaacaaagctaacacttatgggcagtgataatggtgttttaggcttttctcaaggtgataggatttatttatggaatcccaccattaacgagtttaaacaactgcccccttctactccttgtgtgtgtgattatactgtagttggactcggctatgatcacttgaccactgatttcaaagtggtccagttcacatctatagatgaggatggtaatgaagctggctttagtagcgtgtttaaagagggtaaccctgtttggatttatagtttgagaagcaattcatggaaaaaaatggcaatgcctaacttattgtcagattttgaaatacctacttctgatctaactattactcgtgttgtgggttgctctgttgttgttatggcctgcattaattggatagtgtgttttggaaatagaactgatcatctccaatcatctttagggatattttctttcgatttaagtacggagaaaattaagcttataaagcatcctcaaatcgaagaagggtatcattttaggaagctaactaagttttctgggtgtctttgttttttcacttctggtttataccaagaatcagttcacatttgggttatgaaaaaatatggtgactcggattcttggttcaaatatcggtcaattaatttatgcagtcttcttccatattctagctgcattccaaaagattttttgaacaataagaatcttttaatttcttgcactgactctaattattggtattcttatgatacaaagaataagaggctagaaaatatgggtaaaagaattggtgtgttggagtctactacatatgttggaagtacttttaagttaaatggttaataatgtctttaaaatgtagatactgctttacttgagagtttgtgtaaatatatgtttggaaacttgagagttgtttcatgctgctttacttgtgatgttggctgcaaattcttcagtaaagctacaaatctatatgactattgactggtttataattgatgctgatgcatctttggacacgagcctaactctttggttaagttcttaatgcagttagcaccttgggtacttaaaatggtgatccctcaaaagtgtagttcttgttgtttaagactggtgaatgagtttgtgtttattagttttcctggtttgtgaggatgttgttttttgtgtttcgaaactccttgtatgttgttggttatgtttgtttcctgagattttagttgtacaattatatttatatatctaaactctttccttatccctagaaaatgtttgacttggatagattaattttctagcttggttgaagttaattatcttttgataagattaatttttagtttagctaaggcctcactttgtttttctcttcaaaatttgggtttttcatcatacatgtgttgaaacgtaatcttgatagggtcagaaaaatgttccacctaacaatgtgcggtcataatagtaattttagtggcatattataaaagtataatcctaatataattttaatttaactgtaattttattatatcttttatttttttaaaaaaaaaaatagtatgggagctataaaagtatatatatctattctatatatgagaaactagtaaacagaccgccttttgcttgcggcaattaaattattatataaataggtattaaataattttaaattatatatatttattaaataaaaataataaatttatatagaaaactttataaaattctaaaaaaaaaaatatcatacaatttcttttataaatagaaaaacacattttttttttaaatgtatattatagtgaaaaaaaaaaaaaactgaacaataaatttatagaaaactcatcatataattttaaaataattatcatcactatatctcatttttagttactattgcatttaaagttgatgtcatcaccgtatctcacctaatattgttcaaaataggtaaatacttacttttattatgtaaagagaaagggggtgataaaaa

SEQ ID NO: 116727 - DNA, 1760 bp, Cannabis sativa
tcaaagctaaaacccaatttccaagccagcaaaataccccccgcacatcccttcacaggaaccacaatattaaaataaaagtgcaaattgtttagagtacgtagcacattagcagcatcaaccttaagctcggtaagaaaaatgaaatcttgtgagcatgaccaaactaggtctttaaatactagaactgtagaggtctgtcccaaccctctacagttccaagcaacacctctcatggctcttgtcgaggagggactccaccctcctccacaggggacattacatctgctacaatatcggtaaccgatttttgatcttcaacccccactaatatcttgcatggaattgagatatcatgaagtcaagctaaacacgctggacgcacctttgacatacggtccacttcatcattgttcgtcgacacgtttgaactagtagcattttatttttggattgtatcattatgagtccctaaatacagacccactcctcaagggaagttttgacgcacacctctacattgtctcagtagaatagtcagtttttccctagtgaaaacgtatctaaaaccaattttcactttttaactagagtggttcgctcaatgcactcagaagaaagttgcactccaaagacaataaaattagcttttctgtcgttcagacaataggtctcgaattgttttaggtccttgatgtagccttcctcagcgtggaaaaatgtaacgccttgatacttaggaatgctacagtgattttctaattaatttgccacctttgctaatcaaacggatttttctttgaaaatcgtgccaaattaaaactttacttgaaattattaaactttataaacatatttatatatatatatttacataaccgggatctcgagttaaacttttataaacataaccaaaatatttttacaaacatgtcgcacaatgactacaaaatactatccaagatgtctcaagatcgaacactcacagttgcgccatccttattaccccatagggattcaggagattttgacctccccaatcacctctggtttcaaccatgttaccctgacttcttgtattttgttgggtgtccatttaataggacttagcctgtgaacccataggccaagtgggtcagacaacgataacataaactcaatataccacacttatagattttaaggcaatgcataaaaataaataattataatctattatgcttcctaacattctttactaatcacatacattactaaataaataaaggtttgctgaaccgcgagtctaagcttttctctgacaataagtgtacatgtcttgacgatctttgacaaacctgacaactctgataccaaaattgtaacgtcttgatacttaggcgcgctatagtgatattctaattagcttaccaactttgctaaacaaagggttttcctagaatatcgtgccaaactaaaactttgcttgaaattattaaactttataaacacatatatatatatttacataaccagaatcttgagttaaacttctacgaacactaccaaaatatttttacaaacatgttgcacaacgactacaaaatacttttcaagatgtctcgagaccgatcactccaagttgcgtcgccctaacatgtacaatcatcatctaagctaggagctcactccaattcagcctttgccttacctttacctacacatgaaagtagcaactgtgagtcaatagactcagttaagaaaatcatataacaaataat

SEQ ID NO: 116728 - DNA, 765 bp, Cannabis sativa
aataatgttagtttgatgtattttataaagtgcatactccaatttatattaaactaattacataattaatcatatattcaccctaaatatagaaattaattagtagttttaatatactaattaggatcaaaaattgaaatgattaaaaagcttagtcatgtggaattaggaggagttttctcttgcaaagtgtggtttcttgtattggttggttgatataccaattctaactttctaatatattttccttttaagtttttcattttttttttgtttttttgaaaatataatattttttttgtatatattacatgtaatgaatgaaaatggtgggaagatgggtctacagtttcccagcttgagaataaaacttttatgggtccactctccactttttgttacccacacaaacaaaaatggcagtgcataatgcatgattttttaaatttatttcaagtgttattatttatttatttatttttgttgaaaattagggtttttagttttgcatgcatatattttcagattttacattttttttttgaacatgaagattttactgtttattaacaagttcttatttcattaagaacttggattaaggccaactccaaccgtatgtcaaaatgtcaaatatttggtggcaccactaaatgtaatttaactgaactgtaaatactaatctaaatataagtatatcgttccactcacgggcggacccacgccccctgaaaaaaaaaatcgagaaaaaaatgtatatgtatt

SEQ ID NO: 116729 - DNA, 1636 bp, Cannabis sativa
  modified_base (1508)..(1530): a, c, t, g, unknown or other
  modified_base (1587)..(1596): a, c, t, g, unknown or other
taagtgttgactttgtgtagggatttatctgtcaattcccaacactaagccatgaataaagagagagttatcagatctacattcaataaaaccattgctgaatagagttagtttgagcttatcactccaagcaccagaaggaggggctactttaagccatatagagccttgtggagtttacagatattttaaggttttgtaggatcaatttagccagtaggttgttgcatattcacaatctcttgtaatgttccattgaggagggcatttgtcacatcaagccgaagaaatttccaattataagagacaacaagtgtaagaagattcaaatagtagtttgttaaacaacaggattaaaagtttgtgtgtaattaatcccaagtttttgacaatagcccttagctacaagtcttgacttttacttgtcaaaacttttatcaacctttagattcatacggtaaatccactttttacctactagaggtgtcgctagtccatatggaacaacctagtctccagacattattttttactagagctttgtattcatctgacataaaagcataccacttaagatctgtcaaagccctcataactgatgtaggctctttgggaagaagagactcaaggaaaggttgagtcgcttgttgtataagcttttggtttgaggttcctagtattagttatagtttgcattgggtgtttattagaatcaacagactgaatttgggggaatagctcctgaactacaataggtaattcaggtgaagtgtccttgtttatgggaaaattaggtagacatggggtgactatttctgggtttatggggcctgaagtggttgatgaagatgggagggcttggtttatatgggttgggagatgaaatgtaaagccctatagtatttattttctaaaatttgtgctaacctttgctagtgaaagggttttaatagaaaaaggtacatttaataaaaaccttcgtgataattaaatcattacaaaacatacactttttaagaaatatttacaatcctacatcccaaaatctagtgacaggacatttataacgttagtatcaaaatctttcatctaagaacataaaaaatacgccaacagtgtctcaaggatcgcaaccctcccagcttagacaattagatatgtaaaattgtcactctctaaactcattattgttcaactttagatttgcctttacctacaaacagaaatatatttatgagtcgataaacttagtaagaaaagcattaacataaataaaacatacatacttaaattataaatgagttaccatacaccttgttactattagtctactaaccccatctaacatgtaatttgagatctgaactttcaagcatagtatgattaaccataataccagtctattatcagtactctaattgtactagtgttggtagtattaatctatactattcaacattgcctaatatattatatttcagtaccatagtgttgttgggttttatgcnnnnnnnnnnnnnnnnnnnnnnntaatcatatttacttattaatatagatcagaaaaaacatttaatgttgcatggttcnnnnnnnnnntttcatgattatttacataatgtatgaattcgatttaagt

SEQ ID NO: 116730 - DNA, 2312 bp, Cannabis sativa
  modified_base (2192)..(2201): a, c, t, g, unknown or other
aaaaaaaaaaaaaaaagataatgtaatgtaatttaaaataaaaataaaaagaacaaatagtgacctaaaaataaataaatattctacctattaaaaagtctttactacacaataaattatgaaagattcatagttcactttttaagtataatcaataactataatacctaataattagaaaactatataaaaatttaaaaaattatatatttaagtcaaatataaagtgaatagtatcagccccacaacaccgcgttgaacccgtttcgagtatataaaattgcaccctattcctgctctattacccattaaggcgagtaattcccaccctatttggggagggtatccgtccccacgagtcaaattttcatcactaattctattgttattagatgaaaattaggtgggtaatgagtcgcaaatgcaccccctaactcaattttcattttctatttatgtcctcatcatgtccccaaccttgctcccgccccatttcaaacccgctaaggtctataaaataataaaaaaaaaattatagttttgcactaaaaattaagaatgttgttgctacatttagctaaaccttattcattccctaaaattttgaactataatagcttatctattccatagcctttttcaacatatgtttttattattatttttagctatatgtttacctttatagctattttacattagttattatgaacacttacataatttaatataataaattttacaataaaatatcattagctatttttaatgtgttactcataacagtactaattaatagtgttgtaaatgcgaattgagtcttttgacacggcacaaaatcagtacgattccgaaagacacaaacatgaaagaatgatactacaaattggcacgacatgacaccaaaaatatatacttaaacacaacatgataccaaaaagcacggcatattaaaaattcctaaaatttataattaataataataaatatgtacttatacattataaataagttaaaataataaaaaaaaaactaaaaatataatactgaatattaattaaaattattaaaacatgtaaatctatgattatatatcaatttattttataaagtgtgatataaaaatttaatatttataattaaatatttaaattttaataatgctaataatttttatatatggttatttataaaatattattaagaagttatataaatataactaaagttattaaatatacatataatttagtaattgaaaaaatatatatatgaaaaagtaaagtacgaatttaaatccgtatataataaaaacatgttggcctgtctaagaaatacaggttgatacaaacaaagtacgacacgaatctgagcacgacacatcaagtcgtgatgggcctttcctttaaaaataatggcatagtagcataacctatatttttttatagtacagcataaaaagtacgaataaatatgagtcgggctatagtacgacacacacaaatttacattactagtactaaatattataactagtgcttgatagtaatgcccgtacattaattactatttcattcttttttattgcataatttaaattgttatatattgttttgtgtaaaaatatatataacttaaagagtaaatcgtggcataaatacataatgcttcaaattttatacatttaaatactttatttttatttttagaggtaaaaatactgaatgttacaattctcttacactcattactatcactttcgttaactcataaatatggacacgtggaaggctcagatacattatattaatttattttatttaaaatttaatattcttagtatcataaactaaatgttattttttaaaaaaaaaaataagagagatgcaatactagattaccatagctgagggtagaggtgttcataaaatagtcgatcaaatccaatccgcacgatcaaaatcaattcaatccgcaaagtgcggatatctgcacttgtgcgaatttgattggattgaaaaatataaaatccgcacttgtgcggattggatattgattgacatgtaaaagtaaccaatccaatccaattcacatatataaaaaaataaaaataaaaatatatatatacaaataatattttaatataaaaaaatattaatttaaaagtttatacatataatacaattatattnnnnnnnnnnatagatcaaatgtatattctatttttatatgtaatttttttctacatacaatttaaaacaaaattagatatttctttatacatacattttttttttcttactttgaatttg

SEQ ID NO: 116731 - DNA, 1147 bp, Cannabis sativa
tgattaataaaagtggtatttttcgacttactccattgtaaaagttcatttaaatctaggcccatttcagaatacaaaccaacagaggcccatcttaagagataggcttatcgatggaccaaaaccattatttcttagcccaaaacacaaaacgcatgaaaagttttatcaaaatcaatcaaacttcacctatcctattggaccttttggtcacaggtttcgtctttaacataccaaaaaacctagtatgaaaccttgttagtgtgtttgcaactaaattatattatataaactattcttatatggttattattccaaatccccaaatataaaattaaaataaaacaagtgttaaaaaacaaagaaaagggaacatttcattctaatccaatgagcaagagtagtagactaatacaacatatataaatatatacatcatcaaattaaatttaactacttcaaaccacaacaatgcttcttcatctgattcactaactgctggaaaaccatatattatttttggctgattttatgaccaacaatcccctttgacatttttccctttgactttgcttttttaaatttaatttattttaatgtttttcttccctttgactagctagttaacatttgtttcaaactttgctaactattttgtttggtcacacaaattaagttggtcaataaaacttattttgttatgaaattgttgacccaagagaaaaaaaaaaaagagggtataatttgttttggaaagaaaatagacaacaccaaattttataaatatctgagcaaagtatgaacatttataacaaaaattacaagtattcatgattgtaaaagacacaaaaatgatattggttcaataacagctcaatttgcctaattcacatttttgagaatttgtgattaatcttattacttagtatgtatcataagcaatgtcctttaaattacataatcaataatcaatcttgtcataaaataacatagaaagccatgcccattttacataataaatgcattaaataaaataacaaatatttttttttttaaggaaaatggtaactttattaataagaagattcaaccattacaatagaaagaaaatcagcgggaacattatcctcgctaaatatacgatctg

SEQ ID NO: 116732 - DNA, 1691 bp, Cannabis sativa
  modified_base (1522)..(1533): a, c, t, g, unknown or other
ttttgtactatccataatctctccatctgttgtggctctctcaaacccctgatctggaaaattacctccagtaggttcatcctgctcttccaaactaagtgcctggaatgtatttctcattgtcactgcagggttcatctgttgcttttctcttctgtcccctttctgcccatttgaaactttagtaaagccatcttcatcaattacagtggcctttctattatcctttttcactatctattgttgctttgtgggggcaacttctttacattcatcagcagaatgtccaattcccgaacaatgggagcaactaatcagcttccactcgtatttgataccaacagaggtattggatgcatattcattttcaaactctaggatactcgggagttgttgatccatttgtacctcaactaacactctagcataactcagtctctccctttccttggtaatagaatcctccatgagaggcttacctagctgcccaacaatcttaaagagtgacttttggccccaatacttcaattctaaatcctcaaggtgcacccaaattggaacacatttgacatcttctttcttgtaattgacattaggatcccaaggtttcaagataactggtctacgattgaaaaaaatatagcccccatttataacctgatctctaaattatagtgagttaaaccgaatgataaagattccataagacaatactttcactcagtcaaccttatcatgccaaatcttctttgtaaacccctcaagaacgtacaatggtggattaactccaagaacataacatacaattgaaggattccaaaacaagacctcctcttcaatatcatcaagagtaattttcactttcctatttgcctgttcagtatccttaaatgagttctccaagttacgcatcacagattcagatcacagaatagggggtatcgagttcttaccttgcagtatgttaccgttacattgatcattggccataagaaaatgaatgaaatccttccgagcgtcacttctagcctcatcctacctttgaatctcagctagggaagatttgggagataatggttgaaaatctcgatcctcgccctgcaaatcctcctcgtcttagacctccagcgactccatttcagtaattcgcccaatcgaaacagaacaatccacatcaggaacaccattaccagctcttttctttgaatttttagtagcaaatttcgattttccatggttcttcgatcttgttttagccatagaaccagcttctcagctgcaagagctaaaaccagagaaaatcgaaaaaagttgaaatttaatatttatttttttttctattttcagaatatttaattaaatagaaaattattttaagttagaaattttaatttcagaacaacttaaatttgaataactttcaaaatatattttattttattttattaataatttttttaataaattcggaattgcattatttaaaggcagataattttgaattttttttgaaaaatagatnnnnnnnnnnnnttaatttttaattaattttagatcaacttaaatcaaataaatattttctcattaatgattatttaaataattggactaaaatatattataattagaaaataatgtaattagttagtgaaagtctagatagttattttttgtttgcttgaagtattttt

SEQ ID NO: 116733 - DNA, 2079 bp, Cannabis sativa
  modified_base (51)..(56): a, c, t, g, unknown or other
tgtgtttaaattctattgttttagaaattcatgtttaggatgttaaacaannnnnntggtagtaaatctagattctagtaaaataatccacaacagtcatatcaacaataaattggttaacaacttgatccaacccgttctaggccttaaacttaaaattgagagtttctctatcgataaaaagcatttaacgctctaaatattgagaaaacacctacaaacaagattttaggaaaaagtccctaaaaaacggtaggccgtttcctaaaaacggcaagtcgtttctctgggacattgccaagaaaaatagtagactgtttttggtctaccgtttctgctccataaaacaccagacctcatattctaactcaaaactacccaaacgtcatacaaagctctagatcacctaatatgagtccaataaacgcaatccaaccaaaaatttcatcatcgagcccctaacacaaaatctaccattattgagttaggtttgaccttaaaagctcaaacccaactcaacttaggtttcaaccaccaaaaacaattgaagacaacaacatacaactataattaacttccaaaatcaacataaaatagaaccaaaccataacaacatctctagcaaaggttacactacaattcgagcttaaaacctaacaaaattcaaagagaaaggttagctagagtttaccttgtaatttccttcaaaaacctcttagattcctaattgaaaatgataaaaattatggtggaaacctagaggctatttggttgtattttcactttttagttttcagaattgtgtttttaaaagtaaaaatagaaaatagttttttatcattttaaaaatttaatggtgcttggctcaggtttttaaaactatttttagattttttttactaaaaaaaaaaatcaatattctacactacaccatgacatgaacccatccaaccccaaaccgaacctcaaacccaaaaccaaacttggatccaaacccgaactcgaactcgaacccaaaatcaatcccaaaccccaaacccagactcgaacccaggccaggacccacacatgggttgaggtccgagtccagtttcagttttatggtctgagtcagggttcggggtttgagtcctggttcgggtcaggctagggtctaagtctaggtttgggtcgagggtcaggctggggttcaagtctaggtcaagctggggtttgggtccaggttcgagtcaggccagggtctgggtctggtcgggtctaggtttggggttcaggtttgagtttgggttcgagttagggtcaggtctgggttcaggtccgtgtttggggtctgggtctggggtcgaggtctgtggtctgggtctagggtctgggttgaggttcggggttcggggtctaagactgggttcgggttcgggttgggatctagggtccgggaccgggtctaggtcaggtctaagtttgagtccaagtttggggtttgtgtttaggttcagttttgggtctgagtctgggtttggggtcccaggtctaggttgttttttcgttgttgtttttgtgatggagaatgctcattcttcctgctgtgggcaattttctcacgagaaggtcgttgtgggatggtattacgagtagtatcttgactttgggtcatcatcgttcatgccctagacccctcttgacttttgacagggtaacgagtcaagtgaatctcacgaggtcttccccttcttgacgtaccagggtacccacgggctccgcgtcgtggtggtcttcttaggaataatgcctctcttgccactctctattgagtgtgagagtctcatctaagcatcaaaataactaatttttctccatgaacacctcatgaacattagtggttcattataaaaatgggatggtgacgacgaactcccagtgtctcggacctgaacttcgtcgtcgtgcatgggttgtttgcatggatgtcgagaggtctcttaactagtgttaggttatttttagtattaattttagattaattttagtatatttttaattgagttttaatcgtgtttggagcatttttacacttgttat

SEQ ID NO: 116734 - DNA, 966 bp, Cannabis sativa
atcgcttacgagacctcggcggtggtgttttcttctcgagaatgaaacccccggcatcctcggccttgacctcgatgtgaaaattgggattgttagggtttggatcttcgtcttccagggcattatcttcgggaccaatacggcccaagtcgcaccagatcttgcgagagatctcaaaagtggcctgatcatgagggcttttaaaagagaattcctttccagacgagattttgttgagcacgttccggtacttcttcttcaaccttcgaagcttctcaacgagctggttcttgttgaaatccaactgcaatttagacttgatctgatcatagaacaaagcagtgtcgttttgaccatgatgcgtcgtcttcccacgctgcgtggtatagtcaagaaacccttgtaacagtccgatctcatcctcgtcagtccacagcctctgaaatagcttcctcgagtcatcaaaagcagcaggctttttctcctccggttggacagccaagacgatgtcgtttccatgccgatcagaaacagcagaaggatcggaagctgaagcaccagcgatcacggtggtaacaaggctagaaggagggggaggaggaggaggatggcgatgatgaagatggagaggctcgccgttggttgtaacagccggaagagcaacagtaacggaattggaagaggaaggaggcacagcaacggcgacatggaaacggtcagaggtggaaggaggagaggaggcttcaggtaaaacgtcgtcgttttcctcgtcatcatcgtcttcatcttcatcaacgacgtcgtcttcctcctcgtcttgggaggaggagtcgaggtcttcttctccgggcaaaacgacgtcgtcttggtgagaagccatcaaaattgggaaaggtggggtttagggagctaagtttttttttttcctccttttttttttctttttttttttcttgttcatcttct

SEQ ID NO: 116735 - DNA, 1681 bp, Cannabis sativa
  modified_base (1205)..(1208): a, c, t, g, unknown or other
  modified_base (1587)..(1607): a, c, t, g, unknown or other
  modified_base (1653)..(1656): a, c, t, g, unknown or other
tgtgttggcctctttagcctttagatggctaaacttattcaacactttctcaatatagtgtgcttgccctaaagcaaaacctctactatgctttgtaactttgataccaaaaacagtatccacttctccaaagtctttcattttaaaggttgaagaaagaaatcgcttagtttcttctattcctttcatgttactttattgcctaattggaatttattttgtgcagtttcaaagattttatttcgtattttaaatgaaacaatcaaaattattcttcatgtttatttaatgttatttgaaaagtcacaaagtgttaagggtcaatgcttaccattacatttcccgaagtgagaaatataccataatattaattttatttttattttgtcttttgttgaggggagggctacttttttttcatactacgttgcacatgccactgtataattaattttgacataaatatgaccaaaacaaaaatttggatgcagtttttctaaaagaaaaaagaagattgctaccgtcaattttttgttagaacctcttagtcaattttcacttttaaaaatacatattacaatatttctttttcaattttttttttcacggggtgttcgttatgcttacaacatcatccctgcaaaatttttgaaaatttttgaatagtttacagtgtcaaaaatatgtttgaagttttttgaacgcgcgtagtaaactggaatagcgcgaactctgttttcggtaatttggaatttttcaaaaatttacagggatgatattgtaactataacgaataccgctataaaaaaaattgaaaaaaaatatttcgacatgtaatttcgaacgtggaagctgtgttgtggaaaaaagcagctgtagctgtgctgtgagaaaaagcagttgtagttgtgctgtgagaaaaagctactgagtgtttggtaaatataattttaaaacagctataagttgaaaaagttgtatataagtgtttggtaagctaaatgattaaatagttgttaaatatataattactaaaataggtatgacatttgttatctaatttatttaaataattttataaatattattttatatattataaattacggtaatttttttcttataatatttaattcttttaaatatttatataataaaacaataaattagacttttactactaatactactactactactaatannnntaataataataataagatgactgttgagtagtttttgatcagagaaggattttttctgaataaggatgagattgaaagaatgtaagaagccttaaaattaattggtaaatggagaattctaaaaatagatgagggcaattgggtcaaatgaaaaattcattaaactcaaattttagcttccctttaaaagctaaaatctaaaagttggtgtgggccaactttagctaaaagctataattttaacttaaattttaaaaaaagctattttttttttttattttgccaaacactttttaaacaataactttctgaaaaagcacttttaacttttttaaaagctaccccaaatggggcctatatgattcaaaagactaagtcnnnnnnnnnnnnnnnnnnnnnatttacactgatgtgataataagcaatgatgtgtacttacacttgnnnnaagtgttatgttctttccaggacat

SEQ ID NO: 116736 - DNA, 2003 bp, Cannabis sativa
tcggttgggattggatcggtcggttgaaattggattagatgactttctgcacacccctaagataatgtgtgactttattagtagattatattaacattatttaagaagtaaagtaacaatttgcacttgcatcatgagcaaagagaccaaatatagaaagcaaatcaacagacttatggagagcctgaacagtaacaacttaattagtctccactaccacattcgatatgcttttcttttttatccagttgagggcctctttgatgtttaccatttctgctatagcgagttgacaaccaccaaggggatatgtagaaaaagcttcaatcaaagagccacggcagtcccgagcaatgaaaccagtatcaaacacattattaacttcaaaagttgcaccatccacattaatcttgatcatgctttcgacaagtttagttcaataatccctactgtcttcaatgttagttcattacagtagatgtaacgccctagcctctaaggacgctacttgtgcgctttcgtaaattaatttataataataaattaacaatttaattaaaattcgtaatttaaataaacttaaattgaaaaggttacatcggtaaaaatttagtttcggggatccctattacaaaacttttaccataagtttagtacaaattttgtatctaaaatactatacaaatacaacaccaaaaccatcccttgacaactcggctatgcaagccaaataggtcgatatgtatactttctgaagaaaattgttgactcatggctgtcctaatttacccttgcccttacctgcacaacaaagcacatgtgagtcacaaagacccaacaagaaaagtaaatgcaataatcacatgccaaccatacagataattccaaacaatcacaaataaaccgtagaaataatcatatatgtataacaatctaaactacacaaatatctgtttaataacacaagttatatttgttacttcataaagtaactattttctgttgttgcctaatgaggtaaccctgataagcctaaccaagcatctaatgtcactactgttacctaatgaggtaaccgataagtaagaaacctaactacggtctcaatttagagtaatgactctttcttgtaaaacaataattatcgtatctttataatagataataatcaaatcacaagcgataataatcgtaacttatcttgacttgctaagtggtacgaatgcaattttcttaccttaaatccctattcaggtgtgtcagccaacttgagcggagaatgaacgatgatcccaggccctatgccacaacaatggtaaatcagttaccaacttgatctaacccgttctaagtctaaaacacaaaaccagaagttttcctatcgataaatagcatgaaaataccctaaatatcgagaaaacacaaaaaacaagactttaggaaaaagtccttgaagaattgtaggtcgtttctccaaaaatggtaggccattttttcgggacacagctagaagaaacggtagaccgtttatgagaaaaagtttgtcatttttgttagggtttatgccctgaaaagcctattaagacatttctaattattaaataaagcgttgaacatttgatatatgtgtaaatgttaaattattaatatttattattgaataatttatattaaatattgaaaaatttcttattcatatatgaggttgtggcttgtagctgtacaaagaactaagaccagttagctatgaataaaatagtcagcaacatattaaagttataaaatctttaatgaatagttgctagtacgattcactcatgtctgttcttcggtacaagtaatcttggttcgaattacggatgtaatgagacattaaagtgaaggtattgtatataaaagagattatatatgacaaggaccgatatgaataaagttgtctttatcaatatgccatttatcataaagacctaattcatatgataacgatgatcaataatagatcg

SEQ ID NO: 116737 - DNA, 968 bp, Cannabis sativa
atatatatatatatatcaataaaaatcctggtaaatttcggaactaaaggggtttgtgctacaaaaggtgttcatgattaaatttaacttccaaaagttattgaagatgagaagttgttgtgaatgaaaatgatgaagattaagtacatagcacaaaaaataacttgcttatatgttccccaaaagaagtttttgggaacaaattaaataattgttaaggtaatattattgatggagaaccaaatgtatgctaaaagatgtatgactcaaatgagtaatgtttgaacaaggaaacaaattgttgatggcatataagtaagatgagatgacaataatagtatcatatgactattttcttctctcatatatgactcaaaattttataggactatatggatataaaataaataaataaatatatggttagaatttgaaagtgtggtttaaaatatagaatatggtaagatgtatggtaattgaattatgaggtgttctatcttaaaacaatagagtaacccacacttttatatatgttaataaatttcttacacattatatccatgtaaaactctataatgattttaaaactatggttttaattagccataataaagtaggttccctaattggttttgaaaagaaataaaaataaaaatgtgtaactttgaaaataatgcactagtgtgtaatgttttttagattcaagcttttaaaaaatgtcaagaataaaatgagaaattcttgtatatatatatatggttaattgttttcatcaagaattcataacaaatggaagtttgaaattaatattttaaagtgaacttaggcatataacatataatttggttacatgaatcatacatgatgatttaccaaaaaattattaaatatatatataaaaagttttattttttcctaaccttttgaagaaattgttagactatatatatagtgtatgtaatatagca

SEQ ID NO: 116738 - DNA, 2456 bp, Cannabis sativa
  modified_base (2370)..(2377): a, c, t, g, unknown or other
tattttatgatacattcctttttaaaatacatcaatgattgattattatactcttacaaaataaaaaaaaaatttatggatgattatacagatttttgttaaatagttgtaatcagtttagtaggccaattttattttccatgattagtaattaccaaatcacaatatctacaattagtaacaaacaattttaatgtagttttttattcaaacattaatggtctacacggctttgcactttttcttttttctttcttttttgataactttgaaaagcttgttatatgtacatataaaacatatattgtatgtatatatgtataaagctaattaacaatttgcacacggttcatgcattatacaaagtctttgattataatttatctagagctggtggtcggtacgtcatcatacatatgtttgctaataatagataagaataaataggttataaaaaaagattgcattgttcacttaatctattaattactaatggttttgttgagtttttaattataaatatataatttattttttataacagagcctgctttgtcttctgtagtccatgttcatgacttttttccatacctttttcttttaaactattatcctttctttattattccttgcaaaggatcttggccttaatctatggttttttatacttaattttgggtatcaaatccatttattaagccaatccatttgtgcatgatttaagaacaacaacaaattagttaatactttattggggttttttaattatttttattttattaaaaaaatatgataaagaaaaggggaagaaattgaagtggggtttaatggtattttttggggggaatatgcattgtatatgggtgtctatttgaactcaatgaaattataatttaaaattggcaaacggaaaaatacattatgtgtttgtatatgtattaaaaagaagttttcgggtcctatatggtcccccagagatatgagagcccatcaaaagagttgggagctttgtttgttggccattggagattgaaataattaaagtctataaacactatagtgtttgactctttgtcatagtgtacccttattgagttaattctttaatgatcctttgtctttgtgttgggttacatacaatgaaacaagtttgacaaattctacaagaaataccaatttaaaatgaagtgccattattgtaagtagagttaatgtcaaaaaaatcaatattgttggtaaaatttgtggctatttcattgaacacatatttagtttatattgttgaatactattctaggagggctgatgtttggaggggatgagcatgggaggaagttaatgctgtaaagaaagaaaatggcataatgtcattcagcaacaaccggccacactatttttgtcattaaatacgggaagtgtttttttttttactttaagcatatccatggggaattactgttataccatttattataacatatgttctaatcatatacaagggtatgatagtaaatacatactactacaaaaaatgctattcaagtcgatcaacgcaattattcattgcatcgaccgacatgaatagtgtcccaatctattgagctatcggttcctaaacagcattcaaaatattgattcgtgtcatttactaaaatgacataaaaaagaaaattgacgaataaagtgaaaattacttttttttgttcattacatattgtgtcggtttaaaaaaattgaatacaatgttcacgagcatttataacagacacgacatataattgtgaaggccctctaccaacgcaaatttttttgaaatccctaaacccccaaaaattagattcttgcatgttcacttcatctcaatccagacttgcgcaaaaagatctgacaattttgaaagtgatcccctctcgtcacttcgtcttgatcctcttcttattgtcttcttcatgtctatcggtgacctagccccaacccccaacctcaatcccaatcctgaccttcttgtctcttcttcttaatcaggcagcacaaccacaaccttctcctctcttcacgtaagtctttccctctctttctctccatctctctttctcaactagtaagcctgccacctagaaatgtttatttatatatatttttttatatatatttaaatataaataaatttttatttatttatttattcatattaataaatattttgatttatatttcttatctttagataaaaaaattatttattttttgtataaattattttaatttaatttattataggtaaaatatattatttatttagttaaatattatgtgtatgtgttgttagaaaaattaatttaaactccaagatcaatttgtatataacannnnnnnnaataataatatataataattaggcatgcgtacctgattgatccatagcaattacatcaattcgatccctccctagatct

SEQ ID NO: 116739 - DNA, 3919 bp, Cannabis sativa
  modified_base (863)..(885): a, c, t, g, unknown or other
ttttgtttacatattttgtaaataccaaattttattttttaaatcctatcattctatcatgttacttttttttaataattctaacatcacaacgtaatattttatattgtaccactgaattaatactaaaaaaaaaataacaactattggacaataccgcgcgaagccgcgaagcacggcttagttccctagttcatatataaatgaaaaaaaaagataaaatgattatagaattttgagaaggagaccaagagattgagatgaagatggagacgaagagattgagaagagaatgaggtttctgaataaaagagagagagagagaaaaaaaaagattaattaactggaggaggttaaaaataaataattatttatttaaataattattatttaatttaaaaatatattattaaaaaaataattttaggaataatctaatacattctaagtattaattatttatatgcactcatcaatttatgatctttagattaaatatctatggctctaaaaatgtgtctatcataaggacaaaaataaagtgcttaccatagacatgtcttatacatataatttaccataaactataatagaacttgtcaaataattttaaagttattgttactactatatcttactattgtacctaaaataataaataataaattataatttgtagcatttgtttaattttatcaatttacaactatcaatatttcagtctattatgaaaagtaggggtggagtgttcataaaatagttaatctaattcaatctgcaaagtgcagatatccacacttgtgcggattagattggattaaaaaatttaaacttgtgtgaattggatgttgattgacatgtannnnnnnnnnnnnnnnnnnnnnncacacatatttatataaaaaaaattaaaattatatatacaattaatattttaatataaaaaaaaacattttaatataaaaaaaaatagaaatttaaaaatctaatacatataatacacatatattttaaaacttaatagatcaaatatatattctattcttatgtatattttttttctacatacaatttaaaataaagttatatattttttaatacatacaattttttttcttactctgaatttgttaatttttttattttaatttgttattggagacataaaataacaataaattattttattttgttgctagttaggtgaaaaaaaatatattttttcataaacattaaataatttaagattgaaaagtaactaatccaaaataaccgattcaatctgtacttttgcagattatattggattggatttaaactattgtgcagataggactggatccaaaatataaaatccgtgcttagtgcggatcggatgtactatgagcaaaatagtacgaattggattgaataaaaactaataataaaaagtatagagataccatcttaatgatgtgatgataccttttcaatcggattctgaccttgggataccatcttgtatagaagaaataactccacatgaaagagagatttacaaaaaaatgagaaactataaaaaatgattttgcatgatactaattatttaaaggatgtatatttatatacttagaaaaataaagcatgtgattttttttttttttcagaaaagctatttttgtttgatttgttacacaagctgcgttaaaaaaatataagtataacaaatttttggttttggttttgttttggatatcattgttaaatattttaattttttttttttttgaaaaaaaaaaaaacaaaaacgtggtatgtgatacatttgaagttattattttaaaaaaaaaaattaataaaaaaagaaaattaaagaaaaaataaatagaggtatatatttaatatcaatatatatgtgatagatttcaagttattatttatttttaaaaaaaaaatgagagaattaagaacaaaataaatagatgtatatattttataataatcaatatctatgaaactaataaaatattagaaaaataagagaataaataaggatatattgaagagattttaaaatatcatctcaccgcctcataactgtcctttatatctattctatataaagtgtatctatataacacaattcttggtttatgagaaattcatgggtttatattaaaaataaaatggtttatgagaaattcatggctcactttttatttatatataataaaataaatcccattaaatcaaaaaaatacaattagttttttgttgttgtacatctacgatttttaagttgaaaacagatcaatgttgttgtgtgcatgaaagttgctattatcaatcttgatgctgctaatgatacgttgtcctgttgtcgtatccaattggcctattcagcagtagtcagtttctgattttaatttgttttcaagtattttgtgtgtggattttgcatgccaaatgttaggtctctccttaattaatgcgtaccgccatcaacattaaggatcttataaaactgagtgatgtgatgagagaccattcttttggtcctaatgaaggttagccgcatattttattgttagcttggtatatttcacataaaaaaatctttataataggatacggtagaaagtatgagaaagacattttattataacttgcactattgtggtggtatcccgacgccactgtgttgacgtaacttctacatgtagcagcgtaatgccagtattctattgctggaacgctatttgctgaaatgttatttcttcatttttgtgtcgccgacgctactgtgttgacgtgacttctacatgtagcattgtaatgccagtattctattgctgcaatgttattttttcatttttatgtcgccaatgctactgtgttgacgtgacttctacatgttgcattgtaatgccagtattctattgctgcaacgctatttactgcaatgttatttcttcattttcgtgtcgccaatgctactgtgttggcgtgacttctacatgcattgtaatgccagtattctattgctgcaatgtatctgctgcgatgttttgcgtcgccaatgctactgtgtcttgccgttacttctacatgtacgtagcgttgtaatgccagtattctagagctgcaacgctatttgctgcaatgttatttcttcatttttgtgtgcggccatcacacctaaacctctgtttcttgagcttttgataacacttaagactcataataatcttaaactcggttcaagtggttttcaactccaattccaaacaattaaattcaaattatcacaaatcttcaagccttcggaagacctaaacaaatactcagatacactaaaacacaattaatttaaggcattgacaaataatttttttttggcacaaggtattaacaaatctatatctatccatatctatataaatataaaaaggagaatcgtaaggaccttacgaccatgtagcattacatccttccaataatttatgttttctaatttgtagatttttctaacttttttattttattttctacttttcaacaatttttacacttttaatagtagttgaccttttttaaaaagtctcacatggtttagaaattatagtgggtttatacttctagattatatattgttatcccattttttgcactatgatgtggcagcatgtacgagtgacatgtgtccatcattccttgcatttgggcagaaagatattccgaatagactttaagcaacatatatgcacgcacaaagtctacttatttgagcaaagaataaggttagttctccgagctgtgtaccaagacttgactactttagaatggtatcgtgaagcccaagcacgaaggcaatccctacagtcataggattgtatcagagggatatggcaggctgtctcaatcccccatttcatgtatt

SEQ ID NO: 116740 - DNA, 1296 bp, Cannabis sativa
  modified_base (1262)..(1271): a, c, t, g, unknown or other
tccaggactgtaatttgattgatctagagctatctaggtacccgtttacttgggaacggggtaggggaactgatgcttggattgaagtgcggctagatcgtgcattggtaagtactcactggtttaattgctttaattcagccacgttaactaaacttgaaatatcagcctctgatcattgccctctgttacttgagcctactgtccgtaatgttatcattccctttcgtcaatttctttttgaaaatgcttggttgagggagccgttatgctcaaaaattgttatggatagttggaacatgtgtgatgggcagagcatcatggagaagataaagcattgtagtgaggtactttctcgttggggccgtgattacactggcaattttaaaaaccgtattgctaagtgtaaaaaagagattagattttggaaaaaagggcgtgatgctttggctattcagaaacaccgtgaggcagagaagcagcttagtgaaattttcaatcaaagagaggtgttttggcgtcaacgattgaaacaactatggttacgggaaggcaatcaaaacagtaaattcttccatgcaaaggcaactgctaggaagaaacataataccatccatgctttgaaagatgatttgggagtttgggttggatgggacaatggccttcctacagtcattcttgattatttcaacaatctatttaaagcaggaaattcgagttggcaggaggttgttatgggtgttactccttcaatttcagcagcccaaaatgatgaactgttaggcccgattactcaagaagaggttaagaaggccctattccagatgcaccccgataaatccccgggatcggatggcatgactctgggattttatcagaaatattggtcggtggtgggtcgagatgttgttgatcaagttcgacatttctttgattttggtactctccctcctagcttaaaccatacaaatatcgttctcataccgaaaaagaagcaacctactgttatgagtgagttacgacctatctctctttgtaatgtgctttataaagtgatttctaaggtgctagcgaatcggttgaaaactgctttgccccaagttatttctgaaacacaatccgcttttattcctaggcatctaattacggataacatcatggttgcatttgaggtaatgcactatctgaagcgtaagcggaaaggaagggaaggttatatggctttaaagcttgatcttagtaaatgttgggttttatgcccnnnnnnnnnntccatttcaatgtaatccattttat

SEQ ID NO: 116741 - DNA, 1582 bp, Cannabis sativa
ttaatcacataatcttgattacttttcactgtgttgacatcataataaacaagaatatcaatgtgataaggatttggatgatattataaatcaaacaaatgatcatcaaataaatatgtgaactcaataacatattaaacaattaatgaaattaaatttatttctttattgataaatgaatgtagaagattacattgaaatagagttttattttgggaacaaaacccaatatttccttgattttgaattggatagccagagggtccactgcgtggcagaccattttggctctatattcttttgcttccccttgctatctactgcagtgttgacttttgtgatggcgctcattaaatcactcaacatcgtggattcaagtgtgtttggaaaaatcaaaacaccacaataatcaaatcagacaaatagacaagaaatagcaacctaaacaatatgaattaaaacaatagagatgtcatgtgaatgaaaccgtagaatgagtaattataaggttccccttttgcaaacaaagttatttcttctcacccaataaagttgtcatgttccttgaagcctgggaagaacatagtaagaagaggacctactttagtgatattcggggagaattcccagttatttgggtgcctaaccatatactttatcgaaataatccctgattggatacctacatggatccaaaatcaagaaataactgtcaaaatccccttggtctatcagtgacatccgagataggctaggggtgctaattacacggaagggaattttacctgttccaaaagtacttgttctagaagtatttgcatccagatatgctgccagaaatctagcctgaattccctcctcctcaatgaggggatttgggtgatggttgactcatgttgcagtgagaagatcctcatctttagctgccttatttattataatagataattccgtagtatactctttgaggtcgttgggggtctgaggttggcccctgccattgacaccatggatgctttggaaattggctatcaaacgatactggcacagcaactccgtagtcaccaagtcttccactttcaattcctcctctaaaaaggcttcagagaaggttattgactgcctcaactcattcattagcacggttttagggacagactctaaaaaacaaaccaaaattagacatagaaatgggattacctttttaaattatcataaaaagttgtaaaaggatgagggttatacctggaatcttgaagtctagagacagggctagaacacgcttcatgggaaagctagttgtaaagaaccagtactcacaatggtctaggcagtgggaggaggtactcgttggggaccgagtacgtttgtacttctagaggcgataaaaatgtaactagtagtgaagagagttggttcaactcattgtaaagattatagattttcttgaggccttctattgagggtgctcttaggttgtataaattgtttttttggtttaatacactttctgatttaccaaaaaaaaatccaatttttataggataccctcgcataggttgttgttggaaatattttacta

SEQ ID NO: 116742 - DNA, 2153 bp, Cannabis sativa
gaaccgctcttccgatctgttcactacttttggcacaattcaagtaattcatttcaaagatgatattgtcataccctaagcaatgacattggaccatgacatttcaaagcgccaaagtctccgccactcaggatcaagacaaccttccatgtgccaaacagcagaagcaagaacggtacctaagtgaccacgcaccaccataccaaggccactacaagcaccaattttatcgacagtagcatcactgttaactgtgaaagaaccaaccaacggaggagaccatttcaaaataacctcaccagaaggcaaagaggttgtcagttccaaagagagaaaatgcctagctcgagcccgactatgttggaaattctaaagaaattcatgagcccaattcatcaccaagtcaagaggcagtttaatgttattatgcaccattttatttcttttgaaccaaatacgccacaaaatgaccacaaataattcaattttatccttcggcaaaggattaataacattatgaataaaactaaaaaaatctgtatgagtggaaagaggattataccgagctcaaaatcacaaaaataatacttattttgtaccttttgaagatcaatagaatttttattaattcataaaccaaacatagttcattgcatgcagatattgctcatcgagcataatcatcaaaagtaggcaaatcaagccatttataataaggacaaaaatcctaatatcatcttcaactaaatgacttataagtagatttctatcataaatgtatatcaatgacaattaaccaagaatcttttcaataaaaattaagtaaagacacgtcatttattccaacaagaataacggagaatcaaaaccaacaatgtcaaggacaacacagatgaaagattgattcatagaacaaggtgttgatttagaaacccttacataacatcactaattatctcactaagaataaaaactactaattccgttaacccaaaggaatggtgtaaactcaccattattaagaacaataaataataataataataaaaattactataatccaaaacagcaaaaataaagtaccaaaagagacaaataataggagaaccaaatactacctcatccctatctagatcccaaccatcactagtatccataccaacctatgacataccaccatagcatgaagaaaagcttagagagaaaccctaaataaaatcgtacatacttagtacattcatatttaaaaatgttgtgttaaatataattgaatttataaaaagtatattagtgaacaaatgctaaagggcgtatttcttggtcaggagatggtgatcttaaaggtgagtacaagaaaggttggggtggaacttcgagagaatcaactgtcccttccaacatttcaattactcgattcatggctggtcggtttgaaggattggtctgaatacaccacaagcttactattatcatcttcttcactttcactccatcttcttcattaacaattttctttagtccaagattctcatctaactcgaggtgtttataaatccaatgtgggaaatatatctcacttgtattattagcttcaacattaatattttttcttcctcctatcatttccaataccatcattccatagctgtacacatttgatttatgtgacacatttccaaaatttctatcgaaaacttcaggagctatatatccaacagtccctcttgtacctaacattgaaacaccagttttgtctcttttacaaatcttggctaggccaaaatctgaaattttggggacaaagccaacatcaagaagaatattatgaggcttgatatcgaaatgtaaaatttgagtgttgcaaccacgatgcaaatactcgagtcctttagcaataccaagtgagatttgatggcatgtttcccaattcaagtgatgatgattattttcatcatttgtattgtcatcaaatatgaacttctcgagagatccattaggcatgaactcgtatattagagctttattagcctcttcgaaacagaatcccaacaaagagacaatgttgacatgggatgttctgcttatggttgctacctcattcatgaaatcttccccatctttacctttggattggttcaacaccttcactgcaa

SEQ ID NO: 116743 - DNA, 1806 bp, Cannabis sativa
  modified_base (178)..(185): a, c, t, g, unknown or other
aaataccataatagaaatgacaagagaatacgaatttagcattaacaatgtactagtatgtacatgcatacatacatatatattcaattttttaaatatatacacaatatcaccactagcaaggtgttcatacagtagagataataagagcaacattagcatatatatatatatatannnnnnnngagagagagagagagagaagataagtgataagataataatgaagataaacagaggtgaatcagagggtgtcttaagatttagaaaccaaaagtgttctcaccactgtaagtgacataaagaaatccatcttcatccttcttttcttcatatatggcagacataattgcacctgcaaaagccaaaagaagcgccagttttccatggcatcatggaccatcatctcaaactgaaaaagagatagactgtatcttcaaaaatctcaaggacaaaaacaaatatatacctgtaggtgggagaacattgtccacaaaaataaagattgccttttctgcacttagtttaatccttttgcggatcacataaacaaattgtcccacggttaggtcagctgggacaaggtacctgttgtaatttgtctctcaagtcagttttaatcaaaaggaacacacagaaaagcataaagataataaaaggagaaagaaagaaagaaagaaagaaaaaacatacaatctgacataaattccttgttttgtaaagctggaaacttcaagcaccaaagatttttaccaacaaacattcaaacacacccactttataaaagagaaaacctatagctaaatagctatattatccctagataaaagagtagcagaagatattataccagtaagcaaaacttagtaatgttagacaactgagctaaattttttaaagcaattaaagtcagataacttttttctttccctgttttactaaaagttctcaatagtactcaaattaattaactttaaccatgcaataacatgcagctaagttaaagaactaaaacactgttttggctgaagaaaaaccagagaaaagatcataggatttcattttagaaccatatttagtttgtgaaaagaagaccttacttcttcttgtcaatatttggaatatcacttctctctgctttctccacaatcacctttaaattatacaagcaagttttaaccaagttagttatgaagccaaaagcaatgttatagtacttaaacatagagatgcgagtaaagttaaaggaaactataagagcctaagcaatgttacaaaacaaaacaactaagacacttcaagtccaagatgtagtaaacttaaagaaaagttgcattgctaaatatgattacgcttaagcaattctaaacaaaatccatcagaaaactccagtattgaaagcaataattaatggacatataaattttatgcaattagccacaaaactatcattaagtagagaagtatacataattctctactttctacacaagcaagcataaaatgggagaacccaaaatttgagcaaaatggtaatcaaatgcgtgaagcaacaatacattttgatttaaatctggtaaaatgatcatgaacttatgcaacctcatcataataccaattttaatctaagaaatagaacaacaaagagtggtagaatttcatagtacatttaatcaagggagaaaaaaaacagagactaaaattccatcaaagtaacaagatggtcaatcaatcatgttgcttaaaagtataatctcaccggaatcctatcagggtatttctctctaattctagcagcctctgcac

SEQ ID NO: 116744 - DNA, 568 bp, Cannabis sativa
ttgttgtaactaaaagtaagattttttgtagtatgtcatgaaaaatacttaggcctcctcgagaaaaataaaaaataattgtttgctgaaattaagaatcatatttggaaattgttacatgcttcgaatgataaactcttctccattggaggaaaggaagtccttcttaaaggtgtagttcaatcaatccctacgtatgccatgagctgcttcagattatcagaaaagttttgtaaacaactagacacaatgatggctcaattttggtggggtacaactaatgatataagaaaaaaataacacattggaaaaaatagaagtttctttgtaaatctaagatggatgggggaatgggatttcgttctcgtgttcattttaacaaagccttgctagcaaaacaagcttcgcaaattttacaaacccaaactctcttcttgctcaactgttgaaagtaagatatgtaagcccaagttcttgtctaacctatctttttcatatttagattgattttatcttgatttaagcttgaatataaaaagaacaaaatcaaagattcaacaccagaatt

SEQ ID NO: 116745 - DNA, 2190 bp, Cannabis sativa
aatttttaacgaccgaaaaaattcggggacacgatttactacatgtcaaagttcaggagaaaaattatagtaataataataataatctttatttacttttcaatttaataaccaaagcaaaatgattactctctctctcattatgtcatcgtaccaatatattttgattcttgttattaatcacgttgtaaacgtgagtgggcaactaagtaaagttccattctttttaattaatttaatcatttagagcctttccaagaaaaaaaaaattaattagtttaatcatcagattattaaatgcacgtgctaaattagagatcggtgtccccacccaggtgttattacatttattaaaaggcttagacgcggtcctactatataaaacgatgtgaccccacccacacgattattactctcactcgttgtagttatatgtactgataatgccacgtgtgggtcctaaccactcactcacactttctcagcagccaaacattgctttcaaatcaaaaaccagttaattataattttctctttttagtaaaaataaataaattaaattgaaactggacaaaatttgattggactagaaatagaaaataatatatataaacagttaggggaagaaaatataattatttttcaacccctttaaaaagaacaattgtgacttttacctaaaattcatcacacacagaaaaatggcctaataatgaaaaagtccagaaccattccctgaatccgatgaattatgatcggccgtacaatccatcatagttgtcatccatttctgaagttcgtcatcatcatcattatcaccaaatgagaagaattcattttctattgatccgattcccgcgtcatcgcttcgttgatgattctcatagtttattacattaatattgttttgatgaaatgagattggcggtgatgccgatgtcgatgtcgttgtcgttgtagttgcagtgttactctgttctggtaattctggctgagaatttacgttctgatcaagtaaagaattatctggaaatggaaaattaagcttagctcgtggtccacgaaattcaatggcggctttatcataggctcgagctgcatcttcagctgtattgaaagtccctaaccaaacccgactagcttttctcgggtctcgaatctcagccgcccattttccccaaggtcgttgtctaactcctctgtaatttttcttcaccctctttttcggaatagctttcttcttattattaccattactcttactgatcgtgatttcatcttgtgaaggcgggaaaaaattacacccgagacacccttggatcttacaaacctgacacgtgtcgaaatcggaaggtccaatcaaattcgcatccccatggaattgttgaaagtactgatcatctgtgttgttgaaatcaaaaggagcttctgaggctgtgccggagacaacgtttcgaagagcagagactataatggaaagctcttgttcgttagtgagtcgacgagtcggagggtccaaaaatggcggcggagatggagaatcggagagcttggatcgttttgatgacttattcatagtgaagagagagtgaagagagtgtgttatttggttttcaatttttgggtttattttggaattgaaattaagatagagagatgggtgaagaggggtttatatagtattacgcggacagctgtaacaccgttcgaacacggggtgtggtaagtcacgtgggattatcttagttgttattaaaaatatcaggtggggcccaaaaaagtcaagagacgaagcgaaaaagggagaaaagaaagagctgaagtttcgcgcggtgtgtgtgtgagagaaagattttgacggttgagaagaattgcagttgacagttgtaacttgtaacgggtgacacgtcactgttcgaggtgacttcatgcggttcgtcattttattggcaaaagctggactatgtcctcttcttattattcttatgtcgttattattttttgtttatattacgtcataattagaactagtgaaaacaaaaatgaaatcatcaaaatcttactgagacgttcagacttaacagtgccctagtagcaaaataaggatattttggaaaaaaaatatttgatttggctaattaggattttaaggtagtgaaaaatgcttcatgaactattaagattgttgaa

SEQ ID NO: 116746 - DNA, 3053 bp, Cannabis sativa
gtgatgagacaatatgtatttatagagttagggaggacacttagctacataatcctagttggactgggcattctcatcaaatgcttcagtcaactagaaaagctcacatttctgcttcaactagactttatacacccagatgttaagtccattaactattgattactactaatataggctaacacatcaaagaactatccaatcaacccaaattttaataaaattaatgtaaccccgaataaaaagtataacattctcccacttgggctagatgaattttaatacatatatattatatatcaaaatagttttatttaaaaacgactcatgggttgaacaaaagaaaaatatttgtgaccactttaaagtaatagttttttttagagcatcttaacatacaagtgcaatttaacttttggtattaaactatgacaatcatattgtttataaagcaacaaacgatagtcatactcacaaataccaaagtattaaatcgacatggtcaataagtctaatagtgtggtaattaaggaattatgttcaacatgtgatctatttagaaaacataatatccttactagtcatcaacttcactaatatcgtgatgattaataaataagccagtgaaattaatcatacactacttaataaataagtcagtgtcactaaacatacttaaaaaattaagccaacaaaatatcattatcattaagcaattaaacttaaaaaataataatcacaacaagatatgacctacatgttttcaattcaattattgagaataaatttttctactcaagagatgttagttttcatgaaactatttttccctttgtctaattcgattctttaactgttgacaagagctactattttccttcaatactgctcctaatcactctttcacttctaatcccattgtttcatatgataactcaacatctcatggtaaacctcatcgagtttttgttaagccctcctatttcaatgattattattttttttatcaactaatggttattttctttcatcggacaacttgccatctatttcgtatcccttgtcccatgtacttgattactctaaattattttctaaattttgagctgcaatactatccatttctagccatcaagaaccttaatttttccatcaagctcatggtattctttagtgggataatgcaatggacacaaaaattacaactctagaaaacaagctcacatggatcattgttagtttcctccctcatcaacatgtcattggatgtaaatgggtgtataagatcaagtaccatgcagatggtactattgagaggttcaaagctcggttggttgcaaaggggtacaaccatcaaaagggtgttgactactttgacacatttggtcatgttgttgagatggtcacaatcaagcttatcattgctttggcagccattcatggttggttcttacaccaacttgatgtaaacaatgctttccttcatggagatcttcatgaagatatttatatgaatctacctttagggtatagtcctaaggggcaatctctaccaccacatgttgtttgcaaactcaagaagtctctttatggcttcaaacaagattctaggtaatggtttgagaagtttttcactggtatggttcaagaagatttcaagcattcagccaccgatcactcactttttatgaaacattttggcacaacttttattctcttgttggtctatgtttatgatgtgataatattgagcaacaatttggttgagatggaaactttgaaaaccagattggacaaaatgtttaaactcaagaacttgggagaattaaaatactttcttggtcttgagatatcaaggtctaaaaagagatttttgtgtcacaaagaggatatgctcttcaattattggaagactttggatatttaggttgcaaaccagtaagcacaccaatggaagtaaacctaaagctatagcaagatgacaaagataattttgctgatccaaaactctacagaacaataattggcaatcttcaatacgtgaccattacaagaccagacatagcttattaagttaataagctgagtcaatttcttgtcactcctagatcaacacatcttactgttgtacaaaggattttgcggtacataaagtcttcaacaggagaaggtttattcttttctgcaacatccaaagtgtagctcaaagcatatattgactcggattgggcaacatgtgttgacacaaggagatccacaatagaattttgaatttccttggtgactccatagtttcatggaaaagtaaaaatcaacaaattgtttcaagatcctctgttgaagcagagtacaaagctatgacatacacaacttgtgaacttatgtggttactgtcattactcaaaaaaataaaggaggatcataaaggactagccatgatgtattgtgacaatcgagcaacccaacacattgcttctaatccagtctttcatgaaagaacgaaatacataaaaattgattttcatctagtctgagataaagattcaataaggagtgatcaaaacaactcatgtctcaacaaatgagcagttggcagacatactaaccaaagcactatttccagctcaattcaaggcactaaaggacaagattagactgataagtatatacactctatcttgaggaggagtattagacttagagtgaattgggtttggttagttagagtcagctagagttagttagattttgttttcatttctataactaactatccaagctgcatcttgaggtatatataagctccttcttgtacaattcatttttgactgaatatcgagactttcattctctttatctctttttatttttaattcttcttttataaactaataaaaattaatgtaaatctaaataaaaaatctaacaagttttccatccattgattatagtttatatattaagggaaatttgattttttatgcttacatttggttaattttttttcctaaacaaataataactaatatttgtaagatatgacaacttttatg

SEQ ID NO: 116747 - DNA, 2499 bp, Cannabis sativa
tgtcttatctttctagaactggttcatagtccaaaagacaccagattcaaagcattttacactcatatattttacccagcaaaaattaattttttaaatatgagcaacgtcttatgtgacgttagtgctctatgtgtgtgtgtatatatatatatagatacttaagggtattgcatgaggtagtatcttatatatacagtatcatatatacaccgcacatatattatatacaacatatataacttatttatatagtacatattatatatataattgttcttggctgggatattatttttctgctgtttctgttttcctggttctttcattgtaatcagaagacctgttgaatcttgggggattactttgtaaatccttaaggacagtgtcttatttgcacgcttcaggtgttatcaatttattattgtattgtaattatttttttaacaggtgtcccacggaaaaaaaaatatatatataaatatggtaattacaataaaaatataattattaactatagttagtacgtgaaaaaagtaatagctgtatcatgtacttcaccgccattttggcaggtactttgtagagttaattagagaaatgtagttcaatataattgatccgcacatataatttcaaaaatcactgaagtaattttaagaaattacataattgatatttgataattaccagaaccccagccggggaaaacactacacccgttgcttatatacatttatatactagacttgaaattacacaatcaagttattcagtttttgttccaacttcgatagatcgaagcttctctcttcactcacagcctgttaattaataatacacatataaataatcaaaattggttgtgaagcatatatagatatctggaaattaatcaatttttgaagaataattattataaaaatcaaataaatacctcggtttgaatggtgtggagaaatctttggttgacttttgcggaaacacagctgataacatcaaacccttctgtggacaaagctctaagaattaatttatggagtgaaaatccttcactaatactgaaaacctcaactgatcttctcttactacaatgcctcaaactaattatcttagttgactccaaattaataatctcattattattattgtcactagaatctgacatcttttttaagctatccctttttgccttcattctttccatctttctttctaagtctcttatataatttgcaacttcgtgtatttggtccgatgttgacctctttccctgaaaacatatacatataattggtcatcatcatcatcatcaataaagtaaaattgtgtgtatatatatatgtcattatgtgtttgtgtgtttaaccttgagatattgaagagggataagtgatcttagagaagcgtataaggcagacatttcttgtcttctttgcctttcaatatctctatgtatgaccttcttcttcttgtcattagggttttgatcatcatcatcgtcatcatttggttcttgattttggtccaaatttgatgatttgcgccgcctaccgccagcaaagattggctcacagcccttctgagaaggtgttggtggagtaacatcatgatcatgagcattatcatgatgatgttcttggttaataataatctcattttctggatataataatttgtaaggaaaattattacttgagatcagttggaaaagctcatctgtagtagtagcttggtcatcatataataattggatatttgaattaggaggaatataatccatatttggtgtgatttactctccaatcatctctcttgctataaatatatatgtgattattaaaaatattataatatttaattatcttaattataaagactcggtattattgctgtttttatacttgtatttattttttgtttcccaaagtgaaagtccagatagggatatcttattattattattattagaggcatgaaatctttaatggggccaaatggtccaagattttctgtgaatttttataaagaagtcatggtaatataacatgtgacacttaagctattaaaaatttataataataataataataattttaaagggggactgtacatttagacaatagaatgcataaaataccaaaactattccattcacacctgcagtaaaattatggttattaaaatttgcacattctaaacgaggaattttttcaacaaaacaatagtgaattaagataaataaataattaaatttagtagtactgtagatatatatagggacacgattttgtcccgtgatgtattttcacggaatgtattccgtgatgtacgacagccgttagatagaggagttatttgatctgatggctggggatttgatctgagggctggggttagcctaggggtaattaggattaaaaaatggtaacgtaccctgagacccatttaatataccttgagacacatctaatgtaccacgaaatatattccgtaaaa

SEQ ID NO: 116748 - DNA, 3212 bp, Cannabis sativa
  modified_base (3173)..(3176): a, c, t, g, unknown or other
tattatagagtcctttaatcaaaatatatatattttttttttttttttaaagttgggttgtaccagctttaacttttagttgtagtttttctacaaattctttaataagctattttttaactgcctaccaaataactttttgtcacagcttttttaaaaagtagcttttaactttttcaaaaactatgtcaatcacagaccctatgtatattatttaatttaattattgtaatattactttgggtttaataaaatgcgtaagcgagtgaacagttgagacgaaaaatggctctttatgtcaggaaaggaaaaccttttcaaatttgtcgctcaatctctctctagttacgctatgagtgtttttctgcttctgcttaagctttgtcttgaaatggagaaaatcatgtgtaagtattaacggtggaaaagtagtaatggcccaagtattcattagttgtcatgagagaaggtggcggttcataaagataatggcaggatgagattttggagtttacatgattttgatctagctatgttaggaagcaagagtgacgacttctaactcattctgcctctcttgttggtcatatatttaagcgtggtattatcctagtggattgattttttctacggaattggggttgaatcttagttatgtttggagaagtatttttgcttctcaagggttattgaaagtttgttctaggtggtgcgttgttaatggttcttctattgacattttggggcagtcgtggcttccgtgcgaggagcagtccgagattgcttctttccatcctagtttggaggggacgaaggtcaatcagattatggcgggaggagcctgggtgtggaatgatgcaattcttgaggatatgttcaatgcttctgaccgacagttaattaagagtattgtgttgaatgataattttgggtcagatcattgttagtggtttaaagagactttgggaatttatttggtgaagagtgcttataaagagtctccaggtgcttcatggtagatagtcggaagataataattcgggcctttggagggcattatggaaactcaaattcctcataatgttaaagacttactctggaggacatgttctgggtgtaaccaacactgacccagttaaaagctcggcatgttgatgtggtcatcatttgtctggtatgccaaggtatgaatgaatcaattttccacattttggctgagtgtccttaagccaaagcttgttggcaccgggttcaaggggctatttgtaacctttcgagtacatatttttcaggatagttttatcaactgatcatcgaatttctgaagattttaatttgtcatgttgcgatgatttgttggtctctttggaaagcgagaaatgagcttgtttggtaaagtaaaaattctgttgcaaatggggtagttgctgtttcattgtcttactttaatcaatggaatattgctcacgaaaattctacaaagacaatggattccagtccttttattgggtggagcattggtcggtttccagtactgatatgattaaagtcaatgtagatgccattgtcacttctgggactttttatttcgggattagaggactgacccgtaatcatcacaaagcggtcctttaatattaatccaaacaattgcctggcgctcgatgtctcttctctttggcggaggaaattgggttgaagaaagctttgagctggatcaaagaacggggcctagattaggttgttgttgagtcagattgtataagcattattgatgctctttatagttcgactcatttattgtctctttttgtttagttatttctgattgtcgtactttaatatctgatcttaacaatgtttctagtatttttattaaacgatctacgaagaagacatgcaattgtttagcgactgccgcttgttcctccctcggtcatatgatggggggtttgtcgttacttttttaagctattttaatagataaattgtctggtcatatgcattttttttttttgtcaaaaaagtatattgattataattataataattttttattattaatatgttcattttaattttaaaaaactcaaaacaaacaaacaaataatttgaaaatatttatttttctaatatcttcattttaatattgcaaatttaaatatgaaatcaaattaataaattattttagattttaaaataaatatgtgatttcctaattaaccaaacattatttatagtatattaactaattttgactactaaataatatattaagaatacaaaacacaatactcacataaattcattaaattttcatttacatatcagtagctaatatatttatagctttatgagtagctaattcattaaaatgtactctagttatgactaaaattctaaaataattttgtgataaattaataaagctttggtaatattattttgatattttaataacaaaaatgaaagtaaaatttgtgttcttaaaaaataaatatgtgttttaagatcacttttattttttaattttaaaaacagaaaataaaaatgtgttctataactttcatttttattttttgattttatttaagtctggtccaagttcgggtctgggactttggctgtggtccgagtccaggattaaggctgaggccagagtccagatcctaaggtggctagatttgggagttggagtcctaaattatgaataagaaaaaaaaaaactatttaaaaaaatattgaaagaaatttttttcaaaatttttaaaattttaattctcaattaaaaaaattaaaaataaaaatagttttatagaacatatttttgaaaaatatttttacttttctaataaaaaataaaagactgattaaaaattgcgtttggttacacttttttaagttatgaatttagaatcctcatgaccccttatacaagaaaaggtcggtacctttcgcttcaggaaataacacgaccattggagagatttctcaattgtctccttggttttcggtcgtggttgaaatctgattcttgtgataatatcccactatttttgcgggtttaaaactaccattgaacttcttgcgggatttgaatattttaattagttactgacgatgaggatcctctagagtatggtttgacagtttaactgtaaagcccgcttagnnnntttggaaattagcagttatttatgttaatcaggaaa

SEQ ID NO: 116749 - DNA, 1231 bp, Cannabis sativa
  modified_base (41)..(66): a, c, t, g, unknown or other
atgcaacataaaatgcgatttctgatctttattagtaaatnnnnnnnnnnnnnnnnnnnnnnnnnntagggcacaaaacccaacatgtttgacatgtggacctcactaacaaagtagcaaaagtctaggacacttcaggaatgcttcatgaaagaatgtcaagaggccagtccaattcatggctccgagacgatctcaaatctagatgaaggtagcaagcttaagtgactcttgagccacgaaggctaggggtacatgttatccatgttttcgaacaactaatatgtgggccattatggaggcccaacaagtaaaccaaacctactcattgaatccataagggttaattactcgacccatccatcaaggatgggtaaaattggacacttggtctagttacctaaagatcagtgctcaacaatgaagctaaacatcaagtcccagatcaacaaccaacacttaacatgcgaaatgacgtgaattaaaagaggatacccttaggggtcatctgggaataaaatacgaaaggacgtccaatcagttagtgtctcaggagctacctgtgtggtacttctctaacacgatcccgagaaatcaggcggcttgtcccttgtgtcagaccttggaaaggctcacaacaaaaagaaaatcacctttttgagcaaaaacccattattctgacacttcttattccccgcgatggctcacgcccacctatcactgttaacattatgactgtatacgaacactcggttaatctagattgggcctcacctactcggtccaatagctcaaaatatgttatattttctccatcagtgggcattttttactaagaagaaccctaacgggtttgggtcagcccgattaatcaacaatctgcctataaatatggcttttacctttcatgtaagaggttggagattttagtgttcaaaaaactataaatatagtgtaaaactccatagccaatagcttaataacaatgactcattgactaaagtaagttaatagccaagagcttaaccacataaaaaattaacatctctttttcttctcaatcaaactttctttagtttaatatatatttaattcaacttccgaaagtctcggtaaatactatgaggttgtttggctttacagtttaaaaagtgaaaacagtttttaaaaactattaggagtcgtttggcaaaaaaattttaaaaactgttttttaaaaattgagttttaa

SEQ ID NO: 116750 - DNA, 7089 bp, Cannabis sativa
  modified_base (425)..(435): a, c, t, g, unknown or other
  modified_base (4948)..(4963): a, c, t, g, unknown or other
  modified_base (6348)..(6355): a, c, t, g, unknown or other
  modified_base (6716)..(6716): a, c, t, g, unknown or other
  modified_base (6843)..(6845): a, c, t, g, unknown or other
  modified_base (6928)..(6929): a, c, t, g, unknown or other
aaataaattagtaggatcataatcacacttattacatgattaacacatgatataaatataaaccctaattatttactattagacttatcgggatattacatgcggttattgaaagttacttgtaattatctcattacagaaatatgaaatgtgaagattgtcaacattttacgaatggttacaagtgataagatcccaaggaagtgactattatcctagactcctataaatagggacagaattcaaggaataaatgatggccaatttgagaaaaagagagaattatatgtattattcatcctataaaataatttattatattttgtatatttatcagtccaaaataaaatggactcgtggactatgtagaattaacatcaaaatcacgttaaagatcctattgtcatttattattattattattnnnnnnnnnnntattattattaattattattattcatttaattcctgagtatattaattataaaaaagcttatttattagttaacaaaaatccgtgttaacagtttggtactttcattgagagccttgtaataaaaactcagaagaaaaccgtccttgaaaaaaattcaaaccgtccattcatggcagacgatactctttaaaatgaggggaattggccagaagagataactcaacgtcctggaaaagagcataagacttctcataggacaaatacaactgaaactccccattctagaaatataagggagaatttaaacaaacgggggaagaaatcccagtgagatgaagcgaggatgcctacgatcccacaagatatgctccattcgtggaactagaaaataggcaacttcgacagtgactagctaaattaaatagaagaaatacataactggagcgcgaggcagcgaccgcaagggctgcacgagatgatgcccctccaaagtaacctgacacatctactagacgacctcgaggaagatctaaaggctctaagacctgaagacatggggatgcccctagggggaataactttggaaatcccacgaagactcaggagggtcaacctaagaacacgagggacatcctagtggatgaagagatccctcaaaatccaagaaacactggaaatcaagaaactcgacccaacgatccaggaacttcctatagatatacaaactgtgagaatgtacaacatgagaatctagaatcatctcgcatgaatgcagataccaggaaaacactacctgtgattcaaggattctcccatcacgatgtgagaggggtaggcaatcgacctggatcaggccgaccaccgagacacccgcaaaggccaaaccacaatgatagagacaacgcgtacaactatttaagtaggggacgtgtgttaaatctggtctaaagacgaaggccagtacgagaagaacctcaagaaatagggtcgagtacagatcctagtgggtcaagatcaaggacccatgggcaaagtagatcgactagaactcatgcacatgagaggtaagtacgagatggggagggttcacgtcgatattatcgagatgatcaagagggcataagtaactctcaaagttatcaatccgagagttattctacaacaaggtcagtaagcaattatgactagaggaacgagaggcatcacacgagcatctgaatcgtagacaaccaaacttgtgtgaacacttgaatcgaaacgttcgtgatcgttgtgatcgattaaactagaatgtaggtcgccaacaacaattcgagcaacaacccatggatccaattcagttaagggttataaaattaaaggacaagctcaggtgatacaaggacggggaatatgggaaattatcttgatacgattcagacgaagagacatcaccttttcatcctgatatattgaattctcaatttccccagggattcaagaacctgcatgtcgcatagtatgacgggacaactgatcttgtggcacaactgaacaattttaacacaataatgtgagcaatcaatgttttaaaaaacttgtgttgcattttatttccaacttctccaatgggagcaacaagcagctagttcgataaattcaccaaccattccataacctcctgggaacaactatccaaggatttcaagaaacactttcaggctacgaggtataggaggttagaggaatccttgctgactaatatcaagcaatagctgggagaatacctaaaagcttgcttgagtcactttagtactacaacaacaaactaagaaatctaaatgatagcattcagttgatagctcttcaggctagaataacagctgacctatcaactgttcgaggagaactatgggatgatctgtagggtcagcctgttagaaacattaatgaatttaatgaaagagcacaaatctttgtgcagaaggaagaggcacgaagtgagatgaataggctcaaatttggctcggaaaataaactagcacaagtaacgcaatagcgagtaccgtaacttctaaagcaggaatttcgaaccacaatggattgaatggataaaaaaaagacgagttgagagatttgttaaaagacaagaaaaataaaaaagaagcacaagaagtgtattccgatatactcggtgtatatgaaactaaatgaaactcgtgaatctatcttgcgaatgaaaatcgagtcgcatttcaaagacctaatactatgagacatgctagtaataagcaagatcccaacaagtattgtcatttccatcgagatatcagacataccattaaggaatgctgccaattaaaagatgaaattatagcgatcatttctcgtggatatttgagacagtatgtaagaaatcgaggaaatgaatagaatttacctaatgaccaaaataacaaccaaggaatacaacctctcccaattgagggcgagggcatattggttatttctagagggccacaccttgcaggaaataacaataatgctcaaaggagatatataaatgaagtgaagaattaagaatttacctttgcttcagaacccttaaagcgagccaagcctaaagaaccgcacattatctttactgacaaagatgcttcacatgtttagtttacacatacggatcccctggtgattacagttcagctcacaaataagagagtaaaaagaatcctcgttgataatgggagttctgttaatattctatacaaagaaacattaaagaatatgggtctaaaagaggcaaaattgaaaccatgcatggtgaacctgtgtggattcacgggcgatagggttgtaagtttaggcacaattgaactctcactcactatgagagagccaccactatcgacaacccatatacaagagtttttagatgttgacatcccttcgatgtataacatactcatgggtcgccctgcattaacaggaatgggggcaataagcttgattaaacacttatacctaaaattcccaactcattatggagtaggaacagtgagaggtgactagctattggttagacaatgctataatgtcgagttgaaaaatcaaaaggtgaaccatcaattgatggtaattttaacagaagaaagtgaagaaaatgagatggaggacttggatcctaggattcataacaaatacaatcaactcaagttaattgaagaattagaagaggtgaatttagacccaaacaatctgaccaagtgtgtcaactttggaaaaggtttgaggaatgaactaaaataacaattaattgtatttttgaaggtaaaccaagatcatttgcttggagccattcagatatggtcaggattgaccccaatatgatatgtcatcacctcaacattgattcttcttatccctcaaagtgttagaaatgacgatcttagatctcgagagacaaaattcattaaagggagaggttgacagattgttaaccaataacttcataagagaagcattttatctttcgtggatatctaatcctgttcttgttcctaagccaaatgggacatggagaacttgcatagacttctccgatttaaacaaggcttgtccaaaagattactttttgttaccacggattgaccaattagtagatgtgatagcagggcacgagatgatgacctttatagatgcatactctagatataaccatattaaaatgcatattccagattaggaacatacaagctttgttactaatatggggatttattgttacaaggtcatgccattcagactaaaaaatgctagagcatcataccaacgacttgtgaatggtatgtttgaaaactagataagtcagaatatagaagtttatgtggacgacatattggtgaagtcagttaaaagcgaggaccatgcagaagacctcacagaatgcttcgccatactgagaaatatattatgaaactgaacctgaaaaaaatgttcatttagggtatcctcggggaagttcctaggttttattgtaaatgcgagaggaattgaagcaaacactgagaaaataaaggcactactcaaaatgccttcgccaagcaaaccaaaagaggttcaatccttaattggaagaatggcatcactgagtaaattcatttcaaaatcaactgataaatgtcttccttttttcaacattttgcaaggcgataaaaaattcgaatggaatgaagagtgcaagcaagcctttcaagaaataaagaagcatctttccactccataagtattggccaaaccaatcactagagaggtgttgtacatttacttagttgtgacagtcagtatgtaaagaccgcttaaatttaatttagaaattagcagataattaggatttaattatgaaacttacatgttagttatgaattatctttttacggagatttatttgtattaagaatgcattttatatgtcatatatggaatttcatatttttgcatgttttgtgctcgacaacattggaacgcggtgtnnnnnnnnnnnnnnnncatcttagtatttttagtatagcgtggcaatatagttaggcattgagaatgtcgaaaaatagtcgagattttagaattgactaaaatacccccaagtaaatttttatgacttttagcgtgggaagggtaaaatggtcattttgcctaattaactttttttttgtcttttagtggactttaaagtaggtttttaattctgatttttaggtcgatcttagtttaataaaatcatttttatttcatttattttacaaaaattagaaaattcttgaaaaacacattctctcttcaaattctctttctttttctaacaccatagaaccagctagtgttctgagttctgttcagcaattcttgtgatttttagccagtttttagggatctcaacccaaggttaagtttctagcactcctccttatgatttcttaggtttaaagttaagaaattttgcatgatttgagtttatgagtactgtagttgctgctgttgtttgaattgtgtttctgaggtttaattatggttagatctgttgttttgagctggtttgagtagctgtagtgtttattgagtaagctttgcgtttagaactcaagcttggctctttaatggtaattttttattttgagcatgctatgttgttctgttacttggaatatgtctattggggtgtaatatgcaggtctggaaggtttggtaaggtttggagtcaatttggttaggttttcaaattttttggggttttctggtgtaaaccagttaaccagttttataggccctgtaaaccggttaaccgaattagctgttgggtttcccaaatttttcgtgttgtcgattcgtgttagtttcaaagctttggttggttaattccctgttagtttagggtattaccatgttaactttcagtaggtagatttttggtttaaaacctaagtccctatttgtgatttagcgcgtcacttaaccatgttatgaacaatgtgatttaggggcctgtaattcgccgagcagttgttccactcaggttggccggcacacccgaattcgaaaacaaggtaagattagtgtaatgttctgcatatgtatttacatgtttatcatacatgttgtttatgcctgttagagtatattgatagcagtaacagtatgtatagagttgtactgttactgataaatgtatgttggctaaaatactgatcgattctatcacatctatatggctagagcatgattggcatattgggtataggctggtattatggtcgatattgttgtcatatgaacattctagactcagtaccgtgtgggacacggggatatggttatggttgggtgtatgggaaactaattataacccgggatattgttatgttttatgttatgctttnnnnnnnnagtctgttgactcacagttgctatttccatgtgtaggtaagggcaaggcttaggctgggcagctatgagagcgagcagatggagattgtacatgtcggggtggttatgcctagagctacgatctttgggacatcagggcttattttgtatagtcgctaggcgacaaacttttgtatatgtatagttaaacttttgtaaatgcttttgtaaacgagatcctagaatttatatgtatgttattttatgttttttaattaaataatcaaaattttaattaatcacgatttttgataacctcgttgattagcaatgactgcatagtaagttaaaaatcacgctaacatgcctaaaatagttaggntgttacaatttggtatcagaacctccaggttgtctttcgaagattgtcgcgacatgtacaatcatcatcagcgatcagctcgtttcacggttcagtaagcttttattactttagtagtttattttannngtatgatttaagaaaagcctattatgaagcatgttagtagcctgatagctgaataggcacatgtttttaatttccaaataagnngcaattagtaagttttacttgatctcattctgaccagactagctcttggttatgcaggttgttctaatagtatggacgcttggcgaaacaccaggagtcaaggtaactcggtcggatctagtggtggtcagggagttcagattcccctaaatgttcatgg

SEQ ID NO: 116751 - DNA, 1470 bp, Cannabis sativa
tttttattttttttttttttttttttgtttttaagtaaaagaattttatttacacaacaaacaatacaaaactgagaaaaaaactatcacaatcaagtatccacacttgcacagcaagctctaaatataccgaaacaacaaataaataaattacaaaggctttaaagcccaaaaccaatcaatatcgatctacacttatagctttaatgggaatgtaatagctaattatcctattatatatgtacaataatctttaaatttttgacaacatatatataagctctcttcttgtgactttgtgctcctaaaagcaatatttctagttatccatattatgtgcacaacagcaagaagaatcacagagaatacatattcatcagaaatttagaaattttacttcttgacaaccaacgcagagaaatgagattagcaggccgagcattatgcagaagaaaaatgttcgacatgtatgtacatgaataagaagaaaaatgttctgtgtgcaattttttattttgtgtgaaagcacctcatgggtattttttttatctttggtagatatgatcaaattaattaatttggttaggttagagtcttacaattattacatattaatttaacatattctaccaatattatccattttgttttgcagaagaaattaagttcgacatgctatcatgatgacgaggttatatttgcttttccaatttttttgttataaaatggttgatgcaagaaagttagaaaatttctcattagaaatgatagaaagttttatggtaacttaaaaccattttttatcttagtcaatgtactaaaggtgatcaatgtacccatttaaacaatatatgaaaattagggtactactataaaaatgaattttagtgacaaagcaacactaagctaaagatttttagtgactattcattgcaggtcaccacataacattttagagtctctatcactatagcctattatacattctgtcaaactctaaagatgacaacaatctgtaataagttattttaattatttttctacatagtgaccctcacagagcgtcactaatgtattttatttttttaatatcaaatttttatgattcatatttatatattattaaacatatacttatatatatattttttattattattattgcttttatttataatttcttttctggttctttggttcattaacctcacattctcacttttttataacaaaaaaacaacttgaatcaaataatatcaaatgagtatatctctatgaacaaacagaaaccacttttctataaacaagcaaaaaaaaaaaaaaaactgattcaacaataaatataaatatacataactgccttatcaatttgggtattgtggaaattgatcctctaaaccaacttattatccaactcatttaaaccaactaacttaactaactttcggttatgttagttagttagttggt

SEQ ID NO: 116752 - DNA, 3251 bp, Cannabis sativa
  modified_base (3203)..(3203): a, c, t, g, unknown or other
aaaaaaaaaaaaaaaattctatttgtaattattaataaagtaggggctacgctaacattatgaaaaggtaggactgaaaatgttgaaaaaaatagaaaagaaaagaataaataacagtggttcgtgtacgagaaacaatgattaaacaccatgactatgacgtagtacagtttatatggtgttgtctgaaagaagtaaccaagaaggaaggtatggaattattataagtgaattttaaatattgatcaatattatcagagaagaataatattcatatatggatagtgaagagttgagatcgttaatggagagcagaaataataataacaacaacagtattaagagaaggagatctttttatgaggaggaagaagaagaaggtgacgatgaagaagaaaagataaacaaattctattctcttataaaaagtattcgagaggctcgtaacgatttgattaacatgaagaagaaagcttcatcatcatcaacatcatcatcagataataaggagaaaataatgaagaaacctgctactgtgtggaacccttctttccaaattgaagatttcatggaagaagatcatcatcatcatcgccgtcctcgtcttcttcatcataatcgactcaccattaaaacccctattgatttcatgcctactgcagtgccatcttcttcttcttctactaatttagatgcatccaattatcgtgaacttcaaaagaaagagatgatcataactaaagatcatcaagggttagacctaaccctttcactctagatccacctgattgatgatttcatatacatgcttatgtatgtatgtgtaattagatctgataattctctatgctggtacatctagcttcttcttcttctcttgttcttatttttgtcgtattttatttgtataagtcgatatcatgattgtatatttatacaaatatgatgaataattcaggggcattagtactctactgtgtgtagaaattatagaattaagtttaaattatttaattaattgttttgctaagaaaaaaataagttaaaattatttaattaattaattgttttcatatagagaacgaaaaataaaaattaattaaatactttaaattgtttaacaagtatatttttttaaagcttacttgattcatgttattcttctaagttttctattgattaaccattatattttgtccttcaaataattaataccctcgttttgatttcattactaaaacatttattatccttctgatcacttgttcttttgatccccctatatgttaataattaatgagaaacgcattaattacagtgatcgaactatatataaccaaaccaaacattcaaacaaaaactatttgttcattggtatttctcgctttaattttgttttccttttttttaattcatttgagataataaaataaataatatcttcatctctacaattgtttccaaggcaaagattttagtttatatatcaagaaacattgaaatgtggtgggctactgctacatacttgtagcaatagcccacacactaatgttttttttttttttttgaaaaaaaaatacttgttattctaaactagaaaagagtttcgtttacaacaacagagtaaataggaggagagatattctccaaccaataacaagcctcatccacccctaacgcatgtttagccaacccatgagtaggcatattgacatcacctttgacatgagaaccacatacatttgggaaaaaagataaaagactaacaacatcaacaattaaatcattaaaatatgaaattgaaatgaagggagcccttaaagcattagagaccaagagagcatcagtttccacacaatttgttggcagttggtgttgcaaagccatgtttaagccaaaaaatagtgctttagcttccatttcatgtggcaagtagttgcccttcatcgacattattcattccgcactactgcacccaagccaattgtgtttgttgatgcttggacagccgcatcgacattaagtttcagtcgcccagcagtaggtggtttccaacgtgtgtgagatgcagcagtaattgatgaatgtgaggaagaagcaacaaccaaaggagcagtggaagatcttcgttcaacagttggtttgacgtgctgctatttatgattagcagcttgaaaattctggagcagagtaacagcagtaaaactagtaacagctgctggttttgcaattttgccatgaactgctttatttctttcagtccaaatagaccaaaacatttgctccctttcagaggtagaatgtattgttgaaaggaaatgtaagtaatctcctttcttcatggaggagctagcttgccaatcggattgtacattcatggatctccaaacactcttagcatatttgcaaccaaagagggcgtgaccaactattttcttggcttgtcgacagacagagcatgttgaatcagtaattatcttccttcggacaagggctgtggcaaccgaaagagcatcatgaattacacgccaggcaaaaatttttatttttggagggagttgaagcgaccaaaagaacttccaccaagaggttgctaatgtagaactcgaactaagggtagagtcttcaagtgatgcagccaagtgataaccagattgtacggtgtagtaacccgatgagtgatgatgccaaataagggagtcatcgctgctgaagcagcttagtgggatagttaaaattctgtcaacatctagtgatgaaaaaacttgctgcaacatgtcaatatcccattgccattcctctgttataaagtttccaacaacacagtttgatggacccgagtagtggatagggagaaaattagtgtcgctaggaatccaaggatcgacaccgcatttaactgttcttcccccaacgattttccatctcagtccttcaattaggagttctcgaccccaatgaatgccttgccaagtcaatgaaggtaaatggccaacatgagcttccaagaaagtgttgttattacgaaaatatctgcacttcagcaattgtccaagcaaggaatcgggcttctccacaagacgccaagcttgcttcgtaaggagagcttgattaaagtgaacaaaagagcgaaaacctattcctccttctccctttttcttacacagtaagtgtaatatcccgataagcctaatggtaaatanttagggtttatatttatattatgaattaatcaggtaataagtgggatt

SEQ ID NO: 116753 - DNA, 1298 bp, Cannabis sativa
tcaaaatcggctgtgggtgtattacgaacggaacttgaagaaactgaaattgggattgacccgttggagcttacagaggaggaggatgagaactttgatgaattgcaagggagaaggaggctgagttcgaatcatgatttgctccagccaccactgtctccccgttcgtctttgcaagagattaagcgaatggaggaggtgtgccaagatttcagaagcttcctacatgctaatgagaaatgtaacagtacagttgctcaaggtaagaactcaattcctccaatccttcattctgcacctgttgttcgtaacctggaaaatgtttttaagtcccctgttagttccagcaaagttaagattgactttgaggatattgaagatgaagttaatttttggaagtcttctatagtgtgttatgtgctgggttctaatcccccattgcagattatagagggttttgctaaaagaatttgggcagatatggttgatagggtatgtttgcttgcatatggaattttcataattcgttttcactctatcgaagacagagacaaagtagtgaatggtgggtacattttctttaatagacgaccagttatcatgaaaccgtgggatcctaacacaaattttaggaaggaagatgtgaagaacattcccatttggattcaattagaagacttagacctcaagtactggggccagaaatcactattcaaaatagttggacagatgggaaatcctataatggttgacgaggtaacaaaaagcagagatcgattgaattatcctcgtgttttagttgaagttaagatggaccaagaactccccactatgctggaatttgaggatgaacatggtatgaacacttatgtgggggttaaatatgaatggaaacctataaagtgcacacattgctatggtatgggtcatggagtggatgattgcaagaagaattcgaagcctaagcaagagtgggttgtgaaagaagataaaaggaagaaggcagagaagaacaccatggatgaagaaggttttcaacaagttaccaaaggaaggaagcacacagagcaacagaaaacaattgctgaaaccaagaactcttttagtgtgctagctgataatcccactattaatgcagaattgtattctctgcagggaatggaagtgggaaatagggagagtcatctcgatgaaattggaaacacaagagaggggggaggtccctctcttgtaaatggataagttcctatcctggaatgtccgaggagccaacacccaacaaaagcaaaggctaataa

SEQ ID NO: 116754 - DNA, 901 bp, Cannabis sativa
tgacctgataaggatcaacccaagtaatcttacatgctctgaacattaatgaagatgcaactcttgtctaccaaaagtgaatactcttagatcctgtaagggcagaagtacttaaggtggagtttgacaagttaactactaatgacctcctcctggaaacattgtactcggtttggttagcgaattttgtcttggtacttcaacccaatggcacatggacaatgtgcacataattcacagacttaaacaaagctttccttaaagactattttccactcccacgaattgactaaatagttgatgccatatccggttatgagttgcttagcttaatagatgcctactccgactataatcagatcaaaatgcacattactgttgaagaacacaccagtttccaaacggataagggagtgtactattataaattgatacagtttaggttgaagaatgctaaagccacctataaacgactagttaacaagatgtttaaggacaagctttggatggaacatggaagggtacatggatgacatgctagttaaatccaaaacatccataaagcacaacacttatctcaaggacgcttttgagtccttcagatgtatgggaataaacttaatcccaagaattgcacatttagagtccccttcaagaagttcttgagatttattgtcaactctcgaggaattgagacaaacacagagaagatcaaagcatttgttgacatgacttcctccaagaagcacaaggaccgatatgaatgaattttctgtatctaacatttcctttgctataaagacctaattcatataataaagatgataaatagtagatgaacctaaatcttgagtaatcatgaacttttattcatgtcataagtttctttgattcactcgtt

SEQ ID NO: 116755 - DNA, 2403 bp, Cannabis sativa
atacttttggatgctattgatgttatcatagcggcacaaacatagtgtcggttccgcagtgcaatcatagtactggtagtgggtgatatcatggtcagtggcaccaattattaagaacgttcttaaatcatctgataagccttgtggataggtgtatgggggcctagacataagtcgtgaatatatatattttgatgtatgcttttcttactgagtctgttgactcacagttgcaacttttatgtatatgtaaaggaaaggcgaaggctgaacatgagtgagcttcgggcttggatgaagattgtacatgtcagggcgacgcgacctggagtgttcggtctcgagacatctagagtcttattttatagtcgcagtgcgaccaaattttaaatgtattttgacaatgtttgtaaaagttttagtacgggataccgacttatgtaaataactctataaaagtttataaagtttaatagttatatcaaaaaatttaatttgacacgacttttaagaaaaactctttaattagcaaaggttgcacattaattaaaaaattactgtagcgcgcctaatcatcagggcgttacacattaattgcccttcgaagttcgaattcccataatagcacttacataagcagggccttaaaattggcgctcctttggaagtaacagacgtttatgtgccctattgggtagttcatggtatccttacgtgggagggcctctgctagcaaccatcttaggaactatgtataaacctttgcttccccagtggtctttgagattgctattaagctaaaggagttgaggatagggtatgcaccacctaatctttttttgagttatataattaaatatatatatgtatatatataaaaaaaaaatatagtcacttaaataattttaatatataattttttaaattggttttttatatttttttttcttattcaaattttgtgaaaatttcataagcttactttttaaaaaatctcacatttataaagtatagagggtctttgcatatatactataaataaatcatttcttttactttttttcatttgtcctaaaaatttacatattttttttcataattgattaatgactataagaagatatttttttttcaaaattttaggtgataaaggagctactaaaacaaacttggcaattgtatctggattagatgatcttataattagaatggaaaatgattataaagagtgtttaataagtttttttgaaaaccaatattaaaagaaatttagagttaaaaaaaaagatcactactacagaaaatacatatagtaacaccttttttaaaatgaagaaaattaataagcaacacttttaaaagtgttgtctcttagattgttcctaaaagtgtatatatgagacaacacttgtaaaaatattgtcatatgtgtaagataatgaaaatcatataacaacactaattataaaagtgttgttatatatatttcacttttacaattattttaaataatattaaaattatgttttaaaataaaatatttattaattcattattttcttaatttaataaatattgtataaaatttgtatgctctatttcttcttttttttttcaaaaaaataattagagaaaagtataaaaatatacataacatttaaatttaatttaataacaccattacaaaatttattcttatacgttccaaatacattatgtaagtctgcaacaaaatttgattaaaaattctaccaacaaaaattacaaatatatatacaaaggtatatgaaaactctatttttctatgtaactttaattttttcttaaggctcaaagccatccaagcaatctgttcatcttgtgcttcgatgattaattaattagctcgatttccatccatatgtatcttgatcgaagtactacagggaagaaaagaatatgaaaaaagaagtgtattataatatttacatgaaaaattttaatatacagaattaaacaacaaatgtatatgtaatgaatttgtaaagagaagatgaaaataataatttaaataatagaaaactaccttcatatgagctaaaagcttaatgttactatcatgtaaatgtgatgagttttctcacataacattaataaagaatgttgatgaagaaaaatcaaagattatgtaaataaataatttatattattaaagttatagattaacaaattcataacataaaaaaataaacaattaaaaattaataaaataatttattttgtttgttaaaaaaaagtaatttattttttacttttgatctcaactaaacaattttaagaaataaacatatactaggtgattgttacgtgccaagccacgtagtgttagttttatttaatattttagttttttatttgaattaa

SEQ ID NO: 116756 - DNA, 1006 bp, Cannabis sativa
actccataatgtatgttacaatttgacaaaattaatactttgtcacacttaattatttataatttaattatttaatctacatattatattatataaaataatataacaacatgttgaggcaacctccttgtatttgttgttttaaataaatcttatgaattatgatagctcttaaatttcttaagactgtatcttttgtgcttttaggatcagtcttctcatatcattcacattatttttcgatatgactcgtcttatctttatgtgtccttgcctctctctttataaaatacttgttccgttgttttagttaagtccgagatgaacttcgtctttgttgtctcgataattactacctctccaattaataatttatacttttgacttagccttaataaattgttatagcgagacttaagtatagaattaattatagcacattttgaagtgatataattatcacgttcttctttatttatatgtttattttatttttgagcttatatccacgtattgtattcatatttattactcgaaatatggttataacatctctataatccttagatctcactgaaaacacaacaatcacttcttgtgcttgccaaagaataagaggaatgttttgtgaaggttcggttcatgcatcttccatctaaataaccaataattgaaacaagaataagatacattagagaatatgctagacaattgagaaaataaagtattttatcttagtgatgaaatagatcatttaataaatattacactagagcatttacatgagtttctctacgatatttttcaaaatattttactaaaattttactctgtttattttacctaaacttttacatttcatcatacattaacttttttatcttttatctacaatcattttgttaattccatttttggcatatttaattgaaaaaaatattttattattctttgtatatttcggctggcatatattgatatggtttccctatttgtgtatatctaa

SEQ ID NO: 116757 - DNA, 2958 bp, Cannabis sativa
taaattggtcatatattaccaattttaataagtttgcatttaggggaaaaataatatggtattttaagcatggaaattcaaatttcccgtctaaaaatttctccttaattctctcatatattctttttttatttggtttaaatttctctatatctattttttctaattttttaaaaaatttaaatatatattcaaataataataaaataaataaataaatattactatccaacttttaatattcttaaagctagagtcgtgtgtatatatatatagattatactttctctaacttttagtggtatggttttttttttttttttagttttaattatgcgatatgagtactatgagatgattgaggagccaaaattcttctaattttcaatattacgagagggtaaaattttctttcaatttcataagtttatgtttttttttttgcctttaattttggggtaagatgattggtttatttaaatattcaaataataatatttaaataaaaatatatcatcactcaattaaccacatagatcatgaacttttgtttcttttcaatactacatacactttttttctctattatctattctataattcaaatttatttattgttattatagtattatatttatttaaattaaccacaaaaattgaattaacctatcgttttcttattttaagggctaaagcactcgcactcgaagatgctattgctgcatttagtaaatatgaatcaatcaccatacgtatcattcaagaatttgtcaaaaaaaaaaaaaaataaataacccaaaatatttatataaaaacaattaagaaaatatctatatattataaattgttgcataaaattgatttcatttatccaacatgcatgattctattactactacattgctactattctacaagttcatgttttggtactatattttcattttttttccgtttataattaaattgtgattaattttattcaactttatcaattatttttataaatttaatatgtcatttaaaaagaatacaaaaataaaaacaaaacaaaacaaagttacatgattttcatttcaaaaaatacttgattttttttcttctcaaaatataattccaataattagataatttaattatttctttttctaacaattatttatttattttaattgtatatgaatatgctcaaaaattgctctgagaaccaaaatatgttcagttaacttaaataaagtgacaactaaaaatgtgatacgttaatgataacgattttgatgtagtgacgactagagatgagatacggcgatgacatcagttttgaatgacaacagttttgaaatcatatgatgatgagttttctatagatttagtaattcttttgttttagatctctttgtgtgaggattcttcaatctcttttttgttactataaaatttaaatacatctctttgttgctttctcttttagataagaacttgtataataaatttttttacaatattaatttatttatttttctgtataaaaaatttagtagaacaattactcatattattaaaaaactatatcaagattttaaaattttaaatttagtatacttttataacttaattatcaataaataaaatattattataaatttaatatctcattttaaaaaaatgaagttacgtgatactttctaaacatgattctaaatatattttaatagtgtgattatatttttttgagagagaaaagagcgattataaatttaatatgtcatttcaaaagaaaaaaccaaaacaaaacaaaacaaagtcacaagattttcatttcaaaaaatacttgaatgttttttcttctcaaaaatttgattccaattaataatttagtatattaaaaaatttgatatatttactataatttggtattcaattttaatcaaaaaaaatatttttttattctctttctaaggattatatattcatttattttagttgtatatatatggctatgctcaaaaattattttaagaattgcaaaatgttcagtcaactcaagtatgattttttatgtacaaagcaaactaatttttaaacatagtgacgaccacaaatgtgatacgatgatgacaacgattttgatgtagtaacgactacaagtgagatacagtgatgacatcagctttgaatgataacgattttgaaatctgagttttctatagatttaacaattattttttatttttagatttctattttatgtgaggattcttcaatttcgattattttttactataacgtttgagagtagcctttattaatttattctcttttttagataaaaaattgtatgatgaatttttctaacatattaatttatttttttattctgtataaaaaatttagtaaaataattactcatattatatcaaaaattttaaaattttaaatttgatatatttttataacttaattatcaataaataaaatactaccgcacgcgaaccgcgggttgtttcctagtttttatataataccaagataaacaataataccataatagagtattttaatttatgattgcatactagaggtcaacatcatatttttattgttatactaaatatgtatatacctttcagtatataaataaatttatataatgcattcaaaattattacttcttaactacttcttggtatacatgtcacccaaatttttatatactttttgtatgtagtatataaatataattgtataactacttgttggtatataattattatattagtgtataaatttaactatatacaactatctacttgttggtgtttaatttttctaaaataactacttgtttttttttaataatgatgaaattttattaaatcaaatcattcaaaactaaagatgcaaaatccatgggtaatgcatccccagagtaagtacaatcagcctcaacaagagaag

SEQ ID NO: 116758 - DNA, 879 bp, Cannabis sativa
  modified_base (830)..(845): a, c, t, g, unknown or other
ctcagttaaaacaaacaaggcactttctcgttcataaactttttatagcgagccgaaacataattttttcttaaggatagttagttaaattagggagttttggccaagtcgcatctcgcaaagagtgacgtttgccatcaaggatctcgttcataaactgtttatagcgagccgaaacatcctctcgattaagattttcattaaataacctaattttctcatcatttatttctagtattgtttttggttgattagaccgagggttgaagggtaagacaaataattttgagtttttcccttctaaaaactctagaaattccaattaaaaatcagacagaggcattttttgtcacaaataaaaatacctcaaagattctgaaattatgggaagaacttaattcagaggggggaaaggactagttgaaaagacctaaaaataattcatttaccacttcaaatcaaaatcgtgcaaaaccataacaagaaaaataagaggaaaaagaagagagagaaagagggttaaagatgaaaactcaccgaattctgggttgatcttatagcgttgatgatttctaactcgaaacctttggtacgaaaagtccaagatgtagcgtgatcgagtttgggaaaaaaatagttgcagcaatgtaaaatatcactagtaaagggtcttacatcatttaatttaatgattattataaaatattactagtcatttataaaataccatttcaaagtagtatcagacactaagggctcgtttggtacgacatattgtattgtattttattgtattgtattgtgttggattgtgttgtattgtattgtannnnnnnnnnnnnnnntagtattatttaatataatacaatatttggtatt

SEQ ID NO: 116759 - DNA, 1352 bp, Cannabis sativa
gaggagcctatggccagccaagaggaggagctggatgtagaccaggttgagcctgtggttgagcttagggctagtaggaagcgctctaaggtggctgatgttgtccagggcaatctcttgggctcctatgatgaggctagtgtacctctgaacaacagaggttaaccttcggaggttgaggttgaccacattgaggaggagactactgagccctagattcttcagatgggggaaggagataggtgggtatctcctccttctacactatcaagggatatgtttgacaacgtcattgatagcgaacttattgggaaggtccggtgcattaggcctactcgagaccacttggctcacaatccacagctgaattgaatggcgtggtcttattcccatacggagcagggtagggtgcttcctctacacccatactttaaggacatttccaatttctttaggctttgtccaactcagattgcacctaagagcatcgatcaagtacttgtcagctcttttcgttctttatgtcgagctaggctggccacaactttcaaattttaaggtgttatttcttagagtttaagtccatcccatgccaggataggactaggtacttctattttagccagcagggctactggtggctggacaacactaatgattcagctatgtcttaggttggaaagtacgttagaagctactttatggcatatgacatatgatatgtctgccaggacttccaccaggttccaacttttagttggccattccccacactgcgactgagggataggactaaccacattctatctctcctaacatccacctgtaatatttgtacgttggcctctgaggagaactttaggaggtatggtctgtacccacctgttgagagagttattccttcagacatcaaccttgaggaccctagccatagaacatctccaatggtgccattctttaagggtgtcgaaaaccttcagatcacctagaaatataatattttttttttatctttattccacattatttttgacactttttattttaaaatgttcctatagtaagtacttctaaaaattcttaaaataatattatataattacttaatatatataaataattaaattttcttactttatgacaaaataattaaaaaaaaataagaaagagaagatataaaagatgtcattgtatgacattcttttttggcattttttttcactccaacggtaagtatctattaaaagatgcaaaaaatatatccatgtaattaaggattctttaaaatatctctattagagatgctcttatatagggtaaatattattttggaccctgtattttgtaaaagt

SEQ ID NO: 116760 - DNA, 1307 bp, Cannabis sativa
tttaatataatagtttttatggagtatcgctagctaatcgcaacgcgacatgtcgagaaggtgctaggcaccactggtgcctaatagcaatgctcatggtaaaaataccattacgcacctctaaatatattgtcttgagattagttagagatattctccttaaaatttattatattaaactatatgaaaaagcaaaccaaacataattttggaaataaaaaacaaatttgtttaatttatgggctactattaatttattggcatcactcctaatgagatataagaaataaatgacaaaaactgagaaacatcaacaagcaaagcaaatatgaaaacaataaaatagctagccaagcaaccaagtcgtttcgacttgaaataacagaaaattaatcacatgcgccatattcgacaatccatatatacaccgttttttagttatatagtatagctcgagggaaataaaaatgaaggaagcttcttccattgtagacacggactctatccgagctttaagtttacaccaataatcaagccaaattacaaacaagtttcgtgatgcatacttcttcttcttcttcgtatataatatatgcatatcatgtggatttacccattttgactgtatttcctatacaattatttataaaattagttttcatgaagacattggctatttctattttgagagaacagataacatcaaaagcttttggtcaaggacaaatattgtacaattacaatacaatataataactaaggattggtatggaggaggaaagacataattgacaagcaaaacaaataaaataaactcttgagtcatatgaatgatgaaacttaggcggctggcctggattgacaaaaatttatttcgttaaactaacaatcgggtattattataattttccaagtgtttgttctattttgactctattctaatctatacaaataaaaagcttcaatcaatttcaactagctattatcaaattagttacatttattcataaataatcaattaataatattggtataggcattcgcacgaaaattcaattgatgagcatcatacgaaagctgaatatttgatatgccatgtggctcatgtcgtttaaggagctgccttgtcgtttagaagcaaaggtctcgtacgtagagaggattaggaattttatataaattattatttttggtataatttttacacatttatagatttattttatatttttagggtgttcattaaaataacactaaacaaaataagaaagctacatgcaaataaaagtaaaacaacaaccaaataa

SEQ ID NO: 116761 - DNA, 1695 bp, Cannabis sativa
caattgtgtagtgatgacgaatgattatgatcgctggagatccaagattttttatttcttaaatttcattttggtttattattattattattaattattattattattattgattctgacgattacaattatttttttgaaaaaagattgcaactttcattcaaacaaatcagttaacaaaataacttttaaaccagaacgcaggtgtcattccatcaagacccgaaaaatttatcagaatgtatttaaaacaccgccgagcgaacttcatcttccaaaactggttgaagtaacatagcattatcatcatcacttatagaaggctgaatcttattatcataactaaattggctcccttagactgtttttaatattttagaaactgcataccttgcaagttatattaaaaagagaaaaaatagaaagaaaaataaacaaaaagagaaggtatatatattcatgaatacataacgaatttgttataaagtttcaattaaatatttaatttgccacctaaaattaggccgtttgaataagatccatttccatttttaataaataaaagtatattgtagttttattactttataccatcatactgcccatgatgagtatttttctttttagtaatgatatgttgaatgaaatacggttgtacaataataaattgattttttttttacttagctataaagtatgacacaataagagaataattttgtagattttatgccatttctcacgtaatactttgtagttggtccaatatataattacggacacaatctgaagtggatggatgatattggagcttaatagttactcactcttttattagatgacaacttttcaaggatgcgagtaaaagttgggaattatagttgtgaggtagtgatatcatgtttcaatcacttaatggacccatcatccaatcaagggaataatattccttcaaatggaactttaaaaatactcacaactagcttcttttactctttattacaaaatatttcaccaaaacattttattttttattttacttcataaattacattccatcatacatcagtttttatatattttttttacaatatttaaataattatttatttatttaatttaaaaacttgagaaagatagaaaaaaattattaaatatgcttaaaagataaataatatgtcgctgcgtataaaaaagtattagtgttgtggtactaaattatgtatgcaacaaaaatattttattataattattgttagaaaaatagaaaggggcaccttatggtgctaaacaccacatgaagaggcataccactatttgtacaaatcaatattaggtcccacacaatttgatttaaaaaaaatattataagaaattgttaaccacttgcaacgcgcagtaaagaaacaaaaggaaaggtgtgtactgctgtaaattgcaggtaggcagctcaaataggcctactgttctattgctttatttataacaaaggttagtacagagaaatattacagcagagggaaatacccttgggaccacaacaggtgtcaggcaattacaaaaaatatatctgttacacgaacaaaatagactaggacaaaatagcaaaacggaaatgagaacttcctggaaccctttggtcattatgttgggttttatgccctaaataaaatttatttcaatataatcagattt

SEQ ID NO: 116762 - DNA, 1061 bp, Cannabis sativa
aaaatagactaaaaaattcttctggatgccgaaacaagtcaagggtgcatcagtacatcccttttaagtggtgcattgtagaatcacccaataatttttttttagaaatgaaaatgcatattatattaaatcaaactttcgtaatacaataagcatttaaaggaggagtcaatttcttcaatcaagtacaattagaatccactgaaagagtatatttaactagcaaatgaacagcagtattaatagatttaaacaaatgtgaaatctgcattccagaaaagttagagtctagagagagatatttgttaacagacaatgaaaataagaaacagagactttagagaactgtaatcctttaaccactaaaagagaatctgtctctatatatagtaaacaagcaaatgaagatctttaagccattggagactatatattaaagtcataacttccatcacttttgagcgaaaggtaccagggaaaggcttagatatggcagcaattatatcaccataagtgttatgaagaatcgtaccaaaacaggaagattgagtcatcttgttaatgggagcatcagtattcaatttgagtcatcttgttaacgactacatcagtattcatccaaggggcatctgtattggtagcattaagagaggacgatggaacagcagtaaccgagttcttaacctagcgggtgattgaaaatcatcaagaaaagacaaagcaaagtatagtagcacattatgtggttttggttttttaccatgcttttctttatttctctcactctaaatattccaaagaattgttgcaaactgttctaattgcaaatttgtccatgtagcagaaacatgtaacaacagttctttgagattcatttgccccgtaagatagttaccaagagagaaaagaggccttccaaacacgcttaggccggtgacagaaaagcagagcatgtggtgttaaagatcaacacctactctacaagtatctagaactttctatcattttggtaatattatagaattttctagaatcatagagagtaatagtcattagaagtt

SEQ ID NO: 116763 - DNA, 1078 bp, Cannabis sativa
  modified_base (1023)..(1028): a, c, t, g, unknown or other
aataaattgtttgaacacaattttctatattgtaatttgttttgaatgtcaaacaatcgtaataactctataaagttcacggtgagctcggttagcattcaacctgtcaatctagatacgatgtcggtcaaatggcattattaagttaaaattgaataatgtatatgagctgcttggaaaaaaaaaacgctgaaagaaaaagtgcaacactcgtcaccaacatcacaaattaggcaatcaaaaaaattaatagtaatacctcttagcaataagtgatctcgtgataataaattattatgagaaatttgttaaaagataaatttatattttaatataaataatctataccaaattattttttaattatcaactttagcatacataataataagaaaagaactgtaaagcttattgagtaaaatcttccccttttccaacatttaggattgtgtctttatgttaaaacatccccaagatagagtattgtatctcatgtgttcaacaatattaatattgtaactcaaagcacctttaaggaggtcaacaaaaataattgtcatattggtcttatttaattgtataagccaattataatttttcatttatctattttaattaaaaatataaaggacacctatgcctaatttaaaatattttcactacttctctcttgctacataatacaatgtggtacaccatttttttgattaatcatgtacaccatcccattggagttagcctcatagtttgattaaacatgttcttgggatactcattgagttatgttagtttaaaaatgttatgacttttgtcttaatatgattctcatcattttgtcaaaagaaaaaaaataacaagtgagcattgtcattgaaaaaagatcaagggttaaagtatagactaataaaaacataaggagatttaccagtcaatcactcaaaaattatgagaattcaaaagtgtagttaggatctctctattatttcaaattatatatttacttaggtgtcgtttggtaacacnnnnnntttctaattttttaatcacaaaataaaagtaaaatttttgtttttgaaaa

SEQ ID NO: 116764 - DNA, 963 bp, Cannabis sativa
agggctcattcttgtatatctttttgtttcgagtgtttcagtggagatcgggttgagcattcttttatggcaacagctctgttatatttacgagggtaagacctacttgaatagtttaagttcacatagaaacaatgatattgaagagaaaggttgccaaaacatttggcgtttcttcggttgccctcattcattttcaagaatcttacctagttttcggaagaagatactcaagaagaggtgaaagccatatgtataatgtatttaactcataattatggtatcatttaactgtagcatttgatttagttctactgaacaaataaatgagaatggaaaagaaaaaaagatagaacaattttttgtgtggagttggaggtcttttttagtattacccttgactttttttctttttgtagcatttgctttattttattttattttgaaaaaattatcaaacttcattaatggaagcatttgcttcattaaatatgaagaacacaaataagagaaaacataacatagtaaattgaggtaaacaacatttctcaatttatggaattaaaatatcaaaactagtcactcaagttatgaaagagtcacattacactagcatgggtatagtgttcattatggcaaaacaaactaaaagaagagtgaagccaccagagataagtgtaagaccaccccaagatttaaatataatcttaaagggacttgaaaataaatattttaaataattagaaataataataaaaaactattaataaatttaatatacaaaaataattaattttattattttattgataagagaaacggaacctaataaaaagaacataattatatagtttttatatttcagaagaaatatttaacaagaaatatattttaaaagaatggtttggtaatataaagaataaaagataaaaatattaattattttaaaataatttgggataa

SEQ ID NO: 116765 - DNA, 1268 bp, Cannabis sativa
gggggtttacccgcagaaatttgggttgtgggggtttaatgaaaccaaaacaaaagtattgggggttttgccgccatttacccaactatttttggtttattattgagttggtgtgctagtaaaatagtttacacgaaataattttattgtataaacttttagagataatttatttcatgtagctcgcgacattaacacagtagtttatatttagctattaaattactgataatgatcaaataaaaataagcaattacacataaacatacttaaatatatagaataaattcactagaacatatattacaattacaaagtacttaaatcacaatttctattcaacaaaataattccagcacaagagaaactaactcataagatgagtaaaaattataaagttccaaatgaaagaaacatagaaaaaaaaaatgaacatatgaattttgtcacgatagtctccaaggaatatccccaatttcctttctttttcttcttcttctttgttaatctctaaaataaaatgccaaccatataccaaattaaaactaacacttaaatgaaacgattgtttttccttttcctttctcattttttttttctcttctttttccttgtgctgtctatgcactctgttgatgtaagaatcttatgctatacacacacatatatatataaattattttgcttcaagaatctatctgcagtgatgttagagcaaagaaaatacgaacattgtaatcttctactaaattagctcgattatatgaagcacgagatcacactttatcaaagatttcatcaacattgtcatcttccaggtttcagctgaaacatctaagcaacagatgaagtaaaagttgttgttcccacaccaaaatacatctcacttgaaaatcacacagcctgcgcaagttcagtgttctcttcagtatttttaatcaacacacaatcatacatcacagaaattaatcttaatactactcaaccattatttgtaacttgtacctagaatcaataacattagcaaagactaataatacaccattggctgcctatgattaagaatggcaagtcaatatcatggcggattcttgaaccagcctatgtttacgattagccttctgatcaaataaatataaaggaagatggatgcatgtgtaatcattgttagaaaaataattacaataataaaattgataacacctgaggcgtgcaaacaagacactgtccttaaggatttacaaagtaatcccccaggattcaacagg

SEQ ID NO: 116766 - DNA, 950 bp, Cannabis sativa
  modified_base (720)..(738): a, c, t, g, unknown or other
aaaataaaatttttaaaaacaaaaattttactttcatttcgtgattaaaaaattaaaaaacaaaagtgttaccaaacgtcaccttaataattctaaaattaaaattgatattcactctaattatcttttaaaagatctgaatagataatactcattaaaaaatattctatatatatacatatatgggagcatattatttctttattttttgagaaaataacctcataaaacaccatcaaagataaataaatctcaaagaaatcgaaaactaaaggatttattgataattaacatcatccaaaagaatattctaaatgcataaggataatcagaccgccaaattgtgctagaagtagcttccatagcatattttagcaagtgtatccgctactaccttaataattttgggccagtaatcgaaaatcacaatggtaaaattaggatataaatctctaatattatcaagaagtaaacccaataaagaatctaaaaccattgaagaattgagcttatggatcaaactttgacaatcggattcaacctaaatattgtggattccaaaagagatgcactgtgagagggagtggcgaattgcgagagcttcagcccaagctagaggatggctgtcgtgagctttccaagcagctgaagcaaggaccttaacatcatgatctgtgaccaccaaaccaatgttagaatatattttacaaggatctagannnnnnnnnnnnnnnnnnnattaacaccctaaatataaattctttaaaataatgtaattaaacacatataaagtttaagtatattatattgattgcagtagaataatatgtattctcccactcaaatctctaatcattgttcatttctgtcgcagagtattatcaagatttgagtctaattctccttttggattcttcacagtcttatacactatgattgagtacttgact

SEQ ID NO: 116767 - DNA, 4132 bp, Cannabis sativa
  modified_base (3044)..(3044): a, c, t, g, unknown or other
aaaaaaaaagaaaaaaaagatatacctaaactgatgttcggcttagaagcaggtcataatcttatatagctacactaagtctggaaagttgagagagtcataggtttgccctttcagccttgatgctgttgtcatttgagcaagatctacctgtcctcatgctggtataatccgaaaaacatagaagaaaaacagtgaatattcgcgttgagcattgaggtacttgttcttgaaaacaaaagactcacctattcaaatgggtgggaagtaatagactttgttctagagccttaagtaacccaccttctgaccaatctccttcaagagaacaagtttctaaagaatcattgcccttcaagaccgatgcttgtctattgaatgaagtcactgtagccatggctcccatgtcaaactctttgtaaagatagcatacaaaaaaagaagaaaaatgagattaaacatagttaaggtctcttcgtagtttgggataatatgaaaaaagttaacaaatacctgaaggacttctctctaactgattaaggcttgtatgttggtggggatggagtctgttttctctggatatttcctacaaaagaaaaggataaagagttgttagttatatagttagttcgttagttaaacataccataaaccttgtatgtattacttaagatgttcgaaaagtaaattaacaacaacctgagcagatgtttgcaattgaaaagaggcccctatgtgagcctgaacttgtgattccatcccaactgtgacttctgagttaagtatatttaacatgtccggtaccagttgctggtttgaggaagtgcattgatttggaatagaatatagacttggggttgaagtttcttgattcataggaaatgtccctgtcatgttcagaggtagagatctattttcctcaccaaagtcacttctcatatgggagagatgagcaggattcagtgctgcaggtagacttactggatgcaaactcaatccatttctcattgctaacatctgaaacaagaatcacaacacaagcaatcaatatgaaactatttagtaataatatcatcaaattttctttgaagaaattttataatgcagcacagaacaaccagccatatatgctgaccttacctagctaaataaagcagaaccctttaatctagcatcctatagcttatgtgaatcgataattgtggatcatcccaagaattagggattagaaaccaaaaacgaaatagcaagaggcaactgactgaacaatgtgaaatgtgtctttgagtgttttctaaggcacgtctcattttcctaagtacttcttgaatcaacagttcttaagattatacatgatcccttgaaagaaatagactaaaccactctgaagttataagaattttggctcatccttgataacattcaaaatatgcatctattagtaaagatgctatttttgccacaaaaaaaattaaattttgatcatccttaacagatgatataccacatctcgataaaaatacaactgaggtctcactaacactaattcttagtcacagaacaccaatcaaatcatctattttacatgagaagtcagatattattacattttcccacaatccctgagatagatataccctcttatgagcttcctgagggtttttttttacacccaacaaaaacgtgggactcaaaagacaaaaagaaacaacactttaaatttatagtttatgcaaaactcatatttgggttgtggagttttataaactatcactcctctcatcaatcataaacaattgatcaattccggttttgcattaacaaacaactacataactaaaacaaacctgtacttgaagttgaagctgcttgagatactcaatggcttcatccagcattgaagccttgtccgtctattacataatacacatcaataaccaaattgttcttagtctcaatacttgactcatataatttttaaagtgagtataaatataatacaacacacatattttccataagcaaaatagttacataccttgttagaatttggaattagattctgtaatgctttcattttctcattaatcctactcctccttctctgcccaaacaatcccatttttcctacattaaaaaccaccccacccaaaccaaaaaaaaaaatagcaaaagaatagaaatcaaagggaaaagacaaccttttcagacaagttatgaacttcggcggctctgcttctcttcgaggaacctcgacccattacactttttgctggaacatcttccgccaatgcttccaaaccctcctgcgtttccaaaaaataattaaataaaatcagctcaaataaattatttttttaaaaaaaaataccagtcaaagactatagctttagtttgattcactttttctttttttatattttctcagcaaccaaacagaggaaacgaaaatcaatacctcactctcacaatcatactcatcgttctcattctcactagctcccaccgaagaagacgacacattattaggagctatgaccgccacgccgccactcgtattatttatactattatttcccacgaaataagcaccggaagaatcaacggccgagatcccatctccgaccatctgcgacgacggacacatacggctcagattattaccgggagacgtcaacgaaaactgcgtattcattgatgaagaagaagaccgtaccaaaatctgctgtagaaaaagcgaaatttcgtcgggtgccgaagatgatgagcaaatgcttttgtcatacatatcccccattactgctttctgtgctctctctgctctttttctcttttctcttctgggttttgggaccctgaaagtgcgagtagtgagtccactcaatctctctctctctttctctctctaagctcagctcttctttttggggttaagttcggttttggctttcttggttttgctgcgtctggtcttgaaaagccatggaatttaagcaaaaaaaaataagtaacagagcttcaaactgagagagagagagagaganagagagagagagagagagctggtttagtttaaaagctttggtacgcgttacacgcgccagaatgagcgagtgggtcaggtggagggagtctgatggctgaataaaatagtctgacagtcaattcctattgggtgattgaggctgtgtaaagagcataatgtgacagacacggtgactgtaacaaatatagaaacggtgtgtgtgtgtgtgatgcgcacgtgaggctccacttagaaaaaaattaaaattccgtaattaaacatttattctgacattttctccgtaatccgtacctctctgagttttgttttgtttgattattattttcattataagatccgtacacacctgtaaatacacactaaaatttctgtctatattttaattatttttaatacactcctacaaaattttggttcaataataattagtttataaattttggttcaagaaaaatccaatgcttaaatatataaaataagaaaactataaaaaattagttgagagttgggataccaatatgtaaaataaataaataaagaacagacattcttttattaatcaaaatcaaaactacaataataactaatacaaagggatatttccctataaattaaaaatgtttacattagggtggagtttgttaatatttttttaatcatttttttatttttaaaattagaaaaataaaaatattgttcaaaatcattttctataaaattgtttttagttttcaattttttaattaagaatcaaaattttgaaaaaaaaaaaacttttaatattttttaaaacatattattttaatcaatattttagattccgactagacccagaccagatccaaacccaatcccagccctggcacctaacccggcccctaatccggacccatacttgacttcggacctaaacctgacttaaataaaatcaaaaaataaatataaaaattaattttacagaacacacatttattttttgtttttaaaattgaaaaaaaaaaagtgggtatagaaagtatttttgtttttcaaaaacaaaatttttaaaaacaaaaattttattttcattttgtgattaaaaaatta

SEQ ID NO: 116768 - DNA, 2529 bp, Cannabis sativa
  modified_base (2480)..(2481): a, c, t, g, unknown or other
atctggatgggcctaaaaatattggatgtgatccaatgaacacccctacgttccacgtgtctttccaagattaaacctttacaaattttaaaagttttttcatataaaaggttttatgttgatatatacataaatgtacatattttctctctaatttatatatataattttgatttaattgagttgtcaccttttttttatttacttatatattttcttacttaaaattgataatgataaagatgagacccatatgttctctctccatgttcatcctattttctattatctctctccatgttcatcctcttcttcttcttcataggtttctttctctctttttttttttcaaaatccatacagtcatgtttttcatttttagctttctctccatgttcttattttatttcttgttcagttcttcttcttcatcttcttttcatttttttccttagtttttgaagttttcagtcacattttttgaaaagataaagagtatggtttttttaatatgattttttagaactgggcttacaaatatagcttctgttgcatcaggtgttgaggctgtgcagaagataattagtttttttttaattattttttttatttgttttagtgttattttacggttgtttttcataatttattttttgacatcgatttcactgctcttgctccatctcgctgaaattaatgattattctttaggtgttttcgtggtgttgtggtggttctatccgtaggtgtagaagatggaggctataaaatacatttcttattctttctctatgattattttgtggttttttttattctggttctcttataaatacatttgacgagctcactagaaaaaaagttttgaggtgtgtggttcttttatatttttctaggtgattatatttgtttattgttttacatttgttttgtgttgttttagtagtttttttgttctgattttttaagattgggcttgcaaatatagctgctattgcatctagtattgaggctgtgcagaacattgttagtttttttaatcattttttccttttttttgtttgatctgtttcagtgttgttttgtcatgattatttatttgacgtcgatttcactgttttttctcaatctcaccgaaattaatggttgtgttccgattattctgatgttcctgtggtggttttgtccgtgggtgtgcaagatgaaaaccttttttttttttatgtttacagtataaaagaaaaaaaaattcgccaagatagtatagaagttatttttgccgtgtggtagtatttttataaagattgggccaaatgtcagtatttttgtaagtttttcttttgaaaaagcatattgttcttttctaaatcgagttttcagtgagagatttgtttctactgagttacaatcttgtattttggctgaatttacaaattaataaactttcagatttttctttcaaaaaaaaaaataataacaatattcttttttttttttttaatttagcgtctacagttacaattttttttaaatgaccttgaatctaaaatagtataaacctttttctaaattagtttcgatttttgttctaaaataattttatggacaaaatatttttttcactcttcaaactatagcacttgtagatttttgtctcatgaattacttttttgacaaaaataccctgaactgtcacttaagacttttgccccttccgtctaaaaaaataacagtttgttgatgtggtagttaaacaaaaatgttttatggtatttttatttattaattcttttttttttttaaaaaaaaaaagtaagaattattgcaaaacttaaaaattagtacaaacttagttttaaatttcttaaaagtaaaagacctagaatcaaataaatacaaacacaaacaatcatatctaacattcattcaagaaatgagaatatatattttttttaagtagaagtagaacactaataatcaaccttaaaacttgaaatacaaatctataaacttcaaataaaaactcaaaactcaactcaacaattcattcttttaccataaatttaaaacataattaattgaagtaatgagcctcccaatatcgggaggctcattactttcaatcgagataatgaaaaatcatttcattttttagttgaaactttaggtggttctcgaaaaaagatgacgaaaaaaataattcctaataaaaaatatcataaaatattttttcaagtaccacctcaactcaacaaatcattttttgttggagagcaaaattttttaattgctataactcaagaggatttttgctgagcaaaataataattcagaaaacaagaatatacaagtgctataatttaacgagtataaaaactttagagtgattccataatgtaccctttaaaaagaatgtactgatgcactctctatttgttcggtatctagaaaaaaaatttagtctaattttttttttcatnntcatgtacgttatagctatttacggtatcctacaaaattttgaaaaat

SEQ ID NO: 116769 - DNA, 1224 bp, Cannabis sativa
tgcatatatcatatgttgattaatacctaacattgttgattgtatgtgacttcttgtctatgatttgaaatggaacatatttgacacaaactcgatcaatgttgttattgatgtgtatatttgcaacagtatatggtaacccaattggtaggatttgtttgcaattgcagcaaggccttgctcttgggtttgtgcaagttttctatcacatgcttcactactattttagggtgcatcattaatcagctgttcctttcatgttgtttgggaaggaaaatgggtagttttattacaactcattatgttgcctgtgattggaacttgggtatagttgggattgattagatgattaactggctgtttatggtctttgtagttttattaatttaagtcaattgcacgggttattaactcattctcaaattaattttctcttgcttgttatgatttttacgtcatttactttggaaattagaaatttgaagccctttgtggtcactggtcatagaataagagactttcaactttcttacttcccttaatagttcatcttctttgttgcaggcatgtgataatccttttgattactgtgacattgtgacgtcaacaactcataaaagtcttcgaggtcctaggggaggcataattttttataggaagggcactaaaccaagaaagagagggacacttttaacacaaggagatgagagtgatcactatgactttgaggaaaagataaattttgctgtaaccccagctttgcaaggtggacctcacaataaccacattgctgcacttgccattgccctgaaacaagtggctactcctgtgtacaaggcatatatgcaccaagttaagaaaaatgctcaggcacttgcttctgcattattgagaagaaaatgcaagttgataactggaggaacagataaccatttgattctttgggatttaagacccctaggcttaacaggtagacttctttctaattcaagttattaattttacaactgaaagttcgttattatcactacttcctaatttatttacttatcatagtttgtcttttgttatgtttactttcttcattttattattttgtctatttgtttatgtttgtgtgcaagtttttatatatttcctgctttattccttaattaaaaattttggatattgttctgggaaatatgatgctttttgttgcttataaaagtagagttttttttt

SEQ ID NO: 116770 - DNA, 4020 bp, Cannabis sativa
aaaaaaactcctataaaatataggtcaattagaatttttgtcccctaaattataacatgtattaaatcatgttcattgaacttttcagaccgttaaaaatacccctcgaactattgaagttgttagatttaaggacttctttttaatttcattcaattttcactactacagtcactataagaaatgtcacttttgccagaacatttttgtgctgaaaaaagtttggtattgcgctaataaaatggaatttacttttgatgtgttggtaaaaggggttggcaaatcaacgttggtattagaactttttccagcacaaaataaaaagcgctggcaaaaatgacttttcccagcgcgtaaaagcgctggtacaagttagattttagccactgtaaatgtgcgctggtaaaactttgacctttttaccagcgcagtttgcaaaatacgctggtaaaagttacttttaccaacgcagtagtgaactgtgctagtaaaagtaacatttcttgtattgagtaagggcctttagaggcttttttcccaccctttttataaaataagaagctacatgttgtaaaaatactcgcatgattaaaaattaacatttagaggcggttattgtataaaaattatagatataaaaatttactataccctacaaagtcagttgtgggttgggaaactttcaaggttatttattattcatatggcgtcggttattaggaaacaaccgacaatataggtgcacacctttattaacacgtgtgtcatatgccgttggttatttcataataacctcgtgggatcatatgcatgtgaatctcttttttttttggaattcctttcttggggtcaccactttaatttggtgttcccatcaataggaccctttccttagtttggtctattttgaggttatgagtcctggggctcttttcccgttcgatgcaccgtctcttcttccacaactagttcatcatgttgagttttttccatgacaaaaaagtctggttatgtcggggatatgttttaagttttttttttgttaacacagaaattcattaagaataatgaagccttgaaaattaaaatattaaatatgaccaaatccaaataaaataaagagacttttacatggtattgtagttaaaatctacatactctacgagtcaatattattcttttatagtgtgtttggatacatgatagtatttttggatattttctatacttattctctcagttttattcatcccaaacgattgtttgttccctgcaccctaggttctatacatatttataagatttttcaggattgacaattaatctcctttaatcttatctaggtaaccattcacgaaacgtgaataatcttcacgtttcataattacaatatgtgtgacaaaaaaaaaattaacagttgataatcgcttcttgtccttatcagaaagtattttctttatcaagataatatattcaaaatatagctcgtattctttaaaaatatttggaaatgactagatgtattctgcgagacactagttaagatatttttctttcttttgctatttatgacaaatcttgagacaacctttaagattgtatctttcatatccgtttgggtcaatcattttgtgatgtctatgtgcattcctagatgggccgtactttgctcatttcccttagtcttgcaacatactctttaagtatgtggatcaatgagttgtaagctctttaaagaactcattatttaccatttccagtagttcatccttttgtactctatatatgttatgtctatctcattaagtccaagatgactttatgatattctcactaaccatttgtatttataattttaattttattggacaactattttattgggagggaaatagattattgtaacgccgaatatgaaaaacatataaattcacaccataaaagttaaatatatatatacttatatattaacagaagtcgggatactaattttaaaagtagtttcttgacataaaataacacaaatagttttttttacatgtcacacagtgaccacaaaagttgactcaaaatgttcgcccgaaatcctccatgttgcactgccacaatatgtactatcactactgagcttcaaactcactgctcctccgccttagctttctcttaacctatacatatagcacactggtgagtcaacagactcagtaagatatgcataatatatacattataatgtcgtcctgtaattaggctcccaagcgtatatttacaaagcttattaacaaatagtcaagaacgttcttaactaagatacgaccgctgtaccacatgcactctgtaccattgctgtactagtgttagtaggatataatttgtacctcgagtgccactaagtatcgtaccatatgctctcagtatccagctgtactagtgttggtaataccgaattgcactcttaggttgtaccacatgcactcagtaccattattatactagtgtttgtagcttataaaatatataattccatgcacattacatccatacactcacatatatacataatttatgttaatcttatctcgttaccagattcaagcatgtcggtcgacctgaatggaaactcactcactaaacggaggccctatgtcacaattgaataaaccgataaataactttctaaaaccttttcgatgatctaaactaaaaactaaaagtctccctatcgataaaaggcataacgaagtcctaaatatcaagaaaatacaaaaaaaaaatcctaaaacgggaaaacctacccaaaagtttttcttggttcatcaccagaaaaaataatagggcgtttctgcatgacctactattttttactacagaaacaaaataaggcccccaattgaaccaaatcaaccgtaaacttcaccaaatgctctagaatacctagaatcatcaaaatagaccaaaaccaagcaacaaaaccaagcataacttgaaattacaaattctaccatagttgagccaagtttaaattccaagaagaactcaaacttgctcaaacccaaaatcaatcaacaaccatagcgcaaacaagtctatatcatcaatttaaatctgttaaagacatccctaaaccaaattcaactaaacagtaccctatttcccaaattttagctctaaacctaacaataccatcaatatactaagaatacggtttctaagtttacctccacttcaaactacttcaagacctagctaaaacttcaagaaattcattgaaattggctgctccacttctgattcttccttggagcagagtacaagagagagagagagaagattgaggttttgttcttttgtattctcttgaattttctagctaaagaaacgataaaagggagacagtatgcaggtgtgaagtcgcaggcggtgaagaaaaatggtggagaagaaaagggaggaacggttgctgcttcaaatttaaaagaaaattgaaggaaagaacagttaaaatgaaaaaaaaaaacagttggaaagaaaaataacagctacagacccgaacagggcacttacagcaatacttaagttaattgttatttttatttttattttttcttaaattaattagaaattttatataaatgaagtcaaaattaataattgtattttcctttttaatcatattacgaaaatgatttatatatataaatatatatatatataaatatttgtgacgtgtgcaaagcacgtgccatagagtagttcatacataaaagtaatactatttctcaaaaaaaaaaaaaaagtctacataatctagtaatgcttttcttatgtaaatagtatttatgtttacgtacgtaattaagtgaataatatttatgtatatacttttcttaaaaagaattggaattttctttatatagtaaacaaaaatagaatcaagagtaaattgagttgttttatatatatatatatatatatttactatataaagtgtgcctatataactaaattcttggtttatga

SEQ ID NO: 116771 - DNA, 1830 bp, Cannabis sativa
acttagatatttatttgtaactaagagttaaatttaagtatttatgtcgtaaattattcaataaaaaaaataataataaagaaaaactgtgtaataaacccttaagattctacatcacatgctttatttatgagagataaaaaatgagacatcgagaggtgtgttaataacccctcgagagaggagctgcggcattattgtgtccaagccacggcactaaaagaacctgaactcatgccggtcaaaccgggttatgacctctaataataattttaaattagggtaatgcacatctagttataaatcctcacacttacactagaggcagaagaaaagttaactaacatctaaattgaaatgatacttttctatctcacctacaatatacaaacctcttaataacttctttatcaaaaagttaatggtgaaagaaaaagtgacccccatcatcctatttcatgattcccttaataaaatacatggggacaaatgcatttacattttaaaaaagtataggaaatatatgtactatatcttttaaaagagtattgcggtagatacttttatttattttagtatttaaaatatttttttagtctattttttcatgatcttagtacattttaattaattagaattatctgtaaattttttttaaaaaattaaatattttatagtgctgaaattaaagttcaaataattactttctacttgaataaatatttactttatttttaataaactatttcaaattttataaataattttaaataattacaatatactctatcataaaaaagaaattaaactaaaaactctcatgaataccaaaggggtctactagaactctcatttaaaaaaaaaaatatagtatagacttatacatacttttataaaaatgaaaagttcacttaatttaatgttctgctaagaacatcaacaatgcataatacttaaaatagtatcaataatttatacaccatcgtgaaatataatattcaattttacttttaaaagtattccaatgctaatcactatattctcagacttccttagatatatcttttattttacataaaaaatttactttttcttttaaaagaagagaacatatggcaccgatgccacaattaatgttagcacggcatgcgctttaatgggaggacacttaaaattggtgctaaaagccaatgccaatggcaagctcaaaacccagtgtcaaccattgtggatgctctaatagtaatatcttttaaatatattaaaaatctacacattattttaaaatataatattttattttatttttcttctacattattttttagtactcttacttctaaaaatactccaatgtatatcactctttaaaaatgttataattatgatctcacaaattattatttaatatatatcctaaattttagctacaataatttttagctacaattttttattaaaaaaatgaatagcatcaatgctacaatataacatccatgcaaatttctaaaatatcattattttctctctaatagtataacatttcaataatttgctacatagtatatccacttcactaagcatactttaaagttttatcattggaaatgctctaagagcaatccatactagactttatgttaatttgatgaagctattaactgcagaataagcatgtcaaaaagatccatttagttggagctccgatctgacagatctgttggaattattttaccaggatctatatttactaataagtatattgttaacatcctaaatatgaacttctaaaacgatacgaaataaacacatataaagtatcagaaacct

SEQ ID NO: 116772 - DNA, 1542 bp, Cannabis sativa
  modified_base (1507)..(1517): a, c, t, g, unknown or other
aacaatgtcatcaatcctgccttcaaagattgggaatagcaggataacttactggtttcttggctcctgtcatcaatgtccgagaaaacaacaaatcccatgattggatgtgagacaatagctcagatctgggaagctttgaatgaatactacactgttctcaactctgctaacataagcctgtaaaagactcaactcaggaacacaaagatgacaggttccttgaatgattatctgctgaaaatcaaggggatcattgatctccttgctacaattggccataaaaaatccccttaagatcacattgaagccatctttaacctgaatatgatgtctttactgaaatggaggctttactaatggcacattcagttcgaattgaaaagaatgcaaaggccttggatatcaacaaaagtgaagccaacctagctcacacaaggtccgtttgggaatgctcatggcagatttcactttccaaattctctgatgcctactggtcataatcgtggtactctatttcgatcaaccgagtcttaatctcagatgcaaagtgtggctcatggtgccttcaatacgagccgtggtcaacatcctcataatgatggtcgaggaaattccactactagtcgaggagcatctcaatcttggactcaaaaaccttagtgtcaattgtgtcacaagcttggacatgcagtcaagcaatgcttctacatgtttgataaatctttctctggccctaaatgctatagtcaatttcttgcttctgctaatgttgcagagattcaagtttgtcttgccacaccagaaattgtactagatggcagttggtacctagattctggggtaactcatcatctcacaccaaatggagccaacattgcttcctacaacaactactctggacaagaacatgtctatgtgggtaatggtactgatctaaccattgaaagaattggtaactcttttcctctctcaccttttacatctaaaacactatcattaaccaatcttcttcatgtgccctctattacaaaaaatcttcttagtgtctcaaaatttgctaatgatattctgtgttctttgaatttcatcctactatatgctatgtcaaagagcaggacaccaagaagaccttattggttgggaagcttgagaatggcctctacaagtttttatctgctcaacgctctcatctaccatctacctgtcattcctaaacaaccatgtactccacattgttttaccaatcaagtgtctgtttcttattttaaatttactttgtggcatagtatgcgtggccaccctactgctcgaattgtaaaacaagctttaaagtcatgtaatataccagttgatgataaaactgatcttgatttttgttttgcatgctgtcttggtaaacatcataaaatgccatttcccttttccaccatagtttatcatgcacctctacagttgttacactcagatttaggtatacatgaatttattgttgggttttatgccnnnnnnnnnnntccatttcaatgtaatccattttat

SEQ ID NO: 116773 - DNA, 2476 bp, Cannabis sativa
tttaaaaaaaaaaaaaaagttgggtcggatcagatccgatccgagtatctgatccagcatggcggggcagagcagatccgtacatgatctggatcagctcggatcatatccgacccactccattgacattcctacctcatatgttacaaaatgatacaattaatatatattgtcatatgttacatattattgattaattatatatatttaatttatatattatattatttataaataatataacactttctgattcatgaagatcaactagctaaatccgcaacataaagacaaatattgtaatgttagcttgaccaaaccttagatggactgatctctcttctaatctcgagccagcaggcaatcttgcaagtcttcatctctagtctcatctgttctatgttcagtgtcatctggttgagtttcattaggatctaggtattgagctccacctagctaatatatatgatcgaacaaattgagactaagataacatgtagtatacaaaacacattttacctctatagtaaactttttagtattatatataaatatacacataatgttacaacaaataagtggtccatgccaaggattgaaccactatataacttcttattgaatatactaagttatgtgattgaactttagtccaccaacattgacctggagaagagtacaattaaattaatgtacatgttttgattttttttattattattattataattgttaagaaaacttgattttatcctaactgatcattttataattttgttttttttctgatcgactttttatatttactttttgaaaagaaaacgttatagatgtagtttataatttggtgtttctagctaaagccgtaagctaacggaattctatgttcgatataaattatttaattgattaagtaattatattaatcatgcatatatctgactttatatataataaagttatttattaatcatgcatatatctttatattaagtactataaatatatattgcatataatattaaagcaattgttggattgatacattttaacaaattaaagggttgtgtgatgtgtggttcataatttaaaaattgtttgtaattttgaaaagcagaaaacaatttttaaaaattaataagattcgtttagtcaaaattttaaaaaaactagattatagaaacatcaaaatattattttcaattttcaaaaataatttttcttttgtctaacatattatattttatatttttgctcacatactcggacctagactcgcaactagacccggaccccgacctagagacctggaccccgacccagagacttggaccccaaatcctgacccaaaccccagatcccagacccggaccctaacccggactcggatcccgaaccccgacccagactcgaacactggacccagacctagactcggaccttgaacctcagccccgacccagaacctagacccaaaaccgaaccccgaacctcaaaacctgacccagacctcgaaccacgacccagatctggatccgaacaccgaacaccgaactcggactcgaactcggactcggacccggacgccgaccctgaccctagacccaaaacccagaacatggacccggactcaaacttggaccccagacccgaacttggaccctagaccccggattcagacttagaccccccaccacaagaaatgtcacttttaccagcacagttcgctggcaaaaaggtcaaagttttaccagcgcacatttgccgtggctaaaatctaacttttaccagcgcatttacgcactgagaaaagttatttttgccagtgcttttcattttgtgctggcaaaagttctaataccccgtacccgaacttgacttgagaccccacaccccacaccccacacccggacctgagacccctgacccagacccaagcccagacctagacctggccaaggaccttcgacctagccccaggtttgggacccgagttcaggttcgggtctggggttagggtccgaggtctagggtccgggtcgggatttgagttctgggatttgggtctgggtccgggtccaggttggggtctagattcaggccgggatccaggttggagtcaaatctggggtagaatgggttcatatcatgatacagtgtagaattttgaatttttttttagtaaaaaaacatctaaaaatagttataaaaaatttgtgtcaaccactattaaatttttaaaatgataaaattattttttattctcatttttttcaacaattttttattctcattttttaaaatttaattttgaaaactaaaatcacaaacctttaaagctttcaattgtgatgattcctttaattttgaaaactaaatattttcacaataaagcgacgggtaggaagaagaaaaatgctatagtagagattatgactgaggatggccgtagactgagtacggaagaggatattgt

SEQ ID NO: 116774 - DNA, 2540 bp, Cannabis sativa
atcactctcaatctccataccgattccccattcttcacagctgtacctgcaattagtctgttgctcagcgaagaatggccagcacagcatcggaatgccgccgcagatactctccagcgtcgagttccacccactatgagtcaagaaacctccgaccgacttgtggttaagaacatcttcttgagggcaccaactcgttaacaaactccggttctccgtcgccgccacaaattccggcgaaagaacagccgtttcgccggctacaaggtcgggacgtatgacccaaagaaacgttttttcgctgttggctagtccccatgcgaactcggtaagttgagccggtgtcataacggtgatgctcccaaagttaacgtaaacgactgagctgggttgtttagaatcaagccaatcgaggcaagtgggatcttctttccagaggtttgacccaacgtcggagttgggaatggtggaaggtatttgattggctaagaggcttaaggagccaatggagtaaacgggtggtgtcagaatggtgttgagtgagtccaatacatcgcgttctagatcgtaaaatgtgtttaggattattgctgaagctttatgtgctctttcggtttcagttaacacaaattgtagcatgttatcgtttggatcagttgttctcatgaaggtgggtatatcccttaatcggatatttttcatacctggtatccaatctattggagtattcagataaccatttgtaagataactctcatctgcaaattcacaaaattatttaaagttatttatttactacttatttatgctatgacaatatttaatcatgaccaatctcttattataatttttcggtcaaaaacaaatgtcaaaattaaatatttcttttcaaaatttatttcattataaattattgagaatttttaaaaaaattataatgattaaaataattaaataacaattgagttatatttccagcggttgttatatgaaataaaccattccatcagtgctatcatttgtataggaccactaacaataaatgaatgaagatgtagccttttttgagaagaaaaaaaatgaaaaaacagagttgatcatcaacggaacagagccaaccctggtttactctattgatttatcattagttttcaacaacaatatatataaatataaattaaagtaccttttaatggagtaagacccttctggacgagttccttgtaatgaacgtaacccagaaaaccacaagcactagtggtccagaagagaacttctgggataccaagctcttgagctgcgtcaagagtaaagctcattaccccatcggaaacgacacaggtgaccggaggaactccggatgaagaagagttcaagttggcaagaaggtttttaaaaggtactaagctattcctaggagttgagtaacaaagagagggtatgtcttgggtggcatctacgtcggtcggagggagaccgtcggggatggtttggaacgtaaacgaagggagaccgtcaagagaattgggaccacgagacttgaggaggcgtttgtggttgaactctgtgttgacgaaggttatatgaaaccctctggagtggaggagtttggctagtttaagcataggatttatgtgtccctgagctgggaagggtatgcaaacggcgtgaggttttgctagtaatgagatggaacccattgtaattgaggagaaagcaacagaaatggagttttgatttgtaaaagatacatatgaaattattgttctgttctaaagataaggattgtgtattttggagagacccataagtgtttatttatagagttattgagaggaagatacttgaaagattacattcaacactactaacaaaaaataataatagtaacaatttttttttatgaaaaataatagggcaatttttatttatatacaagtaaatgtataattttatgtaattttatgaatatttataaataaacatatatgtttacaattttaacttgttgattactttcaattaatttttcaaaaaaaaaaaatacataaagttaaatatgtaaatataaaaattaatatttatattttgatatattactaaaataatatatttattaaaatttaatataaaattaaaaaagaatatacaaatatatttataaattttatttatgttttataaataatgcatatatatatatgtttagtaaagataatttgattagtattattaatgtttataatagtattattaatctagtatatttattataataataaatataattattttattaaaaatatcataataattttaaaaatagaacacttaagtttatttatttatttatttgaataaacactttaaataacacttatgcttattatttattgaaaaatgtgtaaaaagataaacgaaattgtaattaaatgtggtcatttgtataaacactatgtttatattattattgataatgtttattaattattaatctaatatatttgttatgataatatttgtgctgatatttttttttt

SEQ ID NO: 116775 - DNA, 1350 bp, Cannabis sativa
aaattatgaggaaaagtgtgtgcttacaatttacagttatctaatagtaccgagaagaatgaccgtcatttaataaataaaaattactttaaggataatatgttgatcttctctaagaactcacatctacgaaaaaatttggcacctcgatgacaactctttgccacttgaagttgtagtatgttgtatgagactttcatctcacaacggctcctaaatgatgaaagaaaagattcacacttgaaatatctgaaaactataaaattcttatatcattagttcttatatacttaatagtagtcatgtgtgaataaggatacaaaatatgttatcataataattagatcaaatatttaaagaagaagaaaaattagtagagttatcctacttagtacattaggacaaatgataatttgaaatggaatgttttttggggttatattttcatgtgatttcttgtttattttatgattatagttcaaagaagaaagagtgaagctcactttccatgattcgcttcttataaggtatgatggaatatgtggtcattttacatatcctttacaatatttctttgttattcgaatttaacaaagcaaataatacaaattaggaatcaggacaatatatgggcttaagattatttaaatttcaaggtcctcactattagaaatatatgaaaaaaaaaaattaaaatagaatgtcataaaactcaaacccacatcactatgtaatgtgttatacacttcaactaaccaatctataaatatttttttatttacaatacacttaattttatttaaataaaaacgcaataaaatcttttattttctattttggactctaaatataggtctagcctacttatacttaaggtcggtcctatcaagaatgttttattggttgcaaaattctagctttagcagctgcaacagatgaaagtcactaaaaatctaaatgggaatccatacaagccaaaaataatcaaaatgcttgttgctgtaaaaggcctcaaacaatatttagtaaaacaatagttaaaactgaaagagcattaggcatcctattatctgagtagatatttaagttctaaggtcaaagctttttcagataatacttgcagtgcagagagagaagttcatttatgtcactgagatttacagaagattctttactaattactaattgctctattttttctaataattttgattgatttcataaagaaataatatactgagctaggtagtaagcttaagagcatctccaaggagacaccaaatttggtgttacactatcaccaaatttagtgtcaaaaattatttctactccaaccacaacaccaaaaat

SEQ ID NO: 116776 - DNA, 2264 bp, Cannabis sativa
  modified_base (2195)..(2204): a, c, t, g, unknown or other
tatgtactaaattatgctctccacactttgatacctaccaaatcacgcccctcgaacattgacatatactaaattatgccccttgaattttcatctgtgttagacgtttttttactaaaattaaacaaaaatccttaaattcaacaatctcaatagtatagggggtatttttaacaaccttacaagttcagggggcatgatttggtacatgtcaaagttcgggagtttaaaaatcctaattagcctaataataataatatattgtataattgtattattttgtttctttttgttaaaaacatgatatttaaaaataaaaaatgagcctagcctaacccgaaacccgaacctatcccaatccaaaccccaccgacctggattcgaaacccaaaaaagctagtttccacatgggcaggttcggtcccaaaattcctaaattcgaacttaaaaatctgaaaacacgaaacctattagaacccatccaatgtacacccttattttaaagtgtaaaataaaaaaatctaatgtatttcctttcccttcaactctttcccctctctcctctctttaccaaacatagtgcaaagcatatatgaaactataggtgcttgtgcaccacccaaaatagatttagcaatcacctttgtattccaggtattgagatagctaaaattttaaattttaatatatgatagtgtatattgtaatagttatttatgaaatattataaaattttgaaaaattatattagcttaaggtaaataaattagggttgaaaagatctctttcacacgtgtgtgaataaaagacacattttacaaattatttaaattttatttttagtatggtaaattattataaaaataaaaattaaatttaaaataattataatatacatgattatataaatttaaaattataactattgaaaactcaataagtgtgccgatattttttttttggtaaatactattttagaccttatattttacaacaattataaattggattatttatttttttaaatgataatccagacactctattttttaaaatagtacaaaataaatcatgggcttaattatatctaggtactatgattagatagaatacaatttttgtatgtgtccgaccatgttaaaaattactttaaagttagttatactaaaaaaattgacgaaaattaaatttagggtctattttatattatttttaaaatacaggatttaaattatcatttaacaaaacaaatgatataatcaataacttttgtaaaatatgggatctaaaataatatttaagaataattacataaggtactattttattaaaaaaaattacattttttatgtttaatttttttaatatatatttttacaattttccataaaaacaacacaaaaacaataagaaaactacataaaaataatattaaaataacatctaaacaacaataaaaaataacatacagataataaaaattaacaataaattaaaaagagtacaacataaaaagactgtatttttttgtaaatcaaataagaaaaattatataattatcaaaaaaaaaaaaataagaaaaattataaaaatatttaaaattctataaaattgcatttttgtaattttttgttatttttgtgtatttatgaaatagtctctaatatttacccttttcttttaacatgtaattattaaattaatttgattaataagcattacaaattaattttgtttgagcatccagaaaatacaaaaacctaatattattataataaaaccacattaatatacaaatgagttgagtaggacacataatagtccaacattcattttattactatacattgccatctaatttcaaattttcattgaagacaaaacaaaactattaatatattgttctaaatcctcccaattagctatttttataaattctcgattttaatattttactcctgtaattaatttttttggtgtgtgtcagagttttttacttccaattcttgtactacatatagttgcaaaattaagtctcgtactaatagttggaattttctttgttctaaaatttactatttccaattgttttagtactattaagattaagtacttattttttctattagaacttagaccaactctaatgataaaagttaaatgtaaggaatactattttttttgtaaaatatttnnnnnnnnnngttcaaagaatatttttttttttatatttttaaggttttccaaaaaataacacgaaaaca

SEQ ID NO: 116777 - DNA, 1210 bp, Cannabis sativa
tccattttgtaatttaacaaaacagagggtccaattggtaacttttataaaacacaggctccaaaatggtatttaccctaaaattaatagcataaaagaataaaaaatataaacaaaaacattaatgtttttggcataaaccaaaaaataatgccaaaaacatagaaaaacaactaaatggataaaaatttatttaaaatacaacttacagaatcagttaaatactggccaagatatgtaagtttatgaaaccacatatttgatgcaacatcttccacaccaaaacgaaaaggtaaacttatcttatccttgtccttcaagtaaatcctgtccttgtcattgctaaaagaaaaaaaaaacaaataaaaatattacaaaataaaaaaaaaatatttataaaaataaacaaacaagaaacaaaaaaagattaaacaaaataacatactgttctttctttgttcaacgatcttcacgtagccataagtcaaaattattctcgtatttatagtcaacatcttctccaatcttatcatcaagaggacacaaaccagctacatacttaacaactccacaaccagatccatttttagaacttgaaagtgaagagtcaaactccataaaaggagatgtcaaagctactgatttcttagtttttcttttttcaacaataggagtttccttaatcacaacaagatcatcttctacaacttgaatattagaatctactccaacatatgttgaacccatttatatagatacatatacgtataaaatagaaagtcaatcattatataagtaaatattgagcaactaaaaaaaaacaaccataccacatcattaacaacaggaggctcattaatctcaatatcttcagcatctggaacttgtttaccaaattcacaaccaatctcacctgaagatatctatataattttttattttttatttttttaaaaaaaagaaattagaagaagcacataacataacaacaaaaaaaatcagaaatcaataaacaaacaacattaccataatctcaacaactttcacacctgactgaacagtagcctcaacatcaattagagtaactccatcattgacgtctgttgatcgaggttttcggtaaccaatataataataatatttaagaaagctataaggaattaatgagagagatttttacgtggttggggtattaatgagccttagtcca

SEQ ID NO: 116778 - DNA, 822 bp, Cannabis sativa
cgaactcaggacctccaacactcacacacccacctatggccacttgagctagcctcaagtggttttgttaatagctcattagtttggaggattttactactaaaatttgttatgagaatgtcagaatagtgggtgttgactcagaaaaagtgatcctctttttgttatgtgcctttccaaggcctaacatagggggacaagccgactaatttctcgggattcttgtcaagggtgtgccacgtaggatggttcccaaacaaccatccattcttggatgcatcttcaaatacccttccttcgatgactcctgagggcattagtcttcgtcttttggatactcgttgatagagcaagtatttgtcttctggaactatatgtccgacttagtcattgtgagacactggtggaatctgaactctttgtctgactctgctcatggatcgggtggtcactccacgggctcagtaaatgggcctattaggctagatgggccgatatgaatctacatgtgtcgcctatgcaaaaacacagataacaatactaaacatgagattttttttattatttcacttttcttcccctatattttctttacatttttcttccccaactaaaatccaagttttaaacatagccttaaggatatagaaatcttattgaacacccctgccaagcacgagaagcgaacctcttagtccatcgatgatgacgacaactgttacgaaaattgtaaatcaatacgcaagtgcacgcaattaagtagtaaactcacgcaagtgaggtcgaaccacaaggaattggattaattaccactaaattata

SEQ ID NO: 116779 - DNA, 2801 bp, Cannabis sativa
aggggcgacatgtcgcctctaaaatacattaggggcgatttatagttgttttaggggcgacttttgtcgcccctaataaattaatttgttgtagtgtagcctaagaaaatggacaattgtcccgttgccaatgctggtgttatagctagtactatagctataacatttaggtggtgtttggttagaggtaatgaaatggaaatgaaactattttcatttcattcttttatttggttgcatttaaagtattagaatatcattctaatagaagggtcttttcaccattttagtggaatgactatttcattttcaaatagaaggaaagatcatttcaatgtaagatttgaaatatttaataatttttttatcaattttttatgcattttaaattttattctattctatttctattcaaatttccattctcaatcatattcttatattttcttttctctcaactaaatgtcaccttaaagttagaataaaatttctctaaaacaaaaaatagaaaataccccttcagtagggataaaatgatgctttctgtaatagagatagtttaaattactattaagaataataaataaaaaatacacaacaaccctttataaacacaacgaatttccattcagtaggacatttattatatatatagatggatatttatattattacccttgaaattttgtatcgtgttacggctctataattgtatacttcatatgaaaaatagtatagaggtgtgtgttagaggttctgagtttgaattccaaattattatgtctggtaatatataaaggcttgatgaaaaaaaattctactttacattaaactctctgtctcttcactttattatataactatatattattcaatattacttgttaaaataacttattataatatagctcaaataatcaagcattgacaaaatagcaattcactcgaatttcacccttatcacgaggcctggtcttgacctgaacattcccaagtttgatcatggaaactgcaaactggctctcaaagagattaggctgtgtagccaaagctgagacaaaaggagaggtaatttggtctgaataaagctgttgatcagtggacaacaaccctttcttgttcatcagattactgtaatacattgtatcaaatttcttaggagtagttgcatcaagatcaaccaagctataacccgttttgcattttttcctaaccacattcaataaggtcacgttaagtgatggatcaggcgttttgcctaacctatgttggaaagcatgacaagcacttcttcctatggtgtgagcaccagagagtacaactaagtctagcatgttgaggccgcgggcctcgaagaatttgattagtcctttggtgttttcgcggccctgaggaactaattcagcttccttggctaaggaaactcgaccatctttgcggccgaatgggacttcccagaatggccctcccgcaaagatggtcgcgtctcttgctgcagcggctagaatgtctgcacaagagactgttttcgggcactttttctcaagtacgctcttgatatcgtttatctcccgaaaacctcttagggttttgctagatagagctgccctctcacttcccttatggtttagtagaactgatgcatcacagccctaagaatatataagatatggttttagatcaaaaatagtagaaaattaatcatatatatatatatatggaatattatgcataaatatacatgacactaaccctaacagcgcagtcatgaaaatggaggcgaatgatggcaggagccaatgtggggtccttgttgatccaagctctcattcttctatgaatgatggcctcagcatcaggacatgtcttcctataatgagacacagacaaaagagcttccgcaggcagattattagggtttattattgatgatttagatgaagaggttgttggttttgaagtaataggattaatggctaacaccacaaaaggagaaattattgaaacaaagagagtcatcaagtaatataacttcattatttccatggttaagcttagaataaaatgtgagtttataattatacttctttctgataagacactgtgttttataggtcttgatatatatatggaatacgtgtgaagcactaatatacacaaaattttgtcaagacatgcaaacatgttggttttcgaatagcttaatgtaaagctccagcaaaaaaaagaatagcttaatgtaaactcttattttaagtcaaaacattatttgtttttatattttttgtatgtacagatagacttatatttattattaattaggggagaaaaacctaagtaaacataggaacaaggatccccaccataaacttattatctgtcccaaatataacgttttcgcgtcgaacaagttttgtttaattttagtgtcttaaagccattaattaatctcaaacttatcatttaaaattattaattatcaaattaattttataattttaaggttcatcaatatataatgtataacatgtactcactattttcatttttaacatgtattcactattagctagtgacacataatttgagacgtcaaaattttagtttgataattatctattgtgtgtactgaatttattaactgtgaactttattggtaaaactaaagtatccacaatcgatgggcacatatacagtgacggacccagaatttttactttgtgggagcttatttatcattaaaaaatatttatatttatattataagggaaatttgaaattctatacttacaatcccctaa

SEQ ID NO: 116780 - DNA, 1073 bp, Cannabis sativa
agtaagggagaagataaaagctaggatcattcaaaccaaacacaactcaagaacaattaactagcatttttactgaagtcttcatttctaatcgatcagttcaagatttgtaaagataagaagagactgcaaaacatttaaatgtcacatcgagagagagtatatattaattggtatttctaattaggatttaggataattaggattatagttattagtaagattatttgtttattgtttagttttggtgtaacagtaaactattttggttacaaagttattattttcttttactaaagtttgttactgtacatatcttgtataaatagacttctaagttctaaatactctttcctttaataaaaaaaataacatagcttattctttcactcattctttactagaaagtatttgcatataaataatgattatttactgtgcaaaaacaatgactaatatatagtctagtacattgaatttatttcattattaattgataggatagataatatatataagtatctcatatataacaaataattacaaaaatcccacatgcgtaatactcatatatgtatgaaaaacaataggacgtgccgatcattataaacaaacatatgtatgaatatatataaatatcagtagtaataatataataatgcagacggcaagatatatatgattatatatatatatatataactgaaatcaatgttatatggtgcatatatatgtatgtatgtataggttgtatttaatcagaattgagtaattgcatagaccagaaatcatccatgctccaattatatgtctgatcaatatttgaagagacaaccggatgatgaggtaaagccataggcataggataattattaacaagattattattggtgtgatgattatccatataatttattccttggtatgatattgatgaagatgatgaagatatcaatggaggaggagagtaactctccatggcatctatagtactgctcgatacttgacttgaactagtgcttccctgatcgttcatcatcatcatcatcatctgattattattattattatta

SEQ ID NO: 116781 - DNA, 1372 bp, Cannabis sativa
  modified_base (1344)..(1346): a, c, t, g, unknown or other
tctgtagatctaagatcctggtaaaataaattccaacagagcattggtgatgaaaggtttaggcattaagggtgtgggaagatatatgttattagtggagattgttggagtcaaaggtgggggataagtggcaacaaggaagataggtggcgatacagacccaatatcaggaaagaaaattcttggaaggttgacaacagagttagatatgttgttatcagatgcaaacctgtgttgatgagagaagttattggcaaagttaaaagcagaagagtgagaatttggttgtaaagtagcagatgttgattggtctagggaaggcctaacggggcctggatacaaagagatgaagaggactcattctctagtatagatgtaggctgtggttgggcaggggagttcaatcggggaatggcagatttgagaaaggtgcgcgcaaggcgagttaaaagtggccatgcattgcctttggcaaaattagttcaatacttatcatagcctgttgtaggaagtttagcacccttcatccatggcccataaggcagatcatcatcatttccattatccattctttccataaactttacacatttctcaaatgggtgtccaagtaaacctcattcaaagcaaaatttaggaaggcgctcataacgaaagtcaatccaaaactcatcacaaatttttggcaagcttatcatgcagccccaagggagaggtttaaacacaggaagtttgacacgaatgcgaagaaaaggcccctatccttcatcaagtgagtcctcatgaacgtctatgtactcaccaattaatcctcccaaagctttagccaatgcttttgatttactgagaaagggcaaacggtagatttgaacccaaaaggttgtacaattcagatcacttattgatatattgtgcagattatttagagtgaacatcacacttaagtgattttgaaagtgccacggctctttatttaaaactctgagtttgtctccagaacaatggaatacaaccttgaacatatcatcaccatatgcagtaacaacagcaggaaaacgcccacgccagtgaccagacatttgatcgataaaggtaggtggatggacataatttttagtaaggactttagctaggaaaaagtgttcaggaaggctcagttgggaaggtgcaacatcctcagagatagcaaaaacattgcattcctcttcagtatgtgatagttgttcatttagagaattcattaatggatccatttagtgtaagcaatcgttaacagatgatacaaaccaggaagggcaaatcaatggagtgattgaagattgtgaatgttgggttttatgcccnnnataaaactctttacaatctgattagt

SEQ ID NO: 116782 - DNA, 1198 bp, Cannabis sativa
aaatactaccatacaaaattaattataagacaagtaattaattaattatgaaaaccacaccagtatatatatttatataataaagagatgagtgtgttggccgtacaatcagcctgcagagggtagcaccaactatagattagctggagtagagtagacccacccacacggacgcgctttcatcaataattgttgttagtgataattaattaattaatagcttaaaacatatatgcatgcatgcatgcacttccagtacttctgatttttaatcgcctacagtcttgttcatttgtacacataattatatatactaccggcggatcgagtactgttgtaaatatatatatctagtgtcctgccctaagaaaataaagttatgatgtgttttgccataaaacaatacaagaaaaaatatggtaccgtgccaagaaaaaatatgggccgtgttatgttttactcgagctggttcattttttatacaggcttaaattcatacactatttttctacattttatttttataaatgatcataaaataaataaaatcatgtattttttatagtttcaattaatttatataatttttcaacaaattttcacataaaaatattattaaatatattcaacatgttgcacttttagaatagtgcttacatgtcatatttttcagacttagcgtgtcgtgatatgtttaagctcatatttttcgcatcgtgtcgtgctcaatctcatattatccatgtcatgtcgtgccaattttgtagcatcaagtcatgtcgtgataatttgtagcatcgagttgtgtcgtgcctaagcgcatatttttttttttatgtttagttgtgctcgtgtcagtttcttgtcgtgtcaaaaaaccttggttcgtatttacagcactatggtggagtatgtgctacaatctactcgtaatattctaggtacaccataggcgggagttgggacagttgcctctttgaaaaaaaaattaagaaaaaaaatatatatattgtagttagttaaaatatatatttgtgattaaaaatgataatttaaacattatataaggaaaatttgaaattatatgcatgatagagattaaaattggtcccataatttaaaactatacaaaatttgtaaaatgggataatttttactaaaatccaattttacaccctcattctaaactgactctctc

SEQ ID NO: 116783 - DNA, 1770 bp, Cannabis sativa
tgcttcaccttcttagccttcttttccctctccctctgcttctgtttatccttctctgcttccattctctctctcagcactaaaacttcctcatcattcccatttatcacaatcttatcagtctctgtaaactcaacatggcaaataaggcaagaagaagacttaacttcttttaaagcctttgaactcaaaacatgcccacattttttcagagcataaaacttatactttccattaaactcaagcccagttatagggcattcaaaccttggtgcagacctcacatcgccatttttttcgaccccaggaatcatcgaaagctcaatctttatcatatccttcaaaccctttatatgcccaaacgccttaggaatcttcttccccaacaaagcctccactaaagcttccttattgaaaagattaccgagccaatccacaacacacggttccttcaagggctcattcgaaagagcacaattcaaccacttcgacagcctctgctcattcggatcgactttatcgggcttcttctctgcatacattttgaggtagcagtcccgtgactctgccccagtcgcaccgccatctccacccccaccgcgagctctggatcgtaaaattaaggtcgaaagaggggcgatttgtgaactcagaatcggcgaagaatcatcgagaggcctaccgtttaatgtgaagtaaaaagaagagagagcttcggatgagaaaggtttggggagaagagagagcttcaactggcgaagggtccgaacttcgctggaggtgaagcttagggttttgcttgggatttgcaggtccgggaactgaacgaagatctgctgagcctggtgagattcgcgatgcatcttttcctttactcgattcaagtatgaacaattcgcgaaaattagggttttcagatgaaaacaatcgaagaagaaatcaaggaaaatattgaaggggaagtttgatttgcaataaaaatgtacaagtacccctatttataatttttgttgggagatttttatttccactctaaaattaattattttaataatttattttatataaaattatatatatatttaattatattatttttttaatttttttttcttttaatttatattcttaaaatatttatatatctataaataaattatattcataataacaaaattaaaataaaaatttatgtgaaattttataaaaaaaaattatacatattttttaaaattatcttaaacttaattttttttaatattgaaatgtacctttacattttataaggtacaaatagaatttcccaattttatttttcaaaatactaaatataaataagatatatttttcaaattataagtactcctatttaattttatagtttattttagaaaaaaaaaatagttgaaaatttttaaaaaaatataagaaaattattcagggtaattatagtattagaagaggtaaaatagctccttaccaaaaattttaaaaaatttggaaaagattatacttccatcaagtaaggtactttccagttaaaataaaaataaagtaaatgggtcttatttaaaaaaaaaaaatatgagaataaaattattaaaattaatacaatataatgtaaaaaaaagtaattttttctaatataaaaataattaatttgatttttttataataagttatttaaatactataaaaaaaagtaatttcctcttaaaataaaaataagaaatttttacatgaaaaatcctttttacacactttattaca

SEQ ID NO: 116784 - DNA, 2055 bp, Cannabis sativa
  modified_base (26)..(37): a, c, t, g, unknown or other
agggtccaatctgtaacttttgcaannnnnnnnnnnnaaaatggtatttaccctaatttaattttaatattacatcatgtgttcatattcatttatttaatatttcacacataacggagtcttgatttaaggtaacttggtataattacaattcaagctacaaatgaaaaaatatatatactgtgtgttagacatataaataattaaaaatagtaatgtacttataattaccaagaacatcgccaacgttgaatgtcttgtcctttgtccatgagtcgagattggtacttatatcccacccagaactatctcccaccgtgtacgtagctgctctacatgttatggctgcacccccaaacataacaattattataccataaaccacaatcaactttttctgattcataatattaattataattaaaaagaaagataaatagatagagagagagatcacaattaagaatatagagactagacacacatctctatcttgatttatacattgagggttgcttgtattagattacctaacttcaacgtagagaaggaattgcgtttttcagtgtatatatattatatatcatttttctttaatcacttgagaactcgaactatgtggcaaaaagtccatcctaacattattatgtgttttgtgtaattaagagtcgtgataatgaaggcaggtgattacctacttttattatatatatatatataaactcttagaccttagtagtatttatatgtgcataaattgggtaattaaagataaataaattgtgttggtggttaggtgtgggaagtcggaagatctagagatgaattgtttcattattggtgtatagagcagtttaacacctcccaacctccaattctctcttttttatgaatttgacaaattggccttgtaagaataaacacaccaattaactcacattccttattctaaaaaaaaaaatcaaactatcattagcaataccttacctaagtatccacaaatatgatataattggtcctaaaatacaataatacagatacattaacttaccctttgtagtttgtttgttgcaccatttctaatgatttttataccattcatattgttccacattatttgggtaagcatttttttcaataatgataaaattaaataaaaaaaattatatttttttacaaaattataatatatatatatatatatatatatttatatagcaatacatcatcaagatgctcttatattagttgatcatatattttttatatggaaagtgttcactctgttttttcaagacaaaagattttacatgcttcaaccaataattcaatttagtttaaagtagaatagaacttgcaatttttaatttacaatatagcaacattttggtttgctaaggtagtgatctagtgtatagaaagactattaaaaacctatttataggcaaatgtaagccattagtattaggggcgaagtcagaacaaaatatttagggaggccaattattaaaagaatttttttttatagaattgtatgttacaaaaattattaataaagggtatttagatataattttataattactataatattaatttcttaattatacattctaatgattatattatattttaaaataaattatgtatttagatgtaaaagtgataatttcttatgaatttttattgtcttgtttaacaaaataattagtaattacataaaaaaaaattatattatataataattaatattatagaatatttttaataattataataaaacttttaaatatttttcaatatacattagtaattaattagtcaaaattctttttccttccaaaagtactcatgcgaagtgttagaaattgttatattttacttttttcttctagatcaaaaaaaatttgtttattttttttctgtaaggagatcaaaaatatcatttggtgcagccgtagtaaaaagtgattatttcacaaatacacaaaaataacaaaaatatgatttcgcggaattttaaatatttttacaatattttttattttatttaca

SEQ ID NO: 116785 - DNA, 4030 bp, Cannabis sativa
cctggtaaaatatttccaacactgcgttgaagcagtcatctacagtgttttgtcttgagaattgtgttgaacactttgggcaattcacagacactatgtgatcggggaggcttgtgtgttcacagtggacagagtttaacttcgactttagtgttcttttaggacaattcgtgcattctcaaatctcctcatgccttgaggagaatactaaacacttactatggtaatattgatctcccacatgcttatatgggtcctttagacatgtggcttattcttcacttgctacgtattttggcaaaaaaaaaaaaacacgaataacattcatccctcaaatcttaggtcacaattttgtgagttggaacttgcaattatactgactctttagtaccctcctggagggtttttaatgtggcatcacgcctgttcgtatgaatgtgccatgcgtcctacagtgaaaaactcgcgcgtcaacgtgctttttgctcctcaatattggtgatgccaatttgctttcctgaaattaaatcaccaaataagccataaatgtagagtgttagtcagatactcgagtactccaaaaatgggtttgtttatgcttctccctaaccgtcagattattgtgtgtttcttggaatttgaagggaaccgtagaatcacaaaaaggccaagattgtgagttgaaggctataaatatggcttgccttctcatctttcacactttactttttatccattctcttcagagtcctaaactggaaaaactttcaagccaaccagacttcctcttacttttcctctgatgttgccaagcacaatactactatcgttgctttcaaataccatccacctcactttgacctcaaatttgtaagtattcacattcttctgtgattgtcttctggctgcacaatattttttttgtgaaatttcttggacacatgaatgtattcaaggcgaagggatcttccttcatattttgtctttgatcactttcccccctctttttactgggaattttgaaaatatgatttttttttgcaaaaaccatttttcttctttttttttattatcttattccggatgtggtgcgtctggtgcccgatacccgactcataaattttaagcctttggtatctgaagggggcctcttatcacagtccatttaataaattgagcattatttcccatcttatcgttgtattctgaaaactctaggttgctccatgtaactggctaaggcatagttctctaggcttcgagtgttagttccttattaggactatccattgcttgtttggactaatcaatgaattgtcatcactagtgtcatccaagtcataacagggtgggttcctagaaacccacccactattatttggtatcgtgattatgtgtctaggtcctcattagttgtcacaacttgagttagttcaacagaggcagtaagatcatcctttacaagttgtagaagatgatggaacacttttggagtgaaattaagtagtatcttcacttctttgttactttttttgagattacatctatatagtcaacgtctagaaaaatagtatttatgaaaattgatgattttacatttgttcactcattcatagtctatattagatggattagtaataatttttgtatagatttgaagatttgtgcttaaaagataattttatgatggactgagatctttgagccaatttttgacaattttttttatcattttctcgaagagcttatgaaatccaaaatgatagagctcgttctcatcttttgtaaacatgttaaatcatttcatttggagtctagacgtgaaagttacgcataatttactaagcaaagttgaagcagtaaaagagcgaaaaaaaaatagtatgttgctatagcacagctcctgaaaaaaaaaagataaaatagagagaaaaaaagataatcttagcatgtggcaatatcgggaagtcaggtatggcgctataatgtcgtgtctttggcgctatagcgccatacgtgtatttttttttttgaatttaaatcctaattctaaatgggttctttctatctttttgggcctatatacagaatgatgtaattcgacttttggacgactggggagatacaaacaagcaaccttgagattagaaaacacattgaaaaggaagagagaagatattcgaagcaatcattatcaactatcatcattagattccttttcttctttctctttactcttttatttagttatttaattatgaacatgattattgttgttattatgtttgtgattactaactaaacactctttctagagtgttgatgaaactattttagattatgaattaaagtttttagattattctcatatttgttcttgctatttgtttatgcaattttctgttaattatcatcttattaatggttgatcaccattaattagtatagagattttaagttttacacttgagagaggtattctaaaattgaacttagaattgcatggcatagaaaaagtgtgagattgagagattctactaattctatgagtttcatttaaatataatcacagtgctttattattacttaattgattaacattgaatagagatatcttgttagttaattaagttaaatctatcatcactcgagaatggttaatagattacattaggattcctgaaactacaaattatagaataaattgggatagttggtaaattgagattcataatttgaaataggaaaatcaatgctctaggtcttaacattaacattcatttcattgatgcattagagcatatgcccaattatgttaagtgtatgaaggaggtgttgacaaagataaagaaatttggggattatgaaactatgagtattgacctcgcttctagccaacgacattgagtcaaaaataaagctattaaataagataagaaaaagaaagaaaaattcgtaaaataaagtgaacaccaaattctaaagaggttcaacctcgtaagtatggtaatagcctactccccttgtatttgtattgacttgacagaagggacaaagtgttcttcctctcaaaagctcttacaattaatctctgagtaactttctctcttagatcactcttttctctcttgaatgtatttctaaagcaattctctcgatccccttcatagtgaggttaggccactatttatagggacttcatacatgagggatggtttcccttttgcttataatgagtaaaataggaaactacattaattccataattacaatgcaagaaataggaaactagaatgtgttactgttattctctgacttaatccagtaattatagggattgtcttcgcgtctggacacaacaaaattgatctctagaattgccatctttcatgcttcgcttagcataagcacatctgcatcttggtcggacatttcttcaaccatcctgctcggatgtctgaatgttataggtactgagtagtcattaatgggctactagggatattttcctccgtacaggttcgaaaatatgagacgagtgtcatccattcctattgccacatcatggtacaaaaaacaggataacatttggcccccaagtctgcgcgggaccttcttggtcgcatgtggacttcactcagcctggagtcttgtccggataggtgatgtgtgtcgttgatgtcagatgatgaactgatgtgactttgactaggagtgtaacaccctgtcaattaggcacgctacaaacaactattaatataacctaatcttgctaaactgggattactaggaaataagagcgggacatttaaaactttaaatcaagtacacagtgaaaatataacttgtaattatttaattaacaaaccactccaaaaggttacacatgtttcgggatcccataaaatttttacaaaatattacaagccattttaacatgtcgatctaagtgacaaaaatcgagaatacaaaatacattagtgttgggttttgtgccctaaataaaatccattacaatctgattagttat

SEQ ID NO: 116786 - DNA, 1942 bp, Cannabis sativa
  modified_base (26)..(45): a, c, t, g, unknown or other
  modified_base (1474)..(1476): a, c, t, g, unknown or other
aaataattttcataattaaacataannnnnnnnnnnnnnnnnnnntaaactaagcggtctttacacaagatcacctatattgtaatgtctttctagcctgcttccatgtgttagaaataaagattgtatggatcctaaagaaagatcatcaatagacttgtcacatgaacaacaccagtcacattctagacgtaatccattgagcaagtgcgtgattaagtcactctcttccatcgggtgaccagcagttgcgagataatcagctaacaacttgactttgtcatagtagtcagagattgagaggttacccttttggattgttgagtgttgagatttaatttggagcaatcgggcttttgattgactcgagaagcattgttctagagcgagctaggcattaaaagacgatttgtggtgagccaaagatccaagaacggtctttgtcatggacgagcaaagccaactaaggaataacgggtctttccgtcaggcggtgaattcggggatgagatctccaatgatgaatctctgaataggtgcagttttagtgaggagaatgttatcgagtccatggccgatgatgtgggaatcacttgagatttccacgcacactacaagaaatgtcacttttgccagcacatttttgtgttggcgaaagattggtattgcgctggtaaaatagaatttaaatttgatgtgttggcaaaaggggttggcaaatcaacgttggtattagaacttttaccagcacaaaatgaaaagcgctggcaaaaatgacttttcctagcacgcgtaaatacactagtaaaagttagattttagccaatgtaaatgttcgctggtaaaactttgacctttttgctagcgcagtttgtaaaatgcgccggtaaaagttactttactagtgcagtagcgaactattctggtgaaagtgatatttcttgtagtggcaagatagtttctttaataaagaggaactgtgagagaagagtttaatgaattttgaaaaggattccattgttgggttggagcaattgtcagaatcggggtagcaattggtggcgtttgaaatgatgcattacgttctgggtttctaggatccatgatcaacgttagttaaagactctgataccatgtgaaaagagcttatctatacagtttctatctggaccaatttaaaaatttaatctcaaagaactacaaaagcttaatcaattcttgagctagaatggtatttatatatattgggaagagtacaagagtcttggctgttataacagcttgtaacaaaaaataactaacttgtaaaacagaggacaaatagtaaaaattaacaaccaaaaactactcttaacaactaactaataaaaagaaaatacaaataatttattaattagttgtcacaaataaagaaaatatgtgaattaattgtgatcttatatataagtgttatagtgaaatttttctcacctannnactcgagaccagactcctatttaaaggacacgtgtactcaatttccccgaggaaagctgagatgtcaacgagggactcctcgagtatgaaccttgcctgaaccagactcagcgagatgatgcgaatatgaccaagtctaatcgcattcgtatgactcgcattatgtaggaccaaagaacgactttagcctgcatatatcaagatatatgcgagtatcctcgcgatcctcctgcgaaaacatagagatcgattatctatgttgcgagctggtcccgttgacccaacaacctcgataaaccaatacagactcgcatgtcttggttctatcagctcgttatatgatgtccgtaaaagcaattttacaaggacgcagacatcctggactcaactagtctcgaatgcctcttaagcctgcgagcttatgtaagaatatgaatagccgactcgcactagagaagtcgcgtac

SEQ ID NO: 116787 - DNA, 2385 bp, Cannabis sativa
ccaaaaaagttcagggggcatgattaagtacatgtcaaagttcggaggaaaaaattgctaattagcctttttattaaagagggaagcatctaagtgtttactttattttcttttcttcaaccatattgtgaaaactctaaaacacttcaaatattattaatttgtctaaaaggaaaattgtttaatatatgtttattttagatattttttctttgactggattgtttatttttactttttaactatttcattttaatgtgtaaccatattttagatttttctttgtttggcataataatatttagaatagtttggcttgttttaaacaacttcggtagttttttttaagttatccttatttgttgctgctatttttgttttaatttttacaaaatgaaaggagtattgaatttggtaatttgttaactaagtgaaatttgaaatacatattattaatcattataatttaaagaaaatttacttgtattttaataatgaaatatataccttttctctgattttacttccgtctcacatttttccattccttccaaataaattcgattgataataatttgtattcgcacacttagattcagttgaatgatgaatggacaatttcatagttttataaaagcaaaaagaggtattcgacaaggtgattttgtgtgtctaattttatttattcttgttatggagtatctttctagaattatgttgaaagtggccaaaaagaaggttttaagtttcaagaaaggtgtagaggattgaggttgaatcacctttgttttgcggacgacattttgttgtgtttcaatggtgactttcagcctgcttatgtcatctggtttacttcctagtgaagcaaactctgttgtctattattgcagtatggagcaaaatgagattcaaagggtattagaatgtggagttcaagatactaatcatttgtaggaagagtgattatcatttactctgtcctagtttccattcattcgtattgggcgcaaataatgctcatttgtaagaagattttgaaaccaaatcaattcaatctgtagatcttttctatgaaaagatgtagcggaatatgggggctaggatacatctcttagtctgatctttgtaagctgaaggaaggtggcttggggtttcaaaagattgttacttggaacatggttgctttgggtaaatatactttggttgtggctacgaaacaagacacattatgggtgaaatggtacacaacgtttatttaaagaacaactcttggtggaattacaaatctatagttaataatagttggtattggagacagattctgagagtgcaagaaagtattaagcaagtatgtattgaataaacttttcttgctaattcttacttgattagtaagggatatggctggttagtatcttgtctagagcaagttcattggtgtggacaaatttagggaagatataacatccctaaataaagatttattgtttggcttgctttccaaaactgattacaaactaaggatagactttttaagtttcatgtagcctaagtagggccacacatagggtggtgcaactggaatcgaggccccaagccctacaattttggtggcgtcaaaaaattaagatttatattatatatatagaaacaaaatatattatataaaatttaggttaatatattgcataaaaatattgtagcacaagtagttagttgaagcttaaaatatatattgatgattggagtcttgggtttgatccttaccattgtcacttttgtttttattaaattcttgtacatatcatataaatgtatatagttagtgatgtttaaatttataaaattaattattaaggttcattttatataatattttaaaatatctttagtgcattatttaaaaaaaaatatataatataatatttatattctttttaaataatttttttagaaattaatttaatatatatatataaacatttttaggtgcaatcaaataaaaaaactatcacgatagtaataaataaattaaatatttcaaaacaaaaactaacgagaatattataacttaaaaaattaatgacaacattataatagataatgataatatattaacttattaaaaagtatatttgttaattattatgtattttcttaaatttattaattttgtatatttataaaaaaaaattgacatagtattttttttatatatataaaagtgttaaaatatatagcatttcaatagagatacaattataattaaatattactttaagttaatttatgtggctagaaaaattatttattatatatgtaacgtccccgcttcaagcttccattgggcccttacacccacggactgatggctcttatacacga

SEQ ID NO: 116788 - DNA, 1027 bp, Cannabis sativa
atctcttatgaatatctcgccagaagaaaaggttctaactaacccatgtgactaatttggcctttcgtcacattttccatcttcaccgagcaaaaatcataaaaattataaattttacatataatctaaataatatacttagagtttgataaaatctcttgaattgagaaattacaactccaatgcccatttatgaaaatggggcccacaataaatataaaatcataaaatgtcaataattaacactaattgcctttattaatatataatctaatcatgcgaacattacaaccgagataggggtgaaaactttaatttaaagggacgtcttcagcaggtaatcttggagaaacaagagtaagaagtccagcacaccaaggctttacaacatgcatttgtctactcggtgtacaccatctggcaacaagataaatctctaatagatctctttgatgctgaagatagggatgatctcatgcctaagatcttggcactagaggaggttgataaagctaaggaagcaactcagaagacagaagcggtcaatcctagaactaccattcctataggcgagaacgtggatgactttgctcttttgatctctgaggttgctatcttgaccagctctacaatcacagaggtctcgtctgacattcaaaccaaggatgcaaaattgtagaaggatctagctcattcttaaccgtcctcgcctatcttaaacaacattatatttactattttttgctttttgggggacaagggtcccccttgttgtgtgtgcggagataatattttatacccttacagcgtggtttttaaggacgtagtactatttaattaatgccttagatattttcactttaacctatagaatttgctaaatttaaatagttctggcctattgaggttctagttccaaaggcttaaaccattaggtttttgatttaatgctcagactaaaatatctttcttgtttttacggaaagctttctccagaacttcaaataactaattgttgggttttatg

SEQ ID NO: 116789 - DNA, 1347 bp, Cannabis sativa
gaattaatagcaactaagcaagataaactatggattcgataggtacattcaatttatataaaagagaggaatttgtgggactttgaagctcccatggaatccagctggtattggatggctattgtgaaggaaaagaaccacatttaaggtttattttctgcagctcagacaatggaatacaaaatcaatgttgtatacaagcaaatacagggaaaaaacaggggtcgatgatggcctgatataatttggtcgagactttggcctaacatagatttcttaggtttctagcagtttgggaaaggctaaaaacaaaggatagactatgcatgtttgacattatattagatagcttgtgtgttttctgcaactctgaggaagaaacacacaagcacttgttcttctcatgttctttcaccaagtaatgtctatggaagactatcacatggattggcttgccgattcataagaaatcagttaaggaacgactcgattggatttgaaaatgtcggcaatagaaattattcgtagaggagtgtttgttgctgcagttgatgcactagtgtatcaattgtggaaagctagaaataacgtcatatgaaatcaagtacatatcactatagaaggtattgtaaaggagataaagcagaatgcatatagacaaagagtcaatacagatggaaggaattagttgggtagatagcaattggttcacggtcctagctacttcttgaagtatgagtgttgattgattgtaaaaggattgtgactgtaaagtttttgagatcaataaaaacatataatttaccaaaaaaaaaaatataaaatattttgccataatcatttaaccctttaaatacaacattaattgtcatacatcaagtgctttactttattcatagaacttagtagtagggaataaatgtctaaaaattacgggtctatatgatagtgccttaaacgcagggtgttacatctatactattgtcataaatattttggtgggatacaaggaatattgctaatcgaaacatatagtatattatgttacaacaatttcaaataaaattatagagaagtcaatgtaaagttttgttatttgaaaaagtagataacaagtagagaataaaatttggtttgagcagtagatgagttcaatgcactagctgaactctaaagattgcttgtatagtgttctttttgtgcaataatattcttacttaatagatagctaaattattgtatggataattatataagacaccaatttttgtaaaaaaaattgtatttttacgtttaaagaatttttttttaatatttttatggtttttcataaaaacaaaacaaaaa

SEQ ID NO: 116790 - DNA, 1659 bp, Cannabis sativa
aaaataataaacttaagtgaaatagtgtgtatagtaaaaaagagtataatcaataaaaaacctaaagcatgaagttattttaattgtagtagttattattttaaaatttaaatctatacatatattatatcgaggtgggttcggggcaggtatttattcccccacctctgtcccgtttccgactcgggtatgaatctttaaacccatacccgccccctcccccgaaagtcaacccccgtacctgcaggtacccgaacccgcgagtataattgccattcctaccaccaaacaaaaatttggacatatttgaccccaaaatcttcacccccaacccctcaaacttcagcccgacttccataaaatcatatgttacatatacccaaccctaataatataatcctcagccaaaagtatttttgacactcttgtcatgtcatgttaatctctcggtaatcctttaattatttttaaacattttttatgtaaaaataagtgcaaatttttttaaaacattacgattcaaatttaaacttaccacatatctaaaaatgtatttttattataatttctttaaatttataataaatagaaatccataacaaaactcatatataataattttattattgtattaaagttacaataaaaacatctttttattaatttattattgcttctattattatgttattattctattattgcttatattattatattacgagatattagtggttaaattttccaaactacatatttagttacacttaatcctacaaatccaatttttagtggtaaaatcctaaactcgcattttgttgtggtctttatcctttccttaaatttccaaagttaagtgccaaaatagtaggtctatgtgtacacaattatacacatattatgttttaatttgtccacataattttaattatttttattattataaaaaaatctattttctttctttttttccatttctttttttttcttcttcctcccctgtgtcttctccttctccaaaatcctagtcgcctctacccctaacctccctctgcctaagtttatgtccagccattgcccaggccaccacccctatgtctttctcgttaacccctcaacaacaattgaaagaaaaaaaaacataattctttatctacctctttccttctatctctctcgcatctgccctatcactttctcaatgcccaaattgtgtcgccgcctctcttcactggcgataaaaatgaagaacgccattttgttgatttgagaaagagagatagaagaagggaaaatttcatttacactgaatagtgaatggtttatctgtagtgcctattctatttctcattgatcactctttttatcgattgggctcgtaattctattgcctactgtaagctctcttgtttctcatttagtggataggggtttcaactttctaacttgttcataatagctctggattaagttcacttggatctctttcttcacttgtgtcacctcttttttaagtattttgtaaatctgaaattttttatttttccataatattgagagtgcatgtcacgacccgagccctaaaccatagcagatatgttgtaacaccctaactaccttaggcgtattacgtgatttttttaaacgtactgtgcagct

SEQ ID NO: 116791 - DNA, 720 bp, Cannabis sativa
cattaatctcgccttcaaccgacttcaaggtcatcttccaatcccaccacctcatacacttgttttttcaatctcaaacaattcatttgttggagaaatatcacctataatttgtggtctcagcacgcttagcgaccttgatttgtcaaataacaagtttagtgggaacattccttcatgcttgggaagaatgatttctcttgttgtgctagattggcataagaataagtttcatggagtcattcctccaattttcgctaagggaagcaacctaatggttttgaatcttaatgaaaatcgattggaagggtcattgccaaaaattattgctcaactgtaaacagttggaactgttagatattggaaacaacaagataagtggttcatttccttggtggttggaatctcttccagtgcttcaagttcttatcttgaggtctaatatatttcaaggtccaatatgcaatcccaaagtgagacttccctttcaaaatttgagaatggtggatcttagtggcaatgaattcactggtcgtttgccagaaaagtattttgagaatttcatggtaatgatgaatgctacttctgatgaattaacctacatggtaacaaatttagggaaaattacttattatcaaataagttcattgacaataaaaggaaattttgttgaattgccgaaaattcaaaccatgcttataaccattgatttctcaagaa

SEQ ID NO: 116792 - DNA, 1050 bp, Cannabis sativa
gagagagagagagagagaaggtgatgtgcagctagagagtttattagggttcgttattagtaggtggcattttctaaatcaattaaatgggcccgaagcccattacggtttttgtaagttttttttaagtaaattagaatcaattttgcaccgatgaaaaatgtgtgtcggtgcataactgatgtaaaaatcagttaaattgacgctaaaagctgcatttgagcaaactgcgcaaaattcaacccctataacatttttaaaaattttttatctttagcattggtttttattttagtgtcaaagtagcaataagtaaattaattattattagcgtcggttaataattgaagcaaaaaagtgagtgttgacttttacatcagtcaacgagctagtttgaccatacgtgttgactgacgcaaaaactcctttttgtagtagtgtatattacaaaaagagtaaatattcaaataaaaaaatctaaaccgattcttaatactttaataagtacaacaaaatataattctcttaagtctcaaagaaataaaaataaaaatatataaataataattaattataaattatgatctatttctaattaacattcattgttgtacttattatgtaggagtgtctaactcactttaaattctaaattcattgttaaagtgagttaactcactttaaaaagaaagatatatatatatatatataaaaattaataatataagaatttattatatataaatatatatgtggtgtgatgcggatatagcagattttttaaatgtatttcacttaaacactccacactgcgatgatagtaaaaaagttaactataactgcaccataatagaaattaaccacatgcaatacagtgcaaataatgcgggttttgcggttaagaagatattctgcttagtcatattcgatatcatatgtagatatatatatatatatattatattgggtgattctacaatgcacccccttaaaatggatgtattgatgcacactctacttgtttcggcatccagaaaaaaaatttagtct

SEQ ID NO: 116793 - DNA, 3722 bp, Cannabis sativa
aaaataacagtataataattatttaaatggctataaataattttcataattaaacgtgattaactgctaatttccaaaataactaagcggtctttacactacctatgcagactacttactcgagtactacttgttactacgacacgaaagttgtaaacaagaaaatttaaacgttgaaggagaaggttaacaaagcagaaatggagtaaaaaatcttgaaaacgcttgatcacctattagttttgactctctccactgaattcgaagacctttatttctcgtatatagtgatggagtactgctccggtggtgatcttaactttctttgccataaacaacatcgcaaacaattttcgcgtaactctgcaaggtaaattattaactagaaaactccaataatttttgttttttatttgattttcatgcatatttttgatttgtagattttacgccgctgaagttctagtagctttggaatatcttcatatgttaagaatcatctacagagctttaaaacttaaaaacatactcgacaagtcagacgaacacattatgctcactgagttcgacctttcactttgcttggacacaatccaaatcgttgtcgaatcaccagaatcatcctaattttctttcttcttcaaccgtctcttttgttcgcgcctagttaagacactttatgctgctaaccagctctttgtggccaagtcggtgacgaccaggttgtcgtccattgtcggtacacacaggtacatttcgcctaagatggctaaggataattcccacgagactggtaggcacatggtgtctttatctatgaaatgatttacgttcgaacactattcccagctcaatcccacaagacaacgatctcaaacattatcaatatgctactagccttccccaccttgaccctgtcatgcgagcttgagcttcacgcaagggagttgactactgggttgcttgacaaggactcgaccaagtgtctcgaggccaaacgtagagctgctgatgttaagaagcatcccttcttcaagggactcaatttggctttggcagtggcgaagacctcgtcaaggctaaattgagatccttaaagaatgggtgcttcttaacctcagtagctccgcgtttggccctgagacgcttggtcaggtccttgtcaagcaatccagtattcaactccctcccgtgaaactcaagctcgcttgatagcgtcagggtagggaagggtagtggcatatttataatgtttgagataattgtcttgtgggactaagccgcaaacggtgtacgaccgtagattatttcgttgatgaagataccatatgtccactagtccatcttgttgccatgggacttatcgttagccatctcaggtgaaatgtactcgtgtgtatcgacagtggacgacgacctaatctttaccgactcaactacaaagagccaattagcagccttaagtgtcttgacttgacacaaatagaaccgctagttggagaagcaaaaaaatgagaatgagtcaggtgatgattcaagcgattcaacaatgcctgggattgtgtacgaataaagtgaaaggtcgaagtcagtgagcataatgtgactgactaacttgatgagtgtgtttttcggttttaaatctatgtagatgattccaacatgtgaagatactttaaggctactagaactttagcagcgtaaaatctttaaataaaaaaatgcatgaaataaaataaaaaataaaaaatattagagtttcctagttaacaaattatcttgtagagttaagtagaaaccatttttgaggttgtttatggcaaaatgagttaagatcaccatcagaacagtactccaccactatatacaaaaaatatgagtcttcgaactcaacgaagagagtctaaaaaaaacaaaagatcaagtattttcaagattttctctttgttttcacttttttacattttcacttcttgttcacaactttcatggcgtagtaataagaagtactcgagtcaagtactttgcatgtgtagaccttaccgatgtcgcccgcgccaatttctttgaagaacttagagtggtcgaatgttaggccagatacccgagtatcagagaatggtagagtaggtgaaatctgagatgtatgtggctttaatgaaagctccataaggtttcctaactacttttgtagggagacgaagaagatatagttagtgaatagggtataagaggagaaagtaaatgcatatattacatgtattaaatttattttaataagttaagaatctatttactaacactttcttttacatttaaaaataatgagaattgttataaaaaaaaaaatagctagcgcatattttcttggacataatatataatctatgaaaaataagtattagccaagagatcataaattcaatatcaatttagttttatgaaaaagtatgattagtttcataaaatatcgttacatatattttaccgatccaaaaaaaaaaaatcacatgtttaatttttcttatctatatatataattatatataaatacactagaatgacattaagtttctaggactaaacatctgatctaatttaatatttttatttttatccgattcaatccaattagtaattaaaaattaaaaattaatcatccgatctaatccaattagatctcaaaattcaatttactcctatctaattactaatttggtttggattggttttgtaattaaatatccaattacacacaaattttttatataaacttaaaaataggaaagaaaaaaataatacaaaatattattaatattgagaacctgatgaattttgagattaacatctaatagccgatccaattcaattagacatccaagtcaaagtaattgtaattggatatctaatttttgtaattagattagttcggttcaactaaatcgaattgaatctcatccagccctataaatattaactattttatgtagatgattgtgcatatatattgattttattactatattattaaaatttcaatgaaattaatgtcatttaaaaaaaatagttaaaataaagtattggtgggtttgtaatgcatttcaaacctttttcgtactatgcaagaccaaggcaacaaatagttttgatattaatattttcctactgtgccttaacgccccacattcctccaccactacatgcttatccttacctcatcgaccaagcctgtaaggtcttgtagagaaataagatagagtatagttgaaacgaaacgttcctagaaaggacaatccactccaatataatgaatacttgatctaaaatattggatagatatgatccgatctaaaacataatagatctaaaatattagataaacctgaaggaatacaatagacatacatgaaatacatctaatggatagaaccgatctaatccaacatcttttggatatttgatagattgtatgattgaaatgaatttgatcgaatcagtttgtaaaatcttacatccgttatgtaattggatcaaatatggataggcttaaaaatattagatgtgattcaataaacatcccaaatcttaactattttcgctataaacaatctcgaaaacggtttttgctcaattctgcaaggtaatttattaactaaaatgttgagttttgtgccctaaataaaatccatttcaatataatgagatttacttattaataaaga

SEQ ID NO: 116794 - DNA, 1498 bp, Cannabis sativa
  modified_base (28)..(29): a, c, t, g, unknown or other
aattgactaaaaatatataaaaaaaaannaaaaaaaaaaaaaaaattttgaagctttaataagtaaaaaacagtaaaaaaaaagtataaatgtaaatatttctttgtcaaactataaatgtaatgtttaaaaacgttgaaaccaagaacagggaaaaccagagaaaaccagaaatgaataaccagagttttgtattgattgatctttatgattgattacactgagagaacaagttagctttatatgcaaagaagagaaaggaaaaggaagaggaggaagttagttacaactgtaagaattgacaactcaagctaacagaaataactaactgtcatctaacagcccccctcaaactaagtgtggatgcaaaaaccacactgagtttgtgtcttagaataggaaatcttgagcttgaaatggccttggtgagacagtcagctaactaatcttgagcagggacatgttgaacctgaagctgaccctgaagcactttgtctcagacatagtatagatctatctcaatatgttttgttcttgcatgtaagatgggattggcagccaccataaccgtgctgaggttgtcacaccaaatggtagggacagatttagagagaatgcctaactctgacaaaagagattgaagccaagtaacttctgttaccacagcagctagactccgaaactcatcctcagttgaagaccttgagatagtttgttgcttctttgacttccaggcaacaatattggatccaagaagaacacaatagccactagtagaccttcgatcatcaggatcggaggcccaatcagcatcacaaaaggcttgaatgtcaaaatgagagcacttggttaagtgaatgccatagttaagagagcctgccaagtatcgagggattcttttaacagcaatccaatgagattcaagaggtgattgcatgaacttagatactttgctgactgagtaggcaatatcaggtcgagttattgtggcatattgtagaaaacctacatacagacctgtacagagaagcatcaaggacattatcactgccaaattgagagagtttgaggccatttgtcatcggggtagagcttgatttggcagcctgcatttttgttctgcataagaggtcttgtagatacttcttttgaaagagatgaatgcccaaatcagtgtgagtgacttggatgcccaaaaagtagttaagttcccccaaatcgtttaaggcaaactcagcattcagatctgaaattatttttgtgacttgaacatcactgttgccaagtattaggatgtcatctacatagaccaagatgtaggtgatatgagttgtacaagatcgaatgaaaagtgaagtatctgtttttgatgactagaaaccaaactgagtgagtactgttgacagcttggcaaaccaagctcttggagcttgcttgagcccagtggcggacccagaatttaaagtgagggggggcgtaaataaatttaaaaagaaaa

SEQ ID NO: 116795 - DNA, 2255 bp, Cannabis sativa
actatactaaactttataacataattacaatatttacaagtcaaggatctcgaaaactatttttcaaaatattcataacatatatattaccaaaagtgtcatttagcggcaacgaaaactaagcatgtgttgtttcgaagattgtaatccttcaggtttaactgttcggatatgtataattttcatccatctctacactcactattgttcagtcttaatcttggctttactcacatgaaaacatatctgtgagtcgagagactcaataagaaaagtataaaacatataacatatatttgatcagtaattaggcgcccatacacctaattaccataagtacactatccaacgcgtataactgagtcttgaacgttcttaactatagtacaattaaccataatattagcctatactcagaactctaatcgcactgatgttgtataatcaatccacactataagtacaattaaccataacaccaaattgcactcagtactctagtgcttactgagatttttggaaactaattaaattagagcttaagaaatagtaaaaacataaaataaaatagataaagagttttatgtggtttggatgttgataatcccaagtccacgaatcagtatattggccttataagtcgtgtttaatatattacaatggtatttacagtataactctaactttgctctcttggtttctcttgagggagaagaaagcttagagatattttgacagagcttcggctattacattttttgattccccctttgcgtataaataaatgggcatttataggctaaaatacaagcatggtcatgcccatgactcatctagggtttctacaaaaatcccatcaactattaggaaaaatacgtaaaatatctaactattaggccctcaagatgattcttcctcgtgtggcgaattatccatactatggagaccattattgataaagggcacgtgtcaagaaaaggcttgcactgggtggagaaaatgctcagaggagccgttggacaaagaagagtattcaaaggaaagtgtgcacactatcatggtttgacataggggacgagatctgattatgtgtcagaaaataataactgtcatacagccatctagctctccccttgcaagtggcttacagttctccttacgcaactggcatctatcttagacacttcgcatggctctctggcatttgcctacacttataggtaggttggtcttctcgcgatcctggagcaatgataaggctgttgggtcatggatggtcattgcctttgtaactaacctttgtgcctcttctgggtcagacctttctcgagccagcacaatctctttgtgacctttcatgattaaggacacttaatcggtgatgattgtgattatagccttctattttttttccatgtgtccttcctccagaaatatggataacatatattcttactagtgttggtagcattaattcacacttttctatattgccaaatatacatatcatcgatatccaggtgcaactgtatatacactaacaccgcccttactgatatgttatgtaaattggtgacggtgagaacacatcaactaatcttaaggttagaaaatgttaagtaaccaaaaaataaaaagatgatgatgattaagataattaaagtgaagatgaagatgaagatatagtgatttttggagatttttctctttattgcattcaaagtctgggttacatcaaataattttttaaccccctctaacatatgagaaagggatatttataggctctaatggactgaagtacaaagtggttccaagggaacaaagcatcgctttcacgctacatgtcgcaggtgttggaggtagccttgcacctcgtatccttatctggtgtcagggggtctccggttgtaggagtgcggtcttcggttgtaggagtgtggtcccccaggttgtaggagggtgattgcaacgtacccttgattagatcctcagacctcacaggtctgttgttgccactacttgtacctcctcgctttcagagtctgttgaaggcgtggttgtacgtctgtcttttacacgccttgttctttgattccctgcttaatgacattctcatcagcatgcatccgaacaaaatttcaacatccaggacacatgcacgttacgcttctcacccgttgaaacacaactttcatccatgcataccaggcctcacatgtgagcccccacatgggctcgcatgtgagccccca

SEQ ID NO: 116796 - DNA, 1634 bp, Cannabis sativa
ttaaataatttttttaataagtaagcaaatattaataaattgaaaataaaataagaaaaaaccaaattgaagtacttttttatgataaaaaaagaaaaagcaagaacaatcatgttttagtttttgaggtaactccaaaagtatttataaacttttgatttgattagagagagaagtcaaaatagtttagaggtcaatttcaacaagcctaaaacgcattcgaattccgaactgagccatctctcttcgtctctttcgaggtcagccaccctatatctctggattgttttttctttttgaaaaactatatctcggaattttgtgttgtctataatgggttttgtttaattcccccttcccaataaaatagcatattttcatttgtataaaaattttcccatgtgaagatcagtccttttttggaattgaattctgggattttaagctccgagcattttcactctgtcatatcataaaggtgcattttttattttattttttcattgtttaattgaaattttgtactgcttttgtgcatgtgttattggcttttgttgaatcctttaatacattttattaattaagtgaattaggttgcatgcaaatgagtgtaagggaattgatgctcctataattttactttttattcctataattttggaaagctaaagtgggatttgtagttcatttgttcttatcggtttatttatcctttttgattttgatttttataaacatacaaacagggtttttgtgattttacattcttctgataaatttctattgtttgagtttcaggattctttatattgttaggtcttgaactacatttctatagctctacttggagagatattctgttgtggcctgtacagaggctgtggattgaaaatgagagcagtagctcgaccttttcgccattttcaatcaatttttaggcctcaaagaaataggtactccagtagtttaccttgctatagagggcagctgattgatctacattctaggtctacttacactttcaccaaagatgcacaaacttatccatttcaagaccccacttttatgttatcaagaactctgtcaacagaggttgtcaaagttacaaatggaggtttttttctagccaccacaaactattatttatatgcaacattatagaacatgatttttgacctttctcattttgctgatttcgaaattgaaatgtttaatgctagatacagatagagcaggccctcttgtagagtatgaaagaagaattgcctcaggtgaacttgttgatggtgacttgtgccaggtataattaaagagttttaagctttcaaacaaattatatagcttcttagtgtacaacatttggaatgtttcttgttcagttatgcaaaaatgtgcagttacctttgagattcagccttaattttcatgaaattttgagtaatctacttcccttgattggaaatcttagattcactgatgcattttttgtacaatagcagaatcatgatagttgaaaatggcagtactaacctctgaatatgaatttggttttgtcttataaaatatactgacactgataattgcagctaggcacattaagagagcttcagaggctctacgatgagcttgttgat

SEQ ID NO: 116797 - DNA, 1257 bp, Cannabis sativa
atattgaaatgggttttatatagggcacaaaacccaacagactgatctaattcttaaatgcttatcatcctcaagcctcacatttgcacttaatggagatacaacggaccttctaaagcctaccataggccttcgccaaggggatccactatcgccctacctattcttaatctgctctgaaggactctcgtgatggctgcagcacgaagaaactattggcaacctccaagggctacagattacgagacaagcgtcttcaatttctcatctcctttttgcagatgacagcctactattttgtgaatcaagaaactcttctgcattagcaattcgaaaagctctagatatttatcatagagcttcaagccaaatgctaaatcctcataagtcggtaatgtcgttctctccaaacactcctatggcagcgcaacttaacatgataattagtgagtgtcacgaacgataccttggactttccttttactctggtcgtgacaagaaggcactctttagccacattaaagaacgtgcttggaagttaaggcatgcttggaatgaaaagttgttttcagtaataagcttcttttgacttacaaaaacaacaattggaaagcatgatagaaaatttttggtggggttcaaataaagatggctcaaaaatacattggaaaagatggaacttactttgcaagtcgaaatttgaaggaggaatggggttccgttcttttgcccattacaatcaagcactactcgcaaaaaagcctggagaatatttgacatgcccacgtctttactaagtcgacttctaaagagccgatacttctcaaacaactcattcttggaagcaagacttggcaactcccccccacttacatggcaaagcatctactggggtcgtgaactgcttctcaaaggccttcggtataaagtagggaatggatttcacattcaatgtggccttgataaatggatacccagccatacggagttttatccaatcacgtatacgggtcctctttccttgccggttgctaatttcatcacagataaaaggaatgagacctagaccttcttaacaattatttcggtcagattaatattgatagaattatcttaattcctttgagcttctttccttctgttgatcgtttagtttggcatcacacaacatcaagtgattacacagtcaagtcaggatttcatttggctgtaaacttggatgagcaacaacattcttcatcttcagacttacatagt

SEQ ID NO: 116798 - DNA, 1304 bp, Cannabis sativa
tgaaaaacataaaatataaaaaagtttaaaaaaactaacgggaataaaaatgtaaaaaaaaggctaaatttagtatctagtgtaaaaatctctattattattgagaaatctcaatgacaaaatagacaaattaagtccccattcaatgagattgaacctttcaaaaagtggaggggttgcatgggataatttaaataattaattatatatttatgctaaaaaaaccacaattttttttctttcctttttaatcttaaatttaataaataaatatatatttaaattagtgaaccatgtttaattaattaattaattaactttttggttaaagatatatgatgtggaagtgatgaaagagagagatggaattggtagtgaatctctttggaatatcccattatagtttatgctactccactcatatatatatttgtacttttttttaaaaattgttttatttaattcttcttttttatatatatatatatatatatatattattaatgaaattgacatttaactgaccacttttgctagctaggactaacctagctataaatcaatatagtatacatgtgtataaatttcatttataatcatcatatatatatagtataccctatagttacatatataattgatgttgacatatataagaaaaaataataacatttttttatttccaattatgatatttatagagtttgctcttttagtatttcttattgtgaaaattcttcctaagttaaaaagaaattgtagattaatatatatcattttctagttatatttaacttaattatttctttaaacattaattctatcgatgtaatgggatgatgatatttgtagcagtttgataataaattatatactcttgaagagctaatattactaataaatcagattttaaatagtgtcataagttctcgaactgtaattatacttgcataataataatgtgtaaataagtaaattgtttttaaaaaatgagcagtgtgtaaataaaggagatatttgcaataatttttataatttaaaacatttcacaaaataaaaatattcagaggataaaaatgataatgctgtgaatgattttttttttttttaagaaaggaatttgaaattaacataatgatatataacactaaaataattgtaattatatatagctcatgaacaacaataatagagatgaagcaatgctttttatttatatactaggtaggagttacgtgccgaggcacgtaaatgttagttttaggtaaagtttatttttttttcttcttatttagattgtatgt

SEQ ID NO: 116799 - DNA, 1532 bp, Cannabis sativa
agagagagagaggaaatctagaaggttttaggtggagtgagggctgggtcattccattgccatggccaatggagctttgagctcctcccaaggatgggtcatgtccatgtatgtgcttgcgtgtgacagtatgaggtcacgtggtaaaagaagtcacacttgggcaatacaggttgggcttactctagtctaaagtctcatctcattctcagccccaccaaaattaaataaataatcctcacatgcaaccttttcttacctttttttttatttttcatttttctagactatacaaaaatgaagacagcatttctaaatttatgtcttttcttttcccttttaaaggaaaatttatgacatttaatattttggaacgtccgtttcaaaaaaaaaaaaatatatatattttggaacaaattttatgttcatatcattattcatattttcattactgtctataaatattttggaacatttgtaaaattatattgtattatacatattttcataagttgtccgttttctatttgattaatttaatatttcattttcgattacttgtatattgggtttgcagaccgcagctgtattattctgatttaatatataaaatataaggatgaaattgattccatcaaaattataggacaaatcatgtaattaggacaagttagtatatttttctaaaacaaaaataaaattaatgaacaagagatatacacaagacaaatgttaaaatgtaccatgtttagcattcttttagatgttatattgctgtttgtgttattaaatatcgagttctatatatatatatattttttttttttcttaagaaaatactcaacaaaaacaacaaagccagaacaaaaatcaattccatatatatttttaagagagtgatctaaatcactatgataaacgtcgacgcagataaactttcagtcaacaagctaattgtctagctaaaaaatatacaaagtcagaatatgagttctacaaataaaatgatttatataagatcaagttatctcgaaaatttagacaaaacaatttgagaccaccttcaagaaacattcgatctaaagaaccaatttgaccaaaattacctacaaaataaatagataaagaaaagtggattaacacactatacaacgataatgttgtgaatttttaaattaaaataaaacacacttattatttaagggaaatatgcgacaaaagttcccaaaaataccattttgatgcagattagtccccaacctctagaaatagtagtaatagtccccaatgtcatgttttttataagtccgtcggtacccaatttaacagctttgtgaagtactaacaagaataccacgtgtcaaagtccacatcaaaattttaattaaaaataaataaaaatacaaatacaaattatttaaaaaattaattattttttttctttttttcttcttcttcattttcttgctcttcttgctgtccaggaactagtgaaccaccacccacatcccacgatccagaaaatgaaccag

SEQ ID NO: 116800 - DNA, 1710 bp, Cannabis sativa
aaagaagacaatataaaaagagtatatgtaatttcctcaatttgttacataacatgtgaaggagcaaccaagatagatattgagatcctagtccaatagcttaccaaaaattgatatttgtcgtcatcaccataatgaaaagtaatgtttgaattaccttaccactaccaatttgaggggaagggaagattaccaacttttggggtactatatgagacaacctatagagacacaaatatggtatttttgaaagaaaaaaaaaatatcgtgtaggctagcccaaaaccgttggcacactacccaaacccatccacacaaaactcgaattctaacttgcttaaatttatgtggaaattgtattgtacccactttattttatttgttttgatttttatcttcatttctatattctttaagatatactcacttttgtagatagtgtccatattaaataccttagattaatgttaatcaatcatgtgctatactgaagtggaggacaatggtatattaggcaatctattcacaaaagcggatagattttaatgaaatataatataagggtatttttgtttaatggatacaaaaaagaggtatttatcaacttgtctctaaatttataccttgttgggtgggttcagtacacacttctccacactccaaacttgcaaatcactaccaagaaagtctacctttactttagtgataatattttagtcataatataatttttttgtgattaaatttaacttttagcacaacaaaaagttatttaacaacaaaaattacttgacaacaaaaaattaattgtgactaaaatatagtatttatatacaagttgttaccaatttaattttagtcacaataagtattgtaattaaaatcacaattagtcacaacaagctatagttgttgtgactaatacctttacataaagacattttcctcacaatataaaaatgatgacttataattagttataattttttaatttttaattacaaattttattgtaactaaatgtagaaacttttgtagtaaatccctataatatgctctattgttgctcaaaaggtggagacttcctatctcaaaacttccaatcattataataactttcttaaattacccaaacattactaaagttgcttttagactctcaaatactttcaaagccaagagcttgggggttggaattcttcaacttagtaaagaatgttaaagcctccatcatactctactcaaagctaataaagtaaaatgtttaaaatcatatgagatagtgtatgataagaggttattaattgtaaatatttcttaataaattaaaatacgtgacattaaatattaaataattcaaacaatatgcattattaatgtactttaattagcaatattttgtttttaaagagcatgataagaaaaaaaatcacattagttcaaataatagttttaggggacttgtataaaacctcacctgagtttgagatttaacatgctttaaatgagacaaaaattattatactgtaactatagtgatattaatttgataaaacaagttttgataacctggatggtacacaatttttaataagaaaaacaattttttttaatgtctttaatttttttgagtaaattagtacaatgacaaggttaaattgttgggttttatgccctaaataaaactcatttcaataagatcggaagagc

SEQ ID NO: 116801 - DNA, 2244 bp, Cannabis sativa
ggatagttaacgggagatcaagcctactaacatcgttaaatttaacagaatattcttttatttttaaggaatattctgttaaaccaagaaatgccgttaaataggcacttttaatatataaagatatataaatcgtagtagattagattgaatcagatcagttatttttgtatatgaattaatatctaatccgcacaaatttagatatattgcagattggttagtttaaatcgtgcggattaaattgagtatcttatgaacgagcattgttataaagtaccagtggttcatgacaccactttgaggtggcactttgcaaatagttaataatatttcataataattattaaataaaattatgtgggaccgatgcttaattcactaatagtgaaatgacactcatgatggtgagcatttctcaataataataaaaaaattactttgagctaaaattaaagagaaatgttcaaagacaccttaaaagtgttttaatataccactattgatgcaatttattattgagtttcatacaatttgattaaataaataatatgaaaattgctatccacttataatatgctacatcagtatggtatctaataacaatgctcaaaattaaaatagagaagagatcttctcaaaatacccttaagcttataaactcacatttgtaatttccttttaaatgcttgagatattattattatgagcattgttattagatatcagtggtgcccaacacattttaggtgacaccttacgattaattagcaatattctttaaaagttatttttttaaattaaataaaacttgatacttaattaaactagaaaagaatattaaacaccactagtacttgacgcgcgggtaattggtcaccttgatcatccttattttcattggaaacaaacaacacccaaaatcagatacaaacgtacttgacacgtggcagtcatacagagtactacaactttcctcactcacagtaacactctccacttctctttctctctctttaaatctctcatcggaatatttgcggggaaattcctttaatatttacaattgttatacatatgactttaataaaaaaaagtaatgataaaagtaccttatcttacaattttgttgcagtcgtgcccttttttgaccattaagtatcaactcaaaaacatgtgatgacatattattggaccacattttaaataagctaaagaagtatatcatatgtgtttctgaactgacacttaacgaacttaattaacacttaacagccaaaaaaaagtatgattgcaacaaaatcataagataagatatttttgctgccactttttctgattagggtcatatgtgtaacaattgtaaatattaagggagtttcaccgcaaatatcccatctctcacccttacaactcccagggtttcactttctctgtgtctcacccgttcaaagcttaagctccaaggtttgccggtttaaatccataacaacttactcattgatcaacatcatcaaatggagcttttgattctataaatgtagatatttgcttgcattgagtatatatatcactactacaatatgagcctttagcttccctttttccaacccattttataaaaaaggaagctaaaggttgtgaaaatacctgcattgacattttgaggcggttttttggtaaaaactataggtgtagaatttatatatatctatgccgtcggttgggggttggggtaaaatgagtgattttagattaaccatatagcgtcggttatttggtattaaccgatgccatatgtgccacgtgtcgaacaacggctgcatatatggcatcggttaaaaccaaataaccgatgccatagggttatatatcagaaccccagcttcgtcttcctcatttcacaacttgttgaacacgaagaacatagcagcccaaacctacgaaagaaccctcgccaaccaccactaaaacaacctcattctcctttatttttttaaccattttaccccattttgtcttcaaatcttctattttcaataccttaacctatactgtaaaaaagtttggttttttcccctctatacatcaaaccgaacctattataaaaaaaaggtagtggtataactcttgctaccaattttagcagagaaaacgttgaatctcaacgtccattaaggtataaatatgctttctattcattttatttatgtacattgatattatttcatttttataaatttt

SEQ ID NO: 116802 - DNA, 986 bp, Cannabis sativa
  modified_base (27)..(32): a, c, t, g, unknown or other
  modified_base (926)..(943): a, c, t, g, unknown or other
ttatacatatctttccaagtcaatatnnnnnnttgatcttaagattaaaagaatctaaatcccgatatgcttaggctcaaccctaggtgtacgaactgctagcgagatggtatgttttttgcaagagccaatttgtagaggtcctgtatcctaatgaaatcctctacttttataagttggagtcgaatcccatgcggaaggacaaaactaaagtcgacttctactcactgaagaagcggtctaatgtgatatgtccaaccagtacatgaaaacacactcatgaaatttgagaatatgggttcttaacatctaaattcccattaaaaagacattcaactatttattggatttctatgttgcgagtaagcactagaaatttttcccaactatttttctttgactattttgccaattttggaaaaatctaatcagggcacctttgtctgtggcctttcagatgatattccccttcttgagctaactccttttttggaggagagggtgaaactttactgtagtatagattcgaaagtgttgcaagtggaagatctagttactacggagaacctcaagcaagttggcttgattgctcctcatcagagcatagaccatcataattctcacaagatatactctgaccaagctgatgtcaaagaagccattattgagatcattgtaaatgaggaaaataaagccattaaaaaaatattagtgttggctggaagaatgggcgaggctacatccggaacccatgaataaaggcataaagctcgaatctcgcttcgctaccatcttcccagatggggacactctaagtgtcagtacatacgaaagaggtaattcttctttttgcctagttcatgcttctcgtccagaagaatttgccaacactaatcaggaagagtttatgttgggttttatgcccnnnnnnnnnnnnnnnnnnaatgtaatcttttatattcatttatcaataaagaaacagattt

SEQ ID NO: 116803 - DNA, 2101 bp, Cannabis sativa
cgtaatacgcctaaattagttagggtgttacaaaaactgattctggttcaatcagaaaaccgatacattaagattcaataaccaaaataataattttgcttcaaaaaataaccaaaataatatccatgagcagcatgttgttgaaatattaaagactgagacatttgtatcaagtatcaattgattctacacaacaaattgaatagaacgttcatatgtaaaaccaacacattttctctcgacgtgaaaaagaaacaacaaaacaaccctaaatgattgagataagttagttgagttagtattttttataaactcagaatgctacaaatttagattttaatccttaatcttactttacttctaaaaaaaatggagtatagtgtatggtcattgagatctgtaagacccatcaaaagtataggaacaagagaatatatttctgatttttttattacactccctacctaatcatagtatatgaattacaatagctatagaacaaagaactactatatgaattagaggaaaaaaattgttgaagtgttaattatttgcctggctagttggatttttggatgggtatttgtccaaacctgcattcataaaacaaaattaagttcaaacataaaatattttaccaaaaaattaaataaaaaattcagaagcacaggaaaagacctaagtcatcttggaaaatcttagggagacattgggaaatttgttatgagcattgtagcccatggcaccaagtaatcaaacactactttaatttgttcaccaagctttatcttcaagaccttgccaaattcattaaactaatgtttcatataaacaattaatttataattgaaaaaaaaaaacaatcataatgagtaacaaatgctccaatatatatttatatacatatggggcatttatactgtaggacttagtatattacacctattctatagggtagttattttaactaatctgaacttagaaaataaaaggtgcacataacttttattaaaaaagtgtagaggattatttgaaactttattatattgtttcattaattgagtgttcagctgatagttcacgcctaggacattggcacaggggctcatccaagtgacttgatatttggactttggctttgataagtaataatgttattttatcattttattattatatttttattattaatttgtaaaataagtaatttgcggtataaatatttaaatttagctctcaattataaataaatacttaaatttaatttttgacggtaataatacttaagtacctgaccgtcaagtgttatgttaatagtcacgtgacagtccttgattagtcaaagttataataccaataataaattatatgtgaataatgacttaacaattaatggtcaggttccaacagaagttcataaatataacttaactattgaaactgtaaaaaaaaaatctttaaccgataactaaatttaaatatttacaccacaaataattaatttaaagactaatataaaatattatacgaaaaataatttatttatctttttcacattagtattttgtatttgtaattgataatatcataatcttaaattaaactatagaagtatatgatattatatacttaaataaattaaatgaaaacgtgataatacacatctaatagcaataaaaaaaattactatacgattttaaaaaaaataatatagcataataccgttcaaaaaaaaaataatagcatcatataatttataaaacttaacgttttgaatttaaattagaattccatattttgttctcctattataatcattttataaaaatactatatatcttttattaattgattctataatttaacagaatactaataaaattaatacaactttaaatttataaaatgaatgagacaaaatatattttttttagtattgatgtagctctataataatatagcggctgaaataataaattgattttgtcatattcattaaaaaaaaatcaattaaaattaaatatttaagacatacaatagaaactaatgacaattaaaaaagaattaaaattaataaaattattaataaaaaatagaatat

SEQ ID NO: 116804 - DNA, 4521 bp, Cannabis sativa
  modified_base (2353)..(2373): a, c, t, g, unknown or other
tttttctttttggaatatactattaagttattgtttaattaatatcaattttaatatatataaatatttttgcaggtattaattattttaacattttgtaaatgattaattaatttaaaatatattttttttaataatttgcgacataaatacttaaatttaacttctaattattaataaatatttaagtttaattttagcgataataatatttaaattataattctgaaacttttgtatgtatctgacagttaaatattaagtaaattaccatgtggcaatccctgattagtcaaagtcattaaattattttttaaaaataatttaaatataccaataagaaaatgacacgtggacaatgacttgacatttaatggtcaaggtacttacgtagatccagaaatgtaatttaagtattattaccgcaaaaaattaaacttaggtatttattaacaaccagagttaaacttaagtatttgtgccgcaaattactcttggttttaccaattttgattataataagataagatgatttttttaaaaaaataaaataatataacaataaaaaattattctcaaaataaaattttagaaaatatacttttttttaccaaattttattataataagataagatgattttttttttaaaaataaaataatcaaaagtaattaagaaatagttgatttagattgaagattattgaaaagattaaaaatcatacaaattaatattattggagttggtaattacaaacacttaaaaggttaatgtactaagattagactaatctctcaagaaagatgtttaacctaataaatcaaaattataaaataataaacattaacatgaattctaacttggctattaaaatgtgatcctagctaggttcccccagcctaattttgagtaaataaggttactcctgaaattttgagccaataagaaatgtccaaaatataaattttagggaaaagtttgatgttttagacgaaattatttctaaaattatgagaaaattactgtaagaagttcgaagcatcataacactatataaaacttaaaatttcaaaagattaatattattttagaccttatattttgtaaaaattattgattagaccatctattttgttaaatgataaaatagatattgtattgtctaaaatattagtataaatagaaccttaagcttaatttttgattttttttaataaaattaacttgaagacaatttctaatacgaacaaatacaataaatgtaatcagttttgtcataacatctttatatcagaatattattaaattttattttgataaaaaaatcaatttaaggtactatttagtttattttaaaaaatacaaaatctaatttgttattatcaaaataaatagttcaaacaatagcttttgtaaaatacaagatttaaaataatatttattcaatcttaaaatataacaaggacaaaaactatagccaaaataggaaagaataaattataaaataaccttaatcaaacacacataatatgagttaactttttagtaataaccaaagttaatatgcatgatttgaattaatttcattattttaatatacataataacctttttcatcaatttttaattttaattttttttcacaaccttcgagaaaataattaataaatccaattcaaaaagataccaaaagcaaaaggtattaagatgtgtttatggaagaatatctcttataataagattattagtagttgatgattatatgattacacattttaatgattggaaaaactctttaaaagaataaccatttctgtctctctctctctaattatttgcttttcatctttttcttttttccattcataaaattatacacattttatttgatgattatatgattacacattttgtgtttttatctatttttagaataaaaataaataaataaataaatagattttgcatatagcccaaataagtaagattaatatatagtaaatattataaaatattttattgtacacgtgtctttttttagcattgaaataaattgtttgaattttgtttttaaaactataaataattcaaaaaaattaaattttatagaacatcttaatagataattacattcttaatatagattaatgcaaaaaattcttatattatttattaggaataatttatttatttatttttaaaaattagatattttttcattgcaaatcataattacaattgacagattatccatgcaatgtcatcaaatgtacaaggagtaatattattttaaatatatttttgttaaataatttacaaaatgtatataaaatttataataataataataannnnnnnnnnnnnnnnnnnnntaataataataataatgataatactatgaaggttgtgcatgtgatatatattggtttaaccctattcaaaatcattggtgtggaataaacatcatcaaaattcaaaaaaataaaataaattatatatttatttttttttttgcatagctgtattattctaaattattggctttttttttattacattgtattaatattccttcatttattgttatttttttgaaatcatatattcatttattaatgtttggttgttgcaatattgtagtgcatagggtaatttactaccctatatatgaaataatcttattatttttctattatttatttatttattttgcttgaaccattatattttttctatggttaacattcgctataattatttctaatagtgaaatttaaatttagtattaaatcaacagaaaaaatatattattttagcactaaatattttttcaattctgaccaggacaacactgtaaaatatactaaaaatcttatttttagtattataaataatattttcttagggaagattaagtttgatctgaatattatatatataaatacttattcgaagtaaataaataaattcataaaattaaaattgcactgatgacatattattaaaagaaagaaagtggaaaaagaatattaaaaaacaaaaagaataatttagttgacacctttatcaatgatgagggaaattttaaatttttaatatatattttaaaaagttattctaattaataatattattattaatcaaaggttcgttattatttatttatttattgaaaataatgaaaattaaagttccattcaaacacctttaaattgcttttttacacttaaaaataaaaaataaaaaataaaagaataatgccaaacaagcatgcacgtagtatcttaatagaaaaaaaaaagttagtacgaccattaattattaattacaaataaaataaaataaaataaaaatcatcatgacaacaaacaagcattgaaaaaccaaaattttattattttcttaataattctaacaagtggtagagccatagtattttcatataaataaacaaaaaatatattttaagcatttattattttttttttaaaaaaaaagctccatcgtttagttcttattattacttttaaaaaattatagtaattaaaattatacaattacaactacaatactattttttgaataatggataatccatattaaaaaatctttatatattgcacattacacacatacataatataatattagtaatatagtgaacattataatgtaggtggtattttattctagtttatttatttattttaattaaaacaatgataagtattaactaaaagagttaatgctatttaaaatctatttaaaatctgtgttttttaaaaaattatcgagtggaaatttttgttttgttaaataataaaataaaatatatattttttttataataatataaataggacctttattcaaattttaattatttttttttaatgcaaccaacttaaaaataattattagtataaacatatgcaaaaaaaaaaatgtaaccaattttattatgacacctctaaatcaggttattattaagttttatttgacgaaaaatcagttcaggatactatttaaataaatacaatgtccgattaatttattatttaacaaaacaaataatctaaaatattttttataaaatacaaaatctaaaataataattacactcaactttttattataactactttacttaatactttttttaatagacatactaggagttatagaagctatatattataaattatttataataatgtaaatattgtgtgaagaaattcatgtgacaaaaaaggagagatatatagagtaaatactaataattaaataattggtcacttgttaggtaatggattcttttggagacaagataaattttcggatttttcttttgaagacaatgtcaatctctaattaaattaaaattttatttatttattttatatctaataataggaaatatacccccttaaaatagatatattgatgcacttttatctattttagtacccgaaataattttttagtcaaattttttctcacggtcatgtacgttatagtta

SEQ ID NO: 116805 - DNA, 4729 bp, Cannabis sativa
  modified_base (2812)..(2812): a, c, t, g, unknown or other
tttgctctgcaagaaggagaaatttttttgggaaagaagtctctctatcgtatttttggaaaaaaaaaactttaattttcctaattttctttattttgtcatatggtaataaaaaagtaaattttgaatcaaatataactataaattcccattttcttttttttatgaataagatcattgtattgcactaaaacattttcaccattacatctcaattttcgtaaatgactataccccctgtacaatgctcccttacttacttacaaagctacaacctaattcatatcttcaatagaaattttacaaggtaaaaaacaaacctaatctcatcttacaatcattttgaatcattagaactgtgtggttataatctgccaaagcttttgttcccataaaacatcattccttaccttccaaagattatataccccgctgcctatataaatatatttaggttatttaaatatatattttattatttataaatttttaataagtgaaatgatattatatatttctataaatattatttttcaacttataattttaaaataataaattatataatgaaataactaatttatgaaattgaaatattataattaagatatctatactcaaagttaatttcaaatttattattatttaattcatcaattaaaaggataaatatatcttttaatttcaaaatatatctaacattaaattttttaatcttataattaaataatctgtaaaattaagaaattaaaattttttcaaaatcttaaataaaaaaaaacaattttttgaaatctaaccatatttaaatataaaatagctattttttatttcaaaattcaaaatatcaaaaattaatgatgaaccattaaaagaattaaatattattaatttttaaaattgatatttaggttcaaatattaaaaataatattttatactgaattatagggttttaaaatgaaaaaaaaaaaattgaaattcgaatgaaaaattacaaaaaaatcaaaatttggctgcaaaggcaccctgtcgtccgagcaacaggttgcgtgcagccttctacgtgcgtggtagccatggcaacaaaaattcaaaacatcataactttctcgtattttatcgaaatcgagctccgtaaaaataagcatgctttaattttcacaaggatttaatctaagataatttccaaatcaaatcaaaattaataatcatagaaatttttagattattacataaagtcatcaaaatcacataaaccatcatgaacacatccaaatcaacacaaaaagcacacataatcgtttcaaattaatgtttgatgaaagcaaatcattaccatggctctgatacctgttgttgaaaattattttactagtatctagattttctaacatgtatgttgattatataactataatctaacatcctaaatatgaaatttctaaaaaataataaataaatacattagggattaagaaatatttacagtgatgaaagcagaataatatgactccttctgtttagatctctaacccttgattcctgtctgtagcagagtattatcaagatctgaacgtagatcttgtcctccttcgattgtgttcatcatagtcttccacaaaggcctgaatatcacctagaatagttgtgggctgatactctttggaaaaatatttttgagagagagacttagtgattttcgaaaataatgaagaaagaagagaagagatcgttggttgacattgaaaacttaggttaattctctcttctcatcactttgtttatataggcttcacttaaggctaggttagatgagattgagcttaaaatatagacttaggctgaagtctaactctagggccaaattcctcatgggctttagaattacatttttaccactttattataactaacgaaactaatgtatctttttatattttaccacttatctcatctaattatttaaatactaattttattttaataattatcaaaataagtaaaatttaaataaatttatcaattagacccataaagtatcttaattgataaataaacctctatttctcttttcttctcaaaattgcctaaacttggtgaaaatctcaaataaaacataggctactttcaaattctaattgacttattaaatcaattagttgagtctagaagatgatattatctcaaacaatgtagcaccatgggcctataaacaagatcctaataagtagattcaaaatttaccaagtaaatttcatagcttattaattcttcttgactccactatagattcagaattgcactcttgattacataggacgctctatataccaaatatagatacattatgaattatccattgttagaatctaaacaatcaatgatcctctatagaaaatttacaatgagaagggacaaatttactatgttaccctttaaagtattttatccataaaacacttaactacttgtaaatgatattttattaaattaatataattactgaaatgagcgctctatcatttatcacgttaagtcaagctccaagaaaaccatctcttaacttttaatagacatagaagctatagatgtccatatctatgattaacgctcccactcaaatacactaccatgttcccaagatgtaagtattgggtcgatcctaatggtcagttataacgaacaagtcaaagaacacatgtaatacatttaagctagaagttaatcatctcaagattgagatcaattgactgaagatatactaagtaacattgacttagaaaagatataatagtaagtttatgatatcntttccactgtcaatatcggtccagtcctatctatagccaatacatccgatattaatttactttgctaacgccctggaaaggacattctacttatacaagtgtaagtaaaccacaccgttaattatcatgtcagtgtaaattcagtacactgataaatcgtgagactaaaaagtttgaagcatataatcatgattattttccattgtgtaggcaacactataatcataaataactatatcttcgggatttaatataatttatacatctaacttataatcatgtgaactattcaacataaaataatttttgatcttttattaattagtaaatctaattatatttaattggattttatttatagggcataaaatcccaacaaactcctacttgcactaatataaaactaaatgtgcattttaattaatctcattattttgatgtccaaatcaagtataatatgtagtattatcttcgtaataggatctgatatgttgtatttagtatcaaccttctccaccattacatctccttagtcacaaaatctttgatattgtgaaattcctttctatatgtttactccttttagggtattagattctttatggtttggcaactatctatattatcagaagtaacagtaatagttaatccatgattgaaataatgccaaagggcgtataaaattttcttaggctatctagtagccttttgcgccactttaatagtcagtctcgctgataaagttagagaatccaaataaatttttacacttctctaaagatcactactccacccctagagtaatcaccatccaagatttagactttctagcattaatgtaaatctagaaatctgagtcagtgtagtgttaacatttcgaaaaatcactcttatagactaatatataggttctctttcaatcttaagatttatttgattgtctttcaatattcctatcgtggtttaaactgatacatacttataactctcactcaacagcaagtgtttggtctaatacatataaagtcaattttaaccattagatcatcatcaatgaccaagatcagactaaagtaattttttcatatttgttgtattattttattattaaataggacctcattccttataaaatgagatgagcttcagtaatttatttttcacattcttaaaagtgtccataagatcagagcatctctctctactctctctctctctctctctcactctagaaatttgaactcttttcttagtcaattctcttgtaattctcttcagaaataaaaattcgaagtagatgtagttccattaacaacgcgacatgaagagtgaattataaattctgtgtgtttcactttaatatttacttaagttattatttatctcatcaatctagcgaatcagtattgatcattttttagctagtgtcaacgattatttttgtgtatttatgaaaatattccaattttaaacttacatattttcatacatgcatattctttctagtgatatactaggaaataagaatatgctaatattgagatggtataatagttaatttggtgtgtcatactatataagtaaaagaacaagtacacttttcaaacactataaagttttaaaatatatattagataagttgtttaatataatataactttacatgtttgtaagtagtattagttttttttttttgaacgggaaaaagttgcttccatttattaaaggtccttcaaaagtaagaacaataaattagtagggaacagactccttattaactaatcatgcaatcagctttagaataagagcccctagttaagaagtgggccactttattcgcaaatcactttactttggtgccgtttggtaacacttttgttttctaattttttaattacaaaataaaagtaaaatttt

SEQ ID NO: 116806 - DNA, 3225 bp, Cannabis sativa
agaataatttttctagtattttttttattataaaacaaataaaatacaccaactcaatatattactaaaaaagattaagaaattagaagtttgtgtcttaattaatatatatcctatattctaattttttaaaaatatatataattaagtgcggattggattggattggatcagttactttttgaagtcaaacaacatccaatccgcgcgtgcggatttagatttttcaatccaatctaatacgcgcaagtgcggatatccgcattttgcaaattggattggattggatcgtgcagattagattggatcgaatacttagtgaacacccctaggtcaatgggttgactgggagcatgtcttgggggacgtcatgttggattatttttccaacattttctcatcatattcagtcgagtgacaagaaattgttgattgcattccttcggctattacgactgatcataacttggtcttgttgaaagctatttcaaatgaagaggttaaagaggcgttgtttcaaatgcatcctaacaaatttggggcttgatggtatgactccaattttttatcagaggttttgatcagttgtgggtaaggatgttattttattagttaggaatttttttttgcctcttgtgtgatgccagatggatacaaacttggtccttatttcaaagaagaagaatccgacggtcatgggagatcttcgtcctatttttctttgtaatgctctttgtaaggtcatcacaaaagttttggctaatcgtcttgagattcctttccaaggtcatatctgatgcgcaaagtgcttttattcttagtagattaattttagacaatattttaatctcttttgaggtccttcattacttaacatggaagaaatagggtcaagatgggtatacggctttgaagttggatatgagcaaagcctatgatcgtatcgaatgagagtttcttcaagtaattttgattaagatgggtttacctcggcattgggtaaagttgattataggatgtgtttcaatagttcgatactgaattggccatgggggtcaaagtctcggtactgaattgtgctaaaggtttttctaggcttatcaggaatatgaaacaaataagtggcttcatgggtgtaaggtggctaggcgagctcctgttgtttctcatacattgtttgcggcaattatctttattgtcgagctaatgaaagagaggcggcaaagattatggagctcctaacaaagtttgagcaagcttcggatcaacaggtgaatatttctaaatcatctatcttttttagcactaatatctcgaaggtagatcgtgctcgagtttaggaaattttggggatgcaggttgtaagtgatcaaagtttgtatttgggtcttcctaatactatgggcagggataaaaacgttagtttgggttttctcaatgataaaatgtgtaagcgagtggaaatttgggacggaaagtggctctttaagttgggaaaggaagtccttttaaaatttgttactcaatctctccctagttatgctatgagtatttttctacttatgcttaagctttgttctcaaatagagagaatcatgtgtatgtattggtggcgggcaagtagtaatggcctaggtattcattggttatcgtgggagatgctgacagttcataaagataatggcaggatggggttttagagtttacatgattttaatctagctatgtttaggaagcaagggtggcagcttttaactcattctgattcgcttgtactggtcgtatatattaagcatggtattatcctagtgaattgtttttgtctgcagagttgaggtcgagtcctagttatgtttggagaagtattcttgcttttcaatagctgcttccaggtggtgtgttgttgatggttcttctattgacattctggggtagttgtggcttttgtgcgaggagcagcccaggattacttctttccatcctaggttcgagggggcaaaggtcaatcagattatagcgggaggggcccaagtgtgggatgatgaagttcttgaggattcgttcaatgcttctgactaacgattaattaagtgtattgtgttcaatgataatcttgggctagatcattggtattggtttaaagagacttcagggatttattcggtgaagagtgcttacaagcttctctaggtacttcatgtaggtggtcggaagataataattctggcctttggatggcattatggcgaaatttctcctaaggttaaagacttactctggagggcatgttctaggtgtttaccaacactgacacagttaaaaggttgacatgttgatgtggttgtcatttgcccgatgtggcaaggtatgaatgaatcaatcctccacgttttggttgagtgtcctttagtcaaagcttgttggcagcaggttgatggggctatttgtaacctttcagtcacatatttttcaggatggttttatcaactggtcatcgaattttcaaagactttggtttgtcatgttgcgatgatttgttggtctctttggaaagtaagaaatgagcttgtttggcaaagtaaattttttgttgcaaatggggtggtggctgctgtgttgtcttacattaatcaatggaagattgctcacaaaaattctacaaacacaatggattccagtccttgtgttcgggtggagcattggttggtttccaatattggtctgattaaagtcaatgtagatgcctctgtcacttctagggttttttatttcgaaattagagggttgtcatgtgatcatcatggagctttcctttttcattggtctaaataattgcctggccgtgtctcttctcttttggcagaggcaattgggttgaaagaagctttgagctagatcaaagaacgaggcctagatcaagttgttgttgagtcggactatagaagcattattgatgccctgtataattcgactccttaattgtctccttttagtttagttatttctgatcgtcgtactataatctatgatcttaacaatgtttcttgtatttttgtcaaacaatctacgaacaagacaaccaattattttgtgactgcttcttgtttctctctaggtcgtggctatggtaggtggctttgtccctactacttttcaagctatttttatagatgatttatccaatcatgaataagatacatttctttttgtcaaaaaaaaaaaaaa

SEQ ID NO: 116807 - DNA, 1273 bp, Cannabis sativa
  modified_base (1235)..(1237): a, c, t, g, unknown or other
ggcatgatttggtacatgtcaagtcctaggagcaaaaatcctaattagctctttatattgttcatattagatcacttcaaatgtttttttccttattattattagaacggcagacattgacgaactagaattgtattcttaattataattccagtttcctaatttgtttaaagctagactttatatgatctacaataaataagattttgtcaatgtgttattgctagtttcaatcatgccgttgttaaaaaatttcaccgaattatgcatataattgagctttaaacattagttgttctacatggctaattgggcggttgattagtgcaagaggtacccaaatggtgatcaacaacagaagacttataagagaagaaaaatgagtgcatcaataaaatgtaagaataaacaaactaaagcaacctcagcaacctcacacaaaatacatccctacagtagaacgaacaagtgcctcatggccgaaacgagactctgttataaataatataatgtataaattaaagggcaatgcttactaatatacctaaaatctaacaaatttaggtatatatcgtttggtatttaattgtagcaaatactgtttttgctcctaccaaaaatggaaattaatatacgtgatttcaagaaaccaccattttctccaggtgatgaaaccactgacttcaacaactcaattatttttgaaaaaattaaaataatggatgcgtagtacataccctttgtaacttatataaatacacatctatcacactaggaaaaaatcagaagcaatattcacaaccttcattagagctctgcaactccacattcgaagctccatgaaaatggaacaaaagcttatcataaactctgatttcaataatcgaactagaaaaggcaaccgataatcaaactatccatgatttaacatctatatctgcaaaaatctcacatcgatcaaacattaccaagttctaaaatatctcaaatcgattgatgcaatctttcacgaaaaaatagtcgatcaacacaaaatcattttgctaatcatcgaagatcatgattgaagctgtaaaaaactaaaatccgttgagcacatttgatcagaaaaccaaagcttcggaatcaccataagaaagcttaacaacatcttcattcctcaaaatatgtttccgctatactcgaaattcgtctatcatttcaaaagaggacactgttggatatattttaccagnnnctagatttactaacaaatatgtttcattaacatcct

SEQ ID NO: 116808 - DNA, 1152 bp, Cannabis sativa
gctgctgtacatcacggattacaatccgtgaaagtacaataacgggacaaaatcatatccctatatatttatatataaaatacagttatttaaccgtttttattggtttaacaaaatattttagaaagattaattttataaatatatatataaacatttatagcccataatatcctaatttttcaaaatctcttaaagaattatggaaggaaaaacacatttccaagatgtattattaagattgaccttagcaaggcttctgatatggttaactggaaattcttggaagatctacttgtagctctcaattttccttctagattcattaattgggtaatgatttgtgttaaaaatacaacttattccctattgatgaatggaaaaatgcaagaatcatttaaaggggaaaaatggctaaggcaaggagaccccctatctccccttctttttgttctcattatggagtatttgtctataagacttctctttgctagccaagcacaaacagttcagatttcatcatctttgtaagagtctaaaccttattaactgatggtttgtagatgatttaattgtattttgcaaaggaaagttgaactcagttcaaatagtcaaagaggctttggaggattttagtggcacttcaagtttgcacatcaactatgagaagtctcaaatttccttagcaggagtttatgatgaaaggaaatatatatatatatatatatagttgatcttatttagcttgctgaaggaagatttcccctcaagtacttaggagtctcaatgagacctaccaaatggcgattagaagattgtgagcccatcttgaagaaaatcaaaatgagactccacacatgggcgagcaagcacctttcatatgcgggtagaatacaacttattcattcagtttttcttggtttttgaaactattggatgagcatatttctccttcctcaaagtgttgtaaaagagactgagaagctttggaggggtttcctttggggagttgatgggaaccggagcaaaattcatgttgcttcttgttaacgcagattttcgttaaccaaatttgagcctcacggtaataattccacacaaaaaaagtaaaagctatagaaaaataacatatgaacacagggttttttttac

SEQ ID NO: 116809 - DNA, 597 bp, Cannabis sativa
gtaagaagaggccgtagatagccatgagccataaaggggaaacatgattctgtcacaattcgccaccgtgaccggcgaaggcaaataataacctcttctctggtgacccaagcacccacaattatagcaaaatattccaatcttttcaaatttaaactggagccaccatttgacacctaaccctaaatcaaagtaacaccccaaaaccagaggtttaacaaattctatatcaacctgcactttgagaaaatggttccagaaagtcggtttaactttgtccaaatccaccaccactaccttatcgcaagaccacccaagaggttaccatttgacacacagaaatattcatgagggaggttatgtatttgcacccacaccctaaaatgctcaaagttaacagggccagaaatactaggagtccaagcctagagaatgagggagtacccccaaatgcaccaaggaccgttatcaagagcccaactacgatcatctgcactagcaaaaccaaatttgaagcagtgaggttgtagacgaacatctgtcaaggcagccacatgcagtgaggttgtgtttaattcaacctttcagatcctatta

SEQ ID NO: 116810 - DNA, 2159 bp, Cannabis sativa
taatccactcctgcataccaaataggcactaaagagtttcagagtcggattggtttcgatagaaattttgtatttttttaatgagaagaaacttcattaatgatcccagcaaatttaaaacttaaattggagcacgacccttccaactcacaacaaaactacaagttttttttacaaaactgagcattatcttatccattcttgataacttcttctcattaacaaagaaaattataactaaggaatctacataatgaggagtcaaacacctattctcaaacacacataaattcttattcaaccgaatttcatatgtagtaccacttattgtcattgttggcatgtaaataggcagagttttcatccccatatttcaaccaatttattaactttttttcttgaggaaactacccatgtgattgcaacattgaaccatctttgatctggccaaaacttcacgattatgtagtaagctagagtgaggatcttctggaagatcaagttgaacatgattaaaagcaattcaggccatctcatacttctcacgaacatctccattgtttatcttgatgaaatgtcttaacactttttgtaatcttttaagcttaaccagaatagaagacaggtcatttccttcaacatattggttccaactatctaaaaccctatttttgaactccagatcatcaacccacataatgaagaacttgaaaggtggaatcccaatttggccaagacacatatttttaaccaagcaacaaccatgatttgactcttattcccaatgaaaaaaggcttttgtattcgggtgaagatcaatccattcctcattcttgaacacccaatcaatcttagaaaaaatactctcattctccctaattgttgctccaagtgaaacgtgaaccaagattgtaatatctcaaaaatctaattatgaataattaggatttattatatattatgggttaatttgagggtaatgagtaggattataatcctactaatctaatttagcgtgaatgataaaattttccataagtagataagtaagcgtaatttattaattatggaaatttatttagaatatgtgaatataatgtgagttatttgtgaaataaaattatttttaagtttggcgaccctagagacccgatcggaggccaaaaatattacaacaattttagttagtaactttgataggattattgagacaagttagttttagaattatccgggtatttcggagtactcggggttaaccaaatgccttaggattaaaaatttcttagtggttaaaaaatggtaaaataatcaattattttaattactttaatcttttttattttttttttctttttctttttctttttctttctttcttatcttttattttattaataagaaactaaaatgtatatatatatattgataagtaaaatgaaaggtcaaaccattctcatctctttctctttcctttctcttgagctaaagaaaccaaggcaagaaaccaaattttcttatttgatttctatccaaactcagctcctcaagcactagtagcaactaaagaataatcctagtggaagggaagcaaggtacaacctccatcttttctctttttctcttcaaaactttggtgaaagtttaggttttggtggttgagttttggttctgtagttgctgtgagttgggtaaggttttagtttgatttttgggacagaatggaagtattttggacactcttttttagttttgttgttgttgtggagtgagagccaagcttgagtttttgagctcaaagcttgagctctcatgacacttttcatgttagggcatgattttgatttctatcacatagagattattgtatggatgttatatgattgttctgtgaagtttagaatgaattggtttggttttagtgggcttttgagaagttaaaacttggagtttcacgtttcttgtagaaaatggtagaccatttttggaaaaacggtagaaaaaacggtctaccgttttccctaccaggaaccactaaaaatagcttgtcgttttctaatcagcttacaatttttattatgtttagatgttggaaatattttaccaggatctagatttactaccaagtatttttcgttaacatcctaatatgaattcta

SEQ ID NO: 116811 - DNA, 4384 bp, Cannabis sativa
  modified_base (4341)..(4359): a, c, t, g, unknown or other
ttttttaaaaaaatgccatatttagtgtaattaagtttttatgccatatatatcaaaacttatctttattttcccatatttttgtaaatagccctagatatatttatcgaatagatggcaaccgtctcataaaaggcctgatcggcatatgtctactaggaagatacatttgggctcaatttggattatgaatcatgaaagatagcccaatagacgttgggatgaattcaattcactacatttatgttcgcaactatttctttattattattatttaatttattaaaaaaaaaaaaaaaaaaaaagaacttttgtttcgttttaatttttcttgccataaccgcttaagttatttgtaataatttataaagattaagttgttaatcgtgaggttgagatggccgagttggtctaaggcgccagattaaggttctggtccgaaagggcgtgggttcaaatcccactctcaacactttacccttcttttttttttttttctttcattttattgttttcgtacggttccagtttaattttagctactccaattagtttttttttttgtctctttttctattatttctttcacactcttttatcattaacaacaatacaatcttcctcatttagtttgtttattgagatacttgaggtgaaagtatttaaattgttatgtttgtaataaccaagtcctgtacttaaattatttctttaagagcaaaagtatctaaattattatatttatagcctatttcatttatgtttttagtgtttaaatctatttagatgatatcaaattttctcatgttctaatatagaaaaaaataatttagatatttttacattttaaaaaataattggagtacttacatgccacaaatataataatttaaatactttcatcgctaaaaaaataaaaactgtttagttataattgtagatactaaaattcacaatcaattgaagatgatcgtacgcgggcaccgacaacttatagaacaaagaaaagagtaaccgaaaaattttgggacaccgagatggtaccagccgaagggactctaacggtcaagtcagcaaaattgttaacaatgtaataaaaaagatgatagtaaatgactgaactaagttaccatctatcttgattgcggaaataagtctgtagtttttgagatgatgagagagtgaacaataagtaaaaagtattgagatgactgaaaattgatgtctctctcatagactgagagtggctcttataggcgtccatagaaaggcattactcatgaccgctcacccctttgtgaagcgctcctctcccacttgatcagggagatcgttatttgcgtgatcagtttgactgatccctttagagatcgttggatgagtgataagacttagtctcgtatacgggtaggatcatcgtgagctcaatgttgggtcatggataatgttaatgtctgacttgactgtcttattttaggtctgttgggcttggtatgttgatcgtatcatcataactagtcaaatagtccaacccaatcttgtttgaacattctttagaaacatcgcatgtgacattgagcctgagcccaattttagcctctacaataataatttaataaattaataataatgaagatttttcttttttaaaattactttctgagatactgctccataagatagattattacgaaccatagttgacattcagatatctacttcaaagaatttttgtctaaaactacctataggtagtagaagtcgagttatttatgtgagatggatccaaaaatagagggttctagttataatctaggaaccattcatgtatatatttcacaaaaatttaaaagaaattgaccacattaaaattacttgttggggagatccgtttgatacccaaaaactgcttagtaacaattagataagtgaagaatgttggggtgaaccagaaaagtttgggtagacccggatccatagttgatcctattttcgataggttcagtcgacaattgaatttaatttttctcattatttcgtattcgtaattgtgctaaaagaaggcctgactctaagttgttcactcagtttcatttctattttctcttttgccacacatataactataaatgtatctgtaagttgtaattgtcacaactaaaaattaagtttttaaggaatatatacagtatattaaaaaatgattgggcaataattatatttaattattacatatgagtatattttaagtaattttggcatatggataatattttttttttgtattatttttacatagcgatttataatatagtcacaggagatctctaaagagtttttagaaaattttagacatttttcgatgtcgaaattaaaagttaaataactaaactgcacatgagcttgttttgacatttatacatgcgtacaataaattgtttgaatcataattttgataccttaacttgttctaaattttttgaaaatttataaaatagtcaaagtaaattgcttgttatatatttgtttgttctaaaactacctataggtagtagaggtcgaattatttatttgagatggatccaaaaatagagaattctagttataatcctaaaacaattcatgtatatatttcacaaaaatgttaaagaaatcgaccacattaaaattacctgttggggagatccgtttgatacccaaaaattgcttaacaatagttagataagtgcagaatgttggggtgaaccagaaaaatttgggtagagctgaatccatagtagatcctattaggagcttggttatataagcccatggtccccatactaactgggataatattattttgtagtctcgattaattaatttatttaatcaattaggattctaaataataactatgtcttatttatgaattttactaaggaaagacataattgagaagaaaagagaaatagaaacttatttgttaatttgtacactttgtgggtctaattaataaatatatttaaattatattttatttgataattattaaattaaaattggtatttaaataattagaagaaacaagtgataaaataggaaaaatacattgtttcatttaaatgaaataaaatggcataaatctaactctaaagcccatattgattcaacccaagtctttattttaatcccatctcttctaaacttaatcctaggtaaaacctataaaaagaaagagaagagagctttgttttatgataattttctaatctagaaaattctaaaaagctcacttcttatgtaatatttcgaaagttatgattatgttaaactggacatattttattaaatatgtaattttatgaatattagggtaggattataatcttttttttcttgaacatgaaatagcaacttcaatgaaatttagcattcagcatacaaaatggcttgaagatcagtcgggacaccattcacatgaatgctacaatcagagaaaacttgagatcgtcttgctacaaatgagctactcggtttgctgatcgtctaatgaaacataaactaacattttgtagaaaggataataaaattttacaatcattaataaccaacccaataacagaagtcattttgtaggataagattataatcttacttaagctaattatgagttaattagtgatctttgagtaaatgaataattaagcgtaacttattaattacggaggttttatcggaacatgtgggtattatatataccatttttgaaataaaatattttcgagtttggtggtagcggaaactcgatgggttggtcagagatgtcacgacgacagtagtatgagatatattggaattgtatcggactagtttagaatgttgagtttttggtttactcgagataattaatttgaccaaaatacccttagattatgttttaatttaagtgcttatggagggtaaactagttattttattaggtattatattattttgtccgtaagtggtttctaggctgaaataggtttatattaatatgtttattttattagatttaattataagtgtacataattgaagataaaatcaaattaagaaaaaactggttctcatctactctctctctccttcccttcgagccctagaaactagctgaaccaaataaaatttcttcaccaaatcaacaaaattctagctgaattagctaaccctaggagttgtgcaagtgttgaggtaagcccttcatcttttctctttaatttctagagtttttaggttgagtttatttgggtttatgtgtgaattcgggtctgtggagttaattgagttcagagcaagtttttgttgggttttgtgccnnnnnnnnnnnnnnnnnnnatataatcagatttatttattaata

SEQ ID NO: 116812 - DNA, 3889 bp, Cannabis sativa
aattcccaatcatggtccttgcggatcggatcatccatataatatacaaaaagaaactctagatatttgatatatttctctttgaatgagatctcaattccagcaacgacgtgtacataaaaagaaaaaacttgggattttgtttttaggggtttcaaatgaaatcagtgggaaggaagaagaattctttgggtttgcagctaaaacaagaaagagaatttaagtggtaaatttgggttagtatctctaaagtctctttatttcttgcaacatttacactttggtttgttcagctaggattcaatctcgggtggtttcacgtattgacatttaaatcttagacaaaatctcagttcggtgtgtgtttactgagatttttagaaactaattaagaagagcttaaggaaatgtaaaatattaaataatagtccatgagtcagtagtattacccttcgttggcaaatttttgagtattacaagtgtttacaatggtaatctctgcattccttttgtttcactctaagaaaaaaactctatacgaattttagcagagattctataagtaaaatatgttcacccctttttacataaaaaatggaagtatttataggcacataagtgggtaaggacataccctttaccctattagggtttcttactcagcacgtaggaaaggctgtaaaacaacacatgatcatccaactgctggtttcgtaggtaactctcccatcatgtggtgcttaattgatgtaggctatcacgtcaggaatgagcacgtgtcgttcaaaggtttctcctgtaaaattaatatcttaaacaagccgttggacaataagcactacagaggcacatacgcgcacaaccacggtctgacgcaaggaacaggatctgacacggtgtaattagaagaggcgtgaccgttgggtgtagtttcgaattaggtcacagggagtttccagggagtacaacttaaggctccttagcgtagcccattcctaatcatcctggaatgcttatgcttctcgtttgcctccaaatagcggaagcatcaagttagaacctcgagaattacttcatccttcgtaagggaagcgttcttctaaacactttgataccttccgtgaccatatcttgaaaagggattcatgatatcggcatgcgatctgacgtggcacccttctacttcttccacgtagaacctattcgagaacatgtataatatttatccccaagctctcgggacttgagagtgtcgagagcttgctgccttctcctggaggttggttctgtgtccttgacttacataaagttcattgggagaccgaagggagtgtttatgatagtcgttcttggtgatatctcgaaggacttgccaaagtatgaagctcgattagcggagtcgtgaggcccatgttctttgtcttaggcgcattccttgggaaggcgaatgatggctgattttgaaaagatgcctatcctcagaagcattgtggatgctgtcacgaaatgatgattaataaatgccttattctcttttttcagatgcattaaatgccaaccttttgcatccccaactgttggatgatctagccttcgattcatttgatcaggagcgtatatttcaaaaaaaaaaaaaactctacaaatataattaaaacatcatacaatgcacaccaatattctaaaaataaatataagtgtgaaaaccagtctcgaacctagaaacaaaataataaaaagaaacttaaaatcaaaatatacaataatatcataaaacggagcaactccattacaaaacccttaagacatgtgaaactagttttaaaacccttaaaagctgtaaaaccagtttcaaacctgtgaatagatgtgaaccttctaatactagttttgaacctgcgaaccctaggaaataattaaatgaataagtgtacgagactcatgatttcatgttttcattacaaacaaaagattctagatattattttctgtgccagatccaatgatgttattgcttcagctcaaaaaatgcttattagaaaatagttttaccttgtattttttattattggataaactaattatttcatcaaaagtagcagaaaaaaatcagtttcatcaacaacataatgtaaaaaatacaatgcaaaaaattataatctaaaaacaatacaaactttaaaaatcagttttgaatgtatcaattctatatgaatatcaaatagcctaacttctaactttattctttattttagcattcaatctttcacttgctttctaaaaatcagagttggtttaagcatacaaaatatggtaaagataacaaaggggataaaaaattaaaaccagtttcgttaagaacataatgaaaaaaaatacaatgcaaaaaatataatctaaaaatgacaccaattataaaactagtttccaacatataaatttatatgaatacttaatactctaatttctaacttcatactctattttgacatttaatttcttacttgcttgataaaaaatcataattgatttgagcattcaatatgggataaatatctccaagaaaatcacaaactaaaacaagttttataaaaaaaaatattgtaaaaatgattccaactttaaaaactagtttcatcaacagtaaaataaactaattatttcactaaaagcagcaaaaaaaataaaataaaatcagtttcatcaacatcatactgaaaaaaaaatacaatgcaaaaaattataatctaaaaatgatacaaactttaaaaatcagtttcatcaattattaaaagaagcagaaggaaaaaaaaatagtttcatcaacaagatgatgaaaaaaattataatctaaaaacgatactaactttagaaatcagtttcattaacattaaaaaaaaactcattatttcattaaaagaggcagaaaaaaataaatttcatcaacaacataatgaaaaatacacaatgcctaataaccaaactttaaaacgataataattttaaaatccaattttaaacatataaattttatatcaatatctaataattaaacttctaactattttggttaacttcattctcgaacatacaatatagagcaaaaataataaaaagaatcagaaactagaatgagagaggaaaaagaaaacaaagaaaatttaagagacaaaagtagaataaaaaccataaagaataactaaaaaaatagaagaggaaaagaaatcatatataaaaaataataaaaatagaggtggggttaaaattatacactctaataatcaaataatactctaagcaaacacaaaatccactaaaaatattagagtaaaaagaaaagatagagaaataaaaatcctaaaaaaaaaaaaaaagataaaaccaattgggctagaaacaaaaacaataaaatttgagtttggatattagatttacaaaaatgtggcatatcaaataccataaaaaattttaaatatgaaaaaatgtcataggagagtagcaaatttatataaatgccatatttttgtaactttagtatcaaatcccatatttcatgtaattttcactaaatcaactgaatgagtctgcaagcagtattatctcaactagtgagaggaccatgggcctatataaccgagcctccaataagtagagctagactttaccaagtaaattctctaacttattaatttatccttgtgccactatagattcagaattgaattacactctcaattatatagaacgctctatatgtactaagatatagacatgttttgattatcctttgttacaattctaatagtcaaagatcctctataaatgatctacactgaatagggacaaatttaccgttctaccatttaatctattttatccttaaaacact

SEQ ID NO: 116813 - DNA, 1324 bp, Cannabis sativa
tttatttctattaatagttttatctattttaggagtatagagaataacaactacttgtatacaattaaaactttataccttataataatatttaatgatatatttattttaaaaaataatatcaatattttataaaaaaattattaatttttaatttaaattattatttgttttggtggaaaacagtcacaatttctttttgtgagctctcccttttcccagttcctaatctgcctcctttacgtccttttctcatttatttatatggtacgtctttcttttgcatggatgatctatcatcctcctattctattgttgacacgtattctctctcttttattctttttgctcctgccacgtgtccgtattctaatagataattttagtgctacacgtgcctgtgtttttaatgggttttatggctattattttccctaaatccgatggtgtcgtatccgtcagcatcgcacccttgagagtatcaatttttcactttgtgcccaagaccttctttttctgttggagctcttgtctgaagagatccgagttttcgtccgtcgggggtctttgtctcaatagtagtgttacctcgatgtcctccctttgttgtgtttcaggtacttcctccgtcggcaagttacctgggtgccttattgggttcccgtttgtagttttacttacagttgatctttaatctgtcggttatctattccgtcccgttctttcttctgcttccgtcagtgcttttcttagttgttcttgtcgtttatcgtttcctttcttttttttgttcgtagcgcccccttaaggatcaataactggaccgcaccgggttgggccgccttctatatctttgggcctggatgcattcatcttttgtgggccttttagcgttgtcattttattaggccttttatttctaagtttgatttttaccccccaaacattattattttttaaaaaattagtttaattttttttatataggtatttattttcaaaaaaaaaaaaaaattatttaccaactttgctatcaatatatatagtgttaaaattcgttttgtaaaacagtcagcaaaccgactaacacataccgttgttaggctagctcgagtctaatgtgattgtagcatttatgagtctaacgctacaactactatgttggatatcttatattcggaatgttaaatttaataaaatttctatttcttccaaaaaaaaaatttacttcctaataatattttcataaaattaatgtaaaaaactaaaagttcaaaataacttttaaagatttattttgatgagattttacattagatatata

SEQ ID NO: 116814 - DNA, 539 bp, Cannabis sativa
cccttttaagggggtgcattgtagaatcaccctatttcttttattattttttgtgtatttgtaaaataattctcattataatttttccaccgtgttcatagatatttattaggtaggcgctgttaggatatcatgtcatcactcatcatattaattgtatccttttttttatctacgcataattttgcttagcgttaagtttttgaatgtagaaaagttgcacatttttgcgtacgtgcgcatataaattaatatcaatcatatgtactggtcaatttaatatataatatcaatacgtacacgtaataacaaataatcgttgcttattatatctttttttttcttttttggaaacagtagcttgctatatctatttagcttcattaaaatttctttccgtccataaatgatcacattatattataaggtgatcaataacttttgaccaaaaaaatgaaattaataggcgataattaagctacgccgtattatatcgtattatactgtattgtattatattatattaaattatattttat

SEQ ID NO: 116815 - DNA, 1115 bp, Cannabis sativa
aaaacaaattgaatgctcaataaaatgcacattaattaaaaaatattttgacaactaaattgtcaaaaaaggacctaacaaagagcgactacatcaactcctcattggatgaatccaccatcgggtaggctgaaactcaatattgatgctaccgttaactcaatgacacacacctctggctctggtgcagtattacgaaactgtagtggtgagatcattgctgctatggcgaagccttttcttggttctttttgttcagaggtcatggaagcaatggctttgatgtatagcctgcaatggcttaaagatttttagttacctattcactatattgagacagattctcttatggtggtgaaaggattacagtctaatcaagttattgttatttattttcattgtctgttagtggatatttctcttttattgtccaatttccttagagtttaggtctcttatgtctaataatactacccatttgttagctaagcacgctctcacgatggacactgattgtacttggttagaggaaatctcttctcctattgtattataatcttcaccttttaatataatagcattttatcttaaaaacaataatgtcaaaaataatatcaaaaaatattattgaacccatccttctaaaattctcaccaactaatttataaataaaaactacaaatgcctaattgggcgtgttggaatacatttggtgggttaacattgattttggcaactgtaataattacgtcacaaaaattttgaacactgacatatccacatatttcatttcttttgctaaataaaatcatgcaagtaaacaagaaaagaataatggttctcattacccattctcatttcttaataccataataagctaacacaccattaatatcacaaagatatgtaatcccgtggaaatctattacatatgagatgaattacacccccaccaaatagtgtgtgaatattgtcatgtaaaatctaatttattatgatagagttacatttttgatctgataagagtgtgtttggaagtaactgtgtaattactagggtagtaattacacagtttagtaattacattatattttaaaatgcaaggtgtgtttgga

SEQ ID NO: 116816 - DNA, 1752 bp, Cannabis sativa
tgactgattattagtatatttaaattaatctttttcaaaaaatatataaattcatgatgtggactaatcagggattgtcacgtgttaatttacttaatatttaataaccagatacttacagagttctaaaaatataacttaagtattattgctgtcaaaaattaaatttaagtatttatttacaactaagagttaaacttaagtatttataccgtaatttactctaattgaattattattgtaaagcactagcatttgtggtgactattagtaaccctaataattttttttttttagtgaaaagtagtattataatagcttttttattgttgtgagtaatattataatagtgattaaattaaattacttaaaattttatttggtgtcttttagtatatgcattttaatttagtaattagtataaaaaaccattaactactaataaaattacaagatagtgtaatcttatttggttaagtttgagtttttgcttatagcttgaggcacaaaataagtaaaaattgaactttatttttttttatttggattatgtaaagatgtttttaataaaaggtcatttataatgtgtttgaatattattttgaaaaaatattttatgaataaattataaaaattattctaatttaaaaaatagatttttaaaatttatattagaaaaaattacaaattttaccttcttacaaaataactttttattttattttttagaaaagatagagattacttgtcttaaattgacccactcaaatttattgagaaacctcatttgtggcaaagaaaaatggtagaacactctcaaaagaacttttgtaatcgtagaagctaaaaaaaaaagaacttaaataagcttagccaaatggttttatagatagtcttaaatatcactatgtttaataataatactccttttagaaaattgttaaaatgtatctgttaatatttaacgccatctaaaatatcatagtataatttaataccatgtgttaaacacttaatctaataattattataaaaatttactaattactcctaaggtgcctcttgacgttacacctaattactatgcttaaaaatattactaaagtctactagtagtacctgtttgttatgtgtatttttagaggtgacatgtgtatttttaaggtcccaaaatcaatcaagatgggcctatttacatgcctaattaagccagtgaatcagcccacgacgaagcccaaccatggttctgggtctaattgcaggtcaactctaatatatataaaataaggcctttttggtctcagtagggcgatccgtctagaaaagaaaagacttaatagaacgtatctgaatgccctcacggggtaatccaaaacaggcaatcaacactgactaggtgctatcctaagtggcatccttctaccactaaattccatagaatcagaggtttgtcccctttatcagacttggaaaaggtgcacatcacataaagctacatacattttgtccaatatccattaccctcacatttacaatacattgtctgcagcgcatgcccacctgttaccatcaaatggtactactatgtacggacgacgattatctcttaaattagtcctctcctattcggctgaaagacaatattataaggaaaatctgattttatatacttaaaaaactaaaaaaatttattcttaaaccaaaaccttttaaactaaaaaaactatgactttttttttcaaaaccccaaaa

SEQ ID NO: 116817 - DNA, 1218 bp, Cannabis sativa
tttgtttctttctagttgtaagaattggcctaactacttcccatatgtacaattaattattacaactacttacgtcaaattcccaattatatttatatatgtgtcgaagtcagacttggactcataattaaatacattactaaataaaccattgattagtccttgtacatatactattaaccatacatgcatgctttgatgattaggccttattagtccaacaatttctgttacatcgatttctaattaaacacgttattggtactaacaccacaaattaatcttaagagagaaagaaaaaacaaagtactcaacatataaatagaaaacacagtacagaataattagaaaaaatgcaaaattttattaattacatcgtgacaacattactgtaattaaaattagataataaaaagaaaaggtgcaggcgtggttgtagcactttttagtaaatacaattaattaaaaataataaaggtgtgagctagcaatgtaaatgtatagtgtaattaatttcctatacatcctatctatgtatgaataactaacttcttcgtttctcatatgatagggtatatatggatttcctacctcatatatatactattcttaatgcatctaattttcattactattttgaagaagaagaagaaaacagcagctttgcctaaaatcaaaatttcactactataaaaaggttttttagagacggtttttcggccttttagagatggttttggagaaatttacaatcgttgtcgttctagaaatcgctaaaagggtgcgagttaaccgaaggcaataaggacccttatggtggcggttattatgaaacagttaactgacattataggaacctgtttaagcccggagcaactcttatatggcagcggttattatgaaataatatagatgtcatataagggctacacttggcacggagactcgcctgactgagtaatgcaagtgtcttctcgtaaggccaggttgatattgggcttggcctaatttttatcgtttagggcccactaatggactttaagtaattatcttgtgtccacgtgttttttacgggaaacacggataatatatataatatatatttttggtggtttaagtttagatattttcactggagcacttaggattattgtgttagacattttatttgggcttacattatttttattggttttattaaaacttgggttgattgga

SEQ ID NO: 116818 - DNA, 3607 bp, Cannabis sativa
atatatataaattttaaataagaaaattattttaaagttactagtttttaactaaaaattttaagagaaacaactacaccgttagttttcaaaataatttgacaaaaagaaaaagtatttaataaataaataatcttttacaactttttttttatttttttttaatgttatgtgcgtaaatatataaattttctgtattatgtttatcaaataataataattataatattaaattgtccgagatcaaaattctgttgcacctatacaataaaaagggtcatttacaaaaaattataactctactgtaatgccgattaaatttttttattattatattgctataaaaaatgttatatactgtatttatttatatagtcttacaaattcccatatttatttatattctaaacagtatacatatattaaaatatttttctaatatttaatcattttttatataaaaattgttatatattttatttcttagaatcttcatcaattattatttatataaaaaaaatattactaattatatttatattaatataacatgaatttttatcaaaaatttatataatttagtatttaattgaatatattttagttcatttactttttataattattgatttaacaaaagaagaaaaagaaaattaaatacctcctacaaattatttacaatatcaattaaatatataataatttttataattttgtaattagcacataaataacaatgtatattaatataaaataaattaaaattattaagtttaaaataagaaattattttaatagctaagagttttaagaaaaacacctatattatcattaatcttcaaaataattaacaaaaaaaattaagcttttaatataacttttttttattgggaagagtatatattgtagataagtttttacaactttgttattattttgttttaatttaatatatgttttcttaaaaaaaaaaaaattgatcatcaatgactttaaaacatctatacaaggaaaagacaagttgagacgtaaagtagggaagcaatttaggtgacgatacgtagatttgacatgaacacgactcgagattttacgagtttgacacaatgacatgaaaattttgctactcgtatatgtgttttatcaattttttatgttacgggtcttgttcgtgtctatcatctaaattaaattttaaaattcaacataacacgagcatggcataatgacattaaaatcaacaatttagtttacaacctgccaacacaatatacgattttgtgtgttcgatctgacacgaacttattcgagtcgtgttcgtgtctgtgttttctttgtatttttttcgtgtcacgtgttgtgttcgtgtcgggaactttttagtaaatttaagacaacacaacacgaacacgacacaccaacactaattgtcactctatttgtaaagcataacaagcacaagaaagtttaattccaatccaaatagcacatgtaacattgtttacaatgcatgattgactacaatatgtgctacttgattagtattctcacaaataaaattcaaaccaattacgcattcatgtgtaatattgatttattttaatatgaattaaaaaatatttattaatttatttttgagtaatttgtggcgtaaatacctaaatttttaactctttattgcagataaatacctaagtttaattttttacggtaataataccttagttatatttctagaactttcctagttacctggccattaagtgtcaagttaatatccacgtgttataaaatttaatgatctagactaattagggtctgccatgtggccattaacttaacatttaatggtcaggtgcctagggaagttccagaaatttagcttaggtattattactttcaaaaattaaacttgaatatttatctgcaattgaacattaaatttagatatttataccacaaattactcatttattttaatatgagttacttgattatatccttatttaaatatacgttgatgtacacatattaatttatattttttttttatgaattattgaacttattagattttttttatgaaccagaaaattgtattgctcaaaaaataattttataaagaaaataaatctaagaaagacataaaatataatctttaaaaaataaattttaaaaatagttaatcctcaataaacttattaaaataaatattttttgaaagcatcatactaaaacatactaaaaaaaatatctttacaaaaatatgaaaaattaaaaaattaataattaagtgtactaaagaataaaataaaataactattaaaatttagttttttagaaaaagaagaagaagaagaagaagaaaacaatagtgtaaagacaaaaaaagtataaaaatattactagctaggttccactattactatcatatttcttcaactttactaccattaaatcaacaatcaaaggctagaaaagtatccctaccataaagacaaaatcaaagtctctaccatggatatttcctaaaatgttatacttaatgattattgagatatacaaaccatattagttaggtgattctgatccaaacatatataataaaatcataacatctgaactataacttgccaaataagaatctttcttacttaaaagcatcgtgacaagttagaatttaagataagatgaatgaggttccatctcaaaataaattggttatgggatgataacccattcatctctttaacatccctcctcaagatggtagctattttatttgctcaccatcttcgacaattcgatcataagcgtctttttctcggctttttattttggctcactgtcctgaatcacaagtgactttttttactttggctcttggatcaattacttttgaatttttggtagctttttttagcactatttcgatcggtttttttttttttttgtcagatagtcgttagagagtttttttttctctcatactatgttagaatttgggataagatgaatgaatttttatctcaaaaccaattgactataggaggagtagccccattcatcttatatattctattatatttctacacattaataatgtggaactctctaacatatcctaaacgcttacacattaataatcgtgacttatattttatcttgtaaataaatgttacttttcttttttcttaaaaaaaaagacaagtttataaaagtagtaccattacataaacaatatattaattataattttcaaataatagtactgcttcattatatagtaagactattatatttaagaataaattataatttattctatataaatatattttttagataaaaatgatttcaaataacctctaaattgtaatatttatacatttaatgctttaaaattgtaaagaatgtgctaaaagaatcgtacatgagcttctttgcttacaaatatttttatagcaactagtactacattaacttaaaacaagtagcttctccgaacatattttacttaggggtgttcatccgatccaatccgcacttttttggtcaaacagcatccaatccgcactaagtgcggatttcatattttggatccaat

SEQ ID NO: 116819 - DNA, 1681 bp, Cannabis sativa
cccttcccattgatggcgtcgataaccactctcgaatcattctccacaataacaaacttgtagccggaattcaaagtaatcgacacagccaagcagcaagccgcggcttcaccacactagggttttactaaacttttaatttagctttgaattatatttctttttatattcttttaaacgacacaatataatacaaattccctttttttataaacaacaacactatttctattcctattgttcaaactttgatgggaaaagagaaagaaatgtcataatctcattacattagaatggggctacacactaaagagagctcaatcaaatgaaccaccataccattccatggcgcgtgtttacacgctctttaaaatcatgtagtttttatttttctcattatttccaatagattttgattatggtattgatgttaccaaggtgagcaaaactagaaagaaagaaggaaacagtagtagaacccatacttgtccaacattcatagagtttgtagcattgctatctaacaagatttataggtgggctcatttattccataatagtttttttttttttagataaatattccataatagttaatagattaaattacatgagatcttatattagggatttatgaattttttttataaggatgactcttagaggtagtggagaacttaggatttaaagtgagggaaggtaattttttttgataagtgaggggggacaaaaaaaataaacttaaaaagagaaaaaaaaatgcttttaatgggattggaacccttgttctatgctaaatagcttaatattatgtttattagtatcatattttattacaaatatatgttgtaactaactaaattgcatatatatttttttcgattttcattttcaagaggacgactgtcccgcctcggttatatgtgggttcgcccctatctagaaggactctctcttaatgggatagagatttttcgtctaaatagagaacgagatgggaataggtgtacattacaccacatttaatatttttaggtctatttagattcgatctaattatatattggatattaaattttaccatatgatttgatctaattaatttcaaccattcaatcgatccaacattgaatggatgttagattagatcggttttatacattaaatgtgtttcatgtatatctattggtttaattctggtttatctaatattttagacctattatttattggatcagatcagatccatctaatattttagatccagtatctattagagtatattggattcatccactccaaataaaataaaattttaatattaattttcatatatgcatataactttttacatacaacaacataaattctaattgttcattcaaactaaatgaaaatattaagtagttcgattggatgttgaatgtattaattagattttcagacatcacatccaacatccaatccgatccaattgaatatttaaaaatgacattcaatccgatccgatcacaattgtatatccaatgtaggcactcggttgtcatttgattgaatcgatttatgcacattcctagggatagagatcattttttgtcctcaaatgttaaacgagttggggatgggaatgatacttgctccccgtcccgatagagaccctcttaatttattagttatcttt

SEQ ID NO: 116820 - DNA, 2197 bp, Cannabis sativa
caagctattccgacatatataatgagtgtcttccggcttccaaagagcattattaattagggttgtacataaacttttgtaaactgcccaaaccgagtaattcgcccaaaccaaaccgagataactcgacgaaaaatacaaaccgaaaaacccaacaaaaatataacccgtccaatctttatattgggcgggttaaaaataataccaacccgcccaatcaacccgaactaacccgaccaacccgattaagaggatttttttatatatatatatatatatatttataaattttcttttatatatatttatatatcttataatttatatgattatttaaaaatataaagttgaaactaatttatattttttattgtggttaatttgtattttaaattcaatctacatatttgtcttattactacaattaactaaaatataacacttgaatgtaaaataaaaattaaaaaaaatattagtggttggtttggacgggttatcccgaccataccggtcgctattttatttatttatttttttttaattgggtggattgcacttaaatttttataacccgatctttacattaggttgaataaaaggtaccctaaactgactgaacagaccgaggtacacccctaatgcgcacagctatgatgtgaagagcggggagatatcgttcagtccagaggctgtatcctagagtaaggtcaacatgtataataaaaagaacaattatccaaattgaagttgttttgtatgtaactaagcaaaaccattgtttgttgcaattaaactaattaacttgttatgttaagttttatcaatagcaccaaatctgttatttatgctgtataatgacttcagtcaacttagctaaaggagcttagttagtgaatctttagattcatttaaagagagctgaaatacaagagttctaacaaaccaaaaagaagttacaaaactgttgctgacaaacataaaatgtgggaagagaagagccaatgaaacttttcaagcttcctaagttggctgatccatcgtggtgtttcctcgataagacagctccaaacatgggagttcttctagctcccaactatgaagctcattaagaagattctcttcaatttcgggagacaatcaaatgttaaggaacgttaaattttcaaggctaaatttttccaccaatttgatctgcaaattcaaaaataagaaaacaaaagctaaataagaattaaacttagataaatttcccttcagctacatcaaaacaatgagaaatagattgaaaacatgttttacctgaaaaagagaataggactggtttggaattggatcatctcccataaatcataccaaattttctttcaggaatttttgaaaccttggaccaatcagcacctattctttcttcacatcttctcaataaagtattacactcctcaatctcgagtgtcctcaaaacaggaagcttactgatttcttcaggtaattcttccaaaagggggcaaacgtgaatcacaagtttctgaagattttgaagctcgtcgatccactccgggattttcttgataccacagcgccaaacatggagttcttgcaagcttgtcacttctctaagcccattaggaagagtctccaacgttggaagacaatcaaatttcaaaaatattagattcttcatagtatcccaactaattcgatcaactttgcagtccttaatgcctacaattcgcagaatcttcaagttggagagaggaggaagataagttgatgatgatggagctgttgtgttatgcatcatggtctgctcaaacaacttccaacaaattctatcaagaactagaccttctttcagattcgggattcggggcatgtaagtcaatttgggacaatcctcaatgactagtttggtgagagaattgaacgaaggaacctccccaacttcatctttccaccatttctctaacttaggtagttccatgagccagagttcttcaagagttgaaatacatgttgttgaagaagatgaataagcatctgcaatatattccagattggtaatatcatctagcaccaataccttgagactagacaactcaactgctggtagagacttaaaattagcacatcttctcaaggaaagttttaccaactttccaggaaaataagattttggacaaaacagggtggggctctt

SEQ ID NO: 116821 - DNA, 2442 bp, Cannabis sativa
taacacaccatgagaaaatgacactataatcttcatgataatgcttaattaattaagttagaacatcgagagtaacgtattaactaaaagccagagcaaataaactccaatcaagccggcgaggatatccctttcccttcctgaggaattaacattaaattgtgaaacaatggttacaacatataataatacaaatgcttaattaggattattattcaattaaatcaaaacaatcgatatctagttcaaaaaaaaaaaaaatggacaagaaaatagttctagtgactggttgcgctaagggaggaatcggctacgaatactgcaaagcattcgcggaccaaaactgccacgtgtttgctaccgacatcccccaacgcataatcgacatcgtagacctcccaaacgacaccgtcgagacactcgccttggacgtcacgtgcgacgagagcgtgtcctccgccgtcgaaaccattgtctccaaatacggccgaatcgatattctcgtcaacaacgccggaatcggaagcaccggcccactggcggagcttcctctcgagtcaatacgcaaagcttgggaagtcaacgctcttggtcaactccgactaatccagcacgtggtaccgcacatggcgacccgacccggcggaggaacaattgtaaatgtgggtagtgttgtcggtcgggtcccgaccccgtgggccgggtcgtactgcgccagcaaagcaacggttcaggcttttacggaggcgttacgagtggaggtgagaccgtttggtattaaggtggttttggtgattcctggggctgtgagatcgaaccttggaaaggcggctatggagaatttgaaggggattgaatggaagctttataaggggtataaggaagccattgaagagcgagctcgagcttctcaggttgggaaagctactgagggtggggctttcgctaggcacgtggtgaggaaagtgttgaggccaaatccgcccaagcatattgtgtttggccacatgacttgtttgtttgcctttctttcttggtctcctctttgggttagagattctttctttgccaaacgttttaaccttaacaacaagctttaattaattaagtaattttcgaattttgggaataaacttgttcaagatattgctttaatttattcttaatgaattcattaagaattcattagagttgtaattttgagtctcttgagtttgtttctagggttgagatgttaatcttcttgtttattgtttatttttttttttgaaagaaagtcatcaactttattgattgcaatcatttatgattacatgaagcaactaagtagaaacctcattgcttgcaagagtacaatcggcgataaaataggaagctcgagcaaacgagttagcaacactattagcagatcgtttaataaaattaacagaaacatcacacaattgttttaacaactctttacaatccgaaataatactcccaaaataagaaagtaaaggaagattactccgaattgcttgaacaacggatagacaatcggtttcaacaattgttccaatccaacctttcttttttacccagctgagagcctctcgaacacccatggcctctgccaattcaggttgcacgatcccagaacgacagcatgttattgcctccaccaattcccctgttgcacctcttgccacacacacgaagttgtacgattcactgcaattttcgacagcagtgaatccattcactttttgacagcagtgaatcgagaggctctcagctgggtaaaaaagaaaggttggattggaacaattgtattgaaaccgatattgtctatccgttgttcaggcaattcagagtaatcttcctttactttcttattttgggagtattattttagattgtaaagagttgttaaaacattgggtgatgtttgtgttaattttattaaacgatctgctaatagtgttgctcactcgtttgctcgagcttcctattttatcgctgatcgtactcttacaagcaatgatgtttctactgagttgcttcatgtaatcataaataattgcaatcaataaagttgatgactttctttcaaaaaaagaaaaacaataaacaagaagattaacatctcaaccctagaaacaaactcaagagactcaaaattacaactctaactcaaaaatctaagcaaggcaactagaatatactataattacaatatatacaatgagaaaaaataaccagctaatataaaagtggtcttcgcgtctctcatttcttttttgtaaaaaatatatatgtatataagtaatttattaataatagttacaatcttgaagaagattctaagttcaaatctatctcttctcgtataaaaaagaaaagattatacttgttataaatattaataattatgtggatgtccaaatcttttatttattacca

SEQ ID NO: 116822 - DNA, 1331 bp, Cannabis sativa
  modified_base (49)..(56): a, c, t, g, unknown or other
cttatgtgtttaatttcattatttgagagatattcatatttaggatgtnnnnnnnnatacttgttagtaaatcttgatcctagtaacatattcccaacaataataagtgtcaccaaaccctaaagcacttgggccatcgaactcgacaaatatagggccacctgtcaaccttgcatggccataaaaggcaaaactctccccagcttcatggctagatagaaaagcatctcttcctaaatctctcaagatttaggagaagagcaaaatccaatgaagaagtgagagcaacagcaagacaatcaaccaaaaaggtgaattgactacctgcccaatgaaggcatggccctcaagacagcagggggcaatggctgaacgaggtaataaaggtcagtttcaaagcctctaacaatgaggctgagtatgaagctccgatagttagcattatgctagcacacaaagcgtgggctgaatacctagacatacaccataactctcaacctgtcataggttatctcctaggtgaatatgtatctcaatgcaaaaagataatggcctattttgagctaatttcaagactcgttaagttacctcaaaggctgtaccgaaaggcaagtccacaaagacgaagtaacagtcgatgcactcgcttgactagccaacagcgccttgatagccaaggcaaactttgtacccacttagttcatcaaagagctaattaatcatccctatttaaaaagaaaaagacatgttagacagccgtccaacattgatacacctatagtagcatacctccaagcaataatcttgccagaaagtaggggtaagggggattgctgctaggtgtccaatttttgataacgtaatacatagacgtgatatcccaataccccctttaagatgtgttaccaagtaagaagctgaatcactattgataggagtgcgtaaaggctctacaacaatcatgccacggggcaaaggcaattgggtgtagatgggatcgaattgcagcattgacctggcctcttaaaggatggctgacaattgcctcaaaaggctaaccgaccctagaatcaagaatctagccggtcactacgtccactagctggtcgaccatagcctcatccaactggccaggcaatgccccctcaatgtggctggacacttgatctgtaccccagctggcctgctctgccaacagtctactcttttacttttggtctatcatggatcccttgacgaaagaagaaaaaaggaagagaccaagctgttggaatatattttaccaggatcttagatctaagatcggaagagcgtcgtgtagggaaagagtg

SEQ ID NO: 116823 - DNA, 3866 bp, Cannabis sativa
  modified_base (3293)..(3297): a, c, t, g, unknown or other
attattaaaaaaataactgatccataataaccgatccaatccacactattgcggattggattaaattggatccaaaatataaaatccgcacttagtgcggagtaaatgttgcttgactaaaaaagtgcggattggatcggatgaacacccctactataaacaaaatagttcggattaaattaaatgaacacccataagtagaggaacttagacctaaacacttccttcaaatgtagcataacttccttcatagttaaagctcctcttgaatgccctttctttgtaacttcctacgaccatcaccatggccataagcaacttttgcttattggcattctttgaatagccctcttccccaaagcaatttctattattcggtctcacgagggtcaaaagaaaagtagaggttactaacgatctatcgttcatgtactcataaataagaagcatatgttgtccctcattgcagaacccaattagcagtataaattcttggtttgtacaacaagtagacattacatgaactaacttctcaacgatacccagcccagtgatcactgatctctgaagggctagttttgctgcaaaaaagcagatccaaataatatgttgagaaaaagtgtgtgagagaagatacacaattcataaaagagttgcccacatcgaaggaaaatgcatgaagattacacaacctgaaatacagtttgttccccttatccctccttgtaaaaatattgataaacaataaatattctacaataaaaatccataacccactggcactgtcgcattttaactgagttttttccaggttacaaagatatcatatgagtggttacaccgagtttaatttccaaacagcttctttgctacaatctctggccaagtaattttgggcttgagagagaaagacataagttacaatggaagtgagaatactaaaaaataataataataaaaataataataataagcaaagatagacaggaaactagaagttccaagagcacacaaatgcacaaaaagagatggacaaactaacataaacaatgaaggtggcaatagcacgaccagggcacaagagatgcagagagttaggaaaagcctctcagcaagttgctgaactgtacctcctaactttagtcctaatgcagtgaatgcctgagacaatttaaaaccataaatgaagcaaggaaaataataggtatacaaatggaaaagaagttgaacatgtgtgtacaatctcaatctttttaaccacctcttttaacttttcaggattcactaccatcagctcttcaactatgttatactaatcaagatcatgccaacccggtaaaagtccattaccttgacctttaccctcccatctttttattagaccattttcccattgctcttcaaattttgttataagctgtgcaacaaaatgaaattgtaggagaaaaattgaaacatgtgtgttaaacgaaaaagaaataaataaataaataaaattattattatttcattatttcttttaaaaggggaataattggttttaaaataataataataaaaaaataataatcagtcaaattaagagagtcaaattaagagagtctctctactctttaactacccactttcctattttctctcactcattaagttacatgggtggtgaggttgataaaaaaaatatataaaaattaaattaaaaataagctttacaaatatgagtagttgagagcagaaaatggatcaacactttgaaaaaaaagtctgagaaagagagaaaagaaacacggagaaaaaaatacatacgatactttttggcaacaatcaaaaaagcttcaagggtaagtattcataaatgaaatcattcctatttgtttttcttttgatgtatatcttgttcctctcccattcctatttctctctattcatttacggaatgccctcattctataaatgaaattggatgccatcatccatagaatgccctcattccaccaaaatttggatgctctcattcatgaaatgccctcattccaccaaaatttggatgctctcatccatggaatgccctcattctataaaaaattgaatgctctcatccatggaatgttcccattccacaaaaaaaatagatgctctcaactatggaatgcccctattccacaaaaaatagatgttctcatccatgaaatgccctcattccaaaaaaaaaaattgaatatcctcatctccataaagttatcgttctaaaatataacctctaattacgaactagagtacattaatttttacactgcactgaatatatcacttatgaaagttccgagtaaacgaatatatattattggtgtcatttttttagagctttgtgcctaaagaaactttgttgtaatgtgctcctcccaaaagtaaaatacaattaagttatgtgtcaggtataatttatttatacatatatatggaagcacatatatatgaatcacttacatgcgtaaagctcacatgtacgatattaacagtacataaacaaagatgacatatatgtattttatttgtatttcattttcattgattatttaaacaaaaaaaatgatgtagaattggtatacatataaatatgattataccaagatataggctcattaaaattcatatatatatataatgctgaatataaatatatatatataacgtatcgagataaagactcaccaaaattcatataaatatatataggatgctcaatataaatatatacacgtaaatgtaacgtacctgtattatattgacggagtgagacacaaaaattaaaaattgaggaatataccaaaagggccttcgggtccaaagtaaattaaaacttgcttttcacttaaaaatatctaaataacatatacgtatatatatattgtgcatacagtgtaaaagtcaaatgggtatatataatacactgttttccagttatataattcaattttaaataggaattgaattataaaataaacatcctagatactatctctaattttaattgaataatataaattaaatttgagaaaatatttaacaaaagataaattattattcctcaagtttcggaataaataattaaaatatcagccaaataatacttttatttataaaagataatagaaagatcccaaaattcaattttatcacaaaaaaagtggtaaaattccaaagccatacaaaatgacacaaaattcccaaatgagctcactaaaatcaatcttggaatattaaagaggtcattcacctcacaaaatttcaannnnntcattaacctcacaaaaatctcaaaaatggtaattgtacctaaaaatttaatagtgcactaaaattcaaagtcataataaattaaatggcattccaaaaaagagaggtcattcacctcataaaaaaattaaaatcgaaactacgtttgacttgattcctataaaaggatatgtgtaggtaacttagttgctaagactaagtgcagtcgccgataccgcaaaatggtataaaatataaatctcaaaattccataaaaggtcatacacctaggaatttttccaaattttcaaatagccaaggattgctgaaagtggtcatctaccggaatctttatattcaaattctaaaatactgtattctgaactagaagtgacttgatccttcacaaagaatgtatgtaggcagctcggttaattaaattgattgaactcaactgcaattccaaattcaccttatattttccccaaactatttcaaatcatttaatatcatcgtaattggaatcaaagggtacttcctttaaacaaaaagattgtaattaaaatattatttttataatcttagatggg

SEQ ID NO: 116824 - DNA, 1699 bp, Cannabis sativa
ttatattatttgtactccaattctaaaaaatgaaacaaaattaaaataaattaagtatttttaattaagataattttacaattaaaactataaaaataaaaaattaaattaattttatgtacaccattaaaggcttaaaatatataaatttgagccttagtcacatattcattggggaaagggtcgaaagattttacttgagggatattgtctaagaattcatattcagagatattgttgtaagagctacaagaaaggaacctctctccttgttcttgagttaatacaaataacgaggattaggctattaccgaaatgatctgggctgaacctctataaaattcttgtgttttcatgttgctttattatatttcaatcgttataaactacttgtcgcttactaaactagactcaatggctaaaagcgaggtcaacaggatctaatggagaaacatcgtgtgtagggctgcttacttctttccaatggtgattccttgattgattccaaggctgagaacaaaacattctagaatttggtcaactccaaaactccgcatgccatttcccaaagatgcttcaattatatctttggggtaatttttttttcttgtatctctctggttgacattcttttattcatcatcacctgactttgtctttttgtttcaagcttgtgttagttatgcttacaccattgataacgaacacaagaaagtgattaagcttgctagaaagctcaccgctgcagaggagtgtgctgtcactgtagaagattaagggacttctttgaggagagcattgattttctaaataaggagatggtcaatcttcaagaagtggctaatggtgccaatgctcaggagaacatcttaaaaaagagcttggctgttgcttgcaaggaaactttagatgttgaacaatcttctcgtctgtcactttatgaagagacctttgttgttgcttagtttaaagatcaagtcaacatccccagagagcaagtgactaaacttgaagagaaagttgctactgatgtcaccttttatgatggcttatgctttgatgccatctacaatgcttagtcatctaatggaggatcacaaccatttgattggtcgactttccctatgagtagcattttagtgaacctgttctccaaagaatagaatttaacttgaatggctgtgagccagtggttgaataagctacaagagttgaaggctatgaccccgagcataccgactttcctccttctacatttaatgcgctagttgcagagaatgaggtacaagatgaagttgttcttgacataataagcttttaagatgttgtcttagtccattcttcttttttgtttttagattttagctttaatgacttagttggtcatcccgagcaaccttttaatgtgaataagccttagtaaaatgttatcagaattgtttgaattaaattagaagttactccaacttaataaaaactattattccaatgtttgcctttttgattttactttatttgtttccacttcactgtttaacacttgcatagtacaccatgtcttaagaaactcaatcagtgcgagtgatgtcactattctgacagttatctttaccatgagagtacttacacagatgttcaaaactttttttgaatgctcatgttgttgttggaaattataccaggatcttagatctactca

SEQ ID NO: 116825 - DNA, 1953 bp, Cannabis sativa
acttttagactgttacttatgaattcgtttgtccgaaattcggtttctttttatattttcatagataaaattaaatgttctaatagttgtggtgtgagataatagtaacctgttgatgattgcacatatgcttgtagctagttcaaccgtgtggtttcgaaatttgtaaaattaaaagctgattgtggatttatgatgtagcccagcacttgaaggagttagatgatctcagatcaaagctcacagacactcaagcaactgcggatgctagtgctgcatcagctcaatctgcacaaatgcagtgctcatcacttcttaaggagctagagaagaagaatctttcattaaaagagcacgagaatcgtgtaaccaggctaggggagcaagtagatattctacaaaaggaacttaaagctcgggaatcttcccaaaatcagctgcgagatgaagttatgagggtcgaacgtgatataatggaagctctttccaaaactgcgtcgaacaaggaatgtgaactgaggaagatattagatgaggtctctcctaagaacatcgagaacattaataggctgttagttgctaaggatgaagaaatagctagactgagagaggaaatcaggataatgtctgatcactggaagctcaagactaaggatttggaagcacaggtaacaacagttcactcaatttgtcattaaggttctcttgtcaactgtttatttaccctttttccgattttatctaaaaacagttagagaagcaacgtcgaaccgatcaggaattgaagaagagcgtgttgaagttggaattctgtctccaggaagctaaatctcagacacgcaaactccgaagggtaatcatgccatagatctcaattctcaagacttttctatatgcaaattggttaaatgttgattgagatatttccatttaacatcattgtttcaaagttttaatattttgcattattgtaacagatgggagagcgaagagacaaagctttggaagaactcagagaccaattagctgtgaaacaagttgaagcttcaagttcccaaaagcaaaatttctgggaaagttctggtttcaagattgttgtttccatgtcgatgttggtattggtagttttctcgaagcgatagaaacaaacaagcaaacaaatcggtttttctcgccttgaggaaaaaccgaaacagtcactgtataaaatcatctttaaaatcctttagttctagtcttataggagtagtttaatttaaggaggaggcaattttgcttgtagagtttatattttgtgcataattttggtagttaccatgttgagcattcaactttcaatttcaataaatgaaattgtcatttcataacttcttattaaaagtcaaaagtttggtatagttaactagttttaaatttagataattcagctgttcaagtgggtggcatccaatgcatggtgtagataccaattaggtggctttctcacataataatatgcttagagaatatctctaccaataccatattttcttattgaggaccactaccgacactaatatcttattcaaatttgatatctctatcatttcttacataaaaaaatctagttgttatttgatatcttaacaaacaagattctttattaacgaccatgtacatagtacaagttaaacatagttgaagtttgagaaacttggtagcactaaattattggatatccattcctttatgagcatgggctggtttttattttttctactctctttttctcttcttttccttttacttgttctttatctttttcattaaagaaaaaaaaattcagatatgcaaatggaatattatctaaagtgacatgtatgaaattagataccaatatgatgataatattcatatgatgttgttgagaatcatggggttccaactcaaaaccaattggcaatgagtggagta

SEQ ID NO: 116826 - DNA, 687 bp, Cannabis sativa
caatataacttagtccaagtgtattcttagataaagattgttctatatatgtttgggtgggtaatatatatctatatgtatatgtatgtaatagaatatagatagatatgggtgttttgatatacttggtaccaccacatgtgggcatcacatcacatgcatctggattggccaatggatttgcagacattgggttcggttgtgaagtaataataaaccaattacgttaattatacataagaaagaaagctatttttttattagagcattcttattctgtactaatagtattaatacatttgattaaacatattttttaaatattaaattatataaaattggatatttaacagcactaagagttatattaacacgtaagaagatatttattattagtgcttaatatccttttcaatatcatattattattaacagtgatggactcctaattgagaagccgtataattttttaatttagaagataaggataaaagtaaatctaaaatgaaaaaaaatattcttagtaagaattaaatcttgacttttatcctatgaagttaatattatacctataaaattaatattataattaattaaaatggcatatatatataatatagggcaagactatggtaggacttagcataagttccctaccggtagggaagtttttttgaccattgattt

SEQ ID NO: 116827 - DNA, 703 bp, Cannabis sativa
accctccaaacaaacaaggtaatgtttcacattaccattcctttactaggattaacctattccaaacagccccttagtaataactatctattttgtatatccaaaagaaagtttaattgaattttcgttgattttcttatattcatattttcttattattttattacaattaataaaattacaattatttcttttttatatacatagaacaattatttttttgaattgtatggcattttcaacaatttaatttattatcattttacattttatgttaaaatatacgtacaatacatcaaataaaattatatattatatataaattaaaatgacttaatgtgcgtatgtaattatttatttttttttttttgaaaaaaaggtgtgtgtaatattttagcacaaattatatgtatatttttactaaaaaaaagtgcttgagtataatttatactttaaggtcagattgaatggtagaatttaataattcttataaagtaatttcattaggaaactggaaaaaaaagaatgactatttaatatggttacatttttattgtatttatatggttatattttttttttttttggtatgttatatcatgttacgaataggtaaaaattttatttttagaattaattaaatataattaactattttttaagtaattaaataaatatttaacaagactttttttagcaatta

SEQ ID NO: 116828 - DNA, 2669 bp, Cannabis sativa
ttagtgataatgaatgttattcttaatttatattaaattatttctatttttctatttgaatgctatgtattatgaatttttgttaggtgtacaagtaattaaggttttacattgttctattatcatcttagaatcacttcttacctaatagtttaggattctaagtagagtgataatttgcagttaatagtaatgtcaaaggtattatcgattgtgataaaaaataggacataggttaaatgaattatatgcttcattgatttgttacctagattaacttatctctataagaaactaatatttttcctaagttaaatagattgcatgtttcgtggatctattgcttagtaaaaagatttaattattgagcgcttcgccttgattaattgcaatagggagactggaaaaattgtctgcttcttcattttctacggggttcatagtttattatagatttgaatattttttattattattgatcttgaatgattgttgagggtagagattgactcttaactatttcttaatagtgtattatctatttttatttgctttctagtttatattatttactttatattaaaaaccaattttttaattcttatttctaattcttgaataataaattgatagtaggttccgtgggttcgacctgtaattattatatactgaagtaactagtagtattgaaataataaaaaatagtaaatttcttgtggtaaatgacacgcatcaataagctgaaaaataaaatagaccagtgagtgctgaagtctacctgctgaaatgtacatgtggcccgactgtggagctatcaatgtctttcagatcgagtggttttatttaaagttcaattactcaaacttttaggttcaccctgaataataattttgggacatgtaatttttaatgattttaagtatatgcatacttcaaaaaaagtttaaatttatatggagttttagatacttatctttgaatttatgtttaaaaagatttttttatgtctatgagtttttggtacgttacacgattatcatgtcagtgtaaaccctgtgtactgataaatctcaagactaaatagtttgaagcatataatcacaattattttatactgtgatgacatcactataattgtgaataaatatatgttcaatatttaatagaacttatatattaaacatataatcatgattaaacatgtgaacaaagcatatgacaagttcaagatatgatttttgatcttcattgatagtaaataagatcataaaacaccaacaaactctcacttgtactaatacaaaactaaaagtacaattcaattaatctcatgttcttgatgtcctgatcaaatgtaacatatgacattatctttgtaatagaatttgataggttgtctttagtatcaaccttctccaccattacattcactgtagtcacaaattctataattttttagaactcctatctatatgtttactccacctacggttctggattctttaaatttgacaactacatatgtgtatcacgaagtaacacttgcagttaattcattgatggtcatgtattcttcgtctgtcttgggaggcttaatcgaaagggaaagagttgttggagcatcaacattttagaaactacccccttagctggggcttcgagagtatgcttgggttcgtaggcctcgattcctggaaacttgtggatctcgactccttctaggtccaagagtttctcttttctaacctgaccttctcggcattctccctttctaccttctcctttcagccctctgcggcaaggctatgctagatgttggggagtcagtttttggacagctttattcttggccttcttccctggcatatcgatgttttttaacctctgaagcgtcgatttagaaacaaccccaaagaggttgtttgtgttttttcttttctttattttttttttttattttctaagtgttagtttttcttttagtgttgctctactaaccaacaccattgagtattcattggtgtcagtttataaccgagacttaagaaatatgttgatcattggtgtcgaatttttaaattaagtgaccctcgaaccgagaccaaaaataacttttgtagtagtaattttattttgaaataggaagatgagaaaaaaattaataattttttttatgtattttaaattttatttcattctattctattcttatttttatttcatatttcccatctcattcttattattatattcttatttcttctaactaaatacttaaaacaagcatatggtgaagacaatcggaaatattatcatcggctaccatattggcggaagacctttatcgccaaagccaagaagccaaaggtatcaatgatcctctaatgcgagaagcaattctaaaacacttttaatacatacggtcctccatgtcaatacatgtagcttcagtcaaaatgcagacaactcaaaatttcaatttacacaaatatcattggaccaaaaaaacataaaagcaaagtatgaacccggttatacagtatgatggattttaaacctcattagcaacgagaaatttgattttttatgtgttacatttggttaaaaaaaaattcttaaacaataataactaatatttgtaggatatgacaacttttatgatatcccta

SEQ ID NO: 116829 - DNA, 2600 bp, Cannabis sativa
  modified_base (1862)..(1872): a, c, t, g, unknown or other
taaattctcaataattaccctaagtaagatcataatcttacttcattaccaacataattagatatttaataaaatatgcctatttaaatattatttattttctgggatattacaatgtgagtatcaaggagattctagtgcacactaccaacgagtgtgactacttgaatgatgaaattgaataattagtcagagatagacacctaggctaatggatttgaatttttgtcatttatcctagacaagtaatcattcacgggcaactgatcgttctgataaagcagggaactataaatcctcctttctacaaatttaaaatattatattttacctcaaatcacttcatatttattgtaaggacacatgtaattttatttcatatgttaattttaccacctttctacatatttaaaataacaatttaatttacaaatttcaaaattttattttaattataatagaaatattaaaatattatattttacatcaaatcacttcatttgtaaattaaaatttacaaaataaaggtcaaactcgcatgaagcacaactttgttacctagttgatttgtaagagaagaatagatagtagtggtccttgaatttctaaattccaaaatattagcaatcttttaatataactaaatacaatgttagtacaaaaaattgaaaaatcatatattttctttacttttttctttcttctcttattaaattgttgtgttttaatttttcttctttcagtatatacgtttatcaattaataaaaataataataagtttgttataataataataataacaataataattgctacaaaacatctctcctatacacgttactcaattcataatgataataatagtatataataatgatcacaaatgttacaatacctctataataaaaggtaaataaatgagaaattaataaaattaaaataaataagaaactatataaagttaacctcacctaaaactaattaaatgtgatgaattgaataaaaattaatttttttttttttttttttttgaaaaagaataaaaagtcaattaaacctaatatttaattttttgtaaggattaaacctcaaaaatgaaataagtaaaaagtaggaaaaaaagttgaaataggttgctattgtgctttcttttattgaaagaaaattaaaatttatacataaaagtatttaaagataataaaagtaataatttttaatatattaaaataacattatttttggtgagtttttcttttatattaagattaaatggtgcataatacaataaatagatattttaaatatttttaagagttgtgatttaaaaaagaaatcataaattacaatgtaacaacatttgaagtgaaaagaaaattacttttgtcaaatatttatttgatagctagcgatcaattataaaataaacaaactaatctaattactacaaacttagtcattttataacaaaaggaggaagaataaaatgaaatattatatgctaatatgacaattaagaaaattagcaccagaaataagagagtaaatcatagaagaggactaactagcactagctcctaaagtctctcactaaaataaaatttaccaataaaaaaagaatctactaattattagggtaaatagcggcataagtacccaaaattttgagtttgtaagcggtacaaactcaatgagtttttttagtggcataagtactcaatgtttgtaaaactgtaatttttttctattttcgtcagtacaggctccgttttaaagtttttttaaaaaaaaagatttagaagtaattgatactacatattttttgtccaaaccaaataatctaaaatttaggtcttatatgtgnnnnnnnnnnnacaataacagagtctgtactgataaaacgggaagaaaattacagttttataaacattgggtacttatgccactaaaaaaaatcattggatttatgccgcttacaaacctaaaactttgggtacttatgtcactatttaccctaattattataatatgaatatataatgacccaattaatatttaaactaaatagacctaaactaactagtgtaccattacaaaaaatgtattgattaatagggacttttacatagtatactgtattttgacattttattacttttatactgccatatggtagaaattacaaaactactgtacatttatactgtcttttatactgccatactgccacttgtcactttgcatgcctttctctattttttttaattaattaattttttaaaaaaattgttgatgtgatgctcatggtcaaatcatggcagctcacattttttaaaaaaaaatgacaaataacaaaaattatatattatatttgttttataattacacgttatcccacatttcatcatttcaatttttttcatcatcttaagctattcatctcccgcacatgctcatcttcttcttcatgctcttctttatttttatttttatttttttgtttacaaatccatacaattgtgcttgaactttaaccctcaagatgtgcttgaagagagagagagcgagagagagagaaaccagtagatagagagcctatcct

SEQ ID NO: 116830 - DNA, 792 bp, Cannabis sativa
  modified_base (761)..(762): a, c, t, g, unknown or other
gtgtcctggcctggttcatcttgttcagcattttttggattttgagtagttcctagaatgacaagtcttaggtcaaagctaaaaatgtttcctacggggtaagtactagtgttatttcctgagacactaaggttagtacaaacacatggaaagataatttcattaaaatcacatatctattatttatagtctttaaacatggattctctcttacccatatcttgtagctcttagttccttcaggataacccaagaaaacacattttaaagctcaacttaccaatactttgatgtgcataagcaacacatccaaagactctcagatgtgacaagtctggtgttttaccagactacctctcttctagagttttgaactccataacacttgatggaaatctgttgatcaattaagctgctgtaagcgcaacctttctcgaaaatccagtagctagtccagattgaaacaacatgcatcttgctttgtttaggataattcaattcattatttttgccacaccattctgttgtggagttagtctgactattctgtgtctttgaatacattcccttctgtaacacgtgtcaaacatatcattgaaaaactctaggccattaccagtccttagagtcttgacctttttattagttaggttttccaaccctaaaacttagaaaatgcatcattttttatgttttaaaagaaccaaaccttcctagagtaatcatcaactatagagtaaaatattgttgggttttatgcnntaaataaaactcatttcaatagaatcagat

SEQ ID NO: 116831 - DNA, 2064 bp, Cannabis sativa
tagttatcgagccaactaatgttcatgttcaatcgccgatcccaactgcagagagcactgaaaagtaggtcttaggatcagttcacccgagattgtctttgtgaagccctcctgtcctttaccgcgagatgcgggaattacttgctcgtgggactgctcacagtatgccacctctagttggcatcatttcaaattctgccaatcgggtgattgggatttgatcaataatggtaactttgaggagttgtttgagagaagcttgaacctctatttctcagttagttcctttcttccattcctattttatattatattcttatcattcttctaatttactttggctgtaggcatctttgatgtctcacgtggcacaccaaaggggccttcaaaagatcaaacaattggaatctgagcttcgtagatccatcgaacaatgagaggttatttcaaagtaatggaatgatgcccagactgagaatactagattgatgaaagaggccgaggagtaagagagagaccacaaggctgaccttgaaggtgcttaaaaagaagctgaggatcattgcgaagcccaccaaaaaattcaggaagatcgtaatgaagccaataaaaggcttgagggtgccgaggccaacgccaaagaatggtgcaatatagttacaaaatgctttatcacaaagcttggctggcttatcccaatatagatttaagcatcttggagagtggtgctgcagagatgctggcttattgcgagcagaccaagagagatgaagttgtggatgccaaggaggaagaagaagaagagaaactatccaagtctccaacaatgtagacatggattttacttttatatatttttttatttagcaatgtggccatttggtcgagacaatggttgtcattagtggcattttgtagaaacttttgcattgttggatgggcaactttgcttatttacatttttactttttattccttgaatctcgctttttgaggtagatatgtttatttatttctttttatttcacaacttaatcatttctttcttgacttagattaagatactttgagttgaatgcatctccaatctcattttctttgagatacacaagtagttattaatctaccatgtcttttgcgagcagttctaatctgctacatttttagaacaaacttaaaatacttgaaataattcaccttaggaactattttgaatatcgtttgattgctaatatgaatagttagtcctttattcatattatttttaaaggcacatttgtttctcgtttataatacatgctagaacaatgcgagtcgttaagtattcaactcgcatataggttattgaagttttatgagttaatctcacttacagctactattttgattttccttcccaaagaaaatgttttttcaatttcttgactttatactgtgaaaagacaattttaatcaaaaaattctaattttttgggtttgcaatatatatttcaaggtggaatcaagttattatacacatatatgaccccaagtaattttaaagaaaataactttataactactggcataaactctaactttatttataataagaactaatttttacagagataaatacaatatttacatgttaaatttacttgtaataaggtcgtaaatgttcactattttagtggttctttattagcgagccgttaagctaagctaatttgtaaacaccggttcccacgataacctcaataacataaggaccttcctagttcaggttaaacagtccactagctggaactcgtgtatttggaaatacacgtcttaacacaaatctctaactttaatacgtcttttttggacacttttgttaaaatagctagtgattcaatgttgataagctgcattggttatttttgactcattgcgtctttcttcaagtaggtccaaggacaaattctctaacttattaattcctccttgcaccactagagattttgaatcacactcttaattatataaaacactctatatgtaccaagatatagatacgttatgaattatccattgttacaa

SEQ ID NO: 116832 - DNA, 1377 bp, Cannabis sativa
agtatgtgactattgactggtttgagctgttatttctgatcatttggggtgccccacttcatgtaatgagcctaactctttggtgttgcgaagtgccttcggctggactttgaatgggcttgattctctcactgttgttgggtgactaaagctatccctcaaaagtgtactttctattttctttttttttttaaaagttttagttgttaggatattttgctaaatcaaaatatcaatttaatgtaatatgtcgtggtaaatcaaaatcatatttatgtacttggtggatatttatattttatatagctatgcctctctatgttgctattattagcctgttaatcaattatcatcaaagaaatgataaaaacaaaagcatataaaacaagagaaaatgcaacattggttttcactgcaagcattagaatttatgtaacaacaaagacaagaacaagtaggtaaataagagcaatgttttgaacaaaagcttttatgtatactactaaataaatagctaatcgcacaaatatattccaatcttgttattgtaatctattatggtggtgtttggtgggaaggaatgaaaatataagagggaataggaataagaatggaacaaaataaaatttaaaatgcataaaaaaagttataaaaaaattattaaattttttctaattatttattggaattgtctttctatttcaaaataaaatagttattctaccagaataatagaaaggttattctaatagaatgacattccaatactttaatatgcaagcaaataaaataatagaatgaagatagtttattttctatttcattacatttcattatctccaagcaaacgtgacttgtaagttttaagcatctatttcaactcccaatggccttggtaaacggtgcgagtatttctctaaattgtacggaccacatatttcatcaatcaccatctcgagcatctactacctagggtctttgtactaaggggaagtgtttgggatgaaaatagaatagtatatataagaggcttaggtgacattggttagaggtaatgaaatagaatagaatggaaaaaaaaaaaatcattctatcattttgtttggttgcaaattaaagtattgaaatgttattccaataatggaatgacttttctactattttggtggaatgaatgactatttcattttgaaatggaaaaaaagactattccaatgcatgacaagaaaaaattgaataatttttttatgtatttcatattatatttcatttctatttttatttcttatgtttttattctttccaaccaaacgccagctaagaatggaattaaatttaaaatacaaaaaaaaaaaaaaaaaaaaaaaggggacaaaa

SEQ ID NO: 116833 - DNA, 2189 bp, Cannabis sativa
aaagttcagagaacataatttagtacatattaacgttcagccttatatatatttaaaggtagcatatatcttacaaaaggaaaaaaaaaatggtaggtgtaagttgatcatcaattaatgaattaatgtgttacactatagttaattatttatttaataaataagaatatatttttggttggaaactaagatatagtcatagtgacataaatatatatgtatgggttgaaaggtaaacattataatttagagtagtagtactactactggctctgaattcaaaatagctagactactgaaaatgaatgattccaagcactgtcaacaagtttcatctgccttcagtttcaatttattttttatttaatttcctaattaattattatatatataatgctaccctagtccctaactagctacctacttctctcatagcaaatattttttgataggtcaatatataaacccattctggtaaacatataatatgaacaaaaactgcatgtgtaattaagacaatattattataatagtatcattattattatttaaaaattaattgggaattgagtacgttggtcattgtcttgtccatgcacaaaatcatatctcttccaaaaacctatccattgggattcggggattttcctgcctaacacttccaaagcatataaatatataaatatatatatatatatatgggtgctaggtatttctaaggtgtatctatggactatttttgtgttttatgtttttaaatagttataattttaatttttttatatcatatttagttatttaattaaaatataatttaatgtaatgaaaattttaaaataatataatttattttatatgtatgtaaaataaaaaaaaaaatatacatgcaataaattatttaaattttattttaatacgttaaattattaaatgtacagaaagttttctaacgtcaaagatcgaagcaattgtagttgcaagagagagataataatagcaagtattttcatgcttctacaactacgagacgaaagaataatttggttgcaaaacttcgcatgcatgggttgatgatcttatggtttcttacttccacgagctttttttctctccccaaaccaacttgagagaagtcacaagcagcgtacaaattcgtgtatcatcctagcagaatgctgagctgctattaccagtttcagatgaagaatttcgaaaagctttgttccaaatgcatccggataaatcctcagggcctaatggaatgactccgggtttttttcaaaagtgctggccgattgttaaggatgatgtcatcaatatggttaaacagttttttcataatagttctcttcctacagaccttaacaaaaccattttggtcttaatccctaaaaagaagcagcctatggatatgggggatttaagacccattgcgttatgcaatgtgctgtacaagattgtgtccaaagtggttactaatagacttaagagtgttatgccgtctatcatatctgatactcaaagcgcatttttgtaaggatggttgatctcggataacgtcatgattgcttacgagattacgcatcacttaaagaggaaacgaagagggagggatggttatatggcactcaagatagatgttaagaaagcttatgataagcttgagtggggttatctctgggctatgatggtaaggatgggctttgatggtcgctggattaatttagttatgtaatgtgtatgttctgttgcctataccatttcacatggcaggaaggagttggggcccattgttgctcaaagaggattgcgccaaggggatcctttatgaccatatatctgtttattctttgtgcgctaaggtttttctagtttgttgcggagttgtgtataacgtggcttactcacggagtgtaaaattgctcgaggtgcgccggtaatctctcatatgctctttgctgatgacagctacatttactgtaaggcaacagaggaagaagcgtacaatgtgaaggagttgcttcatacttacgaggtggcttcgaggcaaagaattaatttctccaagtcttctgtatttttcagcaataatactggaattgaggtgcgggattccatttgtgctatgttggaaatttatgaggccgatgaaaatggctattacctctgccgtgttcggttgggagaaa

SEQ ID NO: 116834 - DNA, 1341 bp, Cannabis sativa
  modified_base (1192)..(1193): a, c, t, g, unknown or other
gaaattataaagaaaacataaagaatgtttccataaatttgatagcagtttttttctttttcttttttttttttaaaaaaaaaaacaataatgtatctgtaattgatttaaatttcatttttattttttctcctggcagaaaatgaactgtaaagtaaatttttgaattgatcgatttaataaaaaaaaatgatgagaaaataaaatattttagatttatttttctttcctcttaaaatccaagctccataccaatctggtggtatatatatttatttatatataaagtttatattgaagtgagtgagtgagttggatatgatttagatatatgtatggcatatggtaataggatgtgggggggccaaacttgttaagagctatgtatgtatatataggggaaagaaactatggtctttgtcttggggagcactaatatctcaaaggagtcacactcacatcttggggtcacaaatgaaaattttagagtaatttgctttacatcttgcaaacgctggcacccagtcaagtatatagctacatatttatatacccttcttattgtagtaattggtgaagaaaaaaaataatatatggttcttttttttatattttatttattttgaaaaataatttctaaattaattcaagaattaatattgacatccgataaatatagtttttttttaacagtataaaaatattttattaaaaaataatataagaataatacatcatgaaaaaataatggagtacggataaatataatcttgaaagaaatattttatactatttcaatatatatattacaaaaatttatcaacactactattacaaatgataattttgcgtctgttttaaatcgacatatgcatttattgcgttattttaataaccaacgtatattctgttgaaattttatgccttaaataaaatccattttaatataatcttatttgttattaatagaatattagaagtcatttatgtttacatgtaattttttcatgtttatggtttaatatacaatttatgttaagtccaaaacatatagttattaacaattacagtgatatcaacacagtggaagataattgtgattatatgcttcaaaaaataatgtccaatgattcatcggtgtactagatttatactgatgtgatagtcaacgataaagcttacttacaccttnnataagtgttatgttcttttcaggttattggaaaagtatgctggtatcgaatgtatggagtatacatgggactgagatcgatattgatcttggaaaagatattataatcttaccgttgtatctttataagtcaatatcactggttgatc

SEQ ID NO: 116835 - DNA, 1977 bp, Cannabis sativa
  modified_base (1918)..(1946): a, c, t, g, unknown or other
tctggaatctggatgaagatgacgaagacgaataaggtgaaaaagaaaaaagggaaaggaaaaaaaagataaaaaatttatttttctatgatttttaaacaagatattttgttttttaaaattattttaattaaaatgtaatttggaccaataaaattttaacatgtgccatttttaaatgagtaacggctcagttaaaaaaaaggactaatggacttacaaaaaatatcaccttgaggattattatcgctatttttgacgtttgggacttatctgcatgaaattgaactttacagggacttttccacaaattcccctgtatttaaattacaaaaacggataagtaatatctctaaagaatatacaaaaaatttgaggttgaatctctatcttaaggggttgttggagttgtcccgtaactgaaattaagttatgaactgtttagacagcttgttgtggaccccaccattcatttagacccttttggatgcaatttgcacgtgctggccgaccagccttatccttagggattggccagcgcatggatcctcattggtcgggcaaggtgtggtctggccaggattccttggctgtccatttcctcctagcttgatcttggttgattgcttggaacccttggcaattggcatgtggcaaggtgacttcattcacctattaacaagttgtattccatgtggcctcagttttgtctatgtggacatgccacgtcaagtgggcaaaaattaggataatatccgctccccaagtccctatgcggatgtctgtatgtatagggacttatcaattccatccttggctgtaaaaaccataactgaccaactatgcctagtcagatttttaactcttcagtcagatgactcatctttatgataaaaaataactttattgccaatcattatgaggatttgcattatggcttcatattttcccacttgcgaactattggactccttctcctttgcatgactacttttgaggagaaaataaccacccattaagttttgggaaaaaactccccataacctatataaggttcaatttgtcccatttctacttacttcatttcatcctctctctacaccaaaaatgagttttattaacatttgaaaatgtcatatttagtgacttttattaacatttatggtctattttctctctctccaaacttttacgaatttagggattttcaaattttagatggaaatagagatatatatatacaagtctagatcgagagagagaagagaaaacttaccgtcggagactgacagagaggttggaagagggtgagatgatcacacacagagccaggttgttttcgttcgcctagggttgcttggttctcaattactgtaaccctaaaattgcttaattgaattgcttaaaaattttaatttatttagtaatatttttattttatattgttaaaaaatttttaaaaaaaaaactaacatttgaaaaatgtcattaattttaatgtttagtaacatttttacaaatattattatttatatattttactaacattttctaaatactattaatattaattatttataaatttatgaaatttaaatcaagtgtcaatataacatataattgctaacacttcaaaataaatgttaccaactaaaaatatcatttatcctttctaaggtggcattttgatgaaatgttgctaaattactattattatgatatttttttacaaatgttacaaaataaaatgtcataattctaaattttgttgtagtgtctctctccttcgtacactcagcaaaaaaaaaaaaactttccactttcctctttaaacctgacgccccaagctcccttatttctcgagatttttgattatttttgacgatccaagcattctcctgttggaaattattttacnnnnnnnnnnnnnnnnnnnnnnnnnnnnnttattaacatcctaaataagaactttctaaa

SEQ ID NO: 116836 - DNA, 1119 bp, Cannabis sativa
ccaaattagttaggccggccctgggtggcacctagttttttcagtcagatcacccatacacacgagtgcgattctcgacaactcacctcgatgcacacacatatctcccagttacctcaagcagatcttggcctcgttctccttgtgcgcatacacaaaaaaggtggtcatgtctgctatctttgctctccaggaaatggtaactggctactagtttccaaaaatttcggttaccaattgtaattttatttagttttctatttttaattctgattttaattaaaattaattgtaaattattttcaaaaataatattttggatcaaaaattaagtattatgatctaaaaattactaaaattactacttttggtgttaaaattattataattcaaattaaaaattgtagataccataattatccttatatcataaattataggaatagaaaagtagatatttatgatatattttaattatttaatatttttatctcttatttaatatattaatatctaattttctttatagtcaatttaataattataaatgatgatgagtaagtagagagtttgtgaaattttgaattataattaaaattgtgataatcttaggttgttttagatatttataatatctaattacttaatttaaaattttattaaagatattttatgttacactgtaactcctacatgtgtggttttataaattaatttacgacaataaactaatagtttaggtataaatataatttataaatttttttgctaattaatttgaattataaaatcaggacataatcacttttacaatcacgaattcctttttaaactattacaagatatgccatcacaataatattgtaaaatacacaatcaaattcaaaacatttaaaaatataaatcccagcaacttggccccacttgtcggataagctaatatgtacatttgttggtgaatatctatgactcatggttgttcaaatgtttttacctattacttacaccacatagtactcgttagtcacaaggaacctgtttgaaatattttaccaagatctacatttactaacaagtatgtttcattaacatcctaatatgaattcctaaaacaatgaa

SEQ ID NO: 116837 - DNA, 1696 bp, Cannabis sativa
taacaccctactaggttaggcgtggtatcataatttaaagctaactgtgcaattttttactaatcaacgagtttattggaaaacgtatttaattaaaaaattacttgattaacctttaattaaaataaataaactttatctgctcacactcactgttgctcagcctaagccttacccttacctacacatgtgcacaataattgtgagtctacaaactcaataagaaaagcataatcaaaaaataacttaaaccggatcataatttagcgcccatacacctaatcataaccctatctcgcgtactgagtctagaacattcgtacaactgtactgttgaccataatctcagcctatactcgatactctagtcataccgatgtgatagcgtcaatcagtactttgccaaacatctatccgtcggtattcagtgaaactctatgtacactaatactgctattattatatgtcatctaacaggtattcataaatatgtacgctaaatatataatcatatatgcatattattatactaatcttatctcaattttgaattcaggtgtaccgattaacgtgagtggaactactgctcgacggtttacaggcccctaagttaacatacataaaattgataagcaatacactaaataactttttggggactacttagactaagttttccctatcgataaatagtgtgaccaaaacccaaatatcgagaaaatactaaaaattgggattttaggaacccatttttttgggttttctgcctagaagaacaatagactgttttcccagaaacggtctgtcgtttcttcagcaaaaaatgccaaaatcccaaaactcatccaattcaattccaaactttacccaaagctctaacacctaattagaccataacaaacatattccaactggaaaattcatcatcaagctactaaaactaaaatcaccaataaaaggtcatttttgagcttaaaagctcaatacatgcttaaacacatccatgactaacataatcagttcaaaattatacaaacatcaataaagaaactgtagaagcaagacaatccaccccaatctgaatagcaaccaaaactctaaatttaaagcttaaaacctaactttctaaccatgaacttcaaaggaaacttggaagagatacttacctagaatggacactacagaaactagctaaaagtccttgatttgatctgaattttgatgaaaaccacatggttttcccttggtgttcttggtgaccgacccaaagagagagagaaagggaacctccaattttctagttctttcctaagtgtaataaatgaataatcaacctgattcagcatttaactaatttaattaagcttgagtttaattaaaaactcactaatttaactaaaggcaaaaagggtaaaataacaaatctaccccttgcataagcataaagtaaccttgtaacctagcgatattttggtcaatcctaataaccccaaataatcctgacataccaaatctctatctataatgcttcgctatttctaatgtactaaactataaaaaaagtgactctacatgccatacgtcttattccactatgaccaggcataaaaatatagaaaatataaaatttatatataacataattagcacacctagaattccaatatatctccacaattgcataaataataattaa

SEQ ID NO: 116838 - DNA, 1515 bp, Cannabis sativa
aataataaaatcaataacatttcccataattattccataaaaccctatattcatatcatcacttctacttcttgcacacaacaccatgaccacccattccactaccacactccataccaacaaactcttcaaaaccacccttaccttttccaaacctcccatcaaatcttgccgccacacaatccgttgcaaacaagtttgaagcagtaaattctctctcgccaccaagcactgtcacagccactcccatcttcactcgactcacatagttctttccataagtctgacctaaaacaccattgacatccccactcaaagcataaaacttgaagctcaaatcaagatgggcaaaacagttatcctcagtgatgccatatcgatgaattcgtgactccctctcggtgataggcaccaccgtcgctttgatcttgaaattaccttccacttcaatttctacagaatttgcatcctgagtcctcaacacaattatggaggactcatgagactgccacgcagctccctcgccaacagggagaataacaggctccccatcaaaggcgagggagagacgatccacagtattgctccatgtagaggtcttcttggcgccaatgaagagtttgtggttgtcaaaaaggattccaagcgattgtacccaagtgaagtctctagtcatgctagggtttcgttttccaatgaagtaggcatttatgtgaaggttcgagtcagaaaccaagcaaaagttgtgatctttcttgccatggaagtaaaaggtaattccatcaccaccaatgaagcgaggatcttgacacacagctcctggcctattgcaatctacattttcaagattaattgcaacattcttattaagaacttaattatgtcgctttttataaaaatattttttaattaaggaatttaatttatatattatgaatacaattaacaataaaattttagtaattaaataaatattgtatttagtgtgattaaatttatcaaaataataaatagcaacaatctttttttaaaaaattattaattaagtagtttacgagaaacttacaacaaacagggctacatgtaacacaatccacttcacattggtcacgacaatcaccagggcaactttgttccaagccataacaattagggtaattcttgttcttacatctcgctttctttgctgcggcaccctcccgtgaaggaggtggtagcggtggagtaataggcggtggtgacaaagttggtggcaatgagcatatgggttgacacgtggcacaatcaacggtgcaccactcaggacaagtggccggacaataaagctcattttgacaatatggatagtgtttgtcttgacactttactttgttaggggctcctttaattaaaaccaccatcattgatagaattatcaaaaccctaaataagtttgagctaaccatatttatattattacgttgatgtaatattatatatattgttagagattttataacaatggaagaaaatcaa

SEQ ID NO: 116839 - DNA, 1814 bp, Cannabis sativa
ggatttaggtaaagtaggcatatttttcatagtataaaatttattggttcaaaaaaaaaattttgaaaacttttaagtatagaaaatcaaatttccctttgcaaaaccatgcagagtaatttgtctttagtcattaaacaacacaatatatatatatatatatataaataattgattttaataatgttatgtttgagagaaaagaagaagagatagaaacaaatgaacaagtgattgtcttattcattgagtttgaaattaagagaggtacattatatacaaccgaagcttaactgtcaataatagaaatgtacagcaagctaatctaactctaacaaactataactaaccagctctaacaataattaactattatcacccttaacagcctccttcaaacttaatgtgtgttgagaaacaacattgagttttgttcgtaaatcaggaaacttagagctagaaactggtttagttagacaatctgtgatttgagctgcagctgaaacgtgcttcacttggagttgatgctgcaacagtttgtctctaacaaagtaaagatcaatttttatgtacttggttcgagcatgcaaaactgaattagctgcaagaaaaatcgtgctttgattatcacaccaaacagatggaatgctcgattgctgaatgtgtagttctgttaattgtgtttattcacttaaagtgttggctaagaattcagcttctgtaaatgaccttaagcaacaaggttccccctaagtagatacagtagcctgtggtggaccttctatcatcaaggtctgctgcccaattagcatcacataatgcttcaatagaaaaatcagaggcaactttaaaatcgaggtgccagcagcaatgtacataccttaaaattctcttgactgtcatctaatgtttttgcaaaggtgtttgcataaatggacatatttgttaatacaaaatgctaattctggccttgtaatagtggcatattacagccctcctactatggatagtattacaacactatgaattttagagagtaagtcctataggtattttgtttgagtaaggagctagctagtagtccttgctctgtttttgtaacctggatacttagaaaatagtccaccattcctagattcttgggagcaaaagtattgctctaaccagtgaaattgttgtggtcgaccatctcggggtccatggcacttgcagtggtcgacaatgtgaattataagaagattatttttatttggtgtgatacttgtgatatttacttataaattattagagttattgtaaaaaagaaatactaaaaagtataaatgagttatcatcacataaactatttgatgtaatataaattattgctaactatttataagttaatacatggatttccatagcaatgctcagtatcaaagtgttgaagtatttgtatatatttataaaagaaaattttacaatacacccacctaaaaggttaaaaaaattggataaaaaaaattgtttagatgccaaaagagataaggatgtattaatatactcccttgtagaagtatcttatatatgtatgagcattactataaagtacccatagtatctaacaacacgtacgataaagtatcgttttctaattagttagcgattttttataatatttattaaagtaaaacatgttggacgtgatattaagttgtaccaacagccagtgacggacccagaatttttgatctgtgggggcttaattgttataaaaatatttattatttactttacattaaaattataactattttgtgggggctttttactat

SEQ ID NO: 116840 - DNA, 1741 bp, Cannabis sativa
gtagagtattatatattttttcctcgcctaattttccaattaaaatacatgcaaaacttagtaaattggaagctattttcttctttccatcgaatctgggttctaataattaataaaataataaaaattgttactgtgaatttcttattttaactatttactatttccacatcgtttatgtaaatttttaaaaactttttaagacaacaatatttcaatttaccataaatcaattactatactcttccctcgttcagcacccgtaggtatgaggtcaattttgaatttatgtaccaaacaaaattatagaaatttttgtccaactaaatccccagcagattttcactaatcactgctaaaagagctgatgggatggtcttaggagaagaaacacaaacaaatttgaataagtaatatttaacaaacaaaaaaaaagattgatgagatgatataacatctcaaaaatctactaccacaatctccaatttggatttgattaagaactgaagtcctacatatttatacttaaacaattaaattgatttcttatctttttcttgaggaaataataaaatccaagtgactctgacgttccctgatttcatttccattgatggctgtcaatggcaactaagtcaaaaaaaaaaaaaaaaagagcttattggccacctagaagatcaacttgattattgagcttttaatgacatgaattgaaaggtcaccgagaaataactataagtatcaatcccctctcaaagggaacacaagcaattatcaaagcagcctcatgagaatgatatgtaagatattataacttaaatacattactcaccataatattaaagggacataaaagtaagcaccccatattagagatgctttagttcgaaggcacacattaatcgaaatttcaaagttgtaaacaaagtcataatctttttaatgcattatttcaagaccaaagtcatagttgtcgcacaataattttcctgcaatgcttcactcttatgccacccacaccaccaagtactcactattcacattaatatcaaaagtgttaagactaaaccaaattcatgttctttttttttcacccgtgatttcattcaaagctaaatattacaaacaagacacaacacaaagagatttatcccaaaaaatttattatatcattatccaaattgataacaccacgtttaacacatcttcaatggttttttctttctttctaatatcttctaaattccatccccaaactccaggaggattaaacttaattactaatacaataatatcaatagtaaataataataatattaattaatagtcttaattgtcgtcatcatcattctaatcagaaatccttgagcaactttcgaacctgctccaatgtcacgaacagcatcacagtgaaaggtccttgcctcgagatcgttggcaaaaaccctttgtagagagcaaagggaccctctgaacgcaccgttttgagagcacagtcaatggctccgttgtacggcggaggcgatccgggctccaccttcatgttcatgactctggttttgataacgtcaactgggtttgacgcaaccgatgccacaaaccccgctgcaaagctcgccgtcacgtgggtcccgagcccgtctttcatgacccctttttctagaatcgtctccttgatctggtcgtacgaagccagctgcgaagccgtcacgagcatggctcggttgatcgtcatcgacga

SEQ ID NO: 116841 - DNA, 2099 bp, Cannabis sativa
  modified_base (685)..(697): a, c, t, g, unknown or other
tattttttataagaccgttagtcacttttttaactgatcagttaaacctacgtaaagtactaccggtcaattttttattagtccaaataataatattaattaaaagattaaaaaatattttaaaattataaatgcgatagtagagtaaaatcattttgttgataaaagacattatttgatactcttagaagtttgaactagtttaacctttgatgaatttatatatagttgtccacaccgaacaaagaatcaaaaccagttattattttatcacaatatttttgtaaacaataacatattttcattccatcaatttcactcaaattcaacaatgatttaagaagacacaatttgtaacactctacaggtataggtgtgttatcgtgattttataataactgttcagttcgttgctaatcaacgaatttattaaaaatcgtgaataattaaaactttacttaattactaacaatattaaaataaactaatttttatatatccagaatttcgagcttaaaatatttacaacctattcaaaatacttaatgcaaaagttgtcgcctagcgactatacaaaatacaattagctgtcccaaaaatcgtacgctccaggcctaaccgtctcgacatgtacaatcttcacgcttgccctcacagctcctcagccttagccttgcccttaccnnnnnnnnnnnnnaatatctgtgagtcgacagactcaatacgaatagcataatcatactcataaatataactcggattacaattgggtgcccatacacccaactgtaatcctatccccacaacctaggcgatatttggtctagaacgttcataagacaatactatcagccataatatcagtctatactcggtactctagttatactctagtcgtagtgatgtgatagtgtcgatcagtatttgagctaaacatacatctattagtatccaatacaactctacatgtatttataccgctatcgatgtaatctaacagacttaataaacatgtacgctaaacatgtaaacgcatatgcatatcattatactaatcttacctcgtttttaaattcaagtgtgcaggtcaacctacgtggaatagttgctcgacgatttataggcgccttggattggattcactaggatcttgctagaacaccaaaaatagagctgaaaaatccaatttctctaatggttttccaaaggggttgagaggatgagaaggttgaagaggaataaggtgctacttgtcttattttcttagtttagaagaataaataaaaatcttgtatattaatcttaatattatcctcaaaaatatcaaactacaatacctgactaaattcactaaaggacgaaagaatcatatcgccaaaaagaccattttactcttgcctaagccaaaaagcatacttaccacctccgggtattttggtcaaaccatatacttcgaatattcccaatattactaatattgtctatctaaattgctccactattactaaaatactaactcataagaaaatgtgatactattggccaaagttcgcgttccaatattgttgagtataaaatatgaaaaacatgaaattatatatataatataagtaacacacctaaaatttaaatatatctccataaatttataaatcataattaaaattctaatttctaaattaaaccctaattatttgctaattttcattttaaaattaaccggtctttataattatctcccagttaaaaggattttgccctcaaaatctaacctgaataactctggatattgagccctcatgtcagactccaaatcccaagtggattcctccaccttactagagcaccttgactaatgctattgtcttgtttcgaaggactttatcttttctatctaaaatttgtactaattgttcttcatatgataaatctggctgaagttctaagttttcataactcagcacatgagtaggatccgatacgttttccggaacatagaaacatgaaacacgttatggactactgaaagtactggagggaaggctagatgatatgcaaccaggcctgtaatatccgctaactccgaaagggtatttttg

SEQ ID NO: 116842 - DNA, 1899 bp, Cannabis sativa
  modified_base (1868)..(1869): a, c, t, g, unknown or other
tactatacactcacttaatcctactttctaagctacacattttcatattctaaaaatcaactacaatctaccactcttttgacgataaaaataaatagaatataattgatgaactacattgctataaaggttatatttgaagggtattattaacgagtcttatattatagaagatagaatttagtagtgcaaaaagtttaagagacaaaaaaaatactaattattttatataaaaagttacatatggaaagcagaaaaaagttactaaacataaaaaaaaaatataaaaaaacaaacatgtgaaagacctaaaagaagatctatagtatataaattaaaaaaaataataataatgagattagtatataaaaaatgaggtttcatattaatgacaaaaagttgttattattatttttggaaaggtgtaagtagtcgattttgtttttaacgagtgtagtagattattacatatgcattactgaattctttcatctcatgtggaatgatttaaacttaatagtgataattaagttaagatgagagagaaagagtcatgtgaagtgtgtgaggggtgacagaagcatcgtggttgtgtgtattagttataaacgtgtttattgctgggtgtgtgattagattactcatccactactactaaacttgcttttttcgttagtctagaaccaattggccaattttacggatagatgcgatcaagtttgctcaaaaatgcgatgtatgccaccgaatttccacctatgttaacagacaaccaaatcaattaaattctatctccaatccatggctattcaaagtgtggggcataaatttaataggcaaattcccaaaggaaaaagaggaataaagtatacactagttacaatttaccaagtgggttgaggctaaggctttagcaacaataatagcaacaaagctacacgagtttctttatcaagcaattatttgcaggtttggaattccataaaaattaatttctaataaaggaaatcaatttaaatgtaaagaaatgcaaaagatatgtgatgatctagggattcaaaaagcttttcagtactcacatattgtcaaagtaatggtcagaccgaggcaatcaacaaaataatcaagcacaccataaaaggtaagctcgaagaacgaaaaggcgtttggccagaagagctgccgcaagtattgttatcaaacaataccactcctcgctccataattggtgaaacctccttttcactctcttatgggtgtgaggccatggtcacagttgaggtaggagccgaatcgctgagaagagatgttttcaacatcaaagccaatacagaaaatcagttacttcaacttgatttgcttgaagaaaagcgcgatcaagcccaaattaaaaatgtggcctaccaaaagtgcacatccttctctttcatttcaaaagtcaaagaaagaagtctacgaataggagacttggtattttgaaaggtcatgcctaatgcatgcaactcggcgcatggtgtattcggtgacaattgggaaggtccttacctaagcgctgagaaaattggcaacacaacttatcggttatctgatcccaatgacttagtcctcaatagagcttggaatgaagagcgcacttaaagtactattatcaataatacatgcatgtatatacttagttaacttatgctctaaataatctaagtatagggggtgtaaacgtattgtattactatactattaacaattttcaaagattgaagtttttatacttctcgcatatttgtacttagaaaatttcgtggaattttttacttttaaatgtgaatatcgaaattttcgtgatgttgggaatattttatcaggatctnnatttactaacaagtatgttgaattgacatc

SEQ ID NO: 116843 - DNA, 1234 bp, Cannabis sativa
caatccaaagtaaccgatccaatttgcacttttgcggattagattggattggatttgagctattgtgcggattggattggatccaaaaaaaggaaatccgcacaatagctcaaatccaatccaatccattaactgatacgactagaaaactatcttttttaaaacaaaataactgtaaatactttctttaaacataaaaattttatgataatttaaaaagaagaaactctatatttatttaataaatataatacaatatgattttagaaaactttttcacactaaaataagatcccaaatttatcttttgtctgaagtctttcccacataataagatctgaactattcattaaaaaaaacctcaactaaaataccatacataattaattttgggatctttaccaaatatgccagttaagaattttacaaaattacaaatacttttgttgagtaattgataagtactttttaacaaatattataaatattttagtgaaaaaaaaaaatatttggtaacaactttaactttatagtacatcacattaattataacattgcatgtaggttttattgattaactaatgagtatttaagaaaaaaaatatattataaatatatcatgaatttgtatttgctaggaatactaactttatacaagaatttcatatttatttcaaaattaccaatcaacattgtttatcatatcatataattaggttgaaataagaaaaaaaaaatcccatgtatcaatactttttcttttgtaatagtaattaagaaagtgacatttcttttatttagttatttaattattatgttaaatctttgtataaaataagtcaatgaaacagaaatgtaaacatacatacacttatattaatgttgtacgaatctataattaaatatatataatacatatattaataataacctaaaagaatctttaaaaaatagaaaagacagaaattggaaaaacataaacaagttaatagcaaatagaaaatagtagcattattaatttggtcatagggagttcttattgtattcagaatttgttgatagcggatgttattttgaacaaatcctcaccccactattttagagtacctattgctcttcatgtttgctagttgaaatctttcttaaaaaaatcaaagtgataatcaattcttatctaatatatagtatagatatatatacatatatatatatatattgagataaacatatatat

SEQ ID NO: 116844 - DNA, 6691 bp, Cannabis sativa
tatatgcctctgtaacccagcctgcagccccctcaaaatagccaataactccaactgtaatggagtgtattccctgggcaaaacagtcgaggaagcatatattacttcaccatgttctccacggatgacacagcccagaccagagtaccccttaccttccttaacacctgcatcgacattgattttttcttccccatgcttcggcacattccacacccccaggtccctgcgtctagctgctgtcttgctgcatttttcaccttgaaaatcagcaagaaaccgatgactccactccaccacttcagctggttgcggcacaaaaccgccatggttggaagcatttcggttgttccacaaattccaagtaagaacaagaaacagttcaaatttttccttactcattgcagcggacagccgcatcaaaaaggcaagctcatcttcattcccatggcgtttcacttcatgttgcaaatcaaaaattttccaacaaaccttgctcttcttacattcccaaagtgcatgaaagattgtttcaggagtatgcatagaacacctcgggcacccatcatgagtggatacatggcgcttagccaaaacagaagaagtgggaagccaagaatgagccaatttccagacaaacaccttaatctttggcagaatttttaatcgccataatttccgccaccaatggacagcaagatgatcatccgactgttgtcgttctgctctcaagtcacttgccatacgatagccgctcttgaccgaatactctccgtttttgctataatgccataagattttatcttcaatatcccacccagtgctaggaagtgagagaatcagtttagcatcatcttggttaaacacattctgaatgaattctgcatcccaagtgccatcacccaatttcaaatctgctacctgaagttgctccggtaatggtggcttgtcatatatcttgaatgtaactggtctaggaagccaagggtcctctaaaattctaatagaattcccatccccaacccgccatctgtagccctttaaaattagtttcttacccccacatcaaactccgccaaacaaacgatgcgtgtgtaccacacttcgcttccaaaaccgatgtattagggaaataggaagccttgagaacacggctgcatagagcattcgggaaccttatacatcgccatatttgctttgctaacaaagcctgattaaacattcccaaatcgcgaaaacccatgcctcctttatctttaggcttacataagtgatcccatttgcaccaatgaattttcttatctttttcagaagacccccaccaaaaccttgctgccagtcgatgcaaattagaaattgtccccttcgttagccgaaagcagctcatagtatatgtcgggatcgattgaacaattgccttgataaggacctcctttccagccatagagaacattgatgctttccatcccttcattttcgcccacaccctagttttaatcatgtcactgagttcctttttattacgccccacaaaagaaggaagacccaagtatttaccatgggaagcaacctgcctaacccccataaattcagcaagttggttgcacgttgtctcatcgatatgcttcccaaaacaaacctcagacttaccataattaaccacctggcccgaggcattcatataattgtccaacagctcccggaaccgttgacaaccttccatagtagcatcaaagaaaaccaaactatcatccgcaaaaaacagatgcgatacacacaaatcagtccttctaaacttgataccttgcaaactaccccgttgttcctcagcttgaatcaaacaagagaatgcctcggcacaataaagaaataagaatggggatagcggatctccttgtcttaatccacgttccggcctcacacttccgcgcacttccccattaatgaggaatgcaaaactactgacgtaacacatctcattattttttccacccatgcattatgataccccagccgaatcatcatcatctctaaaaatttccactccacccgatcatacgcctttgccatatccagcttgagagccatcttatgcccattttgaaaccggtttttcctcatacaatgtaacgcttcatatccaataatagcattatcatgtatcaacctccctttcacaaaagcactttgtgtgtcggagaccaccccatccaaagtcagccgcaaccgattagctaagcatttagaaataatcttatagataacattgcatagactaattggcctgaattcctctactctctcaggtttatcaactttgggaatcagagcaataatagtgtcatttaggcaactaaagtccgctccttcattgagacattgaagacataacgcaataacctcatctttcaaagttgtccagaatttatgataaaaaagagccggtagaccatctgccccaggagcttttgtcggattcatttctttcacggcacgcacaatatcctcttcatcaaattccgctaaaagtaagtcgttcatctccctagtgacctttggttgcacggctgccaatacaccaagaataccatcatcactaacagaggttgtttgaaagagagatgaaaaatatccttccaccatctgcacaacaagattcatatcactttgccaaacccccacactatcccgtaagccttttatctcgttttttttcctcctccgagacgccttatggtgaaaatattttgtgtttctatccccccactttaaccacaaagccctactcctttgtcgccaatattgttcatctttttccaattccccattcaattgtttttccactcttttgacatcagcccaagtacccaattcttgtcgcgaagacaattcggccagagttttctttagcttcccaattttgtcattcagcaacttcttctttttcttattccatgctttcaaagttcggcctacctgaagtgttttccgtttaaagccccttgaatgaccaccaaaagtaccatcttgccacccatttaggactatgtctttacactcatcatcatcgcaccatgcctcttcaaaatgaaatctagttttcctctttgtttgaccacatcgatcatgttccacagcaacgggtaagtctacaattaaaggcctatgatccgattcccaccaatccaaaacttggatatccgctccctcaaaacatctcaaccattcctcgttgcatagccccctatccaatctctccataatttgattagattgatgctcattacaccaagttaattcagttttgacagagcaaaaatctatcaaaccacagtcatcaatgacttctttaaagtcttccatggcagacgtacatcgtgtccttccccctactttttctgcaagactcacaatttcattaaaatcaccaatacataaccatgctccatgtacgccagctcttatattccttaataattcccaagaaaatttccattgagctgcatccgggtggccatagaagcatgtcaatgtccatggcaaaaaatcttttcctgcaacttccacaagaatatgacctggggagctcgaatcaacccgaatgttaatatcatccttccacaacaataataatccaccactaagaccaattctatcaacagaccagaaattaactccgacccgcaacacagaacaaagcctttccgcttgaactctagttagtttactctcgattaaaaacacaatactcgggtcatgatcccgaatatgggattgcagtgcacgaactgtccaagggttcccaattccttggacattccaacttaagagtttcattgtgctcggcggccttgcggagcaaggctcgccgcttcaacatcagaatcatgagatgagaaatcaattgctttagaaatactcacctctgtatttggtatagccatgtcgtgtgcctcgtgtccattctctgtagctgctccaaaaacaaaatgttcttcctgtgagcaaccaacaaccgaataatcagtctccctccccaccgtttggttcgttgacatagaacccatctccacatgttgtcgattaacacatcgtgcccggtttttgatagaaattctcttcctttggccatgagaacccccattcttacttttattctcatctgtagtagccgatcgcaccacaaacccccctttcgtgatagctggactcagatggtgttccaagattccctttcctttattcttcttcctagtctctacctcatcagtacccacaacaaacccagttccccctttgcgttttttcaaactctcttcgccctcttcctcacctggaatgtccctgccccctttacgagataaattttgaaaattcccacatcccacttcaactccagcttgtctgccttgagtatattccctaccattacttggattttccttaacatttagaccatgggcctcttaaacatttaacccgtgggcctccttatccccatagatcatttttgaacattcttgtgggcctacaaaggtggcaggcccattggtcttagtaccaacacatctctcctcaaagttcttccctccaatttcggtaataactaccccactaactcccaatgactcttgcccctgattttgaggaaccaccactgcacccctggaattcccaacctccggctgagcagtaacagccgcctccatctcagtccaactatcgtcagatctccgtttctccttttcggatgtcccttcagcaacatgttgttgagaagcaactatacaattaggagtgggatgctcatcctttagccaatatccatatttcaacactttctgtccatccccaatatcctccatggtcggctcttccttacaatcactttgttcatgaccccagcaaccacactgaaaacatagcattggcattcgctcgaatttaatctgtacccaattcttagttcccccagccagcacaaatcttcccacaaacgcacttttatgcaaaggaaaaccaattttaactcgcacatagccattcataaatgcctgttgtggattactccatttaatctccattacatcaccagcgagttgtgccaatcgtctcacattattcagagtaaacgctttgagactaaaacctttcaatttcacccagcagattaccctattcaatcgtgcatcctgccatctatcagtcaatggccattcttccaataataagattcccccactgaagagccaaggctgtttctccattatcgcacgagcatcctctttagtatcaaatgagacctcggatatagattaacccttcaaatgtctctaagactttaacgttccattccccaatattcttccacattcgtgaaaatatagaatggaaaagctttccattcattggtcttttcgaaatcaccttaccaataaccgtcttctccgtaaattcctttgcctcctcctcattcacctcccaatcatcctccgtttcaactgccagttggcttgccatattcacaatgtcgtctactgtggcctccgaagtaccactcatcatcagaagcaaaactataaacatatttaacatgatcacagggtcccaaggaccatagcaaagatagagtctcagagagaattttcaactaatgttgtattacaatattatagcatatatattgatgtgaacttaaaaaccaacaataaataataataataataataaaggtaatttggataatatagaataagtgaatatcctaatgccttaccttatgtgttaatacttatggtgagaataaaaggagtttttggcaattcaattagttaaggacgaaagtattgccacttttattaaggtataatagatttaaattttatatttgactttttatttaataaatatccttatcaaacatttaaataaaaaaatatgtaattatattcctgttaattaaattacagattgagtataagaattttatataatattttaaaggactaaaataaaaattttattatatctatttaatgttttttttttgaataaaaattataagatttattaattaataaattcgttcaaaacaatagaatgcacttccgaggaatagtcctccagttgaagcacatgacctgtagagaaacaagagtctcttgccaagcaatgaaccaatttatttgcatattattttacaaaacataaatcaacaaaagataaagccaaaagcaaatttcgaacattttaaacaataagaccaaactgtgaaggtataaacataccgctctgaatcgcttggacacacatcaagctatctgttttcaacatgactctatcccacaaatgagttgcaatccaactcaaagcttctttaatgcctattatctcagtaatttcgggttgaacacaaccaatcttctccttcttaaatgcttctaccatagcaccatgatgattccgagctacacaacccatgccaaagcgctcctcttgttcaaataaagccccatcaacattaactttgatcttgtttatctcaggtgcaatccaacactcaagatttcgcccccatcatgtagcggagacaaggaaagacccttccttccttgagcaaatttatactgatcaagcatgtttctagctgatgcaacaatatttgatgcagaccaactcttcttttgccaaa

SEQ ID NO: 116845 - DNA, 1869 bp, Cannabis sativa
taaacttaattgaactcgtgctcatattaagctgatttggcaaatattaacgagtattgatgatgtgaggaataacgtaaccaaaagaaattgatgttcagaagtagttgtttgaccattttaatgatatggttttgcccttttaatattcatgttgcttgactagatgactattcatattagttgcgcatgctttttagatggatggaacaacttgcttggctagatgactagtcatgttttttgtgagatatatattattattttgataaacatggcaggtaaagtatttgctcgatgaacatgcaagatgtatggtatttatagctagcctgcatgacaatatattttcaaatttcaatgaatttcttcactgctttcagaaaaaaaatatccatgttgcttgacaattgtaatgatatgggatttctctttaatctggttggatttgttggtcatttatgcattatggatcttaactggcaagttgaagagaacctttcgagcactgcctgtttctcttttcttagttctgtttgacaaggctttcttgaattgcactgtaatttctattttagaccagattttatctagtaagggattcaagattttactctttatctgttttgtgtgagctttgctagaggccctatttatggttctcaatattaagtcaaaggttttgaagcttttagtaatgatcaaatatgattgtatggttttggttgtttttatgctttgctaatatgatctctctcatcatctaaaatgtacagattgcattgctagaagaggaacagaaagatgacacggcagaagatgaagctgcagaaaaggtgacagaggaagctaaagcaattgagattgattcatcaaaggatggtaatttggatgagaaacctgacatcaatgatgttcccatggaagaaaaccaggtgaacattcccatgctcatcgggtgcattttgtttgcttattctttccacttattaaatgaactgtctatgttaccttctttgaagttatgggttccgatagtttagagtttagacgtagtaaaatttaatgttgttttctctcaagcagaaccttgtataatctcattaggcctaacattcacacttgaattttcattactctcaggacacaaatcaggtagtatgccaagatctgaatgaaagtactttggatctgagcttgggattcaatgctcatgaccatgaaagcgacaatgatcccgattccaaagctgatcacagagatagctagttgaaagagtgaagtttactgtaatgtacccattggagattggaagccttgcctaattttttgatcatttagattaattgcgcataagatttctgagtcatttgtagtttctattcctgagtcatttgtcatacattacttaattctttagcactgaacgatcgagttttttcccttccggaaattctaattggtactgatgttcgtactggaatttacataggtgtaatgagaatcaactatttatttagcattcacaatcacaatttcacatctctgttaatattttatgaatcactaatggctgtgccaccaaccaaattctcaattagaagtgtaaggaatgaaacgtagattataccaaacattttggacccttccataattccattccaagttccaacaatggaaaataccaagttaaaaactgcaaacaaaagaagcaacttcttaccactatatcatatttcagcatatttttggtaatcattcttttgcaataacacagctttttgaggagtaatcatgcctgtattaccaccaaataaaattcattgtgaattatatacggtcacatttcaaggccatgtttatgggttg

SEQ ID NO: 116846 - DNA, 895 bp, Cannabis sativa
  modified_base (827)..(850): a, c, t, g, unknown or other
agcaatacgtggctcggcacgtacattcacctagtatatatatatatagatatatagattgtatactacatataatataaattttagttatatgctgtattgcgccacttgtcccccacgatttatttttgctctctttttttgtttaaaaaaaattaataaattttgatttgacaaggattgtcacatctattttttttttaattacaaacaaattataaaaatgagtgataaaattatattactactgccatttttgttaagttcttctttttcatcttattttcatttttcttacttttagctcttgaaaatttcagccacctttatgtgtggattgcagttaaaagttggctttagttagttattgatcactttttgatttttcaaaagccattttccctctaattcttctttccaaccgttgttgcttttaatcctataattcttcatattatttcatttccatggctattacccgttcaaattcttctttccttgttgtcaaaaaaaccctacaaaaaatctctaaaaatattctcgatccgctaaaggaaagaggaatttcaaagacaatcctcctagctctacctcacctgttgctaccaaacaaaaatcagttggtgaatcaacgaagaagaggaaatctaaacgtcctcgacctcttgtggaagaatctgactcgaattttgagctggaggatgaatatttagagatgcccaaagttcataaggtaatttgattatttttgtgatcttttagggtttttgtttcctttatttttatttgtacatatttgtgtttgggtttgttgggttttatgcccnnnnnnnnnnnnnnnnnnnnnnnntcagatttacttattaataaaggtcagaaataacattttatgttg

SEQ ID NO: 116847 - DNA, 583 bp, Cannabis sativa
ttttctctgttataaaagttgctcctttagctccattccgttatatattttgaacaactcaatgaaatggctatttctggcttaggtggcacgatgaggtggctattaatttttaggataaataaatgacccccacctattaaaaatataaataataaaataagttatgtaataggatttataccaaaccctacaatatttcttcttccctttttctttactaggtcgtccccttttttttcaaagcagctcacccttttttttccagcaacatctcatccctttttttcccttcactgactcatcttcttcaatttcaatactctctccataaaatttcaatattcatcttcttcatttttttggcaactcaacaaaatgtcatgctcaagcaattccatgaacagtgggggtagaagatatgatgaaattttgaattggagtagacccaattgtctttgtcgctaagagagtgtgcctcggactgcaaagacaatgggaaattggggaagaaggttgtaacgtcccaatattttgccttattttacaaagtgctaattttgatgcattatttaaaaagatt

SEQ ID NO: 116848 - DNA, 3613 bp, Cannabis sativa
ttgtcatataggaccaattttaataactatgcatttaggaaaaaaaattaaatggtattttaagcatagaatttcaaatttccctatatatatatcaatcatgtataatagtttagctaggtgtaaattttcctctttttcttaaaaggaaaaataaaataaaaacaaatgtcactccataccaaactttaacttcccctttaaaacctacatatcctaatattgcgcgcatgatctacactgtttggtaagaagatataagtgaatggagagggatggaggatgagaggggtacatttggtaagaagagatgagtaaatggagaggggtggaggatgagaggaggacacactagaattcattgtttagtaggagagcaaatgagagggagatgagagttgaagcggggaaccttctccctccaatcctaaaaatctaatccctcacataagaaaaagacaaactaaatatactaatatcaaaattatccttctaagaaataacaaatattttgaccaaacagaatactaatttaataactttctccccatccttccaactttactcctaactcttcattcttctagctttattcctaataccatacaacacaaagaagagttagtatcctccccattcttcctaaaatccccttccatcttactctctccgtccaccctaccaagcatagccttaatattgaacaaatgtcttgcgagaataaataacagtaagttaatactacaaataacattgaatgtaatttaagacagcccttggacacactctttaaccaatgtttccctgcctaacatcttcatcacctactctatcattcgtaaataatctcaaggctcaggcagtgaaacatccgcttatgcaaaaacaattacaagcgtttagccttgactgagcatttttctgaactcatcattggattttggctgttcgtcatgcttttcctctgtttcgggtttctttgaactcagattaagtgcagccacgttcctcggaagtgcaaatgtgttttttcctttgagctggatatgttcaactctaggcttgcgtgcattagactgtgctgcatggggtggcccagattgttgagaggaactgacagactccccagatgcagagtccttagctgcatcggtgcaatcaggacgtcgtgctgcaatatcacaccaccatggttaacaagagagcagaaacaataaagggaaaaacaaatcatttgacagatcagctactgtcagattatatcaaacgtttatgtttcaggagaaaccagcaccaaaattattaatctaaaagataaataacatcaagcactgaacaaatattttaaataacgaagaagaaagaatcaaatccaacaatgtttctatgacaagttcacaacaccaaaattacttatctaataattggatggagatccctctatcaagatgcaagtacaagcaaacaaagaaaatattaaactgtagaaatacatgtatttaattgtttttcaagattgcatcttcaagccatgacatggaaaatattggttagtataacaaaaatgaaatttaaaatcatatatatgagctttctccattgttcctttaaagaaaacatcacacctatattattaataattaaaataatactagagggtcttcttcattctttttttgataaaagccacttcattccagatgtggatcctaaaaacttttctaacgatagcactactttcaaaagttgttataccctaacaaaataactactcagaatgaccaacagatacggaaaaacttattggagtgtacaggatctagatttactatgctgatggcccaaccactgcaggacatgcattcttgtacacccctgttagttgcctaaaagctcaaacaacaatatacagcgagcatgacaaaataaatccgcccagcctacctagcccgtgtgggagatttcgatcagagagatctcttttgccacgctttggttctgaccgtgcaatgctcagcttccttccaagtagagtctccttgttctttgatatagcagcagcaaggtgtgcatcatctaagaaatccacataagccagacccttcaaaataataaataaattaataaagagaagaaaagagaactaacaaaatatcaccaattacaagcgtttgctctataaatttgtaattggtcgtttagttcacagagaaaactcgtcaacaattatacaattcaattttgttgatacttgatagttcaattgctttttaattgaatagttagatatatagtttatcccttcaataaactgacatctgcactagcactagaatactgcttattcagaatctatcaccacaggagactgaataatagtgtgtacaaggataaataatatttttacattaaaatataagcagatcaaataaaagaatgtgactgggagatggaaaataaatatatgcactttgataggtaataggtaggcacatatactaaacaaatttatagagtaagagagagacccgtgattttccagtaaacttgtcacgtagtattcggataccaccaactccaccatcactgaaaaatttggtcagatcttctgaggttgcctggacaaagttcaaactatgaggattatgctcataatctactcaacagatacaaagcagcagtaaatggaatgttcacttgccttgaggggaagatttgatacaaatgcagtgcactggtcagtgtacacccttgctttctcctggttagagtctttagaatgctcctcttttttcccacatgttttctctacttctgcattggtctcttctatcttttgcttctcaactgaatttgacacatgagctttgcccttttcgccgactttgtttaggttttggacagcatctttacgcctctttgctggagactgctcaagagttatatctgaggttggccttctcttttctcgagtattcttctcagaaatgctttccctctctgccaatttagattcttcccgtgacctaagtaactgtaattcttccagacggggagtaacctaaaagaggcagcaacaatgaacaataaaatcttcttttatcacaatttcttctgcatcatgtttagtcatgaacgcatcatttaggaggaaagttggaaggtaattatcacgaaatactaactataaacaccccataaaactattttttcctcccaaacatggatacctccaaaaaatttaggctagtacttatcttgcaactgacaacaaagaagaagagcatttttgtgtttcaaactctatgcttgcatttcacatgcatttattttccagtaaggagttagtttggaaaacgagaatagatgtaaagaggcttgatggtaaaaccttttgtcttagaaacactaacaatgtaaaagtaaatcagaatcagaaatatgttgcaacaaaacaatatataatgcttgcattttctttgatgtgtagttttccctcctttttggcataggttcttaccatatcaggtaataaaaatactaatagcgtgaaaacaatgaaattgtaattatctattatacatataaaaaaaaaaaaaaaagatagttaatt

SEQ ID NO: 116849 - DNA, 1592 bp, Cannabis sativa
  modified_base (1563)..(1566): a, c, t, g, unknown or other
ttgggcttgggcagtacaaaagttgtttttgccgtgtcccagtaaaaatgtaaagttttggtcaaaaagcagtatttttgtaaaattccctaaccctatatatatatatacataatcaatttgaaatgtggaatagtacacaaaattaaacatttatgtatgaagaaatagatcgaaatactttcagctattaatattttgagttttaatcctacacaagttttagatccacaaaagaaaagaaaacttaattaatgtatcgagcttctaagcactcatctaactctcttagatagatttactattttttgtgaataagtagtgagctagaggaatgataccttatagttataggtgagatgctctattagtatatgcgtcacattaattgttataatattttgacaattaattcaaaaaatcaaattaaaaaataaaatatttagtaaatcgaagtctgactatatttagaatatttacgtatgtaaaaaatattataatattctcctatttggtcagtatttaaatttggcacttaaactcaacgattgttcttgctatacaataaacatataaatcattgtgataggtcctcattatatgtcaagtgttatcttctatatattatgatatatttattatataacaatgtacttaatgtggcaatgtatttaagtgaataaaccataaattttatgtttattatgctcctctaaaatatatatttttttactcttaattaattattttattatttatttatttaaaataaaataaaatttaatgtattattatccttttattgaaaatatataaatcttctaattttataaattctgaaagtaaaaaaaatctctttttatcaaaaaaaaaaaaatacctttttttattttttaaatatgaaacttttttttagtattttattttattaaaatgcaaatttcttttattaagaaaaaacaaagattacaaatttctttttaaaaaaaatctaaaacattttttttagtattttcttttattaaatacaaattttttatactaagcaattttttttttttaaatatgaaaccatggtatactaaaaagattatttcctaatattttataactgttgggcatactaaggatacctaacggtttagaaacgttgggtatacttaatattcccaacagttataaatcgttgggtatacttagtattcccaacagttataaatcgttgggtatacttagtattcccaacagtagtatataaactgttggcattcactgtttttatttacaaaatttcatttagtattgccagcagttctctaccgtggactttggttttttcaacagtttttttttgtttcggttataaaccgttgggaaaaatctttgcttatcctttacaatggtttatataattgacctccttattaactgttaggaaaagctattttgtagtagtgaaagatagttttctcagataaaaataaggtgcacatgaatatgagaggatatcgaaattaaaattttattgaataattttagttgtacatgttgggttttatgccnnnnataaaactctttacaatctgattagt

SEQ ID NO: 116850 - DNA, 1893 bp, Cannabis sativa
taatgttaaattatttaatatttcatagaaaaaaaattaaaaaagactattatttcttaatctctaataataatctatttccatctcaattctccagcttctcaaaatggtccgaatgggctcgccttcacctgcttagtcaacttatgcttttaaaacgtggccttaatatctctaaacctatttgagccccaataaataaaatgacatgtgaaatggtcgaacactagaagtttaagctcaggagccttcaacataaattttatgaaaataaacataaacaacagattaaaacacaaatatgatatgtctcaaaaaatattgctatatgtcacaaacaatatcgccatatgtcactaaatacatcgttaattcaacaaaagcatcgctaaacaactcaacacatgtatactaatcatatatatatcacaatatgtcgctaacaaaattgccttatgtcgctaaacatctcaagcataatcagttaggagtagtgctatatcgtaaagcatatcgtgaaatgtctctaatcgttacatgacaacaaatgcagagaactcattcttagatgtcgtcatatgtcacaaaaaaattgtcaaacataaatcaatatatagtaacaactaacacaaaagtcgtcacatgtcgcaaaaaatatcgctaatcgttattatgcataaaccacctttaaggtgatatcgtggaatatcaccacaaatatcgctagacgccaataaatacatagaaactgtcaaaatgaacagacaacatcaacaccattgggggtgatatcatcaaatatcgctatcagtatcgacaaacatcgataaatgtagaaaaaccaaggaaaggaacatacatcatcaaaattcaagtccaaacacaaaaaattaacttataatcggacaaatttccttaatctcaaccataatcaacaaaaccaatccaaaattttaattcaaaacctaataaatagaaaaatcactcaaaaaaaaaaaaaaatttaaaaaataaaaacttaccaaattttatgagaatcgtgggtaggtagcttgggtcttgttattaacgtaaacaatagtagaaatgtaggtggccaaaagggctaggtgtcaatttagggctttggtgatcttcttgtgggttgtcgggaatgtcgtggggaaccaaggggcgatggagagttagagagtgagagaatgagagagagacggtgttgtgagttcactggagtggaagagagagagagtttaagagggtaagaggctggtggtgtgtcgccggagtgagggagatagtgagtttgagaggggagggagttagagagttggagagagaaaatttatttgaaaatgttaaaaagatatatatttgaattaaaagatattattagaagtatgaagtataaattttgaaatgaattgacatattaaaagaccatggttcatcaaattttcctaacatatgatgcatacattgcatattgttgtgccatatagaaagtcatcatgtacttaaaagaacgagagaattattatttaaatttctattaattaactagatacagaaggaaaataatttgaatgtagactaatacatatatttttaaaacagaagaataaataatattttttttttccatctagacctagatcagatcaatgagctccataacagcctacggttttgtgtacacgacacaacaatataatagagagcatttgctttattaaccatttattacatgaatttccatataaattattgaaaggatctatcagttatcacgatctcattatggtcatcaaaataataaaaaacattaaagaacagtcacacatatatatatactagcaaaaagttacctgcgaggcacatatactaaattttatg

SEQ ID NO: 116851 - DNA, 1590 bp, Cannabis sativa
  modified_base (27)..(33): a, c, t, g, unknown or other
aaaatagattacattgaaatggagttnnnnnnngggcataaaacccaacagacagagataatgttttgaaaggggatacatatttttcaacaaaaagcctattgtcatgaaaccttgggatcatgaagttaacttcaagaaagcagatgttagggtggtgcctatttgggttcaccttgatgaccttgatttgaaatataggggagaaaaatatcttttaaaaattataggccaaattggaaaactgattatggtagatgaagcaactaaaaggagagacaagcttagctttcctagagttcttccaaaggtatcttcgaagcaggaatttcctaacactatagaattcgaggatgaaaaagggtataacacaaccgtagatgtttcctatgaatggaaacctgtcatttgtagtcattgttctggtttagggcatgtgtctactgattgcaggaagaaaggggtcttgaaacaaacttgggtggtgaaaaagccaatggaaaatcggtggaaaatgatgtcagagtggttggagccactgttgattttgagggctttcagccagtggtcaaggggttgaaatcaagagacaaggttgttggtgtaacagcagtaacaactaatcaatttcaagtcttaatggggaatacttcaactaaaaatggtggggaacatgatagcttgtcaatagatagaattatgagttggaacatctgagggatcaacaaccaacaaatgtaaaatgcagtcaagcaattgatttttcatcaaaatgttgggcttgttggtctcttcaagacgagagttaaggctcctaacctaagagtcttatatgttagaatattctcgggatggtgttttacttccaatagtgcttggcatgacggaggtaaaataattgtgagttggaatccatttagtttttcagttaatattctccattgctccagtcaacttattcattttcatgttgaaactatagataaaaaaaaacaaagttttttgtcacttttatttatggtttcaatgatgaggatggaagaagagagctttggaaggatattaaaaacttggataccgatgatgcttggattgttcttggtgacttcaataacatcttaagacaagatgagcgaattggtaatcgggctaaacacaaaggatctaaggaattcaaagattgtgtggatgtatgtacttgaagatgttaagtttacgagtaacttttttacttggaataacaaacaaaaaggagagaaaaagatttattccaagattgatagagtgcttgcaaaccaaaagtggctggataagcaccctgctgctgaagaagtattccaaaatgaaggggtttttgatcattcacttgccatattaaccatgtacaacctgaaccttggtggcaagaaaccatttaaatattttaggatgtggtcaaatcatcttaaatatgttgaattagtcgctgtagaatggaggcagcatatttctggtacaaatatgtatcaagttgtgtccaaactgaaaagattgaagtgtgtgttcaagaatctcaattagcagcactttgatctattaagatttaaaata

SEQ ID NO: 116852 - DNA, 1215 bp, Cannabis sativa
ccaaaggaagtggctgcaaatcctttctattttcgaagccactttcgcttttccatccacaaccacacctacttttgttcttcccataccaattattaataatataatataatataatataatacaaatgagttccacaccatcaaatttatatcatgcctgaatcaatttaggtcttttttaaggaaattatcttttacatttgtatactatatattattaatatttttatgttagatattaaaataaaagaaaataaaaaagatagaatatttagtattttccttttctttttatgctttttttatacacttagtaaaaatggagaagtcttttctctctttttgtaggcgagaatacttcagagttttcttctgatttagtttttattattttatttatagtgtattcgattatattttgaattcaatttaatttgcatgatagcttaaagttattctaaaacaaattggatcagttattttagattgattactttataaatattaaattatttaatattaattataaaatatttttttttacatcattaaaatcacttaaatataaaatataaaatattctttttaaattctccaacaataaagtaaaataaattattattctacatctctaacaataaattcaaataaataaacaaaaataacaataaaagaaaaaaaataaaattatatgtataaagaggagattgatatagttttagattatgttttattttgtatataaaatatatatttgatatataaaattttaaaaatatttgtattatgtattagttttgtctaattactttaatgtatttataacttttaaataaatataaataaatgtagatttaattatgttgactatatttgcatgtaaaaaaaataaacaatctgtactttgtaaattgcattagattatgtggattgaatttgattaagttctttatgaatagcactaagaacaactagtattttttttttaaaaaaaataaaaaactaaatactacttgcaattttttatttattttattttttgaaaactactactagttttaattctatatgtatatgtatattttccaaatgagttttgaaaaaatatttgttaattttaaaaatatttttattattttaaagtaaacatacaatacataaactttaggggcttttttacttttacacatcaaaacaattttttttttttttt

SEQ ID NO: 116853 - DNA, 2337 bp, Cannabis sativa
gcttttgcctatttgaggaatttggatgatggcaagttttctaaaaagaaatgaacataaaaataaaaaagaaaatgaaaaagttactgcccttttgaggaggcgaatcgtgacagaatcccacatgcgcaagcgtcacataaacgctgattaataaacatttgattctcttcaactcattccatccaacggtggaaaatctccaatttctcatcagatatatatatttttattattttatttaaatattttgttttgaaaccctaggttttgtttgagatcaagtccgcagcactcctcctcattttctttcacaaatattatttcaaaacttgtacccatatataaattgtctcatttctcatcttcctcaacccttcttttctctgccttcttccattttttggggttttcttcttcttcttcatcttttccgctcaatcagctatgtcggacgaggagcaccagtttgagtccaaggccgacgccggagcttccaagacctatcctcagcaagctggtactatccgcaagaatggttacatcgtcatcaagggcaggccctgcaaggttctctttatcattttccttttatcagattggattcactacggatctggaacttggatttttattctttattatttgttatttgttccaaataagcgataagataaggttaaagtttgattttttttttctcataatctttattgggtttttgttgttcgatgttgttttggtatattggggtttgactaggcttgtggtagtgataagcgtctgtgctttatgtgatagctttcggtcgaaaatgagaaatttgttgtctggtattagaaaatgttggattcgaaaccctttattaagtttcttattgcatgttttgggtcaataatttagggattattgaagatagcttgttatttttcctttgtttctgtttcgtcgtggcggttatatataactcacatgtttggattgatttaattaacgaattattatagaaaacttttgatgcaagaaggatcttatcatggaaatgattgtttattggttctattgatgagtttattattgttctaaagaaaatatttgacgttgcaatatttacaggttgttgaagtttccacttccaaaactggaaagcacggtcacgctaagtgtcactttgttgccattgatatcttcactgcgaagaagctggaagatattgttccatcttcccacaattgtgatgtatgatcattctttgctcttctattttgtcttgtttgtgttatcgttttgacaccttttcttatctcactttatccattctcgtgtctttttattgcaggtccctcatgtcaatcgtactgactaccagctgattgatatttctgaggatggatttgtaagatttatttcctttttttactacatttgggtcatatttgttcacccctttcttgtagtgtttctctagtcatttcaacttgggctaacttgagttatgatattttaggtgagtctgcttactgataatggaaataccaaggatgacctgaagcttccaactgatgacagtctgctcacgcaggtttgttgatatgaatgatttctgctaaatctgtgtcaatatctctgtagacattgatgtgtcattaattatgctcttttgggaattgatgtgtcagtttatctattctggccttgcaacgctgatagaaatttttaggtggtgattattatagctaataattaatggtcatggctttggaattgtacagatcaaggatggatttgctgatgggaaggatcttgtcgtgtctgtcatgtctgcaatgggagaggagcagatctgtgcccttaaggacattggccccaagtagttcattgcgtgttgctctatcaaaactcaaaatgtttttttatcttaagaccataaatttattgtgatacagctttgttgttgatggtggttttatttgctttgagaatatgtggtcacgttttattttatttttcctgcaaattattctgaatgagatgttaccaaaattatcatattcaacttcaatattttttttaatgttgtatgaaccggcaaaacgtgcaatccaatctttgtatttgtatctaatttgccagtattggcaaattaagtcagctattttgccagtattggcagttaactcagctaaaagagtaattcgccctgcttagtagttagtatactgattccaagttttgatatagattgtaggttacgactttcgagggtacgtcaaccaaacaatttttgcttgcgactttccaggattgatcctagtcttgttttgctttgggtttctt

SEQ ID NO: 116854 - DNA, 669 bp, Cannabis sativa
tttttttatttaattcttaaattcttaaatgaatttttaattaaaatattaattaatgatgtggatcaataagagaatgacagttggacacttactagcacttaacagtcaggtacttacggaagtttcaataccttaacagaaggtatttttaccgccaaaaatttttgttaggtatttatctgcaactgcgagttaaacttgagtattttcaccgcaaattactccaaaaaaataaagtgctctattcctattttaaggaactagtagcttcatacagtcacctcctctattagaacgtttctactcccatttgactcataaatcgcttcctttctctcagtctctaacctttgaagcttttcatattctcaatctcaacacacccattactgcttttcaatttcactctatctctaatggaaggtaattttttttttttttggtaattgttgacgatcgatatgttgaaaatgatcgattttttgctcctttagaattgtttggatgttaaagaagaaatttttctgttcaaaatcaaaccaatagtttattcattgtattttagggaaatcaaacaaatggactttttaaatttggttaatatcaatgttttggttggtaactgacttttttggggatttgggctgaggtttttttttttttttt

SEQ ID NO: 116855 - DNA, 794 bp, Cannabis sativa
acgtggcttggcacgtaacaatcacctagtatatatatatatatatctgcaagtgggattatatatatatatatatttatatatatatatttttctttgtgtggatgtgaatatatgcattgtaattatttgtgtggccttcgtaagataattagggttttccacatgttatcaaattacgtgtgccaaagtataataaattaaacagctatatatatatataatgacatgatttgatcaattgttgttattattaatttgacgatcgatatgtatggtgatgaggacttaattagggttacattattggtttttattggaacaataattaataatttgttttggtaaaattatttaatatatatgttgttgactatatatattagtttttgaacaacttgctttgttccacttccacaatgcttgcatccaataagaacagcatcaaatcactcacgtacttttcatccaattaatttacattatatatatatatatatataaatatattaattgttgtatcgatcgatcaacctataccacacatttattcattattatttttacacttttctcttcctgttttattatatattattatattttatgttatactgactagctaatcaatataaaaaacaattgggatctatataggttaaatttagtcgacatgtctatatatgagatatattccatcatgggccggccctgggcatagacgggctaggcctgtgcctagggcccacctagtccaggggcccaaaaataaattttgcccttttaaaattata

SEQ ID NO: 116856 - DNA, 2627 bp, Cannabis sativa
ttctctctgacagtgtgattgttaagagagaaattgtaaggtgagtgttgagcagaaatccattgatccaaagtgagtttagcaaatgagaccactttatcaatcgtttgggagaaatttttaaagatgagatcattaacgttcgggagcgtaataacttcttcttatcctcttcatctaaggctatgttgacatattgttcttctagatggctggatgaagccatagcagaacgaataaaattcaatgagagtaaacggaggcaagacaaacgcaaactttagaacatcagagagcaaaccatgtcatacgacaagactttatactatattttgatatcttatttatttagtggtaggatattcattatttttagtgattttaatcaaataaattgtttatgagcatatttattttattgataatagtatatgaaaaaaaaaccagaattaactaaatatacacacacaaaaaattaattaatatataaataatatttattaatgacataggtgtagataaaaaaaaatatttattatgtctcaaatttaacatatgccatattttgtattaaaaattatgacacataccaaattcaacacttattttacgtgatattattagagaagcattttcttttggaaaaatttatgtgctaaagtattgcactaaacccttatagcactctatagagatattttacagttgtagctgagcaagttgtttaacatcaataggataactgtctgaagcatgaagagaagtataagatctgttagcagtaaatttatttacagcttcagatgggtggactttatcccagaagaagtacgatgttctgttgttacatgtagcacttgaaggaatacataaattaatcgtagttgtcgggcaacaatttcttttaaagttagtgattcctgcaaaatatagatattttaatatattattataattatatatagaaaaattatacaacatgagtttgttcctatatattagtagaaatgcctctacttttaacatttattaaaaaaaaattggaactcaaatttttttaaatgacattgtacattgtgattataatatacattccacctgtttttaaattttttgaataatttaagtgacaatagcataatttaaatattcagttgcatacgtgcttgtgtgttttttatacatgtacaacatactattttgaattctatttttgtaaataactataatttttgaatgcctaactcactgtaatagatgcctattccatacagttttgtgtcggtagtatattgcgtcacttttaggaacaaacggtaaaagttaacttgattgtttaaaacggttagaaaaatcatttttttagtagtgatacctattataactataatgtatattgtatataaaagagattagccaggttaagttttctaattatcgaaaacataaatagtcgtactagtaattaagggtcgaaaggacaccccaacctactgtcactacaaaaaattatacttttagtcacaaattttaaaattgaaaaaattgggactaattataaattgttattcttatgttgtgactaaaaagtctgtggctaaaggtattagtcacaaaaattacaattcgttatgtctaaatatgtttttagtcaaaataaatattgtgattaaaactaaattagtgacaataacttgtatctaaatactattttttagtcacaagtaattttttgttgtgactaaaagtcatatttaattacgaaaaaatttacgttgtggctgaaaagttatcactgagtaacttttttttttgtagtgtataatttctccctataattataacatatgttcaagtattattataacattttaagtgtgttatgatcatcatataacatatcaatattgaaaggaaactttaccctaataaattaataaaaccctatttgaaatttattattaaaaagagattaagagtagtagagatatttaccaagagaagaaagattatcactggattgtatttgagaagtgttgacataaatgaatttagcatcactaaatttggcattaagtttatcaacaagtgaaatgagattttggttgaagagttgaactttcaagttcactttgtttataccatttattccatataaggaaattactgatggagtgtatcctagttgccctagtccaactagagcaaacttccttgcactagagttattgtacaatctctgaaaaaattatcaattattaattaattaattaattaacaaaaattaagatagtatgtacttaatatatttaagccgccgcaatattaataaaaataaaaaatttaatatttaagtatgttaaatgtaaaaaaaaaaaagttaggtgtttaacttaaatgtttatgttgtcaatatttgtttctacaaaggattaagtgatgaagacgttaatttttattataaccctttttctagcctttaaagtaaatcatagaaataaaagtattataggcaatatatatagactatagtaagttttaatctggatattacaataaagtaactggttatatatttttttaactttttttttttatttttttttctataaaatatatattttttt

SEQ ID NO: 116857 - DNA, 818 bp, Cannabis sativa
tgtttttccttgtcttgctgaaagttagttagagtcttgagatattgttatttacttctttatatgtaaagagcttaaagatctaagcctatgaaaacaaaattgactactccaagagttataatgatctgttgaggcttgtaaaagatcttattttatttttccttgtaacttgttaatgagacagttagtatgggaatttatccatcaacatagatacttttggtacaataaaataatttatatttatgtatatatatatgtttcaagtctgttaatctctcttgagcccattgatttaaattttattcgacactttttataccagttgagtagtacacacagtaagatattgaccatatgtgtttgttgtttcataatcacaattcatattttaccacaaataattttgacagtaaatttgtggatgaaagcatctatttttttttgttggaatgagagcatttcttgcattggggcatccaatttatttgtaaaatgagggcattccatagatgagggaatctatttttttttttttagaatgagggcattccatagataagagcatctaatttattttgtagaatgaggacattctatggatgagggcattccatagataaatcaagagacaataagagagataatgatcagagaaagaaataggaatgcgagtattccataaagacttacccttgtagcttgttgatcgtttgcagaataaaagtattttagtatttttcttttctagtttctctctttctctcattttttttttcaaagtgtggataccttttttggttctcaactcctcc

SEQ ID NO: 116858 - DNA, 1269 bp, Cannabis sativa
  modified_base (1128)..(1129): a, c, t, g, unknown or other
acctctcaattagaatattattttcttggttccaagtgtattcttgaatagaagttctactgtatatatatatatatctagagtaaataataatgatgatagaatgggtattgtctatagaaagcatgaggtactctaacattacatcatatatttatatatatataatactaataataatattggtccctattgctgtttggatatgaatgatcattatatataactcttgataaagtcttttgttttcaaatatactctcaacatatttcattttatgaaaacaaaaaagaaaagaaaagaaaatgaaagatcaatatcaatcatgctgtagttttcttaggatctagaagttggtccacatttgactggttcacttagctacgtggcaatgcaagtaattttttgatctaaattaaatttttccaaaaagtttttcttttctaatatatagatatacataacgatgtttttctttttgaaatggatatgcacaacgagtttgacaactcatgtcttgcctcaaaaagacacatgatcccttaataacaataataacaacaataataaaataattgtagtagtaaaatttgcaggaccataaagcccatgtgatgccatgtgggaaacaatagtatttgtaagccttcgatatgagtttcatgatgatcatatatataaatttatatatatcatcataaaacttgaacaggaaaaaaaaaaaaaaaacctaccctagtgtggtccttttttgacaagcaatgctacatattttgcatgtcaatagctcattaaatttgatttgaccattgacaaatatatcaaaaaggtgtgattaatattaaactttgattggttttggctccaaataaaatactacgattaattatatatttgagtggtttcaggacatgcatgaaattatatatgaaatacttattatattgatgattactaaaaaaaaattaaaatattaaatcattaattttttatcaaataacaaataataaaagatagaaaattttataatgcacctctttaaaagagatataccgatacatttctatccgttttagtatctaaaataattttttagtcaaattttttctcatgatcatgtaaattatnnttgtttaagacatcctgcaaaattttaagaaattcagaataatttaacacgctaaaaactgcattcaaacagtatgttgcacgcgtgactattttattttatacgcgtgtaaaatatctgtttgaacattattttctata

SEQ ID NO: 116859 - DNA, 2709 bp, Cannabis sativa
  modified_base (2681)..(2682): a, c, t, g, unknown or other
tttttattttgaggggtacgattttatagttgtcaaagtttaaggggcaaagttgctaattgacaaagatacgtcattatttaaacaaaattatagacggaacctaatagatagactaagtttctgtaaatgtaatagttcagaagatattcttaacaaaccgtatattttagaaatcaaaataaatattctcgaaagttcagagaaaaaattactaattctttagtttaatattttatgtatttaaatttttattataaactttatttttttattaagagatttctcgccccttttccgttcctattagagaattctctacccattttcgatgaaaaatgaattcttaacggaaatgggaaccggagaacactccctaccaattttctgtcccttgtacatccctacccttcacccttgtacggtgctgaagcaagggtattagagtaatttctggtttcacatgaaagctagattcattcataaaatcgggagtgaagcacataactttgccgcaaatcattcttgcataatagatttgatacgtttcgttttgtcttcgaaaaatttaaaatttcgttttatttatcctttatttatttgtatataataattttagtagtttacattgattgcaactattttattttctttaattaatgcttttcatttttaaatgaagttcctttgatccgagatcttcacggaattccgtaactggttttcaagaaacacataatactcttatctctcgattattccttcgaaaactcttaattttgattcttctctccctgctgtaattttctcgataaacaaacggaaaaaggaataagaagaagaagccaaaaaagagatacgcgtaaagaatagttggtttcaaagtttcggtttcgttcctctttcataaaggtacatttcatgattacatttgttttttttcgtaattgtatcgaatttattgatgctttatctcttaatgacttggtattttttaatgtttaagtcgaatcacttatatgattatttgttcatttacttccgatgcatttattgattttttttttttttgatttttaatgttggacatttcttgatgaaaattttgttttcgatgcatgtaaatattaatgaagttcttaatctgaacaaatatgaactttttcttattgtaaatccaggacaggcataagcggtggagctaacaataaagtttttggtaggtcatttagttttgacggtttcatgtttgaaactggattataagactttctaattttggaaagcaatgacttggacctcgtccaagggttatttagcagccaatgcatatccgaggaccctttctcggattgcaattttagtgggattattggctttgtttttagtcctgggttcctgggttttgttgtcaaacccagttggttcccaggtttctggatctttgtacagtattgatagttcggagaagttagattcaccagtctctacagacaatcaaaccaccagatctcctagtgaatacaatgttgctaagaatgtctcatccgagtcatatgtacaaggttccaatggtgacttgaaaaccaaggatgtgaaagatcaagtcacattacctgaactatttgacaagagtttctcaaacgagaccagttcacaagtgcccttaacttcaaaggatgcgcctactaccctttctgatgttgagaagataaaagaaatatcaacagctgttcctgtgccgtcttctgtttcaacacacgacgatggggttaaggatgttactcctcctttgttaaatgttagtgataatgatctaagtggcatttctatttctaaggcatttgtgaataaatccaacattttagatttgggaaccaacgagagcagagcagcttcttctggttccagttcagctgattcagaagctgtgccaactttctctcacgattctaagcttcccaatcccaacaatgcaagcaggactgattctggtattctttgacccttttttttttccttagttttgaaataaatcctttaacctctttgattttctttgatcaaatgaaggcttccctagtttatatatttcatttgcaattgcattgactagtattcagttatgtacgtaccaagttatagattcattaagtttccttttttgctagtgtgacttgatgtttctatccataatttatgcatttgtcttgtttgcataaggggaattcaagggaaaaatacaaaaatgaacttttttctttctcaacaacagggaattgcatttgaggtacggactatcttctttctctaatgtgttcgcttggtttttggtggccgttatataggttgcgatctgtaccagggaaattggatctatgattcactgggaccattatatacaaacaatacctgccctgtcctgacacagatgcagaattgccagggaaatgggaggcctgacaaggactatgagaattggcgctggaagccttctcaatgtgacctccctcgttttgatgcccgaaagtttttgaacttgatgagagggaagacaattgcttttattggtgattcggttgctcgtaatcagatggaatcattgctgtgtattctctggcaggtaattatcagcttatgttgtatttaactatcacccacttatcaaaaaaaaaaaaaannaaaataataataataaaaaataacata

SEQ ID NO: 116860 - DNA, 1306 bp, Cannabis sativa
agagagagagagagagagatgctaaaaaaaataaattaattaattgaaggatgttagaatatattagtaatctatttaaataattattatttaattcaagaatattatttaaaaataaatttatgaataatttaatacattctcaatattaatcatttatatacactcattaatttatcaccattagattaaatatctatgactataaatgcctactatagtgacaaaactaatctgcttaccataaacatattctatatatataatcaaactcattttataatatttaaaaaactattttgttttaaaaatttattaaaataattcgataaaattaacttatttacaatactatgataattaaaaaaaaaaataagaacaaaatacattatatagtaacttattagactcgagtgatatatttaattttgttgattttaaaatttaattaattaaatagaaaaggaaaaagacattaaaaagtttatttcagtcatcttttccggtgaaattatttttttcaaaatgtcgtggtttaatgtaattttctctaataataacctaaattttggaaaatgggcattggcccaaagttagaaaaaggacacaaatggcattgatttttgaaaataccaccttatgtcttagtttcactaattggtgaatattagtggttttaacttttaaagctataattggacatatctcaccaataaaataattaaattagtgtgtgtaataagtggtatttttgcaaataaagcaacgaaatagatgcttgtgtcctaaacaaatgaacgatccttccttccaatccaacaccgatgctgaatagctacgttgaaattgtgatgacccaatgctaatcttggactccgcagagcccttaagttatcgtttgtaatgaaaccaattttgtgggctacgtgttattatgagatgttaggaaaggaattagctcaagttacacttaaaaaacgaggaaattacattgtatacccaccttactttacttattttaatttttatctctatttttatattctttaagatatacctacttttatagatgatgtctccgttagacttcttaagttaatgtaaattatatgctagacttaagtagagagtaggggtatattaggcaactcactcataaaagtgggtatattttaataaaatataatatgagggtatttttgattagtagatataaaaaataggctatttacaaaaatatgagaaaatgaagatatgttttgatatatatggcataaaaacttaattaccctaaatatggcatttt

SEQ ID NO: 116861 - DNA, 5338 bp, Cannabis sativa
aacacatatgtaagaccaataaatggataaaagagtttccctttccaaactatgtcaaacaacttgctaacaagataacttcttagagttaatctttatttttttagttcaacatgcatacaaataagtccctccaagaaaatacacaggcaaaacgtctatagtacttggtgaattacaagcgaccaagagaccataagtctgctcgatcacttggagggcacccataccgtatagtatcgaacaagcacagctcaacttaagcaaaatttaaagctttgataagaaaaaaatataaagctaagtaagtgtgagtggcatacttcagattagacataaaaagtataagtttgagagtaaaatttgctcggttagctacatgttattaaagattgcctggccaatcgtctgttcataagtaaaaggccctaagaccacacacaaacattgttcaaaagttaagggccttaaggccatacaagaacaaaaatatcactagtttaaaagtaaaaggccttaaggccatacaagaacaaaagatgaagtacccaaaataaaagcataaaaatagacaacaaagcctcaaatgtcttcagaataataactggagtcgatgggttcaaagtagtattagaaggactagctgtccacactgagtaagtcttcgttaattcagatgtcacctcccaaaaagttgtgtgagctcatccctacaaaaacataaaaagacaaaatacgagttaacaaccagaaaacataaaaagacttagacaaaatgtgagttaactggccaaaacctaagggtattcactagacatccttgaaatacaaagccaataatcaacaaagtatcaagaatcatgaactgggtagcctatgaatcaaaggccattgactggctagggaagatttgacccgagacgtactggacagagctcctaaaaagggaaattaccaaacaagggtatacaattgacctatgttgataggatagaattcctaggaaggatctaagtcctggacagagttcctagacgggatctaagtcttagatagagttcctaggcaagatctaagtcttggacaaagttcttggacaggatctaagtcttagagagagttcctatacatgatctaagtaccagatagagttcctatataggatctaagtattggacagagttcctaaacaagatctaatagtcggacatgggtctttaacaaacctaagataccaatctaagagtcgatcttgctcatcaaaaactcaaacattatgcatcctaaagctatcaagcagattataatgtggaaagactactctaaaagtgaaactcatcaatggcagattcaaagaaagagagcatatgaggaaagtaaaaggcatacatgggagagagaagatcaaaggtttaaaagcacatcatctaaaaagtttgatacttgattagacaaggctgctcagtaaaggttcctacagtcaagacaagagcgaaaaattccctattcatacagacttccgaacagggacttgggggcaaatattatcccaaatttttcccatctgacttggcatgcccacatagtaaaaacttaagacacgtgaaataaaacttgtcaataataggacaaagtcaccttacacgacatgccaactttcaaggattctaaagtaatcaagcaaaattgccaagcaagaataagaaaaaggagttaagcaggtcatcaagaacttgaccaaccatgtctatctagggaagggaagcttgtagcctagccaagggaagcttataggctggccaggtcttgagaacaagttggctggccaagaataattgtcagaccaaagaggtttgttcaactaaggaggcctagcctttgtaaggaaagctggtcggccaagtagaataataaggttgtacaaggcagttctacagcaaagctgtacaaaaaagttgaacagaaaagctatgtggaaaaggctggctggaccatacatggctaatccatggaggacacatgccggccatgccctaaaaataggactggcctgccaacttatgcaaacagctccaaacaagctgaacgaattatgggacaagtccaacagcccacgaatatagagatattccctcaagatattagtcatatattctaagaatttaactatctttttctgtaatttatataatagataaaaagatgttaatatccctattttaacgaaatatcttcacctatttgaattacgatctcttgttagctctacactatataaatggcattagatcactctctcaagccctaagtcattccacaggaattagaggggctccattaagattcttacacacccaaagactccctctctctcaatcttcacattccatcaatgcctcctagacactaagtcaagtatcttcataagttcttcacaagatcttaccagttttttatttgtaacacattgttctcactattgtaatactgaagagagccatagctagaaattacaaggttttaacctgtgatctgcatggtattatctcaagggtgaatacaactaaaaggggagtaggtcattacctgctaatcaagggggatgaacctctataaatcagtatgtcacttttattatttttattattattatttacatgcaatgattaccagttattaataaggcttcataatcagttgatcgaattctgagtcaacagggttcattcactacatttttctctcaagaaaatttaaactcaaacgattgaaaatttaaatttggagaaaagtggtaaatggtgttttttgagggtatttatacctgaggtggctatccacgtgaaaaaagaatgaacgatccaagatattatctccaaaagcagaagcacatccaacgactcgaaagtctagacgctaagcgtgtcaagcaattaatgcactctggaatcgaggcccaaattaatgataaaaatgcttttcttaatttttgcaccaacaatgaatagtcgttgaaataaaatctttccaggaaagtaactcctcgataaatgtatacctccaccaatagatgattgccacgtttatttcccaactcaaaagatgaaagttcaccttccatgatcagttagcacctagaaagcaataaaaatattactttccaacctccacatttccatttatatggattgggtcaagcttccacactacacaacattatggaagcttggggagtaaatgttatctgtatttttgacaaggaacacgtggacttctgctcagtatcaaaagcccaccagtgggctcaaggaagataacttgggtcaagcccaagttagataagaccttccaagaaggtatcttagctccatattcacacaagcttctgccaaggacaacccgtatctagaagtagttccagtaccgagatctcggagggccaaatagcgtgttcctagaatacaagtgtggtctccctttttctcctcaaatctcagataaaagatcgtatcaagctacaaaggaaaactacataaaatggagatcaagcaattaattcataaataatttcccacaattacatggtattgacaacttaatcgtatcttatttgcctagtcagcacaccgatcctttcatgggctaggcctcacaaaaacaacacccaaccttatgtattttcatgtaaactccccattagagaaaaaagggaaactaagtataattcctataaacattataaacaccaactaattcattcgaattaaggattgaattctctaacaacacttgctcaggaaaaatagagaacttacactcattgtattatcaaagattttttctagccaaaaatacataataatattgactcatggactaaggcttattaacattccaaccatgtaaaaacttcgtgtgttgttttatttctttctttaaattatttattttttcggttctaatttattataatttattttctaaaaatctcggtaaacaacaccgaataacgggcattagtgaactatacagtagcaattgttgattaaagattcctaaattttaatatgttgctgactgttttatttatggctaagtgatcttaattctccttacaatacaagtcacaatctcatgtatgaataataaatttttcgatatttatgtatataaattatttaatattgaatattaataatttaaatgtcaagtatatatgaaaatgttcaactcttatttataaacagaaatgtctttacaaacttttaagacataaaccctaacaacaagatcatacactcctatatgaataaagaattttctaattttattaattatttttcaacaattaacatattcattttataaatatattgatattttatatattcataatatattattcactaattacttcaacaaagtctacatctcatgttgtcttgtattgttacaaaactcgatagatttgaaaatcttctaccctgtactccttttataaacaacataaatatattaatgtttatgattttctttcccaagcttttaaataacttaatgcaaatttgtttgaataatgcctcggattgctataggaaatttggaatgataggaatgtaattatctttgagaaaagaaggtttgcaaaagacaagatatatggttgggtaagggttagagattttacacatgactataagcaagcacaatagaagagaattgatattgttcatcttcaaaacttgtcaaagagtcatattaaaaggttgcatttggatttggtacttgcaaattaaacattgatagatgcaacctctcaatcaatcttagtataaaagttgacaaggagcagtgttgactataatagcttaggaggtgtggttgctgggttaattaggcctatgtttgctgcccctgcccttttatttcagaagaccaagctttgcttggggcttttcgatggtgtgccacagttttccttttgatttctattgtggagactgattctcaaatgtcagccaaccgaataaactcttgtaatgaagatttgtagccttttttagatttggttagggaaacttaatctttattgtctttgttcccataatgttaaagtttgtcatatgtataggagtgataatacattagtttatgatttggctaaattacaactaggatagacaataaagtattgtggaatggtaatattcctcatagttttttaagatcttgtagttgtaatcatattcttttaattgaaagttatatattttttttttaaaaaaaaaaaatttgatgagtttggtggaattcccacttagggcgcgtttggaaagcc

SEQ ID NO: 116862 - DNA, 3453 bp, Cannabis sativa
  modified_base (2019)..(2020): a, c, t, g, unknown or other
  modified_base (3424)..(3425): a, c, t, g, unknown or other
gattgagaaaatcccaatcagggggaagaagagtttgaagtttaagccaacaggcaactccatatgcttgggcaaattcagacccgacctctcctgctgcagcgacaaggtctcaatggccttgctcgaagaatcagtagcaggggttgcctcgggacgaggagcattggcatcggaaacgactggaggaggaacttattattggatatcattgtcagaggcctcaagatcgatgggcttggcaagtgatttcttcttatgggcagtggttttcctttgcctcttgggaggaaccactttagcaactgtagggaccccagggttggttccccatttcttccccttctggtccatgatatcttcataatccatgtctgcaaaacaagacaaaatgttacaattattaagaaggctgatgaaaaagggaggaatataatatccattaaaatccctacagcctataatcttgaataaatcaaaaggctcaattggttctaaatcccatctcacatatatgtgacctatcctatcatccatagtaccgtattgctcagctataccataatatgactcgtgacagttaacctggacgtggaatctaggataccagctgtcaaacttatgagcaatgtagtccacaagaagggaattccaagtataaaaattaagaaatgagtcttggaaggtgactaatgtactacgttcagccctaagtatagtgggagaccaaccacattgattacctcgggatgctccttcatcggattcctgagggggagttttttgaaggtatcatccttgagccaagcgatccaaggccttgtcctcagtcgcaacagtaatctgctgcaaagaagaatacttaggaatcttgtaatcacaagtatattccttatcagtaacaaggcccatcgatcgcaggttggcctcgcttaacaggaaaacgcatgaccgaagaccgtagggaaaagttataaagcgcatgtgcctactgaccatctcaagggtagaagtaggcctcgtcaagagagctgtaaaaataaaacattggtcaaaaacttgaaaaacaaacattgatataaatgagaaagaagagaacaatcactaatgaagtttgtgaaacgtggttgtgtcgatggggaaaagatcatatgtccagaagaatttgttcttgaaggatactttatttggaaagtataccataattttaggcttgctagaatgagtaccgagatagaaaaattccccttcgacgttcttccttgacggaacggccttaactgagtaaagatactcaatctctactggtgtgggacacccctagttcaaaattctatataagactttcaaactaccgagaatcctgtaggagatgaaagtaaacttgaatggggcaactccaatgcaatttatgtagtcgttgaagtaatctctaagaggaagcgtggcccctgcactgatatgctcaaggctcgaggcgcccataccagccgaaccactagtactagtctcacaagtggtccccaggttactgcttcaaaaatgcacacggggtaacaactgaactcactctcctatactgatctaacttggcatgattgtccaagtttgatcccgcaggtctttggcatctcgcccgtgtagcctgagatagaccgcactttcgattctattaactcagcctcaaaggtgacattgggttcttggggagtctttgatgtacatggcttggtgggcataatttcaaaacaatcgtgacattgggtaaaaacaaaggccttgccacatgaataaagcacacgttagaaagttctggccaggctgcttctcccaagaatcagcatttgccttcggagatttcttgcaagaaacgcctctagcgactagcaatatcttcgtggtgggttctcactacgtgttccctaaccctagtatcgttcaaccataatttggaggtggatttataagggttgggtttatatgggatggttgattctgtaggaaactcaaactctaaannttctggatgataaattcctgaaccagagtgggacattgctgcaggcaaaaagtagtcacaatccttagaaagaattttatgaaacccgaaggtaatgagttggagatcttaaacaacctacatgtttcctgaaccctgctatcgaccttgatgtagtttaaccctaaaaaactaccaaaacaagatgagatgacaacgataccaacaaactaagtaacaaatccacacaatgtaacaagcatgaaaaagaacaaagcaacttactgtttgaagttttaagaaggttcatcaatggaataaggcagccattggaaagtacatatgggctatttcaaacaaagaagatagtctttggttgaaatggattcattgtgtttacatccgagatgaaaattggtggcaataccagcctcctagccatggaagctggtattggaggagattggttacacttaaagaccaattcaaagagctggtacatgtcaatgagttatctccctacagtgttgctgctgggtacaaagctcttcgaacacaaagggacaaagtgagttggagtcaacaagtttgggagcgcctgaatacacctaaacatagttttatatcctggattgcagtacaaaacaggttgaagacaagagataggctttgtcaaatgggaattacagaggaagacagatgcatcctttgctgtcaagatattgaaacctgtgctcacttatttttttaatgtcgagttgcaatttcttgcctacaagcagtgaaaaactggctgcagtggaatgccactgctgtgtctctgccccgattgttcagatggattgggagggctaaaatgagcaagtttaggaagcaagtccttgctgcctctgttactgggttagtgtactcaatttggagggcacaaaacacaaaaatctgggaagggaaataggtggaactcgatcaattgctgcaacaaactaaagcatctgttaagcaaagaatctctctctactggccgaagaaagtacaacaaatggaccaaatgtggtttagtcaattgtaaataaaaggaaaggataagacatgtacagagaggtatagaatatatagtaattgagctagaatgtcattttcatttgcattggtttatagctgtttaaggaccttgtttggtgcctttagattgtaaaattggttgtgagcaatacaaactttctgtttcatcaaaaaaaacttactggttgaagttaaggcttagggcaatgactggttactccgtctgaaaatcttcgaacagagcaaggatcactttgagagagtgaaattggaggaaactcgtagcaaaaaggtcaaggacagagaaggcatgcaagttctcagacaaactcaacggtgatccttgacgaagaagcttaaganntttttcaaactttctaaaatggaggaaa

SEQ ID NO: 116863 - DNA, 1131 bp, Cannabis sativa
  modified_base (552)..(559): a, c, t, g, unknown or other
gggatggattggtatactaacatgattctcaatattaactaatatgctaaatccaaatatttgaaatactgccatgttgattttccaagtccaagttcatttaacagtcaatttttgttgtcatgcatacgcaaaaataaagcgtttgttaaattgtgttgttttacacaagaagacatcttcattatctaattgagttttgacatcttcctaatcctgttcaattaccgtctatattacgatttgtagagattgaacttgactggttgcattaccatgaactctaagttacctggttttgtttgttgggtaagacttttgggcgctgcttctttttctgacttattttttattgagattaaaaggcaaaagagtttagtcgcaatcatttagcccttgctgtcgtgaatcattatgcatcttattttataagattgactaagtaaaaaccccatgttattcttgagtgtgtgcatgtgtttctagtcctttttgcttgtcttagaattcaaaatattgtttttcctcacagataataataataataataannnnnnnnataataataataataatgtattgttttcactttctacaactgtcaccaaatagcaaatatattatgcatttaatgatccggagttagccctaagttgacccattactaattttcctagccttttgggtctctgtctgtccttttcttatttttttttttgttaagagaactttaaagtcagtcaagtagtacaagttctgggtctgggactgttaattattttatggcagtactaagtggaaggaaagtaccacctcatattagttcaagtaggaagatggtgtatgttgaaaattttgacttcaagtttcaaattatatattgtaatatataaaaaaaaaatggaaccaaagaggttacaatttgttttaaagactaattcttttttttttttgcctaattcttggaggtatttttttttttattatttatattaggaaaaattcatgtaaaaattcctaaaaaattcattattttgatatcttacatatataaaaagagtgaatacatatactattgatccaaaacgtcacccaaaacggtgcgtttttattactttccaagagtagttt

SEQ ID NO: 116864 - DNA, 1028 bp, Cannabis sativa
aaataagtctttctattctcctttagaagatataatcttaatacttataccaaagtataatagaattctcatgattcaatttatattttgtaccataagagaaatatgaggtttctttatatgaagtaaatttcaataaatttataaattaaagaactagtaggactaatatcagaaaagactttcaaattctaaaagagcaagaatgacctaatttattcataatagaattcaaaactaaaaaaaaaatcatctaggtgatgatattgtatatgtcttttctaaatctaaaaataacgagtctttaaccatagtttgaatgtcattatagcctcaactatagttatttccctattgcgccgaaagatgaatctttcattataacttggattttagtttcacatataaccttccttagttatccttaaataagcaatgtcacaaaattttgcttacaaagtatatttaggtacaataaattaaattatttattgaaacaaaccaaaaattcattttccttagatatggctaatggcatacttagaacgctttagtcttattttttaatccctcttataaaagtcatagataatttcatgtctaatatattttccattttctttattagtgttccatacgcaatattttaagttttatctttatctttattctttatttaaaacaaggtagttaaagaagtatgcttctctctttcttttagttaaaattttgtcacatttagcatgagaattaactttatgttggtagatataattgtataaataaatcaaattaaaagaaaacaaaataaacaaggttcacaaaagaattcctataacacaataagtttaaataatagtgtttaccgagattttttgaaaccgattaataagagctaaagaaaataaaagatattaaacaacaaacaagtagattttttacgtggttcaggcgttaatgatctttgaaattccgtattttaatattcccaatttattatttaattaagtgattaattaaatgcggaa

SEQ ID NO: 116865 - DNA, 3972 bp, Cannabis sativa
  modified_base (1796)..(1805): a, c, t, g, unknown or other
aaatttagtatacgtgccttgcacgtaattttttgctagtatatatatatgaaatacattcaatggatagaactgattcaatccaacatcccaatggatgttggatattggatcgattagatgattgaaattaattggctcggattggattataaaatcaaacatctaatatataattggatcggatctagagatgtctaaaaacattggatgtgatccaatgaatactcctagtaaaacatattaatttgacctagagttttctgtgtggaattcgttaaacgtgtaaaaaaaaactgttttgaagtgtaaaaataaaaaaacttttttattttattaattgataaattagattatgtattttttaaaataatacaaaataatattttgtgctgatttttatcacaataaaagttaataataactcgatctattgttattatgataaaattaagtacattttctacatctgttcgtgttaaaaattatcttcaagttggttatattaaaaaaattgaactcagagtactattttgtaccatagaaaatacagggtccaatttatcattttacaaaatagaaggtttaaaattaatgacttttgcaaaatacatgattgagggctcgtttgatacgtcgtattgtgttgtattgtattaatactatgtttagtattgacttatattaatagattatataaagttataatatatttcaatacactcgatcctaacaccgactatgggtcaagtctcgaaattgggtttgggtcccgagttcgggttcaagttcaggttcaggtcttctaggtggtccgagtctgggtccaggtccaggattgggtttgggattggggtgcaggtctcgggtctgggactagtccaagactgggtctgagtcccggtctaggtccgagttcgagtctgggtcctggatccaggtccaaatcagcgtctgggtctttgtcccggatctgagtccgggtctaggtccaggtttaggttcgagactgggtcttgagtttgggtcgaagattggggttgactccgaattttttgtaaacattataatacaagttaatacatagcatttgttatgtataaaataatacaacttacatgttaggaaaaattttggtcgtaataattaatataatatattgttttatctaaatatagtgttatttattatttaatacaatatgatctttatatggcgtaacaaacaaatctttaaaataatattaactcgcatgtttatttggggaagaaaaatgtggacaaaaaagaaagtatatctctcaatgcttaatattattaatttgttgaatctattttttttatatataaaaacaaaattaatgagaaattgatatgttatatcagtcaactttcaaatatagttttaataaattgattataaaattattgcaaatatcaaagttttttattttttatttttttttaaatgagaacaaattagttatgaaaaaggtaaaatctcaaatagtcaaagagttaaaaatatatatttagtattctcaacattgcataaattacaatttcaactcgaagcataaagatataaggttgcatattgggtgagttttttgggtctaagtttcaagttttaggttttgcaaaattgtgtatcgaaccactcattttggggaccgagtttttcaggtgagtcaagtgtgcgcgggtaaggcaccaactttgcatttggactgggctaccaaattaagctttatgttttattaaataatatcattttttttaaataataataataannnnnnnnnnaataataataataataaaatccttatcgtcattctcgttccctttcttttcccctactatgaccatgtctctgagtctctcttcaggaggaggctaacgaatgtgctttcactacgggcggagggacgaaacaatgagagagagatctagaaaaaagttaaaaaaataaaagaaaaaacaacaaacctgatgtggtcggttggaggcgtgcatggcaaacccgccctgaaaagaacccgagttgagcttgacctgcttgccaacattgtcaaaaccttttttttgggggggttttttgggttcggatcagtcgagttgagcagaggggtgggttttgagtataaatgtccagccctattgttatccaaaattttatacacctgacgtggcatgtccacataagtcaagactgaggacacgtagaatacaacattgtcaatggcaaaacaatgtctccttacaagggcatggcaaaaatgtcaagcaacaagcaaaatgagttaagcaagccgtcaagaagttgtacaaccatgtttggccagcaaaggggagttcatagatcggtgaggagaagcttgtatggccgaccagggtttgagcacaagctggccagccaaagagtgactattagacccaaagggcctgtttgaccaagaaagtctgacctttgcaaggaaagttgtacaaagaagctaccaaggctggccatcacatgctaaggccggccaacacatattaaggatggtcaacacttaccaaagctggcagacacatcccagaattgtaggagcaatacctggttggccataagagtacataggtcggccaggctctgcagaataagggtgggttggccaactcctcttctggcagacacttttggtgtctctgtggctttcaacctggacagacactctcagctacgaattgacttaaacaactcacgaaaataggggttcaactacctattctttaggaataattaataggttattttcttatatatttaatatgtaacaaataagtgatatctcctcattttaaaggatatcaacttactttgaactagatctgttgtaagctctctcctatataaagagtactaggctaaatctaaggtgctaagtcattctaagtctttccatatgctacaaaggctgtcttaagcctcatacaagtgtacctctctctccctctctcaagtctcatatctcatccatgccacccagacactaagtcatcttctctttaagtctttgagaagaactcatcatttcttggtttgcaatacattgttctcactattgtaattcaaagagagccactctaaaactcacaacacttgtgatctgagttgtattatctatagatcaatacaattaaaaagggagtaggtcattatccgctacacaaggggattgaacctttataaatatttgtttctcttttattatttattgttcttatttacacatggtgattgtctatcataaatacgactccgttgctggttgaccaaattctaagtcaacagttggtgttttcattgagagcatttttctgatcaatcaccatagttctatagagaataaatccccccttggatcctcctcaagatcccctaacattaaatcccaatgctagtgttcctcccaccacaaaaggacctaccgatttggataacaccatcaatccaaccaatcatgtgaatattgttgatcctaccattcctccaaggctggaacaacccacaggatttcgtgtaggagagcagatcaacatggaacaacctccatagaacacaacaaatgttgttgttccacagtgctgcgtaggagaaatagtgtcaggaatcagcgaaccatttattggtgagccttaatcggcgaacttataaaatttcagaaaaatctaaataatttatagtatcgaaaaaaaggtttaaacagttaattactatgtgtataagaaaaaaaaaattgtggacacaatataatatttaaaccttattttcgacattgtaaattactcgattttttttaaaatttgtcggtggtcctaaataagtataacatatacaaatataaaaaaaaatagcttttttcagttttaaccaaaaaaaattaacaatattacaaaaatacttctagctggccaaataaacaaa

SEQ ID NO: 116866 - DNA, 1661 bp, Cannabis sativa
tagatattttatataagaaaatttaaatttaaatttaaaatatttaaaatattatagatattttatataagaaaaatttaattataaatattatattttagtcttctagtcatatttagtgtgcttatattatttattttcattttttctttcttttcgatcaatatataaatgaagtgacatttaatgagttttataattttattcatcgatacattttacttagtttttttaaaggcatgatcttgaaatataatttacataaattattttctaatatcaaaatcgaaagtattttaagtcgaactatatatttgtaaggtaagtcaaatttgatatatcatgaatatataaactactaattattgataggagacatatatatactaatgttgccgcaatagttaaaaaaatctcaaaaattaaaatctcaaatctcatttcaaaattttttaaaaaacacattatttaattaaagaaaataaacatatatatatatatatatattgcacttaacattaactaattaaacctaattaaaaagaaaactaattataaatacattgcacgtaacatcaacctaatatatatatataaaaaatacatataataaattattaggagctaattaagcacatgttctaatttagtttactcaatataaaaataataataataaataataaatgaatttttttaagaataattaaataaaagatattttcaacttcaataattgaatgatcgctttaatgttgcaggcctattttgtatttggtattttgtttttttgtttaaaaaatgagaataatattttttttctttttttttgtaattttcagggtgtttgacactatagctaaataactgttctttatttttaaaaattaaaaatagttttttgatcacaagtaaggatgtttggcaatattttcaaaaaataatttttaacatgagaacaacaaaatttattttctaaagtttttattatggtatagttcctccaaataaaaatattttcataagactgttctagtaatgaaaagttagttatttttcgaaagtgtgttcccgatttatagctaatttgtcaatttagaaaaagtctcgtagaaagataggtaccatctggaaaggcgttcccggatgtctattggttccactcggaaggattctcaggaaaagttagtcttcctccagaaaggagtttcagatggctagttgttcctcctgaaagggagtttcgtttagtcgattccacctgactcttttcctatccgaaagtcccttcagcatacactttaatcctctgtcccgatagcatatatctcatttggaagcactttgtcttgtactgacgtggagattctgttacgatgagtttgttgaatttgttacgtcgtaactaacttaacaatttatcaatgcaaccaccgaacttaggatctttatcatgagcctacaaataccatcaacacttattattttagtatgcggggttgagacaagtttcgaaaggtgatcttgagagagaaagattgagaggtagagagaggtatattgaatattaaataaatattttatgtttgggtataaggataaggttattattagttgggtttggtgtgtattctagggttggatatgttggaaattatttt

SEQ ID NO: 116867 - DNA, 2067 bp, Cannabis sativa
ccttttaggttacaaaaaagaaaagcaaacaaaaaaagactgattttcttttcttttcttttcttttctttttcagtgaagcttcaactttcttcatccatgataatactctttaagcaatcaaataataataccataaaccaagaaaacaaaagtaacccaaaatccaagattttgaaacatattgtatatgtatatgaatataacatggctgggctaaacataatgcaagcatataacaaatatgtatatatattacatacatatatatatatatatataaaaacaaatattgataacacataccatttgaatcctttcggtgctgaagttgaagttggtaataggaagagaaggtggtggtgtagtcccattcaacatttttgtgtctctctttcaagaaaagatcaaaatgaaatctttatgagaaccctttagagaaataagaaggtagccctagtttcccaaaacccaaaagcaagaagaaaacgaaatagctcttcttcttgactcgttgtcttgttgagttgtgacaccactattttttgttacgttccgtacaaatacaaacccctttctctctttctctctctctctctttggcgctaacccagaattttattacgtcaaaataacataaaaacgacacctttttctacgacagtctttgaaattgaaaccccaaattttactgtcgttttgacttttgagtgtcgtttttggtgcttacattagaattagaatagaatagaagcccaaaggtgaaaacttgcagaggaaaaagaaaggaatttgggacgagaataagaagaagatgggttacgttctgagagtacgagctgcgtcattctttgcaggggctgcggcagcgtcgtttttggggatttacattcttcataacgattacaaggttgcccatgaagcaatttctcaacaggtattgctttttaaatatatgaattttggggatttatttcatttagtgtatacatttttgcatctggttgttcttgaaaattgatgggtaattgatctttttgtttggtttgagagattttcttgtattttgtagttttaattttggggaagttataattttttttgagtgtaggatgaaattttaggaaaaatcgaactgtctagatagtgggtgtaatgcttaagctaattgggtttgtagatgattcttatggttgaaaatggaagattggaactttgagtttttattgtggtgttttgtgagtttctggacatggtgcttgttgtgatgagtaatggcttagttaattcggttgagattgaagtgttcacctattgtagagagagaattactaggcataaatttctttaggtcatccattgaagtgatgagaagtgatgatagtgtaattaggtgatatcttcccatggaaaaggttccattttggtccatgataggaataattctatgttatttgaagaaggtcagaggagttagaaaacaaaatgtttgatggggaaattggttagaagattgtgtgctatggttgctactaataattttggtttctcttttgttgagttgggtccatatactgtgcttgcttgctgttaaacattccttaactttgatttcgctactgctctttgtatctttgatattgctcttcattcaacaaaaacaaaatgatgtcttcgaatttgctggcaatgtttttagttgcatattttacttctcttctgcttgactgttgtatataaatgcaatcatgtttgctcatcatattagagatcagggtcagttagtagtttgaaactgggtggttgttttatttatgtataaagaattccttcttatttcatttcttatggtcaatttcctactttcactatacaactctaattattctcttataactttgtagttaacataatgtgacttaggatcactaagcaaaggagaagaattaaaaattttagtacacatatggcacttaattatgatttcatctctctgtttgtccagatgaaaggtttgcacgagtcattggatagacgagtttcggctctagaaaagttgaaacaaaa

SEQ ID NO: 116868 - DNA, 1354 bp, Cannabis sativa
  modified_base (43)..(77): a, c, t, g, unknown or other
gtgtttatttcatcgttgtagaaagttcatatttaggatgttnnnnnnnnnnnnnnnnnnnnnnnnnnnnnnnnnnntaaaataaattccaacacaaactacttccaagtcttccatttaaagaaacttcttcaatacatgtctctaaaaaagtttttactacatccatattcttccaactcactctttaattttaactagattgttccatctaataatatacaaattaataatatatattggaaaatatttctatgcacaaaaattataaataaagtaagaaaagtatataaaaaataaatatatgtttgtttgtgtactgatacaaacagaaaaaaaaaaacaaatagatatatataaaagaaacaaaggcaatgatttcgtaccaattgttattgctttggaacgcttcctgcagttaatattttaattgataaatgtataaagtcttatattacttttttgaaaaaagaaaaactttctttcaaaaaaaaaaaagaaagaagaaaaaaagaaaagtctaacatgtttgagaaagtgagctatgactatgacccactacatgctataaaaggagagcatttaatgttcacaatttaaataaagcaaataaatggctatcgtaccagtacatagaaggcccaaaaaataaacataatatataaacgtattataccccaaattcaactcccatctaagtggaggacatgtgtcaatataaagggaatatggatagatgaaattgctttttatggaataactcattaattgcgtaagtatcacagtatatttgtaacctgatgactgtaaggtcttatgcgaggaatcaatatacaaactgttacttagtatattagtgagaaacgatatgtctctaagtgcgactagcgaggcatcaagtacgttatatctaggaagataaaagcaacacatatcaactgcagaagcgcttagtgtataatgaacaaactaagtgcgatagtcgggttggctcgagacctagtaagcgaggtgcctatctcgctgtaggaaggcttcctataattttacccagttaacttcaaaaattttctcggtgaggcttacagtcctgacaagtcagaagctaacattcaaacgagcctcaaagaactctttgtaaataagaatcacgatcgtcacaagacgtgtataattaacctcggaaggaaaaatggtcccagctcactattgtgatcactggaaccaaacttctgtcgagacattccctgatacaacaattaaagacgtgtttaaatacacgatctttttgacccgataaaagcaggaaaatcacagctatatgattttcagataataaccgcatttacactac

SEQ ID NO: 116869 - DNA, 1386 bp, Cannabis sativa
atagcaacatccgtcgagttgttggtagaaaggtttctcaaacagtgcttgagcctattaagtttaccaagaactataaataggctagttataggccggttccaattgttcacaacagtgtctgaaattttttctaaatccaaccagtaattgaaaagctgaaaaggtttagagccaaacttaccaatttccatctactttacaatacaaaagctatgatctgagcacgtctcccactgtaaaatagtctcagaatttggaaaaagatccatcaaactttcattcttgaacaccttatctaacttagagaaaatgtgatctcccgaatcatgtttattatagacaatgtatgataaggtcccgaagacttcaaaacatcaacttgcccactagctagccacatttgagtataaaaatttcaacacgattaactcacttcccaccaattctatcttcatagttgaacattgcgttaaaatcacccagaacaagccaagaaagcttttccaagccaattgctgctaaattatcccataaacttttgcattcagcaattgtgttaagaccataaacaactgtgacaagaaaaatataattgagacatgaaaccttaaccctgcaatgcacaaactgaatgtcttccataatcacctccacattcacaaacttttttgccacagtggcaaaattctcccatcagtaacagaactagattaataatcccgatcagagaagattttattcatcatactatcaatcttattctcatgaactttagtttctaaaagagcaccaaaactaatcttattcaagcggcaaatatccaaaataaatatttactttttgactttattcatacctctaatattccaactaaggatatttcaccactccatcttggacttgattattaggcaaagacacttccaaatcagttggaacctataacgcttcgtaatagtttttggtttttgcattactgtgagaagatttggattttttattacctgatttcttaggagtaatccaatctccatcctgatgttgctggtccttgattgaagtcgcaatagtcaagctttttgactcctgaatctcagtcgagtcaccaccggttgcatcaacaaaagctgattaacaccattaacttctacttgatcaatcgcagaggtttcaatctctggtttgagatttgttgcagtcatctcaacatttttatctttcccctgactagttttggatttcctaacccaaaccatccctgtatcctttgcacatgagctcacattaagtcccatgataccacaagttgcacaagtagcggggaatcatgtccctaaacttttaaggttgttgaaaatcctccctgaagtattaagattgtta

SEQ ID NO: 116870 - DNA, 1844 bp, Cannabis sativa
  modified_base (757)..(764): a, c, t, g, unknown or other
aaaaatcttaattagccttttttgaatgtatggagaattatttttgaaaaaaagcaaggaaaaaataagaaaaaaaaaagagtgtaacatagcataggtaagaaaaagactgggcattaatatattatttagatttgtttatgaagaaaaaaactagtgacaataatatgttatcattacatgatacatctccaaggtggagcttgttttaatcatttctatttggataaagatgtcacttgcccataattatattagttgtatgcatatggtggtgacaaaaatattatttttattattaattattttataaaaatggaaaaacatatagaaaaattttaaaatacatttcttaaatttttttatctgttttggtattttggagaattttttagtctaattttttgtagttatttaggacgttctctaaaatttttaaaaaaattaaaaaaatttaaaatgctgaaaaatagaattcaaaccatctcaaaatttcttaaaatattataaaatatcttaaataactacaacataaataattataaaaaagaattagactaaaaaaattggtttagatacgaaattagataaaaaaatgtatcagtagattcagtgacggacccacttatatatatgtggggattatagcccccactaacaaaatattatcttcttaaaaaatcaaatgtaatttatttaatttgataattataggctaaaatagtagaaaagccctacaaaattaaataaatctaannnnnnnnactataatataagtataaatattttttaatgattaataagcccctacaaagtaaaaattttgggtctgtcactgaatagacaacttttaaggtgtgtattagtaaagtatccaaactatatatatatatatatatatatattatgatgtaaatgttgtgaaaagaattgtgaagggcaaacaaaaccaatggttaaattatcaaatactatggtgtgattaagcccattggtgcattatatgggtccagtccaaatctctattataatataaacaatcatacttggcgtgtgtaattattcattcgttgcaattgctgtaagtaaaggaagatgcttgacgtggccttactaaatcccagctaccgtttataccttcctttattatcattgttagagatattagagaggtgacttgaaaattggtattcattctttttctgttagtagtgactagtgagtgtgagtgagtgagtgagtgagtgggtagtaataatagtgatcaagttatgatgatgtgatgagtaaacattacaaacaaattaaatgcttatatgccaacatgcacacatatacttttatatataaaaaatgtttatttatctgataatttttggtttaacatgtttttagtttttttttttttttttttattatgttaaagttaacatcagtttacttatcaacaaaataacaaataaacatatttaataaaattaaaataaaagaagattacctatcacaattacatattcctttgaaattcctaaaattcctcctaaagaaactctaaccaccagtccacccaaaactctcttcatggaaacgaactccattggaaacgaaccccatcattcattgaaacccttcaatatcagtcagttgatcttaggccaataaatgttaatcctgatagggttaggttctacttaaatgtattatatatgttcttagagttattcgttaaagttcgctcggtcgaatacttacatcttaagaatatgatagtgcaattgagtggaagcgctaatcatagatatataatctatagcttctacacgtatttagaagtgaaacgatga

SEQ ID NO: 116871 - DNA, 1503 bp, Cannabis sativa
tatataaaaatatgatgtataatccaattcaatataatacaatacaatacaatacgacccaatacggcgttccaaacgagcccttagtgaattagcaatgctacaatttagtaacagcaacttcataaagtcaactgatcattgcttaggggaccccaaacaactagagaaaagaaaaatcaaatttgaaaaatattcagaatttaatatataactagcactaggaaagaaaatcatacacaataacattagactatatggcacaacttcctcgaggataaatttgatattaccagaaagaaaacagtaaatgtatatgcttacctgcaagtagccaaacctagcattgagaaagttttacataagaccagtgcagagctacaaagtctccactcaaactttattttattttattttcacactaatacattttctcctttatttaaagtatagatattgaaattgtgtatttaatatttcaaacttatagaatgcattttaatatttcaaatttacacacgtcaaataactgataataatttgatccgaaataaaaaaaagaaagaaaatctaattttgttccaacccaaaggacaatacccacaagctcaattaattactgatagtcccatacgaaatatataaagtgtactacatacgagctttgtattctattattttcatttgagaattatttttttggacaagtgttgaagagaactacatttttgatataacacgtcatatgtagcttagaaaacagtgtgtgtagtgcacctaacaagtgtaagcagccaatttatatatcggctaatctgagaattccaaaataaaatatttatgcagtgatgaaaagtcacatgtgcatgcaattttagtacattacaagcgtatttaaagccaacaaccttttctatacttattatctgtatggtttattccaggcttcaaccctatatactacaatatggctcaaaatcacttctaattaaacaatggatccttgattgagggcatgattagcctagtgtcagtgaaaatgcaacaaatatctttactgcttaataattcaacctaaaactgtaaaactctgtgttgaaggtgatttcaaatttgatcctcactaataaaagcaatctgaagtctgtttgaggtgacaccagtgagaatacaacatatatctgaccttaacgaaaagctgtacaactaaataaattatttcctttggaaaaaaaaaaaacacagagcagaattatcaataaatcccctcccccctaattgttgaggtttttttttatactctgatcttctgctgtggtttggtcttttaacgttttggctttagctatgattttttcacaccttcattaattcaaataaagtttctttccagggtaaaaaaattatccttccccaacattccggacaccgatacaaattgttgcttgagatgaaatagtacaaaaaaaaaaaatgaataacacacaaaagtgaaaaaaaaaa

SEQ ID NO: 116872 - DNA, 1193 bp, Cannabis sativa
tttaacaaaacagagttaattgataacttttgcaaaatattaggtctaaaatagtatctacccttatataatatataaatataaaagtttaattactaacatattattttaatattaaaatataaaaaaaaaaaaaaaaaatagtatagtatataatgtactgttatttttagtcggacactataaactctcacttataaaatactatttttgaaatgttagtatcataacataaaatgcttaataacaataatgttacattaattccttatcccaagtaacttggatgatctctatatatataaatttatgtatatatatatctgctatataataaaaatcatcatatgtatgatcaactgcatctattaaattagtaacactctttttcgccatcaaattaagtaattctatgtgcataacattacaaagagagttatattaatcaatcacctttatggtggataatttaggtgcacacatcattattttaaattaatataatcatgtgcattatcatcgacatattttaagtaatactgaaaaagtcaactatatgaagagaagagtctctcaattctctttgttttaacttttactccagaaattaaacaaaaaaaatagataaaatacaaattaattaattaattaatctatatccaaacaaacaatatagctatagctcgttccccacagggccacagacgcgttttcaacagtactcagcatgcaaagtttgaatttgagacacactgctttagctatcaacctcagtattatatttctgaaaatttctgtagtatatttaagtaataagtgttttggtaaactcattattaatttattcaatatttaaaaaagtttttcaatttttttttttttttcataatcacatatattatactcatataagattatctgtaaatctttacaaaatcttaaaaaaattacaatgaagaaattttgaatatagtagatttaaatgagtattttagtagatctactatattaatttattcggtatttaaaaaagtttataacttatttaattttttatgatcgtatacgttgtatttatataagattatttttaaatttttagaaaattctgaataatttactattaaaaaattaaggtatttaaaaattatttattatgcatataaaataataattatgtatgcaataaaata

SEQ ID NO: 116873 - DNA, 955 bp, Cannabis sativa
ctctctctctctctctctcagataactgaatctcattgatatccccttcgtccgaagcctgaagcccaacccttcatcgtctgctcgaaacccaaccctgtacctttcgccctccatgttcatcgtccccatcgcccactgcgcagcccagctcgagtcgaaagttctctcctctctctaaatctcatctctttctatttttttttattttttctaggtgtgtaatgtattcttaaaacctaacaaatcactaatcaatgtccaaatccaatttcgttttttaatttttatgtttataaatttagaaggtataatattattctcttggcaagatagatgtatgaaatatttttttatttcatttaaatctcatatctgaattagtgtatatatattaacaaatatgagatatattttgtgtataataaatctttatatatcaggtttaaatggtggtttaatatgtgtgtatgtgaattgcacaatcgtggtggccagctctgattttttttcttaatttgtcggtgtcaaattttcatcagttatcgtttgataaaaagatatttgcttcactttaaaatcgacataatatgtattactttttgcttcgattttcaagtgaagaaaaaaatatttttgcttcgtttaagaagtgaagcaaaaaaataataatatttgtctctatggctatagcgttggtcgcaccaactgacacaaattctttatatttcactatgaagcaaaaagctcttgttgtagtacaaatgacacacaggtcgatataatttaatatctataatagattttgattatattatctattcaaataataaaatataatttaataaattatttgaatttaattaatatttaattaaataaagcatttattagttttaattgaaaagatattgtgtaaagaccgcttaagtttaatatgttggattattaaata

SEQ ID NO: 116874 - DNA, 2438 bp, Cannabis sativa
tattttctaacaaaaaaaaacattactacaaaaaaaaaaaaaatagaaaatctaagaagcattactagagaatttctgtaaatgaccctttgatttttatttgttatttttatttatttatttatttttttgaaatgatttttatttggtattgaggtgcatgagtcagttcaatgccacatgttttagtgctattaaatagaatagagagcatattataaaccttgcacaatattcgtgtcccaaacaatcaaatattctttccaatctttttcaatttatatgatggtcatgcttatttcataatcaacgtttaataaaatatcattatcctatatcctattgtagatatgtttccttacaagaatcttatggacatttataccccaaatctgaatcacttttcaatgtatgatggtacaaggatatacattttaggaaaaaaaaacatataaaaggtattgatcaacatgtcatttgtatactaattattatctttttatctaggcaaagctcacaccttcaccttttttgcagcttccttgatttggtcaattgtataaacgccgaagaaatcgtcatctgttatggagttgattgctgcaagtgcaacatcatcgacactaactggtggagccaatatcagatcagatgctggaagagagtttaatggttttgtgaagttctcgacagaacgcagtattctctccagcggttctcctaccaaatctaatggaatctcatagctgtccactcgtctcttcccatatatgaaacccggtcttagcacaattcctgtgagaggtttgaatacacaagtaaatgaaaaactgtggaaaagaaatgttgcagctaaggatgcaagacccagacccagtggttatgactcaaagccaaaaacatctaattaacttgaccaaatccaaaactacataacctttcactagcttcactgagcttgttgctcccatttctttatttcaaacatggattatttagcacataatctcaaaaaataaaagaaaaaggtaaacaagcatcaacattttcatttttgtatctttttctgagttgaactatgaagttctagtaacgtagggattcttaaactcttcaaagaaaaaagaaaaacggagaagaaatgttttacagtaccagagtttggatatttggaaagaacctcagattctgctttcctttttccggcgaagtatccagatgaaagtaaaaatgatggaagattatagtcatgcactgatatgaagacaaatttgggaattcctgccataaaagaaagaaacgtaagacctcaatactctgatcatggactagtagtatcatagcatgcattgtccatagttaagaatcgcataataaattacatcagaccagcggtgggatgcaaatagaaagtaaaacaaaaatgtcgatctagacaattatcattcactccttgaatgatacgacaaggagtttcaaggatcaagctataagggcctttccttccaaagctctagcaaattgttctggcagtggcatgacggcaattattttgtcattacctgttgaacttaaaaaaattatggccaaattactttactccatgctaaggaggaaatcaaaaccaagggcactggatttcttcccaattagactaaaaactaatgtaacattaagaagaaaataatgagggatttaataactgacatgcttaaacagcacttcttgagaaaagaaaaaaaaaaagagctaatgcaagctagaagcagaacaagacagaatttcacaagggaaatgacattgagttgtccaatacatatcaaacatttagttgtttccaatgggtcctctgcgcactgaaaaaatgtaaacttgacgagctttcaatagggagctgttatgcaatgtattaaccagctattacaatggaaaaacatactgatatcaatgatataaactgctacaataataaatctgatggctgtgcataccataatccttagcagcattaacagcgacaacatttgcttcaccattgatcctaagcatctgttcctcgctgccaaagcccccaattgtggaaacaactgcagttgctccaggaagtacttcatcccagttaaggtagaaaacatctcctgtttatgaaaatttaaaaattagtgttctaagttctaacaaaaaaacacacaattttggaaactttctcgaaagagatcgaagaattataaagtgagcaggcaccatgttcctgctgaataaagccataggcacatatcaagtaagcaaaatatcagctcaccaatatgtttatacatatccacgagaacacattaaattttggtatgttgatctatttttgcaacaataagctgcacaaacttgtgataatcatcaatgtacatcttctacaaatctctatcattcttaatacatct

SEQ ID NO: 116875 - DNA, 3376 bp, Cannabis sativa
aggatgttaatgaaacatacatggtagtaaatctagatcctagtaaaatatttccaacagattaaccttcagcaagtctttctacttttcaggtcctcaaggtccctcttcaaaacctcgttttgattcagcagacacttgttggtggcctacagctgttgattttagttttgacatattcgagttttgtgataaaggtgcccacttcctttatagccctatgcaccatcaaagccaccttgcacaggattgaaatatgacaaaacaaaaacaatacacgatagtaagaataaagatgtaaagatcaaagttcacccccactgcttgctgattggtcgcgtgggccagggtgaatgcatcagtactactgcaagtcgcccatgtctccaggggaaacttggatgcactactagccacttgatccagaagttcagcagcaaaaggcgcagcttccctccctaccgtaggtgccatctgcttttctagggcttcgatgtccaccattggcctaggaggaacagtggcaaaaagtccttcagaggtttcagccctcttcatagcagaaactctctttgctctcatgcacaaaaccctctgttcttcctcatattgcctgctcaaagcgtgttcagaatcctttgccctctgcatagcgacaaattctatgagaatgatcttcattgggaatttggagcctactgaagggatctcaagaagagagttaagttgctggcaccacaattgagacaactaatgtggaggttagtgcggcggtaggcactgtcgtaggtattattggtgtagttgtggagcagaaggcaacaaatcaaatgaggctagattactggcttgttgagggtttgaatccagcctcctcctcctcttttactgacttgttgaggattgctctatttatttactcctttaatataaaataaagaagtaatgcatctgtaattgagacatttcatgtatatagaaaaattctacaacgctccccttaaaaggaatgcattgatgtacttgtgtctgttttagcgtgggaagtattgaggaaattgagaatttttttattaaaaactctcttacttataagcgagctcaatctcctaatcctaaagcaattgggaatcttttaaatttaaaaattaaaaagaaaagaaaaatgataagaaatatgattttttttttctcttcatcttctagcttagaattttgaaattcatttgagaatatgaataggaattctaaatctaaaaggtaacaacagtttctaatgctattaagattaagataaagctatagtttaaaaagaaaaagataaatgataagaaaaagatgaaagatcttttctcttcttcttttctactctagattaattcgaatgacatttcaacaaggactaggatttcaatccaattaattctaatactatgagagatatatgaaaattttaagctttttttttaaagataaaatatatgtgaaaaatgataagttttttctctttttctttgcttaataatttttgaaaattccctaacataagagcaaggaatttcaaagtcctaattctattgggaatgcttgaaaaatagaaacaattatctaagattgtcaaaattgatgcccatatgatagttttgggagaaacgagcttggttcacgtcatcaagtcaactccacacaagtataaagttgacttgggggcaaacgctaacccagaaacttttcctggtgacaaggaaatcaatgtttgaaaggttgcaagaaagatgacatctcaaatttgagtaatcctgagtcatagcagtcaacctgggagtggtcccaagccctgtgcccaagttgactttaggaactctagaatggattttcagacttttataactcatttccaactcactatctttcaatattgtataccatgaaaatatgaagcaaccaagtctaggctctgggagttgaaaatacagtaaccaacacctcaaaagtcaacctgggcacctagtgtttcgcccaacgcccaagttgacatcctgaactagggtttcaatttctgagaccttcttgaatcaaatgtgtcaaactttgcattggaacatgaactagatataccacaaacatatttgaggcattagaatcagtttcagagaatgttcatttttgagcacccggacacccggtgcttgggcaccccagcgcccaacttgaaaatctgtcaacctgggccagttccaagtgtcagataaaaaatcttcttccttttcatcaaaatgaggaaataggtactttcagggaagaaacaacacatctaggtgtcagaacaagggcctagtgcccaagttgacacctagggtaggcccaacgccgaggttgacattttgccaacctaggtcgtttttgaggaatttttttgagaagacttttgggcatattctctgttttaagtaaagatttagattcaactatttttggggagcaaatgaaacttccaggtgaccgaaaaccaacgcccaagttgacacttagcactaggcccaacacctaggttgacatattgttaacttgggctttttcaatcagtttctcaaaaaagtgtttcaggcatttttttcttcatcaaaatgaaaatataagaaaacttagggagaaaaccacaatctcgagagcttggaaactgagctcagtgcctaggttgacctggtgctgggcctagccccatattgataatcaacctggtgtgctggttttgatcattcaaatgcaaattcttctccaatctttctctttgaaatggtcaaaacagggtagaagctctgaaataagcacccagcgcctaggttgacaaatggcctggtgtgctgggttttgcttattcgattatgattattttttgaccattcatctagtttttcataataaattagagccatgaagttagaaaattcaaattcataacttcatatattcacattttcgacaaggtgattaacttggaaatcaggtagttttgagtctcctgtttcgacagaacaacaacatctccgagaactcatgaccaaccgccagaatacaaaaacaaactaaatgatgtcaaaatatcacttaggcatcaaaaaatacatctttgacacgttttcccactcacccaacgtccaggttgatgtcacatgtcaacctgggcgttgggccctgagcaaacttcagtaaaatggccacaactccctcaatattactctgattgacgggattaaacttgaatttttaagctatttcaatgctttagcaagtcatgtctcacacattaatctcaattctaaagctatcgactcaaaattttaccctcaatagagttacaaatttaagctaaaac

SEQ ID NO: 116876 - DNA, 1875 bp, Cannabis sativa
ctgaaaacatagaaaacaagcgtaattccgtcccaacacagctaaaaacgcacataagttagatccaaaacataggctaaaattagcctaacacattccaatagcaggtgcctccagtctctgcttttttcttgtggaaggactgccacccgttgcttcaaaggaaccaattctctctattgcaaacttaatgtacctgccagaattcaatataatagaaaaaagggtcatcacatgaccacagaattctcagagacggcagacacggaaccagtgttcctagggacactccctcaaattctacaacaaataaagggtgaagaaaacttacccgtggaaaagagaaatatgaggccggtgatcttggtgcaacgtctttgccgaaggaatcagtgtctgactataaaggtatcggtaacgtttcgcaagacaggagaagagctagaactaaagaactctggttttgacaaatgggaaaatgaaaagagtggaatagtttttgagggtatttaatgggtacctgtaagaggcaccttccacgagaagcgaactgttcgactcgttcgcccaagggacatccaacggttggataagtgggaagctgagagggtatatcatctcccaacagttggcttccatcatttcatgcatcttaaaaagcactcggcaaatagaaagttgactcaaatccaatcattgccgttttgggcatcccacagaacacgcgcccagcatgcgcgcaaaactcaaaagtcagcatttaaaaccgtgacaagaaaacagagggaattatacctcctgaatgatgacactttagtttggcggttgatgacttagtgcattaaagggcttgttatatgtcccacgtgcgcgaaatttctcaagaggagatactataagctcccggaccatggcacaccctggaagcttgggggtaaatgttatttgtatttttgtaagcatgacacgttgattttaatcaaagaaggccaaggagtcatcatctgcccaactctctcaattaatgatcctagaaggaaaaggcactaacctcgcgggaagagtctccatgaaggtgagttcctcgactgctggccatgcaaagggcatccgtgaaccaaagtctcactccattccaggagctgaagccatctactcctacaaggagcatggattgtccaaaaggaacgagggcattcagagacacgacaaatcgggctatgcctttagcccaatgaagcctcacctatacgtgtcagactacggacttaaggaccaggctctcctcgagtacgatgtcagaggttatctcccacgacacaccatcgtacataacatgcatgtcctagtgtacctaaccaaataatccaacgactagatataaatgaaattaaaatgggagaaatcctgaagtgacacgcgtctgaagcccagttcatataatctgacaaccttaaatgtcatatgggaaatatgccacctactaatctgacggtgggatttttccccaacgatgatccattcgagccagcccatataaataagttggcctataaataccccataaaaagcacaagggagggaggaccttttctttcggatcgaagacccattcttcatcatcccaagcaaacacatgtttgtaatcctactattaactctagaatatttctactaagcttcctcttcttcaagaggagcacggtggggaggaatcctagtccactgtatctttatttgtatgaacagttaccgaccaaagaacctaataaaatagagtcgtggactaaagatagctaacgcctgaaccacgtaaaaatctcttatttattatttcactatttactccattattatttgttggaatttatttta

SEQ ID NO: 116877 - DNA, 1091 bp, Cannabis sativa
aaaaaaaaacagtacaaaagtaaatttcaccatgtcacaatacaaatgaaaaaaaaatggaaaaaagagtaatgggtgtaaatttccctattagtattactggcccactatttttcggcccactttgtttcttgggctgtcttctcctttgtcgtatatatacctcattatgtaaagacctaatttcactttggcatttctgctgttattatacagcagtaaaataaaagagatttttctcatctctatcaaacacttacgtcactttcatcgacttttttatagtgaattttacaatataaacatacataacttatacataattcttatcgatgaataaatatgaataattaaaaattagagcatctctaagggtttacaattctaccaaatttgtatggaattactaattttcacatcgagaatataccaattaattcaccaaattatacattattattaatggtgttggattttaaatttacaccaaattagtacatactttttcattttattttaggttttattttaatttgctttaaaatataaccattaattattggttgactatatatattttaaattagttattgttggttattaataatttgtgtacacatcagtaatataagttggcattaactttaacaacatcattttaatcgaaagtgtaagtatcataacaaaaatttggaagttttgccgaaaaaaatcgagttatcacaaatcgtataatttaagtagctttgctggtaaatggtaatatccctaaaatatagttgaagttaccaaagttatggcctttttttagtgattgaagcagaagttagtcttatgactaataaatagaagtataacttttttattattagttttgtaggtgaagaaataaattccgaaatggggtaagttgaggaatacctctttttcatatccattaatcaaaaaatacttttatattttattttattaaaatctacccagagtgagttagcacatgatttatatttatgtaataaatgtaagaggtataatagggatatcatctataaaagttggtatatctcaaagaatatagaaatgaaggtaaa

SEQ ID NO: 116878 - DNA, 1479 bp, Cannabis sativa
ttggattggatcggttactttttgaggtcaaacaacatccaatctgcataagtgcggattttagatttttcaatccaatccaatccacgcaagtgcagatatttgcattttgcggaatatattagattggatcgtgcggattggattaaatcggatacttagtgaacacacccctgacggactctacttgctcaatctatatgaaagcttggaaatctataaaacatgcactttttggatgtaaatatgctcgttcggtttgacagcattcccaaatggtacttgattggactaaagcttcagttatgcataaagggaatttttttggtacatctattttcaatacttaataaggctgaaatggaacaagttattttcttctctgggcaatatggaccgaaagaaacaaaatagttcatggagctacaccaaaaccagtctcaacagtagctatctttgctgaaaattatttgcacaactttcgagaagctcgcataaaattccatctggcacagagtgaaaccccaaggatctccttgacgataccagtttaggtttcatggacactcccgctaattggtacacttaaattaaatgtatatgcaactttgaatgcttgtcgaaacaccattgaagttgaagcagtgatctgtgatgacaaaggccaggttgtagctgctcttgctaagccaataattggaaatttcacaagctaaaacaatgttttatagtgtgatttggatccttaatatgcaaattgatattttctcatgttgagacagaagctttgttggttgccaatttgaatactccttcaaaaatagtttcttctttcaataatttaattgttgatgtatctaattttctcttttttttttttttagagttaatattacttatgttaagcgtacaattaatataattgttcacggtttggctaaatttattctaaaattagatgaaactaacttttggttggagactttacttccacttatttattccattattgttaattattctctcaattttaatttataataacacaatatattttttttttaaaaaaacaattattatagtattttcaaaaaaaaaaaagaagaatgattattatagtttaaattaatataataataaacaaaattgcggtgaatttctagctgtcttcaatatatctgaagatagaattccaatgtatagataactgtttaatactaggaattcaaaaaagcttgaactaataataggaatgaaatcaatcaaatcatctaatctatttctatatgtataaaagaattatatactacgaatatatatataattatagggtaatactatggtaggacttagcaaaagttccctaccggtaggatactttttctcaaaccgttaattttagatcttgtggttattatgaagtaaggtatatactcttactataggactgcttgtatacaattaaaactttatacatat

SEQ ID NO: 116879 - DNA, 1973 bp, Cannabis sativa
  modified_base (1515)..(1516): a, c, t, g, unknown or other
gtttgattgttatggcggcctacaaacaagactagtcataattttttacttagaacccaatctgatcatacttgctcagctgcctaatcctataaaattatataatctttttaattatttattatatatctttaatttaatatatataaaaacaccaaagacagcactaaagccaaaataatacaaagatatataggtataaaggataatattcttaaatatatacttattattttataataacaaatagagagattacttaaatcgaataaaagaaattaaactactgtttttaacatcttgtatactcctaaaacacttgttacgtactatttacgtctaaaacagcattttaattttattttatttttaaaatcgtgtacaatgtacttattttaaatcttatttttaatattaaaaattttcaaataatctaagatatatttttatgggacttttttcgtttttacacttcaaaataattttttttttttgatatttttacaaaattctacatagaaatctctattggaactagcgttgtaacataaattacaataaaaaatcgtataaaaactttttattgcaactagcactgcaaccactttagaaacccaaaccgtaaatttaaaaaagaaaaagttaaaaaatcagtatatgagataattcccctacttttatatatatattatttaaattagttatagacctctacatatacttaaaaatattttcattaatttaatgataaatatagcacatgcttttcaattgggttggaaatgaccttgaatatggttggtctgaaaaataaaaataaaataagtatattaatactattactatctttaaataagacaattagttcttatataactttgcttaaagccaaattgctttattttttggccttataatttataataagatttaattcttaaatataggtgcacttttaatatatatttatatattaatgtattgttgagatttaatttttgtcatttaattatttggacgaggcacacttgcatatattttaaatgaaaatagtatagttataatatcttcattaaagaatattgtatactttggggacaaaatggattatatttaaattatatgaatataaaaattgtgaaaatgacaagctcattcaacatgcaacctagctcttaatatataactattgttatatatttaaatattcccaacatatatccatttgaatatataatgttaaggttcatctaaagaatattatgatcattctaattatattacaaatactttaaaattcgtttgcttaagggatatatatatagttcgatggatccatgaatatgtaattaaccaaggttatatatgtgattttttttataaataaattggactttatgttttacaaaatttatattaattagactatttattttattaaatgataaaatagattctgcatttttaaaatagtataaatagaatcatgagaactgattttttatcaaaataaannttaataataatctaatctaaaaattttataaaaaaaactgtttatattttctgtatttgttattgttttttaagttagttatattaaataaaaaatattaaaaattaagcttaaggtcttatttttactattttaaaaaatataaaatttaatttattatttatcaaaataaatagttcaatcaataacttttacaaaatataaattttaaaataatatttaccttttttatttcatacttaaattttacaagttagtgctcaaacgaaagataacaagatattgtggagagactattaaatcaatatatatatattcatttgagaagtttttagtactaaaataatattaatgatgatatacatacaaggtatagggtgattttataatacattgtaacgtccccgcttcaagtcttcattgggtccttacacccacggaatgaatgtctcttata

SEQ ID NO: 116880 - DNA, 1646 bp, Cannabis sativa
atgaataagattaaattgggcaaattatacctttgcttggcgtttctgtggatgcgagcttccatcctattcgtctcgatgcgtagtaaagtggggcaatcatagtgcgagtaaacaaaaataagaaagaaaaaaagagcaggacacagagcacacacaccagagagaagaccccgggcaaataccccgtgcgatcttctccccaaaccaaaaaattatttcttttttattaagatttttgacctgccatgcaagcgcacctgtcatggcaaaggtcggatgacaaagatgaatcggaactcaggactcgcatggaaccttccgtgccgatatcttatacatccttctaaaaacccagatccccaatcaccccaaaccccctgcacatctcaatatattgttgctaaaacaccaatacatgccgtacagtatcgccatcaaaataagatgatacaactctctaaaaatgataaaccaccattcctggtaagtaaatccgaatctgatcagctccgtgaacgtcgtaagacgaagaacagcaagacttttgatcgaaaaatcgtctgctgtaaaacaggtgactcaaccacgtacctgagcccatagaagaaacgaaaaatcaatactcaaatttaatagctatgaaacgtaaaaaggaatgataaggaaaaaatattacctccatggaaggatacacagcaagatctgttttaggtgtgcatgaccaataatatcaacgatttgaagaattaaaccgtcgtaatcaataagcaagcctccagatctagaagatacatagaaaactatttacaacaataaaagaaaaatagaacaaacaacaaatacgaaagcagatctatatataatatacaaagatcggctaataatctaaacaagaatcttacaagaaaaggaagccttgaaatcgaatcaagtagagacctcgtgcaaatcttcataacctcaaatcaaatctatccaacgtcgtgagatctttgattcgataagaaacaacatccaaaacgtagatcgaaacgagatctgatcgaattagacgaagaaaagcaagaaaggccagccatgcttaacagatctgagatttgaagagaaagaaagcgatgagaagaaatatataaagaagaggctaagaatgaatgattatcttttcagagccctcgtcttcttttataatgggctttgagaatcgggtggtcacgattaatgatttttgtgagatgaacggctatgatttgttttggtagttagttgagaatattaaggcggtggcaaaatcgtgaagcacgttggatgcgaggactttgtcaaacacgacagctgtgcttttgtttggcggtgggcccaatatgtgtttggttacgcgtattcgtatttccttagcctggaataggtttcccgtgcgaatcgggttctagattattcgatgaataataagtatcatgatatttaattaattggaccggtaatttatttattttataataatattaatttaaggataagtaagatatttttctcaaaaaaaaattaaaaaaaaaagataagtaaggtatttttttcctaaactttaatttttaagatttaataatgagaatgatataatttagtttattataatcataaattaa

SEQ ID NO: 116881 - DNA, 1272 bp, Cannabis sativa
  modified_base (1220)..(1223): a, c, t, g, unknown or other
tttttcagatgcatcggacccgcatcaggcctacccaaaaaatgcattttcaaatttaaatctcatatgatttgtaagtatatatagaaagctactatagaaagtgagtgatggagtaatgagtggttaatatggatatatatatgcaacagattaatatatagtactacctaattattttaaacaaacaacaattatttatgatccaaattgagtgtgtgtggtaatatttttcttattatcttatcttctttttcattaccaaactcacatacatctatgatataattataatatagtgaagtgaaccatatattaatagaattaacaataattcacatttcaaattatccgattaccaattacaattttttataataatattataaatttaatttaaaatatatttatttttatttactttttaataatgtgagaataaagaaaaaaaatagaaaaaaagttagtataaaaagtaatttaggtgaaatagtgctatgtgtgaaattctctataaaaaaaattcatatacataataaggctatttagtatttttatctttcgaactatgatttatttattattatgctccctgaatattttatttcgttcaaaataatccttaaactattcatagtattataaatttatcattttataaaaatttgtcaaatgtagcagccaaaataataatattgttatttagatgcatcgccatgtgtataattattttgaaaaaaaatacaagtttttaatttagttttacaatttttttttaattattaattgatttttagtttaacaattttgaaaaatatatatatatttttagaatatatgtggttctgacgtggcaattgtacagctacttcgttattttgtttagcacatgtgagaaattgatagaatgaccgatttacaacactctaaatagtttgaagacaattgttaacgagctgaaaaatttaagaggcacaataatacataaaattcggggaaaatcctaagtaacctaaagacaattattaaatattaattattcatcttctatttttttagaagcagatcccaccaaaatgttgaataatgtgtagatggatccaatagccgtaaatacatgtgtgtcaggatagctcgatccatattttgaaaacctacaataatatcagttttgttgtcattttaaaaaatcttatttttagtcacaataaaacttgtgnnnnaaagtaaaaaagttgtgattaattgttaattattattcttatgttgtga

SEQ ID NO: 116882 - DNA, 1897 bp, Cannabis sativa
  modified_base (1866)..(1871): a, c, t, g, unknown or other
gtaaaataaattccaacaaaagcagccatgtttcaaatgcctcgggttctttccctcagtatttgaatgaaaccaatcttgtcttgattcctaaaaagaagaatttttctaatatgggtgacgtgcgccctatttctgtaatgttgcttataaggtgatctctaaagttcttgcaaatcgtatgtgaagtcttattgattttgttatctctgaaactcaaagcactttcatccttgggcgccttatttctgacaacgttatggttgcgttcgaagtcatgcactatctcaagagaaaatcaaaaggtataaaagggtttatggctatcaaactggatatgagcaaggcttatgaccgagtggagtgggattatctacgatctatcatgtctcgtatgggctttgctgaaagatggatcaatctggtcatgtactgcgtttgatagtaagttacactattatgcatggaggtcatcgtatgggtcctatccacctttcgagagggattcgacaaggggatcccttatctacatacttgttcattatttgtgctgaaggtctctctggccttatcaagaaacttgagtctcaacgggtgatacaaggttgtaaagtggctcgtggtgcaccccttactactcacatgttgtttgctaatgacaggtatttgttttgccaagccacaacaggggctgctataggagtcaccaatcttctacgggtgtttgaaaatgcatcaggccagaaagttaattcaaataaaatcaacaatttttttaaacctcaacacagatatggttgcttgtgctcaaattaatatgtggcattctcagcatgccagaagccacgaaaggaagcttatacctgagactaccgaacattattgggcggaataagaatacagtccttggttttttgaagaacaaggttattaataggatcaacagcttggatggaaaatttctctcgcgtgctggtaaggaaatactcctcaaaatggtggttcaatcgctccccacttctgctatgagtattttttttccttcctaaaggaacttatcttgaaattgaaaaactcatggtacgtttctagtggaaatctgcttctagtaaaggtcaaggcattatctggatgtcatgggataggatggaaaatcacaagcttgatggaggtatgggttttcaaaatcttcatgagtttaatattgctatgcttgctaaataaggatggagattgatgtgcagtgcatacactcttgttggtaaagtttttaaagctaagtatttcccgaattcagactttctttctactgagttaggagataaccctagctttgtccggcgaagtatttggagtactcagagcctagttcggttgggggctagaagaacggttggcacaggagacagtgtgagtatcttacagcatccttagttgcctagatcgcaaaacccttatgtgacaactattcatcctggcttagaaaataaaaaagttagctcactctttcaagttgatagtcgtaccagggatttagatcttgtccttgatctgttcaattaacatgaagctgccttgattttgggaattcccctcagtcgaaacgctactagcgacacatggtcctgggttggtgaaagttcaggtgtgttttctgtcaaaagtgcttataatcttattcaaggtcagaagaaaacacatgtgaataagcatacaccaaatttctggcaccgtatatggcatatgcaaatccccccaaaggtcaggaattttttatggatagctgcctctaactgtcttcgtacttgcctaaaccttatcacaaggcatgtagagattgcaggaattattttaccaggatctagnnnnnntaccatgtatgtttcattaacatcct

SEQ ID NO: 116883 - DNA, 2702 bp, Cannabis sativa
gatatagatacattatgattatccattgttacaatcttattaatagtcaaagatcctctatagatgatctacgctgaacatttctagattcggagagttcttcaatttggagtctatgcaacctggtatgaacaaaacaaatgttgtattgattcccaagaaaaagtgtccagatatgatgagtgaacttcgtccaatttcactatgtaatgtgcttgcgaaggtaatcaccaaggtgttggcaaatcgtatgaaggtacttttgaatgatataatatcggttaaccaaagcacttttatcccgggaagattaattaccgataacatcatggtatcctttgaagttcttctctatctgaaaagaaagcaaaggggcaaggttggatatatggcactcaaattagacatgagtaaggcatatgacagggttgaatggtcttacatttgtgctatgctttcagagatggggtttgctgagaaatagattcgcattatttttagttgcctctcaactgttgaatatacgatggtaagtggtgatcatatggttggcccgattgctccttctcgtggacttcgacagggagatccgatctccccttatctatttatgatttgcgcagaaggtttctcagctatgattcgtaagtttgaggaaaggaaatggattcatgggtgtcgggtggctaacaaagtcctggttgtgtctcatatgctcttcgcggatgatagttacatttattgtaaggctaatgagaatgatgtacgctgtatacaacaactcttagagatatttgaattcgcatcgggccaaaaagttaattttaccaagtcttcagctttctttagtactaatacatcagcccaagctagagatcgtatctgacagatgttgggtattatagaagcaggagaagacagaaagtatttgggcctaccatctacactctcaagaaacaaaacaacagtgtttgggtatttaaaggatagagtttgaaaaaagattcagagttgagatggaaaattattatctcgtgccaaaaaagagattctaattaaagttgtggtacaagcattgccatcttatgctatgaatgtttttcaacttccccaagaggtgtgcaaggatattgaacgcagtatgtgcaatttttggtggcactctaagtcggctcaaaaaagtggtattcattggttgagttggaaaaacttgagtaagcataaaagagttggaggaatggggttagagaccttcatgattttaatctcgctttattgggtaagcaaggatggcgtttgctaactaatgaggatagtttggtgggaagaattttaaaagccagatattttcctttaggaaattttcttaatgctgaattgggagcgaatctgagctttatttggaggagtgtcttggcttcaaaagatttgatttggaagggaattcgaaaaaagagttggggcagatttgaatgtaaatgtgctacaagacccttggcttatccatgacagcaacccttacatctcttccatacaccctgctcttaccaacactactgtcaactctcttatgagagttggggtgagagaatggcatagggagatcctggtggatgttttaaatgagagagatcaagctttggtttggagcattcctctgagttttgaggtgaatcaagacaggtggtactggtataaagaaatatcaagttataacactgttaagagtggctattactgccttcaacaataaaaaggtagctggtcttttgatgataactctggtttttggagagctttatggcaactcaagctaccccctaagattaataatttcctttggagaacttgctcaaggtgtctgcctactcgatttcagttgaggttaagacatgttcagcttgaaacaaactgtccctggtgtcaaactgctgcagaaacttctctacatttgtttgtatcctgcccagtagttaaggcgtgctgaagtaaaattaatttcgaggcacaagatgaaaatttcactacctttgttgcttggtttcagcatggtttggctaattgtgatgctacaacaaggttggaagtttcaatgatctgctggtctttatggaagcatcgaaatgagaaaatttggaatgctaagtcacctactattgatgaaatagttacatcagcaaaactcaccttcacaaattggagtaatgctcggaatagatgtcaaacaactcttatacctcatgagacaggagttaaaaccgagcattggaccccctattttccctaagctgaaggttaatcttgatggagctcttttctagcaggaaggccgatttggagctggtatggtggcacgcacaggtgttggtttggtgttggtggctcggcagatggcacaccaaggtgtagtttcaccaattgttgcagaagcaataagcataaaggaggcattaagttggataaaaaaataaacaatggggtgatgttgtagtggagacagattgcctaaatgttattaatgatattaattctaacaaacctatggtatccccacatggtatggttattcatgattgtaaggcattgttagtagatttgcccctagtttcaatttcttttgtaaaacgatccgcgaataaagttgcgcatgctttagcatgtaactctattcacatggctgattgtacattcagtatggcttc

SEQ ID NO: 116884 - DNA, 1296 bp, Cannabis sativa
aattagtggatttaccccctcacttttatcactagtgttagtttgctccgtcatttttgacatggcattgttttgcccctatatggaaaagttagtattattttacatctagctttaacattgtttaaattaaccatcaaattaatatttttatggataataatcttttactatagttattctcttaatcattttgtaacccataaaaaaaaaaaaaacaattataatgaccaacgaatgtatgaacaaaaaggtaaaaaagaaaacaccacagttatagtagtttattccccgtgacacaatagtaatggagctacgtcaacatagagcttttactatcacaaaatctaatttccttaaaagagaactcagaataaaattaataagtctaacttcacttcacaattttatagagagaaagtgtgaagagagtgaagctctgacaaaggtgtgaaaagagacacagtgggtgtcaaaattgttgcaacagtttgaaacacacttagactcgtcttgaaaagatctttcatatgcaactttaatcgcatcaggagagttgtcaccttgggcgcccaacttttatttgggctcaagatggtttcgtttgttttccaaaagtatttgtatcttcattgtggacaaaaataatagaaatctctaggattgtttccttctcgccacatgtcaaaagtggtgtcaatatcatcgggtcaaatttttgggtaaacgaactcaaattaattttcttttcttataggtttaaaattgcacctataaatattaaaatattaaaataatatatttttcataatttttttcaattttgattttttgctttattaatttatattttatattaaatttatgtatttgaatttatttttattttataattttttaaaagataatgaatatctttattattttttccttaacatgaaaatttatttttagaataatatattttcttttttttaaaaaaaaataaaaaaagtaagtgtaagtcttaggaaaatataatttttaataaaaatagggtgtcttaattaaataatcatagtaaaaaatcactatgtccataaagataggaggtaaactaatacttactttgctaaatagaggacagaataatactatgttaaaagtgagtggatagattaccagatggaaaaaatcaagaggcaaatccactaattattcaaagaattattattttctgtttgaatagtttttagttatttatttttcttttaataaatttttagggcttttttatttttacactttaaaaaagtt

SEQ ID NO: 116885 - DNA, 972 bp, Cannabis sativa
tttttttttttagaaaaaaaacaatcttcttgaattgtggaaatgattacaaatatctctccacacaaaggcggacccacatagaagcgaaggagggcagttgcctcataaaataatattataaatatatatattagttagttacaacatatatttgtaattaaaaataatataaaaattcataatataaactttggtataaagattaaactattttacacacatagtagttatgggttcaaatctcaacaagtgcatgattatttttttaatattttaagtatttatcattaaaatgaatattttaattattgttaatttttttaatttaaatttacaaagtgcaagtttatatcaatttttaacatgttatatcatataaaaaaagtacggctccttacaaaaaaaaattacgtcctctcattttaaatcttgggtccacgactgcctccatagttctatgtcgcttcttttttagaataatttatttatgtgaccacacactatacatataattgtaatatgaatatctatttaacttacataaattagttgaaatcatgtataataactttaaatatttatacattaactttaaaattacggatatatagtctcaaattttataattaaagtactatttatataattattttttgtctagactcttaaattacagtagattgacattggattagtcttacattaggaaactgattgtaaaaatgaatgaaatgcaattgaattgaaaattttgaaaatgtttctaaagtttgaggtgaattttgtacaaaaacataattcaaagaaaaaatcctataaatatcataatgtaaggtaccatctaaaaatcttaatatttgtaaatgtaactaattctaagggatagtaatcctaagatgatgatgaagtaaaatacaagagttaagttgctactagccaaagggtttccctttggctagttatagtatt

SEQ ID NO: 116886 - DNA, 1827 bp, Cannabis sativa
tctactaaatatctaattcttttatagctaatatgcatctaatatctaacacaaaatatattttatgtatgaaagttgtctcaaatttagaacttctcttaagatatggattgagttaatatagactttgagtatgtccaacctatggccaactcataactatatgacctattatttttcagcctaatgagccatgacctactcttatcataaccttttactacaaaaaataggttgggttggcgagattgaatatcactacaacaaattgctacctttagtgacaactatttagtcataacataatttttttgtaattaaataagacatttagttacaacaaaatgttccttgtaactaacacatagtatttagttacaagttgtccctaatttagttttaatcacaataaatattgtaactaaaacataattataacagcaaattatattttttgtgactaatacttttagccaccgaccttttagtcacaataacacaataataatttataattagccacaatttttttatatttagtaacaaattttattgtcactaaaagtaagattttttgtagtgtggcttggctcatattttgtgcacccgtacaaaaagcctcacttctaaccctccaaatgtggtagatggtgattatgaaggtggaagatgcgccttctaaaacaactccatttacttctcaaaatccattttagtaaacttgggatagtggcatgctaggtttgtataccaaacatattttcaaccttaaccagacaacttttactaaaagtacaaaggaaaaagagacgagataataagattcatcatgatctcaaaccacaaatcaaataagtagactcatagtagataccaaattgagcaagtctgtctctagtttggagttagtctctccaacaatgctagccaaaatatgaatgtgttttggaactgtaagtctatttcaaacaataacatcccaatattgatagaatgagaaggagttaccttatcacaaatatgacttatattgaacttcaacaacatatgcaagtgaccacataagaataagaactctcgagttgatctttaactaccacaatctcccactagtaccaactattatcaattggggctgaataatccaaccaatgtgtagatttaatgtacatagcatgaactatcatttggtttacaagttatcgtatttatgagccacaactcaaatatatctccaatggttgcagtattccaattttctttatccctcaagcccaacccaccatatttttttacttgcaaacttctttccaagtaatgtgtcttgggagcttgatagtaaaggactcttccattagaaagctcgacagatcttgttgattttcctataatgttcttgggaaggatcatgatttgtgtccataaaaagaataaatagacaacaagatagagtatataaaaactctacctgcaaattacagattcctagtactgaaactcctacaagatgcaacataccacttttcaactagacaaccacaatcattcttttagagaaaattggaataccaagacaacagaaaggcaaaggacaaagcccaaaagatcaagaaatatttgcacctcctcatcattcatgttacaggctacaacatgataacaagtttatttatcctcattagcaactaaacatgtatccgaaaacacattgaaaattttaatataaattgattttaaattgtaaaaaagaagtaaaatttatagaaaatacataaaaataaggcgctttctcatttttacatttctaaacagttttttttttttttt

SEQ ID NO: 116887 - DNA, 1190 bp, Cannabis sativa
gggttatcttttcctcaacagagcactgagcaacaagtacaaggtgtgttgaatctaattgatcttgctggcagtgagcgcctttctaagagcgggtcaacaggagatcgtcttaaagaaactcaagtacttttattaaagctttcttttttctgatctgtctttgtctatctcttcatatgtcaacaaccatcatccattgtgtgttccatttctaaactattgatgtttcaatccaggccatcaataaaagtttgtcatccttaagtgatgtcatatttgccttggccaagaaagaggatcatgtaccttttaggaactcaaagcttacatatcttcttcaggtaaattctccatatccagatatatgtgatttttttagcttcatctttcattttattctggattctctgtagtcttataaattaaattttaaacagccgtgtcttggaggagactccaagactctgatgtttgtaaacatctctcccgatccctcctcatcgggtgagtcgctctgctcacttcgctttgcttctcgggttaatgcttgtgagattggagttccacgacgtcaaaccaacacccggtcactagattctcgtttgagctacggttaatattccatatatgaataagagttatacgttagaaaattatatataatgcaatcatgctctgtttcggcatcactagtattataaagtgaaaatttcagagtgattctaacttgtacagtgaggaaaaaactatgttatattaggtaatttgaaagattgattctctaagtgctggaaatgtaataagtctaaattcaacaatgcccttacaatgattggtttttgttatttatgttgaatggacttggtggataaatttacgaccttttttttttatataaataataataataattaattggagttgactttaattgaacaggcaatacttaggtgtcctgaacattgttaataaaaccactagttataaactttatcgaaatttatagcttttccaattataatgtctacttataaactttatccaaaatttatagtttttctaattataacgagtgcgatttctatttgtccagtttgtaggtttaagctcaattagatctgtcaatccaatttgttaagcttgtttgataagtttttaactaatttattttgtggggacttatttat

SEQ ID NO: 116888 - DNA, 1733 bp, Cannabis sativa
tatttatatatatatggtgatagtaaacaagaaatgagtgcaagactgtggtcctagctataatcaaatggcaaaatccttaatgtccaaaagagcatcatgagaggaatcaaacccccattcatatatatatttagcaaaaaactggtatttctgtctacgcatgcaaagcttcaaactcttgaaatgttacaactacatatatacactatactatcctataaaagatttgtgaaaattataataatgataaaaaaaatgtttgtaactgtaataatagggatattccctgtgttttgacaacttttcattcatttacttctttttctccttttatatttttaatgcttgtacttgataaatttgtaaatatttatatgtttgagagaattttttgatttaattatttttatggttgtttataaattttattgacagcgtgttaaattttttaaatttttcaaaattttaccgaagatactaaataactacaacgtggacgattataaaaaaattagactaaatttttttcttaaatattgaaacatatagaggtgcattagtagattatttttaggagtgcattaattgtaaaagttttctaacacatatactacaaaattacttttactatttatttttttagggttaaataaaatcgaagattagcacaataaataattaaaaagatttaattataattaaaaacctaaagctaaaatactttaataataattttaaaattagatttttttttatatatttttacaatattaaatattaacttcagttcatttgatatatgtatatgcaactaaaataaggatattattctacgttgtttgaaaaaaaaaaaataaggatattcttaaaaaaaaaaaaaataagccacattttttgtgactacatgtcatttttgtaaaataaaaatagttggtaataaattataattattgtgattaatatttttagtaataagagtcatgtcaggacacatatataataaccccactcaatctttcataaattatatttttgtgtataaaattataattatttttactttcacccccataaaattattttttctccattttaattcttacataattatatttttatcctcatattatttatatttttttatttttatcctcaaaattttctttttatccttataaattttacatttttttctaataaaatttatattttcattcatactgtaattttttttcacccatttaagaaaatttgctggataataacataaactttaaagatattattttcacatgagatcttttatattgatattaaaaataagtatacttttaatcatcaaatgtttaagctatgttttaatactaattaatttctcaaatagaactagtaatatatcttaaatatacattgattaaattaaaagggtttcaaatcacatatatctcatatctctcttctttaatgtgactatgtaattatgtaatagaaattgttagtttaacagttttttttaaattaacgattaagattaataatgttatattagttataaattaattttttttaaaaaaaaataattttaaatatctaaaatttattttaagtataaaaaaaattagataattaaataaccaaatatgcatgttactattatttaatataaatatatatatggaggaggtttcaatggttacattatggttacatttttttaagccattggatta

SEQ ID NO: 116889 - DNA, 2093 bp, Cannabis sativa
  modified_base (2037)..(2059): a, c, t, g, unknown or other
cacaacattacaaagcgagataggtcgaagatccatcatagtttcaggttgtttcttcttaggaataagaacaatattagtttcattaagaaaaggagaaaagtaaccttggtcaaaaaacattcgaacttgcgaaataatatcaccactcaccacattccagcattttttaaaaaaacccggagtcctaccgtctggtgcaggtgatttgtcaggatgcatttggaaaggtgctctgcgaacttcatcatcagtaaccggttccagcaacaaagaattctgatcttccgtgacaacacgtggaatagtgtcagtaaccttccgagtttccaacgaagaagaagagaataacttgctgaaataatcaaccataacgccttcaaaattcttctcccaatcaacccacacaccatggtcattttccagcttgtgaattgaattatttctccttcttgaagtggccatagcatgaaaatacttagaattcttgttcatatatacattgaaatatttttcaccatggtcatatggacagtattttaaacatttgtacctttcatatatacattttaaaaaaaatcaatttctaaaatacctcttgttcacacttcatccatgcacggtgatgttcttctgtaactatcacactcaaaaattctccctctcttttttttccaagtttttatttcttttttcatttttagtattcattttgaaaccatgatcaaaataagtttctctccgaaaaatcatatccttctccccacgatttctgttatggcgagttcaacttcttcctctccataatctcaactacttccacacaattttttctctattttttttcctctatataatggctatcactcgtttgtcatcttctccatcccttgctgcaaagttaagggtgttaaatctattgcaaagaaaggaattctaaaaaggatgatagatgaggatgattttgttaagcccttacctaaacagaggaaggctcttgccaagatgaaatctgaaagcgttaaaagtaaggaagttcataggagtctaattttctatggtaaagaggggaagaatcaagttgattggttgattgagatttgtttacatttttttttagtttttgccctaattttagtttgatctcttttaggtattgtttctgtgttttgatagaagttttttctttgttttttatcttatgttttgaattactgtttttgtcgtaacgagttcatttgtattgtgtgttattagttttatacccgaaattatgctagcacatcagaggaagacatggtcaagctaggaagaataagaactgagacacgtaatcatcattacacttgaaatggaataactcgttaaaagcataattaacaaagtatgtttaactcggctgactgaatcgtcttatgcgagataaaaatatacaaactgttgccttgtgcctcgacgagaaaccatgtaaattcaggtgtacaagatgaggcactaacctcgttacgtgaaggagatataataataatggagatacttagcgtataatgtacggtacacaatctaagtataattgattggtgaaccaaagcaagggatagcgaggaatctaccttgccgtaggaaggcatgcacgtaaaagaggtcagctcgccaccagaaatgcagttgtcaaatttaaagtaagagtattatcaaccatggaaagatatatgacgagctttagctcagtattaggattacttctatactatccccagcaagacattccaatatgatatggcatacaacatatttaatacacgttcattttgaccaagtaaaagcgggatatttacagctgtgtgaaatttaaattaaaattacatttatttaacatgatatctaatcagatcccatgattttagagggataatcgttgtgaaaagattacagtcaactctgtaattaacttcctactacgtgattataaatagtggcaagtaagattataaagggggacgacgaaaaaatcatacaaaagaggccctgaaaaannnnnnnnnnnnnnnnnnnnnnncttgtgttcatatctcttactttactgctttcat

SEQ ID NO: 116890 - DNA, 990 bp, Cannabis sativa
tggtatctcaaataatactttaacttcttccaccaaaaattgccttgttagagtatgattatgctcatttgtgagaacaggtccagtagagataacacttttcaagactttctttcttactccctgttttgaacccaataagtaaatgtaaaattgcaaaaatgcctcactaaccttagatgactcattcacccaatgcccattcatttctttaatagaataaattctatttgtttgtcttcgtgctcttaaaatggcatgaaagagcactgtattagcatccccatcctttaaccaatgaattttgaccttttgagcaagaaaggacatataattttcatgcatcttcgtgtaattcaatctgatctctcactctctcttcctcaatcagtgcactattagtcggatctgcttgcgattttccttgacattccagcatttcattacaagctcttgcctcatgtgcccttatatctcctatcccctgtttagagtgcagagctttttttagtctttaagctttgaaactagttaaacatcgtagtacctgccacattatctttccagctctctaaaagcacctccttaaaaccattcacttgccgccagaacctaaaatacctgaatggttttttcccattcttctcatccgggtatactgtcaagacagctggacaatgatcgaattctccttctaccatgaatactcctcagcatgctcgtatttgtctagccattgttgattagccattattctgtcaatcttagaatagattctctcacaatttcagcaacgttttgacttaaaaactaaaattaaggatccttttacagtgagagtgatgctctatattaataggcaagcactctcttatgccttgtttaacaattacccatttaattaagagtaatttgcggcataaatacttaagttttatctcgagtagcagataaataccaaagtcgtactagtgtggaacttccgtaggt

SEQ ID NO: 116891 - DNA, 2809 bp, Cannabis sativa
gggcataaaacccaacaaaatctttgtagattcaccagagacagcatcgctagccttggcataatcgagcttgcattaaccttaggcgaggcacctttatctgctactgttatgaaaaagtaaagataaaaagaaaggatttcattcaaaaatagaatttccagacccagaagttcaaaatcttgagatgtacctagaaacctttagaatctcatgaatgggtggatatgaacgatttcaggtcaaaattgatatgcaattagagaatcagaagttataattgaatgctagtcaaagttacaagccttgattttatctattctatgatcagtcaagaacggttcaagaatagataaatttgcaacaagaaatccagaaaaataatacgtacattcgatggcaattgcatagagtaaagggaaaagtaacttactgttcggagatttttttatctgctcggaaggtaatgtcaatggattctccagcaacttctttgaagatttgagagaaaaatacgcaaaaactttttgctcttgttctctgagaatgaaaatggctaaaaagtttcccacgaaggattaaacccttatataggcgcctaaaagaggaaattaattaagtcaatattcaaaatttgagtttctcccccaaaagtgtatgttaaagtactcattatgaaggacagaaatcatgcaccctgtacccttcaacactcagtacgtgactcgaggtacatctttcaagaggcatttaatgccccaaacactgaagagactctcaatcaagtcacgtcggatcaacttcaacaactaggacacgtgtcacccatcgagacagattcctagccgaatgaagtccctatgcgaccaaaaaggtcccgcgcagacttgagggacaaatgttattctaatttttgcactatgacgtggcagctgactggatgacacgtgtcttactatgacgtcgcacctgactggataacacgtgtcttactcctagcattctgtgaagattgatatgaagattcaagttgtatgtgcatggcaagttgtaagagcgaagtcattagtggacatctaaccagtttgatcgtgtgatcaactcgcatgcaccgaccaggagatgtaagttggcaataaaaactatatccaaacttgcatgtcacgaagtaattattacttttgtgggattaattcatactttcagagaataaaggcaattagcctagatttgcccaatttttttattgtaattatgaaaacgtattaatttcttattttatttcttatagattaaggaagttcattcttatgtaattagccccgatagatagtggtcttatttcattatttagggacacaaaattactttgaagaaaaaactcaagagagaaattacaatctaagtaaatcactaaaaaaaaaaaattgtaaaaactttcgaaaaagaatatttcattttttctcataatattattctttaattttttttttttttttgcaaagtctccaagatccatttagtagaataacttttataacccaaatctattcaactaatctaaatcaaacaatcttaacaacaataaatatagtagataaaacattaaattgttgtaaaagttggagaggaattaaatctgccttccaaagttccagtttggttaaaaattaagtgtcaaacacatattatgcaagaatatattttttatttatttaattataatatgtacgtaacattctcttggaaacttatataataaatattttgatatattaaaggaacaatattgccaaagaacatctcaaccacacatcttcatttaagatggttctttataaaagtattctgccacgtaggtctgaattacatttgtttatgatttatgtgtacagtacatattatattatattttcttttaataataataaaaaaatgtgcctccaaatttagctacatatataagctactgtgtactctaatgatattaattattcttcatatttctaagattccaatatttcttgattgaactgtactctactattatttaggaggccactatttattaaagaaaaatcatcctaattaataatatctactatatactgtatacatgctaggaaaatttcaatagaggaataattgctctaataaattaagataacccttctatcagaaaaaaaaaaaaaaaaaaaagaagaagaaaaaaaattaagatagctcttttggttggtaacttggtatagatgtgattagaagttacatattaatgagagattttacaatgtactaaataattttaattttatatatgagaatatatattataattatttaaaacatctcgttaattttttataaaatttaaaataatgtaacacgttgaaaagtaaggttcaaaataatttaaaatagacagtttaaattttatttatttttttattataaattattttaaattctttggtataattgatggcttagtgtcacataaaaataattaaatttaaaattatttgaatgtaaaaaatattggtacactttttttctagagacattaccactattcatataaacgtgtcaatgtgtataagaatgctcatagtgacagttaaccgaataacactttaaatttgttactagttcaatagtttggagggttttacggctaaaatttaaatttaaagaattaaaccacaattaaaaaggttttgccgaaaaaaaaaaacaccatcaattaatatgatgctatatcaaattatattttattattaattagttaggatgaagtaggttacatatatat

SEQ ID NO: 116892 - DNA, 792 bp, Cannabis sativa
agtataaatcaacttataacgacattttttctaagtacccaattcccaacggagtcacttttcatatgctaactcaaactgaggttaccaagagtctacaagatcttgaaatgtcgaacatcgaaattttggtcaggcgaaaacacatggagctagtaataagaattgattttgtatgcatctgagatgtctagaaacctgttgagagactggagaatcttgatgcatgttcaacatagggattttgcaatggacttgattttcataagaggagtcctcttaggtgtaattatctagaataaattttagtttcaagtaaacaagacaatctttttgtatgaatttatcttgcaaacttgtccctttttattgcattttcttgcaaacttgttgtcccattacacttctcagggtaggacttcaggcattgcccctagctagtacaaaaatttcctttattcatttgtctcttgaacttcattttttttcttactctttgagctttatcctttatcttctaaacttggttagtaagttctttgagtgacaagaggtttgttttggtgtatactcttattttggtacaagttgtcaagttaactataaaatttgtgactaatttaatatcatcattttttttaaaggttgtcattttaatgtttgttaaattttgcttgtgcatatttagtgtaaataatttaatattaaaaaagtagccgattgaaaatatataactgttgctgaaaattattaatactactcaagtatacgcaatcaagtagtaaatctcac

SEQ ID NO: 116893 - DNA, 2904 bp, Cannabis sativa
  modified_base (2828)..(2873): a, c, t, g, unknown or other
aatcctagtgtatgcgccgtcaaggacaagcagtcatattaccagttgatccttgtgattttttatttttatttttaggttttaacatttttgtatatatttttaggtagaatttaattattatacacatatatgccccaagtaattttaaagaaaataaaactttatgattacttgaaacattcaaatttttattcagaataaataaccactattacacagattaatacaacatttacacaataaattactgataataagaccatagatgctcgttattccagtgattcgttattagcaagccattaagccaagataatttataaactccagttctaactatgtcttcaatggtgtacgggccttcctagttcgggttgagcactcaagctgttgaatctcgcgtatttgcaaatacacgccttattaccaaatctcgtactttaaagagtctctttcaaactcttttgttaaagtatatcgtgatgcgatgttgataagcagcattggttatttgcgacttgttgcatttttcttcaagtagatccaaggacatattctgaagttcttggttttgttcttaattgtgaaattcacgcctgtgggtcacaatatttacttctacaagtaacattgctttcgagccaaacgacaatgaaaatagagtgtgtcctgttgctattttctttgttgttttattggcctagagcacttgtggaagctcgtcaacccatctccctttggcggcatctaacttcttcttaatagtatcctttaaggttttattaacagcttctactttcccatttactcgaggccttgatactgatgagaagctcttgattattttattcctttcacggaactcaatgaataatttatcatcaaactgagtcccattatcatttactatcttaattggaatgccaaacctaaatatgattttcttgataacaaaatcaagaacttttttgcacgtgatggataccagaggttcgacttctatccattttgtggagaagtcaactgccacaacaacatactttgcgccaccttgtcctatgggtaaacccccaatcaggtcaattccccatattgcgaatgggtatggcgaggtcatcatttttaatttggtgggtggtactcgaggtatatgtgagaacctttggcacttgtcgcatctcttgataaatttgtgtgtgtctttattgatagttggccagtagtatccttgacagattatcttttaagacaagctttgccaacctgcatgatctccacagaagccttctgaaattctctaattatatcattagcttctgctagtaacacacatcacaatagaggcatggaataaccccttctataaggttttccttcgaccatcatgtagtgagggatcgaatataagcgtttgtgggcctctgttttatatgtatgaatttctctacttaattgatacttgaaaattggtgtaatccatattggtgttgcatctatcatgtcgacattttcctattcacatatgctcagctcgtctaatacctccaccggggccaaatttaacttgtcgagatcaaactgagttgctagttctgctagggcatctgtattagagttttgttctattggaatttgttctatttaaaataatcaaacttttttaaagttcttgcaaacataatctaagtatttggccatctttaggcctttcgcttggtattctcccaagattcggttcactattagttgcgagtcactaaagcatgtgatgctcttgaattatagtacctcagctattctaatcctgctaacaaggcctcgtactctgccttattatttgaagtttcaaacttaaccctaagtgcgtaggggaatttgaagttttctggtgacacatcactattactcttacctccgagacattcccatttgaagccccatcaacaaaaaatttctatatttcaacttcacttcctattctagagtcttctcctgagtttactccttctatcaagaagtcagccaaagcttgccctttgattaaagtccttgagtggtaagttactttaaattgtcctaactcaatcaactattttattaatcttcctgaagcatcaggttttgatagtacttgttgcaatggttgatttattaggatcttaataggatgtgcttgaaaatatggccacaatttgtgagatgcatgaatcaggcataatgtgagtttttctagaggtgtgtatcttgattatgcacccaataactttttactaagataataaacaagttgttggttttttccctttcttgcactaatgctgaacttatatcattttctgagaaacctagataaaggtatagtgtttccctagtaatttttttggcctaaacttgaggtctggaaagatgtctcattattcctttaaatgcttattcgcactcttcgttccacttgattttcgtattgccttgcaagatgttgaaaaatgggagatatttatcatttgattttgagatgaatctattgagtgctgccattcttcctgttaaagcctgaacctcctttggctttgtcagtgaaggcatctcgattaaagcttttattttccttggattagcttcaattcctcttgcattcacaatgaagcctaaaaatttgcctgaggacaccccaaaacaacattttttaggataaacttcatatcatactttctaagtatagcaaaacactctgcgaggtcctctaaacgatccttgcattttactgacttcactaacatgtctttgacatagacttccatgtttctgttggattttatgccctnnnnnnnnnnnnnnnnnnnnnnnnnnnnnnnnnnnnnnnnnnnnnntcagaaataacatttaatgttccatggttca

SEQ ID NO: 116894 - DNA, 1697 bp, Cannabis sativa
ccgccgccgctgcccccaatggcggcgttctacggtttaaagaagctcccaaattctacaactctccaaattgtccaaaaaatgtcacgtgctcctcctacaacgatgtcacgtgctcggacaattcagtacacgtggcgatgaccctcgacgcagcttatctccggggatcaatggctgcgattctctccgtactccaacactcttcttgtccggaaaacattcaattccacttcgtcacttcttcctccgccgattcagattctctccgctcagccctctcaggttctttcccttacttgaaattccaaatctaccctttcagcgatgactccgtagtcgccggcctaatctccacctccattcgctccgccctcgattgcccactaaactacgctcgaaactacctcgccgaactccttcccaccaccgtacggcgcgtggtttaccttgattccgatctcgtcctagtcgacgacatcgccaagctcgccgccacacctctcggagacgacaccgttttggcggcgccggagtactgcaacgcgaacttcacctcttacttcacgccttctttctggtcaaacccttctctctcgatgaccttcgccggtcgggaagcgtgttactttaacaccggagtaatggttatggacttggagaggtggcgcgtgggcgggtacacggctaagattattgagtggatggagctccagaagagaatgcggatctacgagctgggttctcttccgccgtttcttttggtgttcgccgggaatattgctccggtggatcacaggtggaaccaacatgggctcggtggtgataattttcgtgggctttgtcgtgatcttcatccgggcccagtaagcctgcttcattggagtggcaaaggaaagccttgggcccgactcgatgccaacaggccctgtccattggatgctctatgggctccttatgatcttttacaaacaccttttgttctcgagtcttagatttttgacggtattttattttttatatttttgaaaattttgagttttggtgggatggagtatatatatatattacaatatatacatacactttgtgctcaaacttaattttacagcgtcctttagtgagatggaaaaaaaaatccaaaaaagaaaaaaaaaagtgtacattatatagccattaatagactttatcattacaataatatatatgatccttttcaattttacttcttttcttcttcttcttatcactattttaattatttaacatagagatattatgatttgattggtttggtttgttgtaattttaaatatattctaatattgtttgattttgctattgtaagacaaagggtatattgtcctatagacaaaagcgttagtttgatttgatgatattaaaattaatgtctgttattatcacttttgaaaatatttttaactactttaattataattttgaatgcatgagaaccatcactagcgttataagtattctttaacatgaatcatcatcactattcacttttcattacatagtactttcctattgatttttgagagactaatttgttttgacagtattcttatgggatgagaacttttgaggtatttaaagaagaataaggtatgagttttccatagctgagtatggagagccaagggatggtgatcctgtttttttttttttttttt

SEQ ID NO: 116895 - DNA, 714 bp, Cannabis sativa
  modified_base (659)..(680): a, c, t, g, unknown or other
ccattgcatactgtccaccctaattccccaacggcttctaaaccataggcctctagtaaagttgcactgataaaaaaatgtgttcagtgttttttgcttcatttccacaaaatacacaactgttgtctgtctagctaaggaatcccaatcttgctttgactggtagagcatttgaccatattttccataacagaagcttcaaacgaggatgcaaattaaatttccaaagctcaatccacattctattttgctccttaaatctgtgtctttgacttacccaataaacgctcttaatagagaattctcctgacgttgcagccttccagaaaggatgtccctctcgccagctaggggggtgattctcataatagaatgggccatattctcatcaaagcaggcctgactgagatcctcattccaagttttagtaccctttacaaataaatcagaaactttcaaaaaggcatgagttctgttataattaaaactccttttcacttcctctatagttttcccaagaacccatgacctatcccacaagtcaatgtcaccactaccaattaagacccccgcacctgcaagacagatttgacaagcatccataagaccttgccaacaacgagagtcaccttatgtggaatgtgttgggttttatgccnnnnnnnnnnnnnnnnnnnnnntaatcagatttgcttattaatatagatcagaaat

SEQ ID NO: 116896 - DNA, 2367 bp, Cannabis sativa
tttctttctttttttttgttggtttaacctcttatttgatgttgcttacttgggcagggataatgaagatgactccgtctctaaaatgaaagttgctgaggatgcgctagcagcaaaacagaaggtaaattgttgcgtagttacaggctctttgtgtttcctattcttcgtattactttttgggtaggttgaaatttatggattgaaatttcttcctcattttcctagctaaatttttgacaatccaggagaaaccttcatttgagctttcagggaagctcgccgcagaaactaatagagtcagaggtgagctatgcattatttgcttggattttgatgaggaaagtctctttttcctctttttagtttctatataagtatgggcttcaaattttctctgtaaagtcttattatgtttgtcttacactttgtgtcattgtcatttctacctttgataaagaaaaataaatctaggggaaacactgacctatctaattgccattactgtcaggtataacattgttgttcaatgaacccccagacgcaaggaaacctgatgtaaggtggcggctttatgttttcaagaatggtgaagctctcaatggcaagttttacgcattttaatccttccaaatatctcctagttagtgtttcatttgtgaagcgttcatcccttcaatgggctttctatgtggaatctacgaccactttctttctgtgattgttgtttcctttgctcatcattgcctacaatatgtcttcatgcttgtcatttgcttgctctatattttaataaggaacattttattctcagaacccttgtacatacaccgtcaaagctgctacctttttgggagagaaagaagggtggcagatgttcctactgaccacccatcctgcagcaagcaacatgctgttatacaatttcggtacgtttgtagtacacagttttgttgttgatttatgttggaaattattattctcatttttgtaactacttgccaggcaagtagagaaggagaaacctgatggtactctaacaaagcaagtaaagtaagctggttttgacttgtccttgtttccagtaatcagaaatgaatattacgagtgttatatctaacttctgttatgcaggccttatgtaatggatcttggaagtacaaacaaaacttttctcaatgtaagttgctcacttactttatgtctatatttagttgtaatatttttgctcatttgtttgcattgaacgggataagttttgcgttctgcactggttctaaccttctatttttgggtgctaacacaggatgttgccattgaatctgaacgttattatgagcttcacgaaaaagataccattaagtttggcaacagtaggtaagccaggaatttttgcctttacctataatgatcagatgtctccttaagaacaacttgccttttgataattaagcccatttgttctggtgtcatagtttcctctgcaatttcggctgatctgatttggttgctgcactagtttttgttactgacctgcagttatttatacatgtttttatctgttctacatttgcagccgagagtatgtgctactgcatgagaactcagcccaatgagagattggagactaatttgctttttctgaagttcactttaatgtttgtgcatggagacgagtattttacttgagggtgtttttttggttcttagccatccagtgatgtgtgaaaacttatctctaattttgtaagtcattaacttggggagcacttcacctggctctaccctaaactagctactagctttatgtcttagcaacttatctctagtgataaatgcaaggtatcatctgttgttttttttttcaacttactaatttatcaatggagacgtttttcctcttattattatttgaaatgttctcacatatccaagtgaacagttgaattgtgttatgtaaattttattttaaaatttatttcaataattttatttatagtatacgatagtggcaaatagtgctactgccaatttcaaatagtgcttcatgttacactataattggaaaaaagaaaaaatcaagcgtaataccactattgatatcttttgttcaaaaaatatgttattctctcttatagtcgtcgaaaaccttcctaccaaccaggcacctcaccaccaacgatcgaccgaccacgcctaatgccagtttatgttgaacaaaaaaatattatataaataatttttttataaaccgtattaaatctaataaaaataataaaaaaaagattatttcacaaatacacaaaaataacaaaaaaaatattacaaaaatacggtttcacgaaatatttttatgatttttttgat

SEQ ID NO: 116897 - DNA, 976 bp, Cannabis sativa
atatatatatatatatatatatatatatatatatataaaaggtaacatagaaaaaaacagttaaagggaattggccatctaaagtgaaccaaggtgattgtgagtggtataacacgttgtgatggatagtcaaaagttgtaattagatattttcatgcgttaattggtgttgtagtttgtaatgttttggaagtgaataatataagtatatgattcatttgaaaaaaatactttcatgttaaattgagtattaaagacatacaataattaagactttggggagccattattttttgaggtttgagacttatttatatttagaactttttgaaatcacttttgccataattttttctagagggtattattcataaacctatattataaattgtaattttttttttcagctttgatgaatttcacgatttattcccgtttatagaaagagttgaattcctatgatgaacggtcatttttattcataaattaatcaacaagtggcatgcttaataagattttattatgttaaaagtagagtttgacttctttttcttacatgttaagagggttatgtatagattaattttgacggctttctatgcttaatagaattaaaacaaaagacaggttacaatatagagaacttgagaattttaaatgttttttttgcaacactgaagatgagaccgtgccttattattattttttttttagtgttcttttttcgtggaatgcttggaaaaggtgaaatcatggctgaattggagattcgctactactaccttacaaaaaattgtaaggtggatataaggagcgcaaaattaaacaaggcgaagaagtcaattttagttgctgtcgttgcagccctcgtctacgaaatatgtgttgggtccgcccctttattggtgggctggaccaataagggcttaggcccattttatttgaatcaattaaagaaaaaaaaaaagaagaaagg

SEQ ID NO: 116898 - DNA, 1822 bp, Cannabis sativa
atccctggccatactccagctgagaaacatcaccaattcttcattaatatgtggaataagagagtatcaatacaattacaagattcagagcaatctcagccctatggtactcgaaatacaccagagaaaacagtcacagttttctctctaccaacccgagtacacccccttgttcttgaccctcttcaagaacagaactctcagcttagaatcctaagcaactctcttgaatcctctctcttactctcctacttataaagtgaaaagactagacatatttataggcccaactcatacaaggaaatagctccaactaactaactaacataacagaaagttagttaagttagttggtttaagtgagttggatattaagttagtttagaggatcaacttctacaaatataaaaaagagtaatataacaattaatccctaaaataataatattattaaatgtgaaatattttggcgccactatatcaagttaccaaaactgattagaacgataaaattaagcaatttgtaccgcatgtttaaaaataatattatatataaccgaaccaacattatatatattactttcttccatacataaatttacatccggaacctctatatatatacatatttaatggagaatattcatttgaatgataggcttaaagtaaacaatgccttgttttaaaatttacccaaggtttagaagcaaccctgattaataatgattttaaaatgactattgatcatattttgcttgtaatgactggctatttcctttaactattgtcctagagaaactaatagtgttgtgctgccactcatggcaaaattattacaatgattaaacacatatttttttttacactttctccatcttaaaatacaatgaccaataaaaaaaagagcatccaaggctaatattaacttagtactttttcaaatcggcaatttaaaagtagccgtaattttaactggtgaatgtttgtttgtttgttggtacatagacaaaactttacaccaatagtatggatgcctttctaggggaaactaatttgtgaatatccttttaatattgttctttctaaatttagatttatataccgcatttaatattatacaaaatgctaccttcaacttaatattcaacttctttctttatctttgtgttcaaaaatataagtcaaaatatataatatataacctgtaaattttaaaaaattctaaataatctacattactgattatagaattcctaatattccaatttactatttattcgattttaaaaaaaatactgaaataatattaaaattatagagaacattgtgaaaaaaaaatagttgaacatcggacggattgaccagatttcaggtctgaaaaatggaacctaaactagcatgttcaaaggattcaggttcgcgggttttgcacttacgggttcgagttgacccaatcaactctcagtcaacagtttcttttaatcacccaaattttttagagaaaaagaaaaacatttaaaacccaaagtagaaacgtaaatctaataattcaaaatcaaacaaatcattcgttaaacttatgttaattgttcatgaaagaacataataataaaaactagaactgtcaaaataaattgtaactaaaaatcaaagtccatctatacatttcgtagttattgtccacgataatccatatatatgatacataaatactattttggatcctgtgttttgcaaaagttaccgattggaccctctaatttgttaaataacaaaattgaaattctgtattttaatattctcagtttgattatttaattaa

SEQ ID NO: 116899 - DNA, 1619 bp, Cannabis sativa
gttggtccctaggctatatatacttgtctcctgtctttctttgtaattaattcattcaatcaataaagctcaattcatttttcttcattccgcaataagtaacaagtcactcagcctcaagagtgacaaaagtcactcagcctcaaaagtgacaaaagtcactcagcaaagagagtgacaaagtcactcagccatgagagtgataaagtcactcaaccaggcctcctacaaagtcactcaaccaggcctcctacaaagtcactcggccatgacattgcaaaacttggtgaaattttccctggcgagaggagagtgaagggataaggatacgaacacaaggacaaaataagcatgcgaggagagtaagaccacaccttttgcaagttctgaaagtaaggaggtacaagaaatggaggcaccacaccagcaagatctgaaaaacccaacaaagggtatgctgcagccactacccctacaacccgaaaccaccttacaccagacaagagtatgaggtgcaatagcaacttgcagcctgaaagcgacacattgtccccttgggaccaccatgtacctcaggcaattaaaccctataaatacctctttctgagatgtagaagggggttgaaaaattattcttgaaatactacaattagatcaataaacagttctttattttttctactttgagttagatattcaaccttaatcttcatcttcttctctcttttctgatgtagtttgattttctggccagtaagttgattgacgagttctcattgttaacaacaaggttaatgtattgttatttttttattcatttataactgtctttttgttattttatagttgtttcatagttatttttttttgttgtttatgtgttttatagtttccatagttatttttttgtacagttgtttagtttatgtgcaatttttatggtgtatatttttattaatttattccacacaatttttttgttgtatatatgttcattagttttgttctttttatgttattttttagtggttttcagaatattttttgttcaacaattatttattagttgtttttttatacatttgtattttttatggtgtatatttttatttttttctgacaatttttttggttatatgtgtacgttactttatagtttagatacatatgtttagtttatttttttggacatattttatcaaaaaaaaaaaagatttgagattttttgttctttttaattaacacaatgtgtaatagtaaatttgacatattaattatatattacgtattatattatataccctattttttcattataaacgtaattatttttttaacttttaaaaaataaattatcattttaattgctactaattcaaaaagaaaaggaaaaaaagttaaaagtatgaaattataacaacaaattttatgataaaaaaaaataatgtagtatagtacaaaaagataaattaagttgtcaaaactaagtaaaaaaaaatggtaatacaaaaacatattgatgagttggtattgctttgcatattataactatgtcattgtattgttatttatttttattttttttgaaggaaggtacgtatttcattaaaacaaatcag

SEQ ID NO: 116900 - DNA, 1523 bp, Cannabis sativa
  modified_base (1474)..(1489): a, c, t, g, unknown or other
ttataataacagtgtgaaacttttctcaaaaaaaaaaaattaacatttataactattaatttgtaaaaatgtataaaattttataattgaataaggaagaagaaaaataaatagaagacaaattcgtgtctttggatgatgggggctttggcatttgtacatattataatatgagatatttatagtataagtttattcataaaattataattttatcgaaattcttaattacaaacttcaatagtatcttaaattagatatataagacgtagattttaaatctttttaattcaaacagagatatgagatatgtagtatcaattattaagttatgttataaatttaagacactaacagaatttgtactgatagaactaaataaaaaatataattttaataacattgactacttataccaataaataaatttattaaatatatgtcattcacaaactcaaactttaaatacttataccgtaaatatccctatataaagagttcccttttagtttgtggtggttagttctcctctttggagtggtatttattggtgtcatgtctgaccctaggcatagctaggttagacttgtgtttagggtccacttagtttagggattaaaaaaaaatactcattttaaaattacaaattttgttatactgatattaaaaaatattacattttactttaaattagaacttaaaaatattttttttctgtaacttattaaattgtaaggccgaccttaattggtgtatgtatatatattttcagatagtgtataaataattacaaattaaggattgtcactatatttaatttgatataataatatgagttatatttttttatttccaatatattccttaaaaaataaattcatttcatttttatgttgatatatctatacataagcattatactttttttttgttttttctttttcaatctcaaaaaagaaaacatgtatttttgatttatcatttatgtgaccattttcataaaacataagttgatgacatggagtggtgttgtcattgacacaaatgtcaaaaatagagaaaacaaaacaaatacatgtcaaacaaaacaagtttggattttggaaggtgtcacctaggattcctaataaggccattttgtattctaatttttgaccaaaaatatgtaacaattatgagcacaaaacactaaagactcaattattatattcactttccttaatgtataatgtagtttaaattaaaatacaatgaattttggctctacttaaacaaagatatgtatattttctctgtatggaagaaggttggactggagatttattgtttgtaatatagattttttcttttttttgagaaaaataaaattttgtagatgataatatatcacacaaagaacataattaataagataagtaaactatgtcttttataaaaataggaatgaaaaccttaaggaggcgtttggttgggnnnnnnnnnnnnnnnngaataggaatgggaatgagaataggaataggaat

SEQ ID NO: 116901 - DNA, 893 bp, Cannabis sativa
tatacaatattgctattgctcttcatagattaccaccatcactgatttttcaaacaaattatatacaataatgtttgaattgcagtattatgaatccttgctgcgagaagtcgaagaagaaactgaaaggcaaatttctagcgctgtggagaaggctgttaccttaaaactacagaagctgcaggctaaacttgatcgatgtcttaaagaaaagaatattcttaaggatgtaagtcatagctagctcgtaatgctctgctcggtgcgactttgtggcttattttcacctatgactggaagattttagtttctttctaataattaaattttcatgttgagtgcagcttaacgagaatcttttgaaaaatcaggagatttggaaagaaaagataaatcaagcggaagagaggttttgatctgtcccttttttctttaagaagataaaatcaatgctattttctgtggtaagactaatcctctatgtttttttatcaggaggaaaaaagcagtagaattaaaggaagatagaatcaagcaattggaggaacaggtaatacaacattttcataatgtgtttatatgtttttgtttttttaattaactaatggaattcccatctcccatgggctattatttcacttttcacagcttcgggatctgatgtcggaccttgagtcagtggcttaacttgcaaggaagctagaaaaagctaactaaaacagaaacagaaaagaaaaatcaagtctgaagatacatacatgtacaggaaggaacaattgatgttaacttctactgctgtaaatttttgttacaggatgatgaaatattaaatttgatatagctattcaccttggtgctgcagcatattataataaattttaatttaattttct

SEQ ID NO: 116902 - DNA, 871 bp, Cannabis sativa
gtctcaaactgatgagaagaaagtaatatttttatccttaattgtgattttttttgttgcttatttataaaaataatagtacatatatttaaagctttcttttcaagacaagtctagggggaaagaagtcttcctcatatggcccaacaaaggttctcattaaattgaatttgaagtagtctctgcctcatatatatatatatatatggaaatttagtctatatctagatttacattataacataataattatatatctctcttttaaaatctaaatatgttcaccaaatttgatttagtgattctattggtgctagccacaagtattcatgtattgagttcaagccattattgcatagagactgagagacaagctcttctcagcttgaagagaggttttgttgatgatggcgatcgtctatcctcgtggacaagtactagacgagattgttgtgcatggagaggtatcaggtgtgataacttaactcttcatattatcactcttgatcttcattctaatgataacgattcaatgttattgagtggtgaaattggtccttctttggttgaattgcaacatttgagatacttggatctaagtaacaacaatttcactactaataaatccaacacaacaatgtgcaatattttagaaagccttagttgttgtggtgaaaagtactcttatttagaacatttgaatttgagtacaaaccaattcgaaggatcgttgttgaatatttcaaagtttccattctaaaagtgttggatgtctctactaataagcttaatggcactttgcctgaagatattggtaagcttctgttggaaattattttaccaggatcttagttctactcacaagtatgtt

SEQ ID NO: 116903 - DNA, 968 bp, Cannabis sativa
aaattataccaaaaaacgaggagagcggcgagcagatccaggcgatacaagtacattgttaaagccctttcctctgttttgtttcttgctctgtctatcaacttcaccatggggaagttggtgttcatttttcttaggcaaagattcacttctatcagttgaagctgacgaagctggtgcagaggcagaaactatagaagactcttgaggaagacttgttgtctcaggtaaatatcctactgaatcataaatcaaaataaaaacatgttatggacacagtcatttaatcaaagtggaagaatcagtatgaaagaaacacacagcgataagaggacacagtaagttatttcttaatattactacttgaagcaactaccgtatcatccatgaggacagaacacaaactccacaagttttccacttacaaacgtagaggattttaccttgggcggcaacttcttgaaacttctgcctcattattctgacaaatgcaaataacccatttgttctgttcaattcatggaccaactccttgatgtcattcaagtgtggattgcaatctaacactggaaatgcaaacaagggagcagaggggaaagggccaaaatgcagaaaattagttggctttaaataatttaacattgctaacaaatgacaatatctcacttacagtagtaaatattgtcagcatggcgaatggtgaatgaatattcttcatttggatttttcaaactaatgttcttgaatacgaatttcacacctaccaaacagatgtaagtattacatgtcatttcttcaaaaaaaaagagggggaaggaacatttgttgcagatttaaaaagcctcaaaatctccattaccgtgcccgccttcaacatggaaaccaagaaccctattgtaccaagagagggcttcctgtatttcatctttatcattttggctacctgtttcttcagatactgccaaaaa

SEQ ID NO: 116904 - DNA, 1932 bp, Cannabis sativa
tattatttgagataccaggatcgaaggcacctggtcctgatggattcaacagtcattttttcaaagataattgggaagtggtaggagatgatgtgtgcggagctattttatcttttcttcatacgaggaacatactaaaagagattaattccaatactattactctgattccaaagactaattgtcttgttagcgattgtagacatatcttttgttgcaatgtgatttataaaattgcctcaaagatggtttgttttgattgcacaaaatcagggcagatttgttcaaggaaatttcattgcatacaatatcatgatttgtcaggacttggttcgacactataagaggaaaaattataaacccaattgcatgttaaagttggacctaaaaaaggcgtatgatacattaaattggaattttcttgaggaaatgattcaagctctttagtttccgagagaattcattcggtggactatggtatgtattcaaaccccgcgttctagtcttctgttcaatggatccttacatggtttttttgaaccaaaaagaggcttaatatctctcttgaataatgataaagattggccaaaagcctgatttccaatttcatggaagatgcaaggagttgagtttaactcacttgagctttacggatgatgtgttactctttcgccatggagaatttaaatctatctaagggttgaaactcttctcacatacttcatgccgccaacttagtgaggctgtcatcattttatttttgcgggatggaggagaaagaaattaaaagagtgaatattttcggttttgtaagaagtgccttaccatttcgatacttaggcatccatattgctgcttgtcgtcttaatgctacagaaactgaaataatagtggagaagatgactaaaagaatcaacggaatctttccttcgcaggtagagtcactttaattaattctgtgttgatttctatacatacatattgggctcaaattatgatcatgtcaaagagatcttgaagagaattaataaaatatatagagcctttctttggaaaggtgtctcaaattatgctggccctgggaaggtagccattggaaagtatgtgtgggttgttgcttcaaaacaagataacttatatgggttaaatagatacatagtgtatacggggagttggtattggaaatgaatagtgactgtcaaaaaacaaattaaaaaggttttcaattaccaactactcatgaacataacatataacattaaacaatgctaccagctactagttggaaggcaagcgaaagtttattgggctgatatggtgtggaaccgaatgaatgttccgaagcacaattttattttgtggttggcaacaattcaacggctgcatacaaaaacaagattgagcagattcaatatagtaggtgatacaaaatgtgaggtatgtgctaactatgatgaaaccattcaacatgttttctttgattgtcaatttagtatgaaatgtctaattgaaattaaagtttggttggagtggaaaacgacggcaacagagattaaagccatagtaagatggctttctcgtggtaaagtttccaagagcaggtgcatgtacagtgcttgtgtacagaatatggttaaatatgaatgaaatcttgtggaatgctaagtgttttacagtggattcagttgtaaagaaagtgaaatatgatgtaaagaataggattaattttgctatgccgaagaaagtgagcaagggggataggagatggatgaaaaaattgtaaatagactcaggcttttttgtttaaaaaagtgttgtttagtttgtaaaaatgttttgaagcaatatatcatctctctgatttatcaaaaaaaatatataaaaataattattaaatatatgtagtatgtcaataaaattatatacatacat

SEQ ID NO: 116905 - DNA, 1800 bp, Cannabis sativa
gggggtggacttggaaggtattggtgtcatgtatacgtggactaatggtcaagactgggagcaccttgttaaagaaaaactggatagggtgatttgttcaacctcttggctgactcagtttaccatagctggaaccaaaaacctccccatcatgcattcggaccactcagcagtgattcttgatcttttcttggaagctaatcattacaaagcaccttttcgatatatagatgcttggaatatggatccggggtgcagagatattgttagacaagcttggacgcaatcttttcagggctatcacaacttcattctgtgtgccaagttgcgaggtacgacctctgcactggctaaatggaacagggaacactttggcatatgcaaaaagaaactagaccttttggaaaaacttctcattgatgtgcaaaatcgctccccctccccagagaatgttcaattggaaagctctatccttctcgagattgatgaggttgaagcaagacaagcagctatttggagacaaaaatctagagaactatggcttagagacggagatcgtaactctaagttctttcatacttttgtcctagtaagaagaaaaaggaattttatctggtccatctctgaggatggtgtgaattggctggaaggacgggaaaatattgcagattacttcacctctaatttctctactatttttgaatcctctcgccctgagattggccaggaaatattctctctaattagccctttcattagctctctgaagaatgaacatatatgtgtgattccctctactgaggagattagagcagtggtcaaggaaatgccccaacttaaatccccgagaccggacggattccccgcaaaattctacaagactcactgggaggttgtgggaaagcaaacggtggattttgtgtaagaattcttctctacgtgcaagttctctaaggaaattaaccgcactttcattgtcctcattcccaaaaaggaaaatgccaaatgttttaatgactttcgacccataagtctctgtaatgtcagctacaaaatcgtggcaaaactcttggctaatcgtatcaggcctcttctggataagcttatttccccttttcaatcggcttttgttcaggggagatggagagctgaaagttctataattgctcaagaaatagtgcacgacatgagtaaaaagtagggaaagaatggttttctggggatcaaatgcgatatgtcaaaagcatatgatagacttgaatgggtctttatcgatcacgctcttaaggcttttgggtttagccttcgggttcgaaacctcatttcccagtgtattagtactgtccgataccagttgatgatcaatagaggtctctcgaagtccttttctccgcaacaaggtcttagacaaggtgaccctttgtccccgtatcttttcattctttgctctgaaattctgtctcgtttaatgctgtagcaggaaaggattggcttgatttcgggctataagtgcaccaggcagggtatgcaagtttcccacttgttgtatgcagatgactccattttctttatcaaagctgatcacggttgcgtttctcggctgcgaatggttcttgataaatactgctcttggtttggtcaactaattaaccagtccaagtctaagattatggcctcaaggaactgtcaacccaattgtattgctgagtatgaaaatttcttaggctttgagatgatgtgtggggaggaagtttgttagcccaagatatgtttccaagagggggggtgaattggaaattt

SEQ ID NO: 116906 - DNA, 2373 bp, Cannabis sativa
  modified_base (2330)..(2348): a, c, t, g, unknown or other
attttcgtgatatgcaagaaagacattctgtatttaattttaattatgaatttaataaaaatattgagattttttatacttaaatttataatatagtttggccttcctaacttttcatgctggctccgcccctgcttgtctccctctctctagaaagtcacacaacacacacacccaaccggaacaccctttgccagttcatcaacttagcttgaccaccaagtgcataagatcaacccaaactcccttaccaacatacttcttaaaaagaaaaaacaatggacatctaatttcttgaataattgttgttgagtttagttgtatttggtttgatatgaatagatctacacatctgctgcattattattgattgtttagtgtctaaaatgaaacttcgatgaatctaggtttttctagttttttcatgttttaacaatatttagcgacatgtgtcgcgacatatatcgacatatatgatggttagatctaagagatgacgtccaacgatggttagcgacatgggtcatgacatgtagtgttatataatggttagtttattagagatttgtttaatgatgtgcagcgacacgtgtcgtgacatgacgacaatatatgtgtatgtgatgctaggcatgatgcttaacgatgtttagcgacatgttttatgacttttggcgatatttatttgtctttgatactagagataatgcttaacgatatatagcaacatattttgcaacgtttgtcgatataagtgtacattatatgtaagaggcagtggtgaacaacatctgctgataattattgatattttattatgtcgtcattttgtaatatttcacaataattagtgatatttttgtcgatgcgattgatatttaaattaattttttgttctatttttatttgtagattcaactatgtttgaattgtattgtatgatggggtttgggctcttcaaggtttttattggatactcaatagcgcaaaaagtaagacattgatgtttgagattgatactactttagaaaagatgcatgataatttgtatgaagagttagaagtagaccctttggtgtatgaattgaaattagaggtatgttacatgtacatgaaaggtaccatgatacctcctaaggttttagtgaaagatggtcaagttagagtgttcttagacttgaaggcaaaaatgagtgcgatgaacttgctgccactattagtgactatggtaaagaggatgtgactcgaagtgtggttggagcttttgtcccaaaaacagatcatctagttggtttaaatgagcagttccctaataatatagatgataacagagctaataatgcatttgattgagtctgatgctccctatgcaacaatgataatgtggtacatttgaacgaggatgatgctatcgatttggaaattaattaagctatagaggtacctgacctgatgttagaatctcctctaagcaataattgtacagagggagaaagaagaactcccatagtgaaaatatccaaacaccaggcactagagcagtcggtaaggtcctcctcatagtactcttgcatctgattttgaagtttgtacaaaatttaaatctcttgtgtggaccaaggaagacatagaggaaaataatatttatacaatctctcttattggtacgccttcaagggaaatacactttggcaagttgtacacaaacaatgtagaattgatacaagtagtgggaatgtatgcattaaaaaagaatttttagctcatggtgagaaattctggcaccgatgtattttacgtaacttgcaaggatcgaaattacaaatggagattgagagggaggaagaaggcacattgtgacacgtttgaggttactgtgttccacgttgaacacacatgtcacctagattctagaaaatctaataaccgtaaagcagcgtcgtgggttgttggccaccttaataagagaaagtacacaatagatagaactaagtacaagaaaaaaagtataaaatggatatatttgtcgactatggtatcacgattagttatgagaagacatggaggtgcagggagaagacacttacatatactaagggtacgccagcacaatcttttacgaaattagctgattacttctacattctggatctgggtaccattattactgacattgtgagagaggatgacaggttcaagtactatttttgatcactagatgcttgtaggagggatttaagttttatcgtcctatgatgagcgttgacggtacattcttgaaaaaaaaagtatggtggcacaaaagagattttgtatatattaaaccatannnnnnnnnnnnnnnnnnnaacataaatgacttctaatctttta

SEQ ID NO: 116907 - DNA, 2720 bp, Cannabis sativa
  modified_base (2430)..(2434): a, c, t, g, unknown or other
agaagtaaataaattcacaaataaaataataaaaattagtgcaaattgcctttactaatccacattactagagcggtcattacatccaccgtgaaataaaggagacagaatctttgcaacagtggactaagcagactgtgatctaactgaaccagtatgattctcttgtgtttattatttttccagcctttttattaagtatttgtgttcccggttcgagtactcgccattctgggttgaatactcacacttgttcaccagtttttattattattgtaatttatttttgatgttgtaaaattccttcaacaacaaacacccttgttaaacaactcaatcaagggtgtcactcttcttgaatagccctccacgaatcatctgtagtaattggctagaccaagaaaagagtgtaagtctttaacattggttggtgtcatccactcttagatcgcctgcatgttctccaaatccatgcggatcctcttgcattccacgacatgacccaagaacttgataatttcttgagcaaatgagaacttcttttgcttcacacacaacttcttgaagaccatagctaagtgttcttgatgctcttctaaagtgatgttgtagaccatgatatcatccaagtacacaaccacaaacttatctaagtattcatgaaagacttcattcatgagtgtacaaaatgtagttggcgtatttgttaacccaaacggcatgacgcagaactcaaatgccccatatcgagtaacacaagtcgtctttggttcatccccttctgcgatccaaacttgatagtagcctgatctaaaatccaacttcgtgaagtatttttccccacttagctagtcaaacaaatcaacaatcaaaggaatggagtatctgttgtgcacaatcactttgttgagggtgtgatagtctatgcatagtctcaaggtctcgtccttcttctttaggaacaacacaggcgcaccaaatggtgtcttcgttgacttgattaaccctaattctaacatccttgttagctgcctctttaactccttaagttcttggggaggcaaccagtatgccgctttagctgggagctttgcgcccgttaccagttttatttgatgatcaactctcctccttggaggcagtttctttgggagtttatctcgcatcacatccttttattcatctaacacctactcaatttcaggtggagaggactcctccacttctgcatcatacacagttggagcaatgacaaacattggcctcttcttctttagatccttcttcagttgcaaggccgatagaagcttgacttctaggggttatcttacttttgtaggaaccatcgaaggtttctcctccatgataagtaaattccctattgctggaattggaatggccccttttttaactagaaacttcatccccaataccacatcaaagtcatccatgcaaactgctacgtgttccagttgcccctctcttccatcaatattgacattcactttcttggccaatccatttttttcatggcctttgaattgactgctttcatgcggcccatatccttctccaattttaggcctactctcttggctttgattttggaaataaaagttgtgtgttgcgccagtatcaatcaacacgctcttagcttgctttccatttaaattggcctccacaaacatcaatcccttcccttgagctttcttgccatttgtgtcatgcttcttgagagcattcaacactcatgtgcacgcagtcttcatcttcatcttcttccccacatccttgctcctcttgagcaatggatgcctttatggcactccacttggactggtgggggcaagcagctgccctatgtgggacttaataaagccaacacttaagggacttcttcccagtggcagcatcactcttacaggaggagctagatttaggagtctccttgacccctcccccacttttacccttccactgcttctcagacttcttactcccaatattgttggagctagtttggggattcgtcttcttcgcttgtgaattctttgagatgtagtcagtcagccactcggctacaacttcagcagtagctaggtctgacacacgttgcctctgcagctcttgtttagcccatggcttgagtccatcgaggaaatggaaaagcatgtcaacttcattcatgtccttaatgtcaagcatcaatctagagaaattctttacatattctcgggttgattggatagtattttactgtgttagtccatattgttggtgattaataattaatggacttagcatctgtgtatataaattctagttgaagcagaagtgtgggcttttttaattaaccgaaatatttaatgagcaatctcaattcaactagggttatgtaattaagtcccctccttaactctataaatacannnnntctcatcacaattgtacacttttgataattagataaataaaaatgtttctaatttagagatttaaggtggaagacttaattaatagtattttattatcaaattacggtaattattgtagatcaatcaagtacatatactcaattattattgttatctaaattatataaaaattgtattttaagttatgttgtcgagtgaatttcgcaacaccaaaaagtgtaatttaattgataaaaaagagaattatttgagaaaagacaagtgcgagtattcaacctaaaatgg

SEQ ID NO: 116908 - DNA, 1161 bp, Cannabis sativa
aaaaattaaaaaatagtatataggataattttcatatatttatttatttaattaatacatttaaataaaaattcctaccatatgggaaaaatggataaaaatcgtcgggaaaagttgattattttgaataacttagatcctgtttggttgtgttttcagtttttagaattgtgtttttaaaagtgagaatagaaaacagatttttgtcactataaaaatttaatggtgtttggcacaagttttttaaaactatttttagattttttcttgctaaaaaatttatgacatgaactcatttgggttcgggtttggtcccgggtttaggatctgaatatgtgagcaaaaatataaaatataatatgttagaaaaaaaaaatatttttgaaaattaaaaacaatattttgatgttttctgtttttaaatttttcaaaactcagtttttaaaaaattatttttaaaaaattttaccaaacgattctattagtttttttaatgtaagtttgacagaattttatcgcatgatatttctagaatacatttttagctgtcaaagaaaatatttgttttacatagaaaatgaattggtcaattgtaagcgaagatataaattttttcaggctaaataaaacaagtttaaaataaatacacactcatctgattcataaaaaaaaaaaatatccgtacctataaatctgttgtgattgtataatagtacaatattttttttattgatttttatggatttagattgaatactccttaaacttttttatttaattagtatgataccatgttaaaatatgaaaatatataattgagaaagtataatatgagactctctaatattttttagtaattaattgttcaaaattaaaattacgcgttaattatatgaaagttaatgtaataacacaaataagttatatatatgtgtgttttttttaaaaataagcgtgaatgtgccattaataattagagttagacttcgcggtcattacataaaaggttctccggaaccgaagaaaccagaataatctcatacatcttgttaataagagcccaattagccacattataggctacaaaattacaacaagagaaggagggagaggacttaacacaaaatgagatataattgtcaatcgcccaatgagactccg

SEQ ID NO: 116909 - DNA, 1278 bp, Cannabis sativa
  modified_base (1208)..(1214): a, c, t, g, unknown or other
ggatattattagtgtttaaaatatcataaattaattagaaggcaacacgcctaaaggttgttactcagtatttaattttttttttttttaatttaagcatttatatattacaatcatattttacctgaaactcgaatttaggaactccaacactcacacacccacctatcaccacttgagctagcctcgagtagtattcaaactctaataaaatgggaagaatagctccattttcctaataaaaaaagagcgactgtctgacaactgacaagtgaagccagaaaagaaaagagaaaaagaatcaataaatgttatcgtgaaattatcaggagaagagaaaatgggttgttgtcgtttcgggatctggtaagccctgcttgactaataatatgtcatagtttattttatttttattcatattaataattataataaataattaataaaataaaaattgaagtgaaagtgaaagtgacttgtcagaaacttttgtcagaatgctagttgcactccaacaaacgcaccctaaaagttttaatttttcaagcaaccaaaacaaaattaaatattaataataccctcaaacttacaaaatgtcaatttcccaatttttatttttttattgctaaatcttaaatatgggtagtagtgcctcacacacttgtacacaacttattatacatatattgtacgagtagtgtctactaatttaaatgttttatttgtaattgattatagatattctttaaaaatattcgataattaatttagaaatatttatagtaaaacttttttaatatttataattattacacatataatttcaatcaaaaaatagcggcaaaagtattttatcttacaattttattgtaattatattcttttttggcaatcaaatgtgaactcaaaaatacgtggcgacatattattagactacgtattaaataagctaaaaaaatatgttgctatgtattattaagctagcatttaatggacttaattggcacttaattaacaactaaaaaaaggtacaactattaaaatcgtaaaatgaaatacttttatcgccgtttttttttttaaattattcctatatattaatataatatcttttaggtaatatagataatcaatcacagtgtattatttttaagtagtgctaaacaccactaatatctaatacaatagaatctctatttaagaatacnnnnnnnaagaataacctctaatttgttataaaaaaatcaagtcccgatttgtgccagttataaataagaa

SEQ ID NO: 116910 - DNA, 1067 bp, Cannabis sativa
taatttagttatacatagttatacatttttttttttttttgataaaatttaattgtaaagaaacaataaaaactaaatacattttttattgatgaaccagttgaaattcattacactaaaacaacatccttacaaactaatgacaccatgttaaataagtctcaaaagtacacttctatacagttttctcagctttctattctctactctttttacaatgcctcaaaccaagatgactcttccttggttatctttttagtcaaaaacacaagctattctatcttttgtaatccccctaactttatgtactaattgttctaccttttgatctgttgccaaccaaattttttcaatccttgtcacccaaatatgatagagaaggcttgctagcgctgatgagaatacctgcttcttaaactttcctatctttgctttctcaatccaccttagcagcatgtgtagtgagttaccacaatcattccacttcaaccatttcttcacctggttcaagcattcccaagagtattcacactcaaaaaataagtgttgaactttttccacatgtgtaccacacaagatacaagtggaattatctggacaacattccacataacaaaacaatgtttaggtaaaatatatctacaccatacttctttgcaccatcgtaccttatcttgagttggacaaagcatcctgtagccattgataatttagtatttctaagctgtaaactgaatcagatctatgagatggatgattttgttttttatctccataattttcctctagtgccaaccactttgggtagtagctttgtattgccacctgttttcattttgtatatatacattgtttacccatttgagccatagactatccttcttggaagctattgcccacacatatttcattatagctactgtgttccaagttgctatgtccctaaatccaatacccccagttgttttagtttgacactgttgggttttgtcccctaaataaaacccattttaatataatcagacttactagttaataaagatcagaaatcgtattttatgttgcat

SEQ ID NO: 116911 - DNA, 2528 bp, Cannabis sativa
  modified_base (2155)..(2157): a, c, t, g, unknown or other
atttatttattttaatttttaaattaatcacaaccatccaatagtgatctaatgactaaaaataaatgtaaccattaaaacctattccattgatatatatggagagagtgagggaaaatataaagagaaaattcattgtgaataaaacaaggtataaaattatgaattcagtcatgagtttcaataattcaatcaacaaattactaattaagaacacgttttaaaaattagtatacttcaaataatagtcatttaatgtacttgatgtagttaggttggaaatgtagatattaggtgaagcacctaattatatagtgcaatgtttgctttgtgtaaatttattgttcagttttaaatattcgactaagaacttcataaaaattatgagtagttgtttttcttttttaaaaaaaataataacaatacattttttctaaaaaataataaaaaaaaatagaaattttatttaaattttatataaaaaaaaaaaaacaaaataattaagaatattggcgataaaactatctgaactatacaatttgtgacacttaaccacataaactgatttttaacgacataactacataaattgcacttctatgtttgtctttacccttcctttcaataggctctgttaagtgctacggtatacatgccactatatactgcctccgttactctcttttcacttttctcgtgcgacacccctgtcgtcccagtgagaccatctctggccacagatggcccaatcgaaccacaccatgagtttcacctaccgtcaaaacccaaatcttgatccccctctctccagagccccatcgattcaccttagtcacgtttttcaattctctctcacagtgtcttagcttgatgggtcagctgcgattgttgttgacccatacagagaccacaaacatcttcaccaaccttgaaaatcccaagaacctcgagcccatatctttcctcgcgggttctctctacaccaactctccccgctgcacgagcatctataaggtcatgtattaatgtcacagaccattgtcaactcaaatagagctcaccgcgagcttttgagactttcgaattcccaggttcttcatcccccttccatgtttgtgctctctttatcttttcaagtttttctaaacttgagtaatttttaaatatttttgtcgagtttaaatgtatttgaacaaagagagattttgatttgagttaggatttgatatttggtttgacatttttttatattgtttatgatggtaggtttcaattttttgtatttgtctaatttagttttttttttttttagaaaacattggctgtggtgataatggtggttgtgtgatggtggtggtaatggtgattgtgtgatggtcgcgccactccttttgcttctgtcaattgggatccatcttttttcctactccacttctattgattcaattttccctctcttctttatcggcatgctttctgggtgcgacacatgcatagatctcataatttttttttttttcaatatctccgaatacctaaaatatattttgtttggatctctttcagtgttgaacttattgttacggttcatgccctgaaaaatctataaagtcatttctaattattaataaagagttaatattttttatatatgcatgaatgttaaattattaatatttattattgaataatttatacaaatatcaaaaaattctttattcgtatataaggttgtgacttgtagctttactgagaaataaaatcacttagctatgaataaaacagtcagcaacatattaaagttttggattctttaattagtggtcgctactacagatcactgatgtctgttcttcggtgccagtaatctcgaatcatattactgatgtagtatgacatctaagtgaatgtgttgtatataatagagattatatatgacagggatcgatatgaataaatttgtctttattaaatacgtcgtttaccataaaggcctaactcatatcatagcgatgatcaatagtatattggcctaaattctcagcaatcatgaacttttttttatgttataagtttctttgattcactcgttaaagtttctcaaagaagataattcttacttcttctgtgttgggaatctaataatgtggatggnnnggagcatgatctacaattatagaatcatgtctttcctaacagatcgaaatgttggttccctttaagtattaattttggaactaaaaagttgcttgtacagatcactgatgcctgttcttcggtgtaagtaatctctattctgattactgatgtagtatgacatctaactgaatgtgttgtatataatagagattatatatgacagggatcgatatgaataaatttgtctttattaaacatgtcgtttaccataaagacctaactcatatcataacgatgatcaataatagattggcctaaattctcagtaattatgaactcatatttatgttattagtttctttgattcactcgttaaagtttctcaaaga

SEQ ID NO: 116912 - DNA, 4148 bp, Cannabis sativa
  modified_base (27)..(28): a, c, t, g, unknown or other
gatctttatattgaaatgagttttatnnagggcataaaacccaacatgttattctattgcaaagatgcgagtagatgatttatgatttaggatcttaatgatctgagaagagttagggttaaattgataatctgtcatcaccagtagggagagaattataattaacattagcaattgagaagctgaactaacatgattcctattcctaattgcttatccataaataatcactcttagttattattttctagttagcttttatttttaacgcaatcgtaaaattgtcaattttccaaatagaatcatagatttaatctagtggtatttagttcgattccctgtggttcgacctcacctgtgtgagttattacttgattacgtgcacttgcgtactgtttacaattttcgtaacgacgggtcttgtccaactatcgtttacgactccagaggacttagatatcggtcctttgaccgactcgggttaaaattttatgggcaatgttatatttgttatttcaatttgtattggtattaaacattgtacactcaacgaggggatatcaaaatattagaatcgactgtgttggtatattatttattggtaattcatcagacagggtaggaaaattagagaaacgacgatatgagttaaatttgttgatattcccaagtggaatataagatatgagtagttaatgggggtatccatctaattgatttggagaacataatcttttgatataaacttatctagtgttagtataagtgggacattttatgagtattgtctcaaatcctaggtgaattaaagggaacaattgtgtgggtagatctattcactaccagaagggatgagtcaagctgtgccaattagagccccgtgatctgcaaaggaaagaccaagagctttacaatccacatcacctagagaaaggttgtatgtagtgattttgagattatgttggcatgggactacgtagtgtagaggacttgaatgaattgtttggagtacctatattagcaagaagtatcctattttggtagcccatcatgaaggagctccacagtaaagtgtcgttgacttagggtgattacatttagaaagtttgcccatgaagcatgcgagttagaacaaagcatgttagaaacacttggatcggtctgtagggccagtcgtcatacaggaagtagctaaagtgatccactcttgtataagagccattattatgtgggtgtcagtggcccaatggaggcttgaagcatggacgtaactagggtaatgtataaaagaatgtcagggagagtaggggtatcactaaggtaaggaatattgcctggattatatattgtgatacagtaatgatggaaaatacttttatatttgaccggattgtctatctggtatataaggagactatagaaattttgggaaaggattaccttattaagtaatgatggaaaggcataatgacctagattgggggaaaggcttgtaaattgagatgcaatctaatggacatgtattcgagtgattggtgaatgttggatcacaaagtaggttgtttactaaacaatggactatataattgagggtaaaatgaattttagtgtgattaatcaagtatgaaaatagtgatgattacaaggaagcaataataacgtacaaatcatggagtgaaaccttagtgataacaataggaaaggagtataagagtcttagatgttgatgaaacagtaccattaatgagagactcactacaagttgtaatagtaattaataccaagagattgtcaataaaatagagaatatacttgagatatgtatatttctgggtgtgttaaaaagaaaattttaggatttctacctaatacagattcagagctttgagatcaatgaatgatctttgatcagttgtaattagctaagaactcaggaaatgaatgcatgcaaaactgagtggagatggataagattcgacttgacagtaagatgaaaattccttaagcattagtgaaaaaattgacgatgattgtaggttgataatgaaggtagtgatggaaattagatttaaataatgaaaggatgaaaacaagaatacaagtgggaaaataatagaagcatctactttttgataactgttaatcccaaaaattgggatctttaatttttgagattattcggtgaagggaagaatgactcgtgatggtgtgccaaattggaatgcacgcccgaggtccacccctcaaaaatagttcttccaatgtcagggctcatccgcatcgttacaagaataaccctgaggggtcccgttgagatagtataggtgtggctagccgtgtggcgagatgcatgcaagcggtgtggtaaaatgcatgcgagctatgtgatggcgagacgtgatggggaaggcgtgtgagaggtgggggctcgcgtgctagcccatgggagctcacacgcgagctgtgagtgctagtagcttgatgatgtgatggggcaggcatgcgagatgtgggcatgcgagacgtgggggcttgcacacgagctatgtgggctagaggtgtgcaagatgtgggcgtgcgagacgtgggcctgcgagacctggggtgcgagacatgggcatgcgagctgtgtgggatgaaggtgtggcgagatgtgagttggagtagggggcatgcgagtgatgagtgggaagtgtgcaagaggggtagtgacgagctgtgagtacactttggagggatgcaagtgtaggaaaagaagtgagggcatatggataacggtgaagttgagtgagaactccggggacacggcatgcaaaggaagcaatatgtccacgccttctaaaacctctgaacacaggggagtacaagtagagacaacaacggaccagcttgctctaaggactcgaccataggtacaccatgaccggtcacctaaggcatgcaagtggggactcccatacctgaaataggggaccatgtaccagtagcttaaaaccgcgcgtctgcaattcaggaccacacacctgcagcttgggatcaccctccagtagttgaggaccactcatctgcaatccagaagcacaggcctccagttggggaccacctgacaccacacaagagtacgaggcacaaggccactccaagcacctgcaacccacaactcgaatgtgatgtgttgataccatttcaccatgttgtaccctttgccactactgcctataagtacccccatttcaaatgtgagggtggttggaagttgattatttgtaactgataaagaaaaggcaatggagagcattaaccattcatgtcacttcttctcttgatctcatcttttaatagttacacattttctgaccactaacttggttgacgagttctaactgccaacagtttggcagcgtatgtgagaacgacaaacttaggaaaagtcgtttctatattatcaataatttcaacaatgcctagacgctcacatcgccttcgagacattgaaatccattttgacaacaatcagctggtacctataaggaggaatgagcctgcccctgtcgtcgaggaagaggcaaccataaatcacgggtctcagtagctcaagggaggtagggacatcctaggctctcaagcagcacaagaaagcaccgccatgaacaagcccccatcggtgaccagtacgatggagcgacaacctccataaccactgccagagaaggtgtgatgtagggacgaagggttcattgaattagacatcctctaccctttacaccaaaggacttaggtacgttgcgtcctagggcagggaaggagatgcgagtctactcagtcacgtcaagctcccgcacccgcatgcataacgacgagatgaataagtaaaagataaacaacttgaggttagaggacaccgtggaaaacatgcagaaggtgtgttggacaagctcttgaagggacacattccgatgcacctttattccaacaaaggagaaagataaaggactatcaaagtattttaccagtaacacactggaagcatcaccatcaaaggcgaggcccaggaaggacttggagccatctctccatcttggaaattattttacaaggatcttagatctactcacaagtacgttgattaacaccctaaatataaactt

SEQ ID NO: 116913 - DNA, 3068 bp, Cannabis sativa
tattgaaatgggttttatttacggtataaaacccaacagtacggtactttacaatgactatgactacgatggacatgtgtgcttcaatttgtcggtctattagccttattgtcgtttgctctcccttgtcgagattgattttcttttttatggttgagctttgtaatggacttaaatttgtcctttgattctctgctaaaagaaaattttgatctttccctcaaaataaaaaaaaaagaatcataatctgattattacggtaatttttggattaaacctaaatccaaaattattattctctgtcccaattcacagttgatcttaagagttgagaacatcatcaatgattgaacaaatatacttgaaaatattatgtgtgatcacacacactacaagaaaagagacttttcccatcgaatttttgcattgtaaaagtcaattggattcgttggtaaacatttatcagcaagtaaatcctccaataaaagttgccaacgttttttagtcggggaaggtagttcctccaacaaaattacgatgacctacactggcatagatggtttttcccagcatataaagtcgttgttgaaatgtaatccctggcatttattattctcatgttgagtctcgtctgaaatgttttgtcggtgacatattgcgttgataaaacttttccacaaaattaatattattcacgggaaattgatgtcggtgtagttagatacgctagtataattttcccacaaaaccaaatatacgcgggaaagttttgccgaagcaccgaacttcatcggcaatacatgttttatttaatttttttggttatgtataatttgttttttaaaaaaattgaaataaaattaaatgaactgtaaatataattttaatttaaattgaaactaaaattctacaaataataattcaaaataatacaattgcataatcctgagtgcatattgtatttacacaaaactgaagtaaacattagaaaaaaaataatgtcaaagtttataaaaaatactaatgtatacactaaaaatactaaaataatagtaagactttaaattaatgacactattgtcatcttcattccagctcgaatgggcgacttgtgaaaaaaatctagccccagttggagataaaaatgaaactagggtcattaattattatgtgcttcctactcttctatatttttcttcaaagctttatattccttaatgctaacaaaaggttggtcggaggtaggacctctcttaggagttttccttttgaccactttcctatgtctagacaaaggcttaatgcctttcacatggcgtgaccactcaccaagtatctgtgtcataacaagcatatttgggggaaacttggtgggatctacatcaccctaaccaggttgatcactctgtgcaggttgagattcgtatctctcaactatttaggcctacaaaaaatatcaataaattgttagaattgaatagaaataaaatatacaacaatatagttaatgttaaaattacttacatgcacttgttgcgtgtatttaatatgccaagtgttgttcttatggtggaacttttcgaaagtatacacgacactaagaaagttctcttgtctcaagatttcagtaatatactattcaactcatcaattttttggcaatgatatttagacaatgtacctgcccaatgatatggttaaggattgtttagatccccatcaacctggaatcttcatcttgctctatttatttttttggttatgtttgattcttgcttgtaatttaaaagaattttttttcattagagttttagaattatttgttaaatgaaattaaatttttaaatttttaatttgtacctgttgtgtagggtccttccagtaggcgatcacatctgatcacatcttctcatgcctctccaatttcagttggcgatcacatctactcacatatgcttacacctctagtaacacccccaaaaagtagcgaagaggttcaatgcataacgaggagggtggcaaccttgaataggttcacttcaagatcaattgataagtgcctcctatttttcaacatcattaatgaaaacaaaacatttgtttgagatgaagaatgtgagactgcatttgtaaaactcaaggaacaccttggacaactacccctattagccaagcccgcaaaaggcagaaacttgtacctttacatgactgtgttggaacacactctaagcatagagttagtcagattagaggtaaaatgacaacaacctatatacaacataagtaggaagttagtcgatgcggagacccaatacctagaaatagagaagttggtgttgggatttatgtcctaaatacaagtatttaatggataatatattatagaataaatgaaataaaattataagataaatgaatacattaattatagaagtataattaataaatatctaaaaaaaatttattcgtatgaaaatggtataatcttgtaatatcatacaagagaattaagattatacaatataaataagacaagtcagtagtgtattatagtaagggatctttaatatggaattaccaattgtggtttactatacactatactctagtgtgtgtgattttaattctatatcacatatgtggatagacatgtagtaaaggtattgtgtataatttaagtatacatgactggaccaatatgtaataacatcattcattaaagtgtcgtttaccatgaaagaattattcatatcacaatgatgatccttagtatatcactttgaatgctaagtatacatgaactcctatttgttaacccaatatatgttttaaagaggggggtgaattagaaaattaagctaattttggtaaatcaaaacttttaacacaaaattatgtaattaatcaacttaatcaagtaaattcaaataatacgagaagtaattatatagagaaaataatcaaacttgtaaagtaaagagtttaagtgtaagaaatcgcaaactctcgatttttataaggttcagtagaactgagccacctatgtccttggtcttcaaagctataga

SEQ ID NO: 116914 - DNA, 934 bp, Cannabis sativa
tattttttagaaaataatgtaagctaattggggcataagaattttttacgtaattttaattttataaaaattaatttatatgtaaattatatacctatgtaatgctcatatcacggagttcggattcaatcaaaatccagccatgattgaccatgatgatccccatgcatggagctcgagcaccaagtgctccggccatgcacgcgacctcagtcatccatggaggttggatctccatgaccccggtcgtgcccctcgacaccggtagcacttcaagagcaagggactttggtaccggagattaatgttgacggtcgacgttggtagtggttggaccaccctcctcttccacgaacacatgcaggcatgtcgcatgcaaggacatttttatgtttgattttgtggaagagcaaagacctgattaggtctttggcgggttcaacccccatgctccccaaacaacatgatggtggtcaaacaaccgtctcatgaaccccaaggacttgagtccctcctccttgcaccgactaggatgtgagacgtctaataaacccgaatgggtctcgagatcaactgacctgtgtggcttctatgtcaagcttctcatcatggccaccatggccaccgtaggccatatggtggctgtcaaaccgccggcaaatgtggaccatggtggctggccctaaacccaaaacttgcatatatgtattacgatatatatagtatgtatattatatataagggcatttacaattttgtgtacattattttaattaattacaaaatatgtgaaaaaaacttatcatcattttctcatacatttttatttaaaattaaaaacttttttttttttataatatatatggtaataattattcattattatatatatggtaatattggctatgtttatttttatatttataattataat

SEQ ID NO: 116915 - DNA, 1234 bp, Cannabis sativa
tttttttttttttttttatgcatgctatatgaacaagttatctgtaacttattaagaaaaaaattgaaccaatatctaattcattatatttattacttagcttacataattatattttacttaatgcagcaaaaaaaaattattttttacttaagaataatatactagtgactatactaccagcaagtgttaaccttgtagtttgttactttttgtcaccataatgtttgtggcaatcctttaattttgataaataatttttaaccgaagtatttattttttaaaaaaataataatatagtgatgaattttcatgtaaaatttctattttatttataattagaaaaacaaaatctagtacatttcataatataataatttatagctaattttcaaataaaatatagtctttaacatgtttgctatatttataaaaacttaacaaaacagatggattcttactccaaagatgacaaaaagatggaaggtttgggtctgttttatttcttaaaactgtatttccaataataagaatatatgatttttttgtcattttaaaaatttaatggtgtttgactaatatttttcaaaaactatttttaaattttttcttactaaaaacattaatttcaatattctataccatatgacgacataaatccactctaaatttggacatggacttgaaaccaaacccgaactcgggactcaaaaccaaattcaaacttaacaccaaaatctagacctgaactcggggctttgcctcaggtgccagatttggaccaccgactccgacctgggatctggactcgggaccaaaatcgaacttggacccaaacatggaactaagaattggcactgatacctgacccggacctgagacccagacccaggccacaaactcccgacctcagacccaaccctagactttggaccctagccacggaaccaaccctgaacctcggccccagacccagtctcgaatccaaaccgcagacacaaccccagatccaaacaccgggcccaaaccctgaccccagcctgaacctgaacccgaacccagacccaaaccttgaccccagacccgaaccccgacccatgcccagacccagaccctaagtcgaacccggacccaaaccaaaacgtagaccctgaccattactgtgacagtcagtagtcccgtgatccgtaaggagaaataccaggtaagctgtataatcccacatcgcctgggg

SEQ ID NO: 116916 - DNA, 2247 bp, Cannabis sativa
atctaaaggtgttatgacaaaactatttacattttttatatttgttcgtgttaggaattattttcaagttggttatattaaaaaaagttgttaaaaaattaaactcaggatcctatttttactattttagaaaatagagggtccaattgataacttttgcgaaacacagaatccaaaatagtatttacccttaacaattttatggcttaaagtttttatttataaaaatacgtttttaaaattttgaagttacaaaatacactatttttcttagcaaaaagtaagagaaaaataaaaaaaaaaaataatgaaaatcaacctaacgacaaccatcaataaattataaaacaacaaaaaataaccagaatacaatctcataagaactataatacaaatataaataaattataaaacaattaaaaaaatagtttataatttttaatgaaaatatatttttgtaaataataaatttgaaaatgtaaaatgaatttttttcatattgatgtatttttgtatatttttaaaatttttagtttattttgaaaaaaattctaaataaaatagtaatttttttgaaacaaaataaaatagtaactgattagttgttattttatattatccattagctcattttgtgataactatattaattttatatttctgaatgcagtggtgataaataaataaaatattagttgattgagttgttatttttatatcatattaaataaaatagtaattaactagttgtttattttacattatttgttagcttgttttgtgataattatattagttgcatatttctaaagtgataataaattaagaataaatacttaaatttttgtttgttgcaaaaattctttttgaattataaaagtcattaaaaataccttttgtagtcgcattctacttatttattgaaataatttgttaatataatactaataatatgatgatacaaataatacaatataatgatacatacacgtgttataataattttaggctatttaaaatttttacatcctaaattatgaattatgtatgattgtgctctttaaatttttcagtccgttaaaaatggtctccaaacttatgggtgacaatttgagttggtaaatcgtattcgtatcgtgtcgactgtcgaggcttaggtattacaagcaaatgtcaaccccaatccttatccatttataaattgtgtcaaaaattaaaactcaaatccaacacatttataaataggttaacctaacctgacccgtttatataaaaaatcatgcttgatttttgttaacttatcaactcattaatatttttagaacaagtttaacatgtttacaatctcttatgacatatttgagcaatttaacatgtttatgtcctattttattaaaaaaaaactaatttacatgtaataaatataataaatttaagagtatatactctcacttaggtcattatcgtgtcatttttgagttaaacatgtcaacctaaaaatgacccgtttaataaacgaattagtcgtgttaactcaaaaatgaccaaaacttgtttatttcatgtgaatttcaaatcattttatcgtgtctaacacagatcacaactcttacccaaactattcatagtatcgtaagatggtacttctgtcaggttttgttacatgtaccaaagagaataatgatatgacaatttaaactattaacatgtcaatgccacatgtataattaatttgaaaaaataatttaattttttaatttagttttacttttttttttttccagaaaagtcattaattgacttttttacttaataattttgaaaaattcattttattttgtttaattttaaattacacatatattgctaatgtggcatttatataaatatctacctcattattatatttgccacttgtattgtgacaaaacttaagagaacgaccattttacaacattaaaaataatttacctattttgaacagactaaaaaattgaaataatacaatcatctaaaaatcatagtttgttggtaaaaatgataaatagtaatagtcatcattttatttagccatgaggggcaaaatagtaaattgaccctaaatgaaggaaaattttatttacaccgcataaaatgataaatacatcctattattaaaaaaaatataaatctaaataatttttttttgaataaaaaataatctttattagacgaaaacatccactaaaacaatagactgaagagcaa

SEQ ID NO: 116917 - DNA, 2697 bp, Cannabis sativa
  modified_base (2664)..(2672): a, c, t, g, unknown or other
aaaataaataattactattttaccaattcaaaatagatttttctgaacgatattatactattctttatcccttccctagaaagtatttcaaggtggctattcagaaaccatggatctataattctaaggtctaatgaactagtatatttattgagtctcatcaactaaataatctttatttattaattccatgattactgcactaaaaatataaaattgaactcttagtaattatagaattatattattgagttttactacagtttctattgatttaatcaattctagtgagtagccctccatgtattggttcgtaattaattttagtcaaattaccgttttacctttctaattacttatttatcatttaaaaccattaattaactagtggaagtataatttagatctcatctaaatttgtacacaactttctaattctagaattaacacttaaagagaaccaatgttcgattggttagaaaagtcaaaattctataattgtagatcatattcctagtcatccacattattagattcataaaacaaaagttgtaagaattatcttctccaagaaactttaacgagtaaatcaaagaaactaataaaatgaactagagttcatgattacttaggatttaggtctatctactattgatcattgttatgatatgaattaggtcattatagtaaatgatatgttagataataaagacaacttcattcatatcggtccttgtcatatataatattttttatatacaacaccttcactttgatgtcatactatatccattatccaaaccaagattacttgcattgaagaacggacatcagtgaaccgtactagcaactattgattaaagattcttaaactctaatatgttgctgactgtattattcatggctaagttatcttaattctctgtacaattacaagtcacaacctctgaataagaaattttttaatatttatatatattattcaataataaatattaataatttaacattcacacatatattaaaatattcaactctttattaataattgaaaaatatctctataaacttttcaggacataaatcttaacaaaaggttccataatttaatacactctcgacttattttattgtatgatcttaatgttcttatacttttcttacaatattatacctactctacatgagtatggaaaattttttaaatatttattaattatatttctataattaacatattcatttatcttgtacccttatttcatatattatctaattaatacttaattttagtgcataaaccctaacaagccgccccacccctcagcctcaccaatggtccaccaccaccgtcgatccctcacacccattcgcgagccccactaccaaggcaaccaaccctatccatttgacatgccacatctctctctcttttctcatagatacaaacgcctggaggacaatgcaagggactagtctcatcaccttcattcttctttctcatatccatgatgacaattatagacgcaaaaatggtgtccacagggttcggttacgacaatttaggcgttcctacagaggcgacaatggcacagggttgagtggtcacgacgggttgacttctacacagtttcaacgagcgattgaggtgacggtggggactttctgagactgacgatggtggctggttttatgaatgttttggaggaggagaagacgtataagtcagtatggttgtttgtgataatggtggcagcagggttagctattagggtttttttgagagagacaatcttggattgtgggttactgttcaacttatatatatttttaattttaatctttcaatattgagaaatattttgaccttttgtggttgatgtttatagatttctacaaatctcaaaactctagcaaatagattctgagttggtttatgatttggaaacttttgcagctgtgatggtggttttgttatgttcaaatctggggtttttgtataagtggtggtggatttgttccattttcaaattttagaaagcatcagtcatcgagcaagaggaagaaagaagaaaagaagaaaaggaagaaaattaaaataaaaaactttttatataacttttaacatttttataatatttaagtaattaaaataacttggatgaatggaaatatgtcatgtatacaatttacttttttaattatatttttaaaaaatttaagtattttaattttatttaaatatttaaaattaggtggatcaaacaaaacataacatgtatgcacttaggtacacacagacaatcaaccttagcatttaataacaatttactaacggaaggataaataatataacagaagtgacattttggtagttttgtgaccaaaaattagtttgtgaagtcaagtgtgacatattatatagttcaaatggttatgccttcaatatctcattatttttattaattataattataggagtgttagtatatgtgtggtaaaagtgttgatatttggtagatgtaagtatgtaaatgtaaggtattgtattttatagcgaaaacctatatttctttacagagaaaaacacttttttattaaaaaaaaagttgtaataacataaacacatgaataagaaatatgtatttatttatttatttattnnnnnnnnnaaaaaaaagaaaaagaaaatcttta

SEQ ID NO: 116918 - DNA, 2577 bp, Cannabis sativa
  modified_base (27)..(28): a, c, t, g, unknown or other
actaatcagattgtaaagagttttatnnagggcataaaacccaacactacatatgtagcatttgccgatacaaatagtttattgccttcatgactacataagtatgcacctcgagtttcctctaaataacttacaaacatacacacttttgttatggtagaaagttttctagtcttgggttaaagaatatgtgcaggacaaccccaaatacaaaactattttaaactgggttttattccattgcatatttccattggagtcttgcttatgctctttgagggtactacattcaaaatctaagtaagtgtgtatccccaaaagttgagtggcagtgatgagtaactcttcattgatcttacaatgtctaaaatgtctgatttcttatctttgaaacaccattgacctgaggtgttccatcaataaaatagtctgcaacatattaaagttatggaatctttaatcaatggttgctagtgtggtttcaataatgcatgttatctagtgtaatcaatcttgattttaattgctgatattgtatgacatctaagtgaatgtgctattataatagagattatatatgacatgaactgatatgtagttaagttgtctttatcaaacatgtcatttaatataaagacctaattcatatcataaggatgatcaattgtaatatctcgaaaatttaatttatgaataattaaggcatatttatgaaatatggatttataaaggtttaatggataagattatgatcttactaatctaattatgaaggacttacgaaatcttgctataaataaatatgcataatttattaattacggtaattttattagaccatgtaggtaacatacatgctatttatgaaaaaaaatatttttaagtctggcaatagtagagacccaataggtgggcaacattgtcacaatgttattagtggtggtattgggggggttttgttaagtttgtttatttaatatttattggggtattttggggtaattgtttattacaaaattacccctgcatttgatggtaatttaggaattaagaaaagggtagaattgtgttttatctagggtttattaggctttgtccttttgtggaatctagtaaaacttaggatgaagtaagttaattcctcttgcttaattaaataatactataaggtaaaaccaaagataagatttagctcatcctcatcctcactccttctcttctctttctctcagccaagaacaaaccaagcaaccacaagaacccaaaccataaattcaaagattctacaccattttagtatgattttagcaagggatttaagtctagttgatagtgaagactaaaggtatgattctagtacctcattctctctttaattcatgaaaggtgtaggttgtgatttggaattttgatattttgattgttataagtttagatagggattaggttgtgttcctgggttagattgaagcttgcttaaaggttaaaatcttggtttttgcagcagtgaggttgatgaatcaagcttgagttcttggatacaatatcatgaaaatagaagggaaacagagctttagtaaacacatctggaagtttttttctttggagaaaatatggatcattttgagggtgccttggttgattttctctcagacaatgtgggagtctatttcaacatgtttggtttgtccatggtagacatggctcttcaaaatgtggattgctacattattgtcaaaacagaggatttttggtgtgggaggactaactccaatgtcttttaaaatggcgaaaatccatgtgacttctcacgtagcgtgtgttgtggccctgtattcaacttcggttgaggagcgagagaccatttgttatttcttagacttccatgagataagggaattatcgaggaagacacaatatttagatttagaacatctagtgtcttggaagcttcctagtcaacagaagagaacaatttgagtcggagatcagattgtgacgtgctgatttcaccatttcagcatatgcttaaacttggtgagtgctagaagtagggaaatgaaggatttgtcttagagtaccttttaagtattgcaagatatggtgtgtagcatgtaggggtgtacattggtcggtttggtcgggttatagtgtatttttaccaaccgaatataaatgtcgggttgcaaatatataattgtaactcgtccaatgaaaaaataaaaaaaaaagtgtaacccacctaatgatttttgtcggtttggtcgagttaacccatttaaaccgatctttattttttatttttttcattgatgttagattttggtgttcaaataattgatttaaaaaaataaatgtataatatatggctttcaagattaaaataattaaagtttaaattaatgttaagaaaacaaatatgaattgaataaacattaaattactaaacaatatttttcaaaactagaataaaaaaaaatatgctcatatgtaaattctaaattctaacttcaatattcaaatacaatcaaaattatcaactataaattctaaatttcaaattaaacactataaaat

SEQ ID NO: 116919 - DNA, 2986 bp, Cannabis sativa
atagactttgagtcaattttttggatcatatatatgtgatggctttgattgcctataacccttctgatccaaagggagaaaaaaggttgaaaattttctttttcctgactgaagtaaaagcactgatttcaactgcacactccttgcttcttttactccaaagcttctacatcagccatagaaatggccatgtcaagagctagtttgactcccacgatcgaaatcatcgaatatcatcgaaaaagatctctgaaccaaactattcatctagccactgccttctccactgatatccgagtttgtataagccatacaagagcagttactcaaagcatttagcccacaatttctccacattaacttttcttttcaagctattaaatctaatcaaataaactcatctctctctttattcagcccttagaatattccaacaacaattcttggattattcctcattgaagtttaaattcagcaaaggtataaaaagtaatcttccaacattaataaatagagcaatatcagctacttcagaagaaaatataacaaaggtttaatctcattgatctcaataaactaaaatatgacctttttgttaaaagataatgattctaaagagggtgaaatccacatcaaggcttccttcaagtctgactcgttctcaggcataacataagtaataactctaagacgcttccaattaagcaaaggataacgaaataggttcttcaaatttttgggcaagttttttggccaaatgagtgcctacaaatttatgaaaacatataaatagccttaacaatatgaaaacaaatacacaatactaagtaacaaacataccttttctgtgccaacaaacaattccacaatattccaagagtaactgagattcacaagaaaattcagcacaccaataaactcttttatgccatagtttccctgccagtagccgcgaatttcaatttttccatttatcgaactagatgacttcattgatatgcaaaaattgggactgccctcataacaaatgtaagctaattttggagcagattcaattgtgaccttgttcaagtgacaatcattagagcaactttggtgaaaatggaaaaacttcaagtgttgactcgagattttaaggtgcttcttctttgtattgcaacttcttagagtcaaattctcaattggaggaatatttgaaatgagagcatcaaatgacaacatgtcattgttcctaaagtaaattttgtccaataaaacattttctagtaccaaagattcaaggtttatggcgtcaacttgaatttgtaaatgattatgttcctcattttcaaatacaagtcccaagaatttgaggctcaaactctccaagcaaacattatgattattacctaagaaactataatctctcaactccaatttctcaatagatgggcaattcaacaaaaatttaactaccccatcctcctttgcattctctgaattccatccatcattcaatgacaaagtttttaaaaatggaaaactaaatgaacaagaattagtatccaactctactccatccaactccaaaatagtcaaatatcttgccttgtctattattttaggtaagcaataatcgaacttaaacatgttaccaatttcctcagggcctatcataagacttattaccttaacattattatcaatagcaaagtctagccatttatctataatggtagccttacttttttgataatcccaatatatgtaaagcttaaaactagttatggccgaaacatcatcagtattatgatacatagctttgcgttgttctaaacaattattgagaaaattgtaaaagttttcaatataatcatgatcataattagtatgattattatcataaattgaaaaatagagtgtggggtccgaataccagatgggtttccagcgctttgaaagaatgcatgtacgaaccacatctttagttggtagaaacgagagaatgtgatggatcatgcatcaggaagtttcgaaattctgtcattatcacaaccatccaccaacattggtgtcatgatagtaaaagattcaagggattgggattgagatttaggagttgaggaagagactcttataattgttgtatagattcacttttatatatgtatttatttttgaaaagttgttttagagttctatatcaatgcatacggtttgatttagttagggatattcattatttatatgatattcttttttgtttttttttgaattaattatgatttttttttttttgtttattatataatttacttccataatttaatttttttttagtgtgtcagtttgtgataatttttttaaaactaaaaaatactataatattatatatatgtttatatattgtattatattatcatgtactattaaattgtgttatgacacatacttaattagctccacaaatgccacaattgtgatcacacttatctttggaaaatgaggtattgctattgctattgctattgctctcccaaattttctttgagtctaaccctacataccaacaattctaaatcacttctcgtttggttcatgattttcgagatcacggactattggagaatattgtcccacataaattaaatgtaaaaatattgagccaatatataagaacataagctacttcactcatcattattagttttgacataaaactccatatttcttgacagtgacataactttaaggtcataaacatagtaaaactaatgatcattgtacacaaacccgtagaccaagcaatttcttgtgttacttggttgtctatagggatgttcattggaccacatccaatgtttttaggcctatccagttccgatccaattatatatcagattatagattttatcatccgatccgatccgatccaattaattttagtcatccaatcgatccaacatccattgaatgttggattgatcggttttatccattggatata

SEQ ID NO: 116920 - DNA, 2014 bp, Cannabis sativa
attttttagttatatgatatataaattttattatatggtacattattttagtttagactcatgtgatataattatattattagtttgagaataaaaattctaattaatttttttaaatatttaatttgttaataatattaatattttttattttcagattaatttacatcttaaattattattatgtattggagtacaattataaatattatattaaatataatatttatttatttttaatgtcaaatttaataaaatatctaaaattttgtattaaagatgatcacttgtgattcaaaatggtaatgtcgtatcacatgatttaatggatatgcatatttgattattgtatattaattaataaaaataaaaatggtaatggatatgtattccaacatttgtttatttatttaaaaataatgtaaaaataaagaggcggaaggagataagtattgatttttagttaaattggatatgtttttgtattgctatataattagatggatatggaatgtatgtcaggtgtgaatctaattcatgttactaccagtaccacttagtaattaataattaaaatatgttcacaaataaaataaaacaacttaataaaatatatatatagtgttctcatatcttatccaccaactatactatggaatgaagtaacgtagctactttgataatttattatcaaattaaatatttttggcccatgtgaatttgcactatattctgtaaagaaatgtataagagaacgtgaagcgaactttccatccctatttctaaatcttaattaatttgagccaaattattttagaccacactaaataaatttagtgtgaatgatttagtctagccggactatttaaaattcttcgattcgatcacgtacggttttagaaatttcaatagcgattcaaatcaaatcaatgtgtataattattttatatatacttaatgggagctaatacaatatatattatatttttttacctattatataaataaaatgttgacatttgagaaaaacttgatagaattttgatattgacctaatattgttaatattgttatgataataattttttattgttatttatgtattataaatttattaaaagtaaataaagttaccagaaaaaataaacaattattgtaaaaaaaaatttacaacaactacgaaatataaactatagttttgaactaaattaatcagttttgagtggattggtttgatcatttaattggtaaacgtaacactgtaatttgatttgaaaaattgaaattctagaccaaattaattaatctgtgaatacccttacagtaccacctcaccaatcaccaaaagataatcttagaaaactaaactaactaactgaaaccatttagtaacagtattgaaaagtaataacaaaaaataaagcaagtttaagatgactcaacttctttttccttggcagtcccccttaaagtaagtgtacttaatcataagacatgtcttgatgcgtaggaaaatgattgctcgatataagtttagtgaggcaatctgcaatttaaaagtctactagaacatgagatattttgatttctttaatgagaactttgtcatgaacaaagtatagatcaatctcgatatgttttgttctagcataaagaatcgagtttgctgctaacattacagagctgagattgtcacaccaaatagatggagtgagagaggacttcattttaagttctgaaagaagagactatattcgtgtgatttcataaacaactattgccatgcttatgaatttagtctcagtagaagaccttaaaatagtactttctttctttgactggcaaaccacaaaatttctcccaaaaacacacaatagctagttatggatattcgatcatgtaatgtcctgatattttgtcttattttacaaaatactatttttgatgcattaattgaaaagattcaaaactgtttagaaatatacaacatattttacaataaatatgcaaaaag

SEQ ID NO: 116921 - DNA, 1612 bp, Cannabis sativa
aacttggaatcttaattaatatgagtttattttagtgtaggcagtggagatacaatcatacaacaacatactataaaatatacctcgtataactctctagcaaattaatattaatactaatactaataaattgtacacgcgctagttattagttttttttttcttttttagtaacaatattttgtcttaatatagtaaataattaaataaaaacattggatatctttcaaacaaaagcacaacattcaatacaatctcaaatacaaatttatagaaataaaaaatataataagctatttatataattatttattttagttgggaaatttgatttttcatccatatataggctaataattttaaaataaacccaaattggaagactatagaaaaattagtgctcatttttcctttaatctaaaaatactcttaccatttgaaaagtcctcgttctgtccttctcgctttctcaatgagaaaaacccaactcccatcgtcgtcgtcattcccccttgcaattgatcggaggaacattttagagagttggacaagaaacactattttcgttttagttcattaatgggtaaatgattttatttaaatattattattaatcattttgataatttataatattatttaaatgcttgatctatggttttttcgtattttttgctaatgtttttagtaaaaattgaattttttttggtgagatttatgttcttttgggttatcagagattttttttttgtgaatgtctgatagtatacaatggtgagtacgcgataattttataaaaatagaattatttatatttttttgtgtttttatttagtttagttcttaagtatttttaatttatgatagtgaatttatattagttttatgtaaatattaaagttagtattgttaaattagtttaattaattttatttagttttataatttataagtactatttttaatattgtgtaattttgtagggatatgagtcaaactgtttaggaattaaattgaggaaattacattgtacacctattttattgaggatgttcctattagattaatataaattatatgctagacttaagtaaaatataaggatatattagacaattcacttaaaaaattggatatattttaataaaatataatataaaagtacttttaattaatgaatataaaaaagatatttttcaacttatcccttacattgtggtaacaaattatctatatgggctcacctctcactaaagcctaattagtttgtaaaaaaagcccaactcaccacagcccattcattgatcatggtttttgtttcttagatgttgcctcactaatgaatacaatgcaaagaaaagaaaaatgggcctcaagtgtgcgatagttgatagaggaaaaggctatttacaaaaatatgagaaaatgaagatatgttttgatatatatggtataaaaatttaattgtcctaaatatgacatttttttagaaaaactgacaaatatgaaaaaagatcatgaggaatgccataaaaaactttaaatttgtgtgtgtgtttttttttttttaaataaaacactaaaatatataaaaaatgactagatgtgtttt

SEQ ID NO: 116922 - DNA, 1360 bp, Cannabis sativa
taaaacacttagacattgtgtgaccttttttaccataatgaatttataccatttttggacgatgttgttgaatatttttagaaaaatatccagaagtagtactaaatctagatcctactttatcatcttcaataggaatatttgacaaacacctttggctttcttcttgaataacataagcatatgacttattgatgttggaaagaggaccttgcatcaagatctaagatcgagtactgctgtaagactcatttaatctaacccaaaaattcaagaacaagatcttcttcctagtattctaagattatcttcatggcaccataagtacatgttggttgtggacgatattcttggatcagatcccatagggagttgagtcgagtgaagtaatttataatagttttttgaaccttgagccaaagatttcttcgtacgtatagcttcaaacacacgaggagaatttttttgattaaatctttcctcaagattagtcagatgtgtgtagcattgtccatgtacagcacactttcaacaatttcactagaaattgcataaaaaatccatgaaatcatagtactgttacaacgattccagagctcaaaaacatcatcatcttccttgggagcaaaaaattttctatttacgaacttgagcttgtttcttgcaataaaagacactatcatagctcgacgccatgagctgtaattctcacaacctgtcaaaattttcggaactaaactaactctaggataatcattattggacaaaaaataagaatttcgagcttcatcaaaataggatcaaacattcgaatccaaaacagagaattgattaaaagtctccgaggaactttgagtctgaacaccatcacctcgtgccatggaaaagagaagaagaagaagaaagaagtaggttaactcagaaaacccactctgataccatattagttgcgaaagtaagagagaaaacagagtgaagcaaagctctgtacattgattcattaaagagaaaatacaatggtagaacttatatagctcaatgtacaaaactttagaattagttacaaaactaattgtgatatctataactaactaactgtaacaactaactcttgataatttatgtttattatttaagaatgttgattatttttaattttgaattgaagtaataaaatataaacacttgaaatttaaacatataaacattattttatatttcacgacttatatgtttattacataatatatgtttagcatttaaaattatggaattattacatggaaatacaaattgacaatttatttacaaaaatacctctataaggtgtggacagtatttataccttttatgtgctttt

SEQ ID NO: 116923 - DNA, 4216 bp, Cannabis sativa
ttggggggtgaggtcgtcgggactttggcttccaatttgtccagcgcgtggggctgggcggtagccggaggtgggtcgccagagtgtggtggtgatggtggtttgtgggttttcttgctttgtgtttgaagaaagagaaaaggacagatagatagagagagagagagggggacgaaggggttcaactttattatatatattaatttttttacatatatattattatatatatatgatgtgccaaagataaagggtcagcctaaacgaaagcggtttgtggctcaaaaaggagggaaaagacaacgagcaggcggggaacctgtttgtttgtttacggcagataacgaaaaggctgaggagagtgtgaacggacaatatgtttagggggatgattcttgtttcatggatttgaactctcttggtgatatgaaagcgataaaccttgatgtgcagagttgttagagcaatgattgcccttttttggaattcccaagagttggggaacccttggactattcattccctccattccctagtgcgtgattattttctgagtgtgattttcatctctaaaatgaaggattcttcttttcatatggagtgggtttgagttcatcttgtttttactggttgcttctgcatggatttagttgggaaaagtggtggattggcattactttttcttggtctaatcgatgtgcgggttttgtcttacaaccgttgccatattgatttggtggtgagtaatgaggatggtctttctttgcgtttcacaggttattgtggaaatcccgatctaaatcagagaatatgttcgtggaatatgttctgtcgactgataaaaagtatgatgatccttagatttgtggcggggacttaacgacattatctgccctcatgagaagaaatgagggggcaaaaacctgggtatttaatgaggaacttccaataggctatcgatgactgcgtctttcaggagatcccattttcgggcaacaagtatacttggtacaatggcagataaagcaaccttatctttgaaaggcttgactagttcttgggtaatatgtgatggcataatatgtttctgggagcaaaaatgcaacatctcccgagatggaattcagatcattgccccctcttattgcaatttacctcgttgaacaaaagtatgacctcaaagataccatggaatgctcggtttcattacggaaaagcttggcattagaatgaggaatgtcgaaagctggtggttgaatggagagcctctttcctagaatagtcaagtttttaataagcttaatagatgtggccaatgtctagatagttgtaataaagtccaatgaaaagagtctcaagcgcgcattgcctgccttaaagattaggttgtcgtcctttccctctcctcttagccagaagattggaaagctcttactcagggggaaaaacctcttaataaccaacttgccgaagaagagatcttttggcgccagcaaagtcgagccctttagtgtaaaagtggagattgtaatacctgttacttccatcagcaagctacaaaacaaaagtggaaaaatggtattcaaggcatttgttatgataatttagtgtggcatgacagtctcgaaatggtagaagatattttttaccaagtactttcaatatctatatacttctcatcatggggtagttatggagtttaatcaacttcatcgatttgtcccttgttgggtgtctttttcagacaatgagaagcttcttgagtcgtttactgctaaagatatttagcaaaccttgcatcaaatgaatcccctaaaagcccccggtgaggatggtcaccccagccttttctatcgagcccactaggatgttgtggggcaagacattattcagatttgtttggatattctaaataatgataccgactgtaggactataaacaaaatccttctttgtcttatatctaaggaggacaagcctacaaaggtgacgaaatatagacccataaacctctacaatgtgagttacaagatgattgctaaaatgcatgtctcgctaatcatatgaaagtcagcctcgataaggttattttagaaaatcaaagtgctttcattgggatggctaatccaagataatgccatataaggctttaaaagtcttcattgtttgaagaaaaggtcattttcgaaatggaacaaaaatggcaatcaagctggacatgtaaaaggcctacgattgggtggagtgggatttccttccgaccatgatgcagtgtttggggtacaaagctcgccagattcaaaaaatcatcaattgcatctatttcatttccttttcggtgctccgtaataggagggtgtgtaaggagtttcttccctaacgcggcttaagacaaggtgatcccctttctccctatctttttttgatttgttcgaaagctttctcttgtctaattcaggaaacgaaaagggttggtcttattcatgggattctctttagccaagatactctcaatttgtctcatttaattttggcagatgatagccttgtatttctcaatgcttctatggaggaaggtacaatatttcccatattttggaggaatacatgatgctctcatgctaggaaattaatatggagaaatctaaaatttgtatggggaagaaagtgttggaagagaccgtggctgtccttgtaattcaccttggtgttaaattagttcactatcaaactaaataccttggtatgtcgaattttgtgggcaacaaaaaaaataagtctttgaatgtattcaacaaaaagtgcatgataagctcaaaaggtggaaagcgagtctattttctcaagctgtccaaaaagtgttgatcaaatccgtggttcaagctcttccttgttatatcatgagttttttcttccttcctaaaggaactacagatgtgattcacacaaaggaggcttagttctgttggagttcttctattaccaagaaaaaactctattagggcacatgggagaaactttgtcttccaaaaaatacgggtagaatggggtttcacaatatagaggacttcaatcaagccctattagctaaactttgttggaaagcgcttaccattccccattctttgctagctagaatgctcaaagcctactattttgctaactcatccattatgcaagcaaaactctcaagtcgaagtcctatatttggcgtagtattatttggggtcagaatctcttggctcatggaattcaatgaagaataatatcaagccagattgtacgaataaatgaatatatgccttattcatatctgttctcccttcaaacttctactattgtccctaagaactcaacgattaatactcctctttagggaaatgggagctgaaatgaaccattaatacatagacttttccacccagatgatgttaacgagattcttaggttggtgtctagtcaaactcaacatgccgatgaccaactctggcactttacccccaagggaactacacaattaagagtggctacctaacctgagttatgcttaacactaaagctgagtgtgggtcataccatgaaattaaaaggtggtggaagtttatttggggtctggctattagtctaatgatcaaaaatttctctcggagaatgtgctttaattggctacatgttaactcaaacttgaaccatcgagaaaaggacattgagaaggcttgtaccaaatgtggggctatcaatgaaataatttgtcatgccctttggttctgctctgatatatgttggtttttagagtttatattagagtcacagcagaagcatataattggaatataggttttaaaaaaaattattaaatttgatatgaaccttaaactccgaatctcaatacaatataacataaattaaatctaactacttggaataaggattttacttcttgatgcctatcaaagaaaccttgtatcttttcatataattgttcgatcatccaatctaaagctttatgggattgatgaagaatccacaccagattttctagattaccctcaacactcaggataagagtggacttatagatttaacgagatgaataaatttttctgattacattgtattctcaactcatgagacactgtgatggagattggaactaatatcaattctctatgacgagagagagtggtgtgtgaggctaagagagagagagagagag

SEQ ID NO: 116924 - DNA, 2210 bp, Cannabis sativa
agtgtataaaatttaaagataaaaattttttactgccaattactctataataatagtaaatagtaataattttttttttaattttaaagaaaaaataaatattaaaaaaattaagcttttcatttcacttccacgtgggcatgcctccgtttcttttctctttattaatcttttgtaaccttatcttatcttgttttatttattttttactatttaccccacataaatattttttaattttattattttagggatattattctagaacctgtgtccaataagacattgttcctcaattcattccaacattttactcacttaaaaacaaaattaagaaatatttaaatattcatctgacatttaaattattaattattatttctacaccatcccatgcatctagatttttgtattttaattattttaaaataatttaaattattgttttttttttgacatattcaattattcatcatggtagttgaataagatgttttggcaaataaaacaaaatgttttatgtgaaaattattgaaagctccaacacatttattttagatttttccttcatattttgtggaatataatttcttaaaaaataccttatattttattattaaatagcagccgttctaaaaaaaaaaaaatagatcatgttaaaaataattatttaatgtgcattgaaaatgaaaaatgtcaaaaacaaatgttccatagagatttgagcttagttctaaatatattatttttttttaactaatattatataagtaattaaaaataacggtgttgtaacaaataaatattattcaattcaaacattgtaatttattatattttattgtataaaaaatactaatttaatccttatactttgttaaataataattcaaagtttgtattttataaaataagtttcatatagtatcttatactaattagttttggtaaaaatattttttaatagcatattcgatcaaaatataggagttaaaaaaagaaaagaaaaatagagaaacactataaaaattttctttcgagtattgttattgggtattagtggtgtccaataccttttataggttgtgtcatatgattggttagtgatattttttaaaaactattttcttaaattatatgagactcaatacttaattataccaataatagtataacaaaaaaaaaaaaatgttaagcaccaataatatttttttacaattatcatttctataacttaaatcttccaacaatgcacaatgtttgtttcattaaaaaaaacataactattgaatgaattaattaagatgtaaagataaataaatgagagtaattgctatttatttatttatttcttatggtggtatttatttattttattggatatataatagggaaaaggaatatgtatagataaatataatattaatgagtaattagtaattaagtgaaaaataattaaattagtaaaataagacacctatttagaggtggcttgcttttgtcatacgatattaatgtgtagctttttcctttgaaaattgtgaaagcaccacttttattattgaacttttattaaactaataaataattgtttttttaaatattattctatatacttttgtatttattccaagcctaataaaaataaattgcataattaattagtttaataatataaaatgaaggtgtctttactattattaggtgttccttcaataataatacctacctattgtctcttgtttttttgtgctatttatttctttcaccttttttcttattcactccaattattttcactttattatattaatcttttacatttttattattccaaatattaaaaataacactttcattacattatgcttatatttacggccaaagcccttaaaaaaaagtcaaaattgtctggaaaattacaaaagaaaaatattttttaaaaatatttgttataaataaaaattatattttacaaatactacctttccttatatttgaatgggaaattacaaagaaaagacatattggaaactaatttctcaaattacatttttctattctaagttacctaaaacaaataaaaataataagtaatcatacattcacatagtaatttattgataaaatttaaactaatttacggtataaatatttaaatttaactctcaattgtagataaataattaagtttaatttttgacagtaat

SEQ ID NO: 116925 - DNA, 1178 bp, Cannabis sativa
  modified_base (951)..(965): a, c, t, g, unknown or other
cttacatatgccataatttgggtaacatttatctggtatctgggtgttcacctatgtacgtttgtcttcatgtttgacctataaattaaattttatcgcttaatatattatgcattctttggttaatactgtttgaagagtcgcattcttgtgttatgcattctggcagtacggttgtcacatacttgaaaggtgattttttttacttatcttcccatttgtaaaggtattgctgggagaaagaccagaatctgaattacaaaatgtcttaccctcaaaatctggcctgcaaactgtaatagaggtccttcggattcaaatgaagttctggcctacagttggatctacctttgccaaactgcaatcacagtggggaatgtactcacttaagaacaaaagtgaggattcatctcatccaggacactggaaaaaataagtagacttttagatgaatttatcatgttgacctattaattgagttgatgtaatcctttacttgcagaaaaacaaatgaaaaagctactgcggaggagaagtctggcaccaatatggtggagatggggtcgaaaaagggttatctatcatctgttgaatggacattttaatgctagaaagaagagtggacgttgaccttttcttttgttgaatatgcagtcttccatattgggatctggcatttttgcatacggtttagtattagattttgcttggccaggtagttcgaacttttttgtacttttttaggtgagaactcctatcttttctttgttaatggcctttattgaagaaaatacagctaaatcccaagtgctagttttgcttttactttctctaaccaaatggttaatcaacagaatgtgcttctaggcaaagcttgttcattaagtgcactcatttgctcattgttcatttaggtctcttggagcctgtttggctttacagtttaaaaannnnnnnnnnnnnnntggcaaaaatttttaaaaattgttttttaaaaattgagttttaaaaaattaaaaaacagaaaacatcaaaatgctgttttcaatttttaaaaacaattttttttatcgaacatattatattttatattttgctcgcatactcggatcctaaacccgcaaccatacccgaacctagacccggatgggttaatgtcatggtatggtgctaaaata

SEQ ID NO: 116926 - DNA, 3232 bp, Cannabis sativa
aacctgatttgatattcatatactagttgatgagatatgttagtttaaatatcactactaacattttatgcatttttatttactaaaatgttttagcaacggatctttatactaaacaacattctttatacaaaattaattgaaatttaaggcagtacctttcttttcattttcagggcttggagagggacatcgctcctcttcaccccaatcatgagcagcagtccaggagttctgaacaataacagggtcttcagttagtttatcaccatgaagtctaacattgtaatgcaaaattataggtggttcaggctcccctggaagtggttccccagtcaagtcgaatcgaaaatttccaagtagaccatttggaattccaataagtgtaatggaagaaccttgagtcaggccacaaggaacttgcaacttatagtcactgttattaagttctgtgccactcattttgtttaaaaaatagggacactgtttctcttttgccctgccttttgaacttttatttgtacttagcttttcctcttcaactgaagccatgaggttattccaagcacctccagcttccttaatggcctctactgcattaggtaaaccttgagcatgatcaattaggtgtttcaaatggtcccaagtctgcagagatttctgctcaacattagagatattcctccgagcaaagagatcgaaaataatggtttcggtaggtatcacctgtatagtattcacaggattctgaactgcaggtggggaaaaggcactgagccattcaagagggttaacattactagtattagaggagaaaggagttgtcaaataacttttcccaataggatctttcatcaaggcatatctcagaaccagaagcataaacaaagacccaaccagaacaccaccataccatttcttcattcttgatattactcaagcaatcaattggtcgatatgcctgatttcctcagtaaaggaggaaaaaagttcaaaaattccagcaagtggtggtgttaccaaatttctgatagggagaaagaagaacgatccatttggtgcaaactgctaaaaaccaatcgtagcacaataaaatcatattaagtgcattggttaaaggacctttgcttccacgaaataacttttcaaggcttctcgaatctcaaccagctatccagctgacaccaacaaacactttgcaagcagtttcataaagatttgaaagagaaggatctagtaactcatgatgaacctgaaataatgaaaacaataagttcttcacaaaggtgtacacttacaaattacatttagaaatgtgaaatttttgtcataaaacctgctgaagaaaataagagtgaaaagaaaagcaggtgtttctttgcctatcaaagaatgaaactctgataaaaattatatttccactagcgtatgttaatacaataatttcattggtataaacagaacacaagaaaaacatgccaatttagcacagaacttcaggtgttatcgggaaaattaggagatggacaacaaacaatgccacacaataaaagaatactctcaagtttaataccatgataattgaatggatcacactcaggccactcaggcgccttctccaatttaaacccccattgcaacaacgcttcctcaataaacgcaattgaatagatcaaatcatttttagttttacagttgccagtcaatcgttgatcgacatcttagctaattaaccaacagttcttatatcatgaagatattaatttcatctttcacagccagtaaacatcaaattagatgcagaaattcttcgaataattttctagacgaaataaaataaaacaaaacatatgaacttagtccagaatagtggtagtgacttattcaacgcgtattttccctaacatgttctagaactgtagttcctaattcctatatttgactagaaaaacaagaacactacacttaacctaccctacctcctcccccctcacccccacaaaaaagaaaaaggaaaaaagcatcatgagcttccgaaatcgctccgattagttgatgagtgacaatagaattatattttgtaaataatcataaacacactgagacctccttcgtaggtgcactactaaattctcattcgatcaattttctacaaacaccagacagatcgaaaggagaagaagaggaactatggaaaagaaaaaaagaaaaccaacaactacagcggaagaagaaagcgaaagtcgcagctctagaattccgaaaagcaagtataaaattacgtttaatatcaggaaaagaagaaagaaagaaaacaaacttggattaaagatggggagtagaattacctgacaaagatttccagagaaaatgcttggaaagttagagaaaacttgttaaaagaaaaggaaagagtgtctgttagatcttcactgtagttctgaacttcaacttcaagtatacgcgttaccgtgggaaacaaagacgagaagccagaaaccgtttggctcctctttttgtttgatttggtcgttttcaagtcttcgctttatttgggtgtttcactctaataacttaattacgtaatttagaaggcaagatttaattatctaatttttctcttaacaacaccaactactttaagatttaaataaataattttaagtcacaaaacacattttatatttaattatttattacacaaaaggaaaagttttatgagaacttgttgaattgaattctccattacatttgtcaaatcgttgacgggataaaaccaataaagaaaaaacacattgcgtcgtctatggtcttttagcatattaaagtggtgacgtggctgtttctgatagcaagttgaaaagtaagagcagattataattttttttgaagcaaacaaatttttaatttttaacaatctctttttctattttttaaaaaaaaaacatctctgtatctctcttttttatttttcatttcaatttggtttggcagttcgtgtcagaagccacaactcacaaggaaagccctactgtcggtcactgacagatcaacgtaaattagcaaactttagcgttgttaattataatttgtctgtcacggtgttcgttaaaaactgtatggcgaattaattaattaaatcccttcctcaaatgatttttaaaaaatttatttgttttaattatattttaaggctaattaggatttttgccccctaaactttgacatgtac

SEQ ID NO: 116927 - DNA, 1989 bp, Cannabis sativa
catgccaaattgtgtaattacctccaattacacacaaatccaattacattgtggctttccaaacgcacccttagaatttttttttctattttatttcattaaatggaaaactacaaatatagtgtattattttagtaaaacttaaatttaatggtaatgtaaaatgtatattaaatttgtcctaagctaaaattgtgccaaatacacaaaataaaataaaataatatgagttaaattttagcccacaaatacaacttttttaattacctttttgccactcattaatagtatttactaatgaatttttttttttttatatttacaagatattaaaataatataaataaaattaaatattttgaatattttagtgaggattaatggttatattgatttttatagctaatttacacattgtgtattggagcacaaataccaaaaaaaaaaaaaaaaaaaagctaaatataactttatgatatattttggatcaaatttaatcaaaaatatacatcattcaatggagatgattttatatagatttccaataggaagttaaaaaagtagtgtattgttacattttaacttacttaagaaaaagacactattagagcatctccaatagagatgcaaagtgatgtaaatatagtatatagctcattttgttaaaaatctactctaatagtgtgctaaattatgatgcaaatttttcacataacaaaaaataatctaaatttggatcataatatagcatgatgcaaaatttacatcaaatagatgttatgttttgatatctaccattataccatttttaatattttattattaaattttagttaacatgatgatttatatcaaatgaattccattattattattattattaaattttatatttactattacattattattattttattttatatttttactaaattattaaatgaacaatatattaaattttacaccattaagatttacaattatgcattggagcacaatagtaaaagttgatgtaaaaatatcacaaaactactttttatgcctaatatagctcaactttcacatctttcattagaaatgttctaatagtattcttaaaagtgggtcaaatttgagataaaatatagcattatattaaatttggtttacaataattctatttttttatttattataatacttccaattattatgtttcattgaattttacagaactttattatctttatttaccatattacttttatttaaacaataatacaaataaaaaataataattttgtatatttttaataaaatattaagatgatcaataataatttatttttacttattttacatatttgtgtattagagtacaattataaatagtaggccaaattagggtcggggcttaggaaaaaaaatttaaaaataaactttttatttgagaaagaaaataaaattcaaataaatttttaaacggcttttttaacccaaaaaaaggccttatggactaatattattgaaaaaatttaaaaataaatcttaaaacattaattttttgtgttaaatttaacacaaattttagatgatcttttattttatgtaaaattagatacatatcttacattactcttggaattttattttattaaaacaaaataatgatatactattttttatatcactttattataataaacaaatatttttataattggtactgtgaaaaagttgaacgtgtaaattttttttaaaatagttttaagaataaagggggtgttcgatgtgcaggaaatcttatgggattggatccttgacctatgtttggtgctttgttaggctaggcataaaataatcgagggccaatataagaaccttagtaagaaactattatatcccatcatcagtggcggacccagaatttaaagtgagggggggcgtaaataaatttaaaaaaaaaatataaagtgtagttagtgggatttgaacctttaccctcta

SEQ ID NO: 116928 - DNA, 1445 bp, Cannabis sativa
ttgaaaaatattttcacttttctacttttaaaaacagaaaattgattaaaaaaatgttacaaaacgccaccttaattaacaaattcatcttatatatagtattttatttttagacattataggactaacttaatacatattgacaaagcattttttgctcttcataattatttaatgaataacaatatactgttaagtaaaattttaacatttagaatattaattggagatcattctcgtgcgggcaaggagatcctcataaagacggtggctcaatctttactaaattatgcaatgagtgtttttttgttaccggtggagattggtaaagacattgagtgtcaaatggcaaattttttgtggaaatcatcctttgggggcaacaaggggattaattggatgtcgtgggatcgtatgtgtcgtcataaaattgtgggtggcatgggtttttgtaacttgcgtgatttcaatcttgctcttcttggaaaacagggatggcgtctactttctaggcctcactctttggttgcaaaagtgtacaaagcgcgttattttccaaatgagagttttctcacagcataattgggaaacaatctaagttttatatggaggagtatttgggaaactcaggatatcgttcggaagggcataaggtggcaagtgggggatggcggttcaatctctgtcttgggtgatccgtggttgcctgatgttgataaaccgtatgttctttcatcccatccaggcttggaaggggttaaagtttgtagtctcatgcgcttgaatgaaagatgttgggatatggagattttgcaggacatgtttggggatcgggatatcagattgatcattaaaattcctttgcaagtgtccccgttgtcggatcaatatttttggcatatggagaattcaggcctttacacagtcaaaagcacgtacagtcttatcgaacagagcaaggggttaatctatgaggacagcttctccattttttggaagcacttatgggcattgcgcattcctccaaaggtcaagaatttgatttggcgtgcaggtatgcagtgtcttccaactatgtgtcaatttcttactaagcgggtagcagttagtgcggtagtcctatgtgtgaactcgaggaggagactatccttcactgcttgtttacttgccatcatgtgcatccttgttgggacagggtagggataggaactcagatatctgataatcataatttcttatcctggatggcttttctttttgagaagttagaggttgataaaagggggatggttgctactcttttgttgggctatataaaatgccggaaatgagctagtgtggaaatagaaaagtgtaacaccctaactagcataggcgtgtttacgtgatttttaaacgtactatgcagctcgttgctaattaacgaggtttatggaaaatgtgat

SEQ ID NO: 116929 - DNA, 1706 bp, Cannabis sativa
accatctgttttagcatcacccaataggtaattggccttcgttgatttacccattgaaactaggagagagcgactccttcaatcccaactatggttgtatccaacatcatggattctgtcattcacgtgatgagaaaatagcattcgactctgaatccatccgtctggattattgtcgttgaacaatggtagttccattcgtggtgggtggaaatccaggctatgagttttacccaacatgaatgatctgagttgaatcgggggtatcggtgggggaacgagcaacggtaaagtcaccttggtgccatcagagatgaatgcatagttgaagcacccgtaaaactgggttcacctatcgatgacccattcccttcattagtgcgtcgttgccggtcggcgctcgctgcagcagcttcaggggaggacctcgccgaaatttgcagaatctgtgacaactatctcgccatgttttccatatgtttggaaattgctgtgttgatgtgtttggctacggactgatcgatggagctttgaagctccccatgcaacttcgtgaacccctcgttaagcttcaacaccttggaatgaaggtctgaaacttttgctcccaccttttcctcaataatttccaccactgcatccttctttggtcccataaagcatgtgctctgataccaagttgataggatttggctagccaacagagagaattaacagtaaataaaagcaagagaaagtaatttggataaaaatggagtgtattgataatattcaggaacttcgacagcctggtctctcccatcacagtgatagaattctcataaaaacttccccctcataatgctaaacattgcttatttatactagtactcaagggcctaccaatcaccccactccacccaaataaaatccccctaacagaattacaaaacaacaattacacctcagcacgatcccctgttgcacccatactcttagctgtcctagtcctcttcctagcatacacaaatgttagaggaggcctatcactatcctgctgccacttcagcgacttatgatctttgagaaactcattttgattattttcttcatttatctaattgtttgttctttgtttattttatccaaaacagcgaaacggtttagcatactataaatatggagggtggtggtcggtttggtggatgggaacttatagtatggttctatcgaaagctgcattctttcacaggaagtacttagacttttatactaataagatgtccccaacaattcatgactacgtgaccagtgagaggtacacatatatatacttctctttgtatttttatttatatataatttcatcctgtcagtgttttctattggctggttcctatgcagaaactgtgaagatatagctatgtccctgcttattgccaattctactagcgctcctccaatttgggtaaaaggtacattgtaattgcttcatatttcagtctcatgtataaaataaataaataaagcaaatatttatacttaaatagcaagcggtgttgttttctttttgctcattttgctcatcgttactaagtgttccaagttccaacttacatactgtctcattgctcgagtaaaatagtttgatgatattttgaggcagaactatcacctgaaaaagaaatcagattcactttttataatgcatgatttttttttttttt

SEQ ID NO: 116930 - DNA, 1611 bp, Cannabis sativa
agcaaagaactatccaatcaacccaagttttaataaaaccaataaaatttaatgtaagcccaaataaaagtctaacatatataacaaagatgtttagttaattatttcaaaggatcccatctctagtagtaacctttaatttcaagcttttatcaataagaggtgccttgtagatgtcttcttttctagacagaacctttctcgtcccatgacttatcatctccaatatcactttcctttgacatgccttctcatccttgttcttcgctacactagtaccatcaagttctctctctctccttaaagtaatactattgcactcttttgaattattctctacatcaattggaaaagaatttgatactgaatttttcatagcactagccagtatgcctaattgtgttgttattgtctttagcatagcctccatagtagtgcaatgaatctcaatattgttaagacgagttttttttgttaatctagccttgccttgaactctacaacaaaagtgttcgataatttgatcaagtgttggagaaaacatctcccttatgtatttatgttgctcttgtggtggttggaaaacactcatatcattaacatatgaaaagtgctcatggtttcgattttaccttaatataactatgatttcaatcattaacgtgcctactttatttcaatatttttaagaacctacaactttattgtatctctagacccactcttgactgtcacataaagaatgtgtaagtaaatgttggcacaaaaaattggccaacacttactcgttagattggtgagatgaaatagaagttaagtaaagcaaatacagagatacaagaggtttatagtagttgactcccttgtcgtgacgataatagatctatatctacttcaagtttttatattagtcatgagaatacaagaaaattgactaaggcaagagctttatatttctagagagagaaactagaaagagatgatctgaccttatgggcaaatttcagaatgtgcaaaatgagctaatggaactctccttttatagggaaggaagtccattaaaataataataaaatattacaaaaaatataaaaaaaatatttctgagttgatcatcaccattgaggatgatctaatagtgaaaatgacttcgaatgatgatcgttaattttcggaggttgagttgtgtcagttggattgtttttgagtaatcttaaaaagtacaattgtcttggagatgaaatttaggcttaaaatatttagaattacaatataggtgtgagacttgacttgaaagagctttaaaatgcaagttgaatcgcatcaatcaagttattattgagggagatatacctattttacaaaaggctattcaacaaccaacgcctaagttaagacccaaggtccaggttgacatccaccatctaggttgatattacctggatgttgtatgagtgcaaaaacgtgttggacttatatttttttaagcctacatgatatgtaggaatgttcataaaatagccaatttaattcaatctgcacgatccaatccaatccaatttgcagagtgcggatatccgtacttgtgcggattgggttggattgaaaaat

SEQ ID NO: 116931 - DNA, 1564 bp, Cannabis sativa
ttacataatcataacaaaccactaattaaaagaagtgtccaatgtgtaacaacccattatcttccatgaaaccaataccctactataaacctaaagactcagtccataactgataaacccattttatttattcaacattctcagaattcgacatcttttgctggtgctgatggcttacatggctgtttgtctagggcagtgacatgaaaaaagaaggctggtgatgagggtggtgccattaatgtcaagtgtgatttgcgtttgcatgactctcataaaggaaagccagttgctcactctgtggtaactgctccgacttctcaggctattattttggaaatttatcctttgacaaataatatccctttaatttttgagaaagggaaatctaaagttcttattgactcaattttatttgaaaatattaaaaatttaagtactgataaagtgtgggtctctcatttaatttagatgatgtagatgatggtgggtctaagttaactagtgtgcagagtattactatggggcatcaaggtgcctagtatcactatgaggtgacgacttataattagttagtgattttttataatctttattaaaataaaataaatggagcctaatattaaattaaaccaataataatattacaccttaccagggactagacaccataagtccccttcatagagtctcttagtgtgcatggtactattaatttgagacataatttggaggttaatgtgcttggtaactttagtttgacactgatgtgggcccaagttaaataatgtgcatgatactattaatttagcacacgactggaaagttaatgtgcatggtaatactattttggcatgtgatggtgggtctatgttagataatgggcatatgtgactttgcatgagaattttgatcacatgattgagaatgagagtgtttcattttcatcgcagcaaggtatgatttttgggagtcatattcagtcttctacggagatctcgccaatctctggtatcaaatgacaatccttgcccgctttttcttaggtggtatgttgttgggatcttcctctaggacgacggggaaatcctaaagggtctttgacggtcgtaagtattagttttatggtactaaatcaagtacagctcagaataaatatgtttaattattattgtatcatatactcaagattactatatgtatatatattaaatctaaaagtaaaaaaaataaaaagattgtttatctctcgaagcctatcaaagtatccttaattcttttcgtatgtgtatcctcagaacggtgatttaaaaactcataccttgatcttctagatcttataccatatacaaggattagtgtgggctagtaggatacagagtgtatatgaagttcttgtgttctctacacgtgagtaagaacaattctataatattttttgagagaaaatattaaatcagattaatcctttttaagagataggttaaaattcttttttttttcttcaaaattttgtttatatggtatatttaaataaatctaataaatattttatttaattaat

SEQ ID NO: 116932 - DNA, 1670 bp, Cannabis sativa
tcttaatcaggttagtcgggttagtttgggttgatattattttcaacctgcccaatataaagattgagcgggttatattttcgtcaggttttttggtttgaatcttttgtcgagttatctcagtttggtttgggcgagttgttcgggttaggcggtttacaaaaatttatgtacacccctatgaacagcagtgagctcgaacggatgaagattgtatatgtcggggtggttagacctagagtgtacgacctttgggacatcaggttgcattttgtttagtcgctaggcaacaacttttgtatcaaatattttgtaactcagttgtaaatattttaaatacgggatcccaatttatataaaaattatttactttaaaattaaagagtatttaaataaagttttaattaatcatattttttaatagaataaataggaaatttaccttccgaactattaccatgtgtaattcttgccccctgaacttttccctttgttaatattccccccgaacttttctctgttataaaagttgctcatttagctcaattccgtgtatttaataatgacatggaattttgcttaaaaaaaggggattttgttagcttagttggcatgttatctcagcaaaaatatggaggttaaaattgtaattatatttttttctttttaaaaactattttaattattggaggtttatttttggaaaaaaattctgattaataaacttccttcttctatcgtttatgtttaggaaaaaattagtagggttgcaatttgagagaagaattgctggatgtgtgattgaaggggacctgagattacttcaacgtttggtctgccatttctttagtgtttggttgtgatttataagaagaattaatgaatgtgtgattgaaggagtcctacgatttcttcagcgtttgggtctgcgatttctttagcatttaggtctgtgatttcttcagcgtttgagtgcgattgaaaaatggtgaagaaaggaagctttgaaaagaagggataccccaaaccatcgaatgaaaagattatgccattttacggtaagtgttattattgagttattattgacactgattcataatggaatagcagagttatgttgtatcttcttcttcttcttcttcttcttcttctctggtttagagtgttgattttgattaccctatttagctcactgttaattctctctaatttgttgtcatttacactaatatactgttgtttaggtatgttgtcgttacttgtttgtagataacaaacctcaaagaggttctaaaaaatgctgtctttccttcctctcagtgtagtaagaaaaaataaagtaaagcaaacacaacacatagttaacatgtaaaggaagtaatagacttgtaaattcattcaagcatagaacaaggaatatttggtgttgagagatgagagatgtagtgtttttaatgtgtctgagaagagaattttggggaattttttttttatttatacataatgggagaggtttgtttggtctttttgagtatacttagtgtggtctctgtgcaaatgatgtatggttgcatcgatgtgtgtatgtgattctttttttttttttttttgaaatgggggtctgtgagtttaatattgctgtcagttaatagtgaatacaaagtataaaa

SEQ ID NO: 116933 - DNA, 1174 bp, Cannabis sativa
aaattttatttatataaaatacgagtttttgatgtatttttattgtactcttattattttgttattgattttttattatttttatattattttgtggttgttttagtgttatttatttttgtatttctataaaaaaaaccttaaatatatatatataaaaatttaatataaaaatgtcttttttttttacaaaaactaatattttatgtaaattatcctaaaatatgcctctattttagttctttgcttgcggctcaagaaattattagtaatgcaattatgtattttttacaattcatcaatacttaactttaaataaatcttgaacagatctactgttgtttattttattctcttatcactacacatcaaatattatttatttttaatttaaatatggcatttaaaattcaaattcacaacctaaaatgcaattaagcatatatatgtacaaatactagagtagttttaacataaaattgaaaataatttagataaatttattatgtgatcataactttaactaaaagtgagtatatgtgtggcttaacatgtaacatttatttagtttataatataagtctttaataaattgaatataagtatttttaaagttaaatattataatgttacaatctttttttgtttggctttattttagtattttttgttaaacaactcggaaattagacaattaattaattgattttttttttaattttaattttccatccaatagaagatatgtttatattggattacatattgtaattaataaaattaaatgatttttatatatataagcctctatttctaaacatctaattgaaaattaaatccatacaattatatataatataacaatcaattaattagctcttggaaggttgtcccacctgcttaacaatttttactgcatgtaatatatatggatgagatccaactgtgaaaaaattagtacatagcttagtatttttgttgtgtatatgtatggtgcaattcgcgattaattattattcaagttgataacaagatctcaattatttaatattaagcatatatataaattcacacgcgcgagttatataggtggggtttggtaatacttttttaatcagttttctgttttaaaagtgaaaaagtgaaaatatttttaaaaaacatgttctataaa

SEQ ID NO: 116934 - DNA, 1159 bp, Cannabis sativa
gaagaagaagaagaagaaatatatatatattattgttgttgttttttataattttcaaataagtttttataatatttaaataattagtattatgtggaccactaaaaaattacaatgtgtacacttatgtatatgtggacagtccaccgtagcacttaactaaggcttttgaacggaagtgtaaagagcaaaaagaaatgtgagtttggtaggtcttgccgtcgaaaaaatcaatttatgtggttaagtgttaaaaaataaagtttgggtaattttgcagccaaaatccctataattaattgggtaattggcagcgaaacctacttatgtgtaatttttatatacttaactcctgatcttttgttttagtgataatacctacttaatttactttttttagtaaatttgaggcgccagttaaatttcaccgttaaatgccaattataattgccattgtgtatacctatttacatgtgaactaaaacctcaaagccaataaaaatatgccacgtatacacatgtgtacacagtaataatctatttagtatttattggtaaagtttaaccggtgccttaaacttgcaaacacaagttaaattaagtgggaattgccacgaaaaaaaggattattttaaaaatacccaaaaatttatgtttttacggaattttaaattttttaacatttttacatacttttttttcttaaagatttacatattctaaaaaaaaatattatttacacattagtttcacgttgcaaaaatatagtataacattacaacaatatgagaacaaaactaaaacaaacataaatgtaaataaaaaaatttataaaaatataaaaaaaaatgtattatataaatttctaaaaaagaaaaatcaggtataaaaattaaaacttaaaagaatttcgtcacgaattactctattaaacctatttaatttgtttactttgatcaacttgtaattttatttgtactagttgcttcttagggcttctccaaggagccatcaaaacactatatttagtgtgagattttctccaaggacacggcatctacggctgcatattgccgtttgtgatacagtacacggcatatatgcagtacactgtagtgttagacttttatttgggcttacattaaattttattggtttt

SEQ ID NO: 116935 - DNA, 1851 bp, Cannabis sativa
  modified_base (1427)..(1428): a, c, t, g, unknown or other
  modified_base (1664)..(1664): a, c, t, g, unknown or other
atcatgatctgtatgtccctttgacaaaacccttcccagtccttttgacagaaaccctatctggggaacattgtattcagacatgtataaatatacatagtcttttttcatagtagagataccaaagcattatcaatcgaatatatatatatagtcatagttgatctccctaaaccttatacatgaatttatatatgttatatatatatatgcaatcacctgagtgtgtatatatgtatatacatatattaagatatcttagcagcgagtttgaaaaacgacaaaaacgtaaagtagtggagaaagagatacgtacgtacggaacaagaaatcactggaaaagatatttatatatatatatgacgcttagcacacaagagtatactgctatatataatatctataggagtttttttttatttttaaatgataatttctttatcaaaatccacctactaatctaaataataactaaagcaacttaagttatatagcaatataggaagtaactactggaacaacctaaactataccagtaagaaaaaattataaaatgatatattaagtaattcttcaataaaatatgggacatgtatacatatggttgtatatctaccactttaggagtaaaagaaagcactacacaagagagcagccttaagccactaaagctaacttaatagtgagagagggatggaaaaaaaagaaatgttatgaattctaatctaagagctttaagctattaaattattaaatattaattataaaataccgttaagaaaaaaaaaagcaatcttaatgaaagagaagagaaactttgaaaggcaaccgttaggatacaaataacttaggctcaaaccatttgttgggttttgagagtacagagagtgacagtttgatgtgatcgatgccatgttctaagaaattaaggttatatataacttgatttgccgtactaacatcaatatctatttatatattaatgagcatgttatatgaaactaaaataatattttgggaatgatttttagtattttatgataattattaaacttgaaatgaaatacaatatttaattatactaatactttcgtaaggtaaatataatatttatccttttatgtacttttaattactaaaataccacttacactatcatcacttacacaatcagttgatggttgcagggtagttattgcgtggttgcgcgatgttgcactagacgaagctttcaatcagacgatagttgcagggtagttgctcggtggttggccgaaagttgcatcagacgaatgtttcaatcagacaaaagtttctgggtggttgctgggtggttggccgaaggttgcatcagacaaaagtttcaattagacaaagtaacagttagcaaaatgtttatgtaactgtaatgcaactgttgtgaaacnntaaaaatcagaacagtgtttccacgtacataactctatctacatatctctttatgatttaatatgaacaaattcaccattagaaatttgaaaaataacaaaaatataccaagataaatattttactataatattgatgtaatttttttgtatcatacttgagttagattgtttaggaactccagtttaactttttgagatctacctttcatggatctaaaaattgaagtcaggacnttagttttatgcaaattaaactgaattttcagttgaattttaatttcgtagtagtttttctacattttttttttataaattcgaaaaagcccctgttttgattgattctgatcgtcttctcaggtgaagtcgccagaattaatggtggttctctttctggttgaatttttgtttcagttgcgttggg

SEQ ID NO: 116936 - DNA, 2624 bp, Cannabis sativa
taaaattattaattttacctaaataaatttacaaaatatatgtatatattttattaaaatgtaattattattattatatagaagtatattttgttaatagggaacttaaaaaattatatattcttatttataatgagctcaatgagtgtgatacaatgaagacaacgactttaaatgattcaagaaaagttaggtgagatacggtgataataatgagtgtgatacaatgaagacaacgactttaaataatttatacataaatatattatgtgaaacattctaagttttttcttagaccctatttatttattcattgttatatatgatatttttttaaaagttattatatattatattaataaataattattttttattataaaactaaacaaaattagccgcgcgaagagaggctatattactaaattttatctaagacattaaactttaatatttatgctattttttttaataaaatttttgttaatctcaattgtgtatttttatttttgaatcacagatgtattttttattatttattgttatggtgaaaagtctgaattatttctaatttatttttgaacttgaaagctcaagttttaatgataattcaaattcaattaatatgattttgatatataataaattaaatataaaattaatatgttttgtttttggtagtttaatattttataaattaaaacaataatatttttttgttgccttgtttgatttactaatgctaatgaatttatatttatatagtgttggaatgagtgaaaagtaatttcttattgggattaaccacaaaaataattttatgcattattttctaacataataattgacaataaaatcgaggtagagagtgtttgttatgaacttatgggagaagtatatattaggatgtgggagcatttgaagggaacctcatgtattttttaaatggatcccatagaattttagtgggtaatatgaaaacttttacacattcgaattttacatatatcttcacatgtgattctcttgccattctcatgcaaaccaaaacttaattattacgaatactcttttaaactaatctttatggtataatgcaatctaatgtgactcagactatgaagctcaaagaaatacccaattggggtcaaagaaatgcaatttcagaaggtgcaaacttaacttaattttggggctcaaagaagtacttatattgaaatggactgcttgattgtactggtgcaagcagtgagaagttcttcttttatgctttctttgtttgatttaattattaaaagattgtaaaacctttctcattgattacttcacgtataattattttataaaacattgatttggaaatcgtaggactcatgttattgcaagagctagcctagtttttgctgattgtctttttggtgtgtataatgtattagctgaatataagccattgtatttattttaattaatgaaatttgacaaatgaatctttcaaaaaagaaatgtcttaatgtaataaatttgagatgttatttgctttctaaattccttaattgtactttaattttctttgaccattaaaatattcatactaaaaaaaagaaaaaaagatatattatatttttttgctagtctagctttttattaaattataaacaaataataatgtgcagtataaataattaagtttaactcccgattgtagataaatacttaagttaagtttttgacaaaaataatacttaagttatatttttagaacttcagtagatacttagccgttaagtgtcaagtcaatagccacgtgaaaattaagtccaaatcattaaaattttatttttaatttaaaaaattaatttaaatttatactaataacaaaatgacacatggataatgacttgacacttaattgttgggtacttacgtaagttctaaaaatatagcttaggagttattaccattaaaaaataaattaaggtatttatctgtaattgagagttaaacttaagtgtttatgccgtaaattactcaattaaaaaagagaaatgcttaaagacactcacggtgcttagtacctttgtgatgtgtaatattgctattgatgcaatttattatcgactctcacttattttactttaccaattataggacagcaacttatagtggtgcaatgcactttggtatctcatagcaatactcattaaaaaaatagaccaatagacaatgagggaagaataataatatgtagagtaatttgcggcgtaaatatctaagtttaactctagttgtaaataaatacttaagtttaattttttgcggtaataatacttaatttatatttctgaaatttttataggtacctggccgttaaatgtcaagtcattatctacatgttattttcttattagcatatgaagcaattttttttagaaaaataaaaatttaatgacctaaaccaattaagaattttcacgtgacaatttacttaacgtttgatagccaagtacgtacttaaaaatttaaggctaattatgatttttgccccccgaactttgacatgtactaaattatgccccatgaacttttaaggtcgttaaaaatgccccctgaactattaagattgt

SEQ ID NO: 116937 - DNA, 2442 bp, Cannabis sativa
  modified_base (2030)..(2034): a, c, t, g, unknown or other
  modified_base (2120)..(2126): a, c, t, g, unknown or other
tgggaagttttcccaggaaatgtgtgagtgaggacaaagcacgctggaaacattcgtgttggtttgtagggtaagtcatcagtccatgaagtagccagagtgatgtacttctgtatgagagccatcattccgtgggtgtaagggcctaatggaggcttgaagcagggacgttacataccctttcttgcacggtagggcacccgtgggccaagcctagcaagacagtaaaataaaaatatacacaataatcaatgatcacttaattattgatgccactgcatctattctctatttgacatagacctacgtgttatgctcacacgtctatttatgtctataaagcatagacccacgtgttactctcacatatctaattataataaggcctaagaatggtttatctcgaaactgattaccgagtctaacctaataatgacttgggcgcataattctttgtttcaacatatatatcatggcattgcattcaaaatcatttaatcactacactagtaaccctaggtcatataaccactcactttagggtaataaccctaatcttggttcctcatttaatcacaatcataatatcaaacatgagtgccaccacgcttaactctacatgttaactactgtcttacctggtatcccaagtatgtggatattccaaaccactgggttttcctttacaagcgctggtaatcctagtcacaattctcgagaattcacaaatagggttaatcccaaaattcaatttcatataatcacataattggcatttcatttactgataggcataaagagcttggaacgagctttccaacaatataaagaacatcccaaacggagtcccgagtcaaaagttatggcaaaaacaaaaatgtgaaaattcccgagaaagacggggcctcgccgcgacgagcaaggccatggccgcggcgaggggccctgtaacccaaaaatctaccatttttcataacttcaaatttcaaccatttcaaacccaaaactcattccaaatcatacacaaactcataatcaaaactaaaatcaccctaaccattaccaacattgaatttagggtataaaaccaaacttcaagatatgtaattagtcaagcctttcaaaatcatcacaaacaacaagctttgaactcaactttcaaagcttcaatctatcaagaataacccaaaaaatttagaacataaccccaaaaattaaaccccagactacaaccctaaaatcatacaaagctcactagatacaagctacatagtcccaaaagcttaaacaccccaaaagcatcaaaataacacataaagattacaacatgcatcaagaaaatctcaagaacatcaagcaaaaattcaagcatcaaacacaagctcaaagcttcaaatctaattcagaataacataattaaaagagattaaagggctaccaaagttcataagcttcaactaagcaaatcccccacaaatcctcactaattaagccttgattttccaaaattgctcaaagtttgaaaacaaagagaaagggagagagagagaggggttgggccaagctagaaaccagaaaataaaatagaactttaatttctaaaattacttttgttgaaatttgcttaagtggccaaatgaccaaaatgccctcaaggcataaaaatgatattcacacataataagggtaacattgtccaaactaacacatataatttcagattatctcacttatcatataaatgccaaaataaaatcccaaaaatgtattttgggcccagaacttgattcggctcaaaatacctggttgtgactataccgcgccgacttgtcagaaaatacttgtagatagacagaataaacatattatttaataatatagctcataagcacaatatatcatcaaattatgattttacacttctcaggtcaaaattacgaaaaatgcccctagtataccaacggggtcttaaaatacaatttaaaagtataattccatatattaagttatataataatataattccacannnnnacataattaaactagttagggttgctaatttggtttccaaaaccttagggtattacagctttttacatccatttggtacaagatannnnnnntgtggcatgcaaaagctaacaacattcttatgaactcaagtcttgctaccggggcaaaggtttcctcataatcaattccttcttctttattgtaactaggggtgttcatcaaaccgtttaaaccgctcaaatcgcctgcaccacaccgcactgcaaaaatatgcagtttgaaattctttgcggtgcagtcgcggtttgaatttttcctaaattgcgcagtgcagtgtgatttgcagttttaaattattaatatgcggttcaaaccgcaccgcacattataaaaatactaatttttatatttagttaggtccaatat

SEQ ID NO: 116938 - DNA, 1844 bp, Cannabis sativa
tctgaaagctatctagattcatctatgttatttttctggtttaatgtgtttgttggttttttattcttgatttgtttgttttaatttaacatttgtttgtttaagtgtgatattaaagctggaattacagagattatctatgtatcagagctaaatttcttacatagatcaattggcttttattacctcaagtctaaagtcaggtgtgtgggagtggaatggtgcttgacgacctcgggccctatgtcacgataacgacacttgataaataatcaaacatgtaatatgccttaaactcaaaactagataaaccctaatcgatactagcttagaaataatctaaacattgataaaacacataaaactaagttgtaaaaaaatacctcaaacagctaaccggttttagaaaaaatgaggttccccattgggtcaattggctgactgtttccacagtaccctgtggaacagtttctactgtagaaatatataatctggtttttgcaccaaaaccaacccaaaactcctccaaacctattaaaaccttccaaaacagtttaacaacataaaatcaacataaccaaacactcaaaatttagaaatgcctcaaaattaaaaacttaccattgttgagtgagtttttgagttcttgaactcaactcacccaactcttggtacaacaaacctaaaatcattaaattaaagcttaaacaaccctaattatcatctaaaaacaagctttaacaaggtaagcgtacactaaacctaattattaaaatcctcttcaaaacttaaccttagaaccttaaaatttttaagaacactaaggaaaaacacacctcaagtttagatggcacctaaggttgaagaaattgatagaaattgacctgagtttttccttgggttttgctggtttcctcgagccgaagaggagagagagtgataggttttcttatttaatattattttttttatttgtaattcttgattaactatatctattaattaaccaaaaaaaaaaaaaacaataataaacccaactttcagcttaggactttactagactatcaaataaaacaaaataaataaacttaacaaaatgactattttaccccccaattatacacttaagttaataaatattctaggggcactttggtcaatactagctactccatctaaatcgatacgacaaacattctggtacaattccaataaaactcattctattaccgtcgtgacatctttggctaaaccatcgagtttgaacccaaaaatattttattttaaaaatagtatatatataatactcatatgttctaataaaatctccgtaattaataaattacgctcatttattcatttatttaaaaattcactaattatttcataattaacttaagtaagattataattttactctaatatttatataactacatatttaataaaatgtataatattaaacgcaattataattttcaagatattacacaatatctccaatcgttccactgagttatatcacataaatattagttggagctaaatttgcatcaccatcatcatcatgatttgctactggaatctgtgctgctctctcaatccaatcttggatagcattagtgatgtgaggaacaacctgtcttttcaaggtaatctccatttcttttcgtatcaataattgactagtaaacgatactaaaaccgtagtaaattatgtacccacaagtttagaaaagaggacaaagttcaaaattggatgatcataatagtcgaccatatacactaaccgtttggtacgcaggattggactggattggactggactggacaagattggatta

SEQ ID NO: 116939 - DNA, 2091 bp, Cannabis sativa
  modified_base (1389)..(1401): a, c, t, g, unknown or other
caatcaaaataagaattctaattagtctcctagtaggaaagattcaaatcataatcttattttatgagcttcacttattgtttcaatttttataaatctagctctaacagtcattgtaggagtgaatctactagaattcaatttataaacacctttatgttgacgggatctataaccaaccgacgtggaattgtaataagtgagaaatgaactaaaaatgtaataaatgctaatagataacaaaaacaatttaaatatgtttgcccatagaagtcgttaatagcgtgattcccttgtaatttattaatcgaagttgcaaagttaagattaggctcttgaatgcaagaatgaaattgggtagatttttttctctctaaattatcagtttcggatctccttcccaggtcatgggtgaccccttataggggaagggtcagttcttctcgcttcaagagatgcgaccattgtaaaaatatctcaactgttttcttaatttttggaggtgattgaagtcatattattgtggtaatatactgctatttttgtgggtttgcaactactgttgagctttttgtgagatttgaatgtggaatgtgatggttacggtgagggtcctcctaggatatgactcaatcgtttaactcaattaggaggtaagagtcatttacttcagagtggtaccccgagaccccttactctcgctcctcatgtgatgtgtagtcttgatactaagatgatatacttccttcaactgtgccatgtgtagctagaatatgatacttagaccacaagggtatagggggtaaggggtatacctatagactaatcccttagggggaagtggtgtactcctagactaaccccttaagaggtaagggttgttcccctagactaaccccttaagaggtaaggggtgtaccgctagactaactccttaggggataaggggtgtacccttagactaacctcttagggtgtaaggggtgtacctctagactaaccccttggggggtaaggggtataccccaagactaacccctcacccttaagggtgtggtgattctttaacccgttgtgagagtacttatccactctccctcaagggtagccatctgttggattttgtgccctaactaaagctctatttaaatgtaatcttgaataattatttatcaataaagaaacaaaattattttattacttgtttagtgtgttgcttggttcacatgtttgttacatgatcatttgtttcatttataaattcatctaaatccttatcacattgttattcatgatcattaatttgataattagtagtgtatctatatcttagaacatatgaagtgttctatataattaagagtgcaatttcgaatctatagtggagtnnnnnnnnnnnnntaagttagagaatttacttggtattttagaactacttattggaagcttaattatataggcacatggtccttatactagtctagataatactgcttttagactgagttaattagttttaattaatcaattattattctaaattagataatctcttatttatgagttttcactaagcaagggcttaattatgaaaaaaaaagaggttttaaggtttatttgttaattaagagactttataaggtcaaattaaaaaaaaaaatagatgaaaattttattagataattatttataattagtaaggaaatagttttcatatttatcggattgaaattgtaaaataaggcattagtgaaagaaaaaataaatggttgaataaaattgtaaaattataactagtggggcccacatcaatggctggccacttagtgttttattttgctattattttatcttgttttttaatctatataattcaagtcctaaccctagttaaaatactacaaaacgaatatgattctctcactgtcataacctaagataagactaaaaacctagttttcattctttgtcagataactagaaaaagagagcttccttcctttgtattttcaaattcctttctcttcttcttcataaatttcgagcctatagcgatagagtacatgcacactcatatcaagtcaagtactc

SEQ ID NO: 116940 - DNA, 904 bp, Cannabis sativa
tacataatatacatataattcatacatgtttaacacaattaatttaaaccctaatgctagaaattaaagattaggtcagcaatattggaacacaagttggccaattatttgagaggaaaagaagttcaaagaagattgacttaaattaggggaggcttccctaacattaacacttttcatttatattgaaaatatataacaaagaaaagataagactaattgtaagtgtattaaattagatcacataatgctttctctttatactccaccaatgttctcttagtggtatttggtgtgttgttcttgtcgttttggataattgaagccacttagtatagctagtcttccattaaaactattttatatatatatatgctaacctaataataaactttgtttattaattacttttgaggacaaattatcctactaacaagcatgcttttgatgatagttttcattggttttgagttgataaaagaaacccaacaaatactatattccatcaatcactttttaccctatattgaattttgtgtcaattttattttctttctttgagtcaatgaattgacctttataacacccactaaaattatcatacttagagggctttgaaatttttagcttaattaattaaaccaattgaatgaggccaagaaataaaacattcctttaattgtgattataaatgtgtccaaaccaatagttttatgacattatttttctttggttttgcttagtgaggggtattataataatttccacttagaattggagggttaatcgaatgagaagttttatttccagcccataaaattataaatacaccccattattaaaaaaaaatataaatttaatttttttaaaaaaatatttttaaaaaaaattactcttaatattt

SEQ ID NO: 116941 - DNA, 992 bp, Cannabis sativa
ttcctcctgattgtccaatgtctagtgtctacatcttgatcttttcatgaatcgaaccataaaaggttgagaaataaacttttcagatgatgatctatatggtggtgtattttattttatttagtatgtacattcttatacatatagaattaaacaacctaagaatatattttatttgcatataattataattgtctacaaaagattatagatattgtttattatattctacagtggcctttttctattgtttgtattattgagaatataagatatattatacatacagctatttttatgtatttcgtgaacattacattaaggtaagtcaatataaataaatgtttcgtcatgtatgaaagaaacattgaacatccaaggtttcattattattatttatttttttgtcagaaaggtttcattaattattaatttatgttcactcatacatacacataacatatacatttatttatacattatcattcgaatgtactaataatattcctcagtttgtcaaatatttaaagtggtagaaaaatgaagatgatgtaccattgtaaccgaattattctattaataattttctttaaacttccaaaaaattctgaccgttgaacttttttcagtatatacgtatacggcatgatttactatactaataatcatagtgcagtaagtgcatattttaattttaatactaggaatcctggcaaagtaaagtctaaagcataagaaagtaagaaactgcagttttttgatcaagtcttcctttccttctcaaaaccaagtccaatagaagagtacaaagataaatacagtatcaaaatttattcatgaattagtaaaacattataaactattaaaaaaatactctttgacatatcaataccagaaaattaaacattgattttgctgagcattcttagaaaccttatcccaaggaaaacttcccccttaagcataaagggaaatggattttctgccctctg

SEQ ID NO: 116942 - DNA, 2820 bp, Cannabis sativa
  modified_base (2734)..(2743): a, c, t, g, unknown or other
tcgggtttaggtctcgggtcccgagtctagttttaggtcctgggtccgggttggggtttaggtctcgggttcgggtccaggtcccgggtcagtgtccgggttcgggtcccgattctgggtccgggtctgggtttaggtctcgggtcttggtctaggccccgagtccgggtcccgggtcaaggtctgggtccgggtcccgggtcagggtccaggtctcgggtccgggtctaggtttgggtccgagtctgggtcctgaatccgagtcggggaaccgaatctaggtccgggtctcgaatttgggtccgggtccagttccagggtttgggtcgggtctcgggtcccggtccggtctcggtacttgggttccgggtccgggttttgggtttgggtcctgggtcacagtctgggtccaggtcccaggtcacggtccagatcccgttctcgagcccaagtccaggtctcgggtccaggtctaggtccagatcttaggtcccggtcccggtctcggtctagatctgggtccgggttcgggtccgggtccaagccccaagggatccgagtctgtggtccgagtcttgataagatctgatccagaaaaaaaaattggacggggcggagcggatctgatccaagatccaataagtatccgaatgttttgaatcagaggtgatccttcggatcggaactccgaccggctccaactaaatggatctttttgacatgcctacttgcatatataacatcaccatatctcaaagactagcattgatttcaagtttaagattgacacatttaatgttctggcttttagcgattttgatagcagagaagaagaagaaaccctcagcttatcgatttttagctagcttatcggattttagctgacaacctcccaaagtaccctaaccataagaatgacaccaaaaatttatgctacaaggtaaaaataatttttttttatatttttacatttatatttctaatttttacgattatttaataattttacctaatcttataaaaataacatacaaagttatgaataacataaaagcaaccaaaaaaaaaatacaataacgtaaaaagaatagtgtatttttgtaaaaataaaaaattaataaatatataaataatctgtttaactatatttttataaaattttttaaaaattttgaggttaaatatgaaataatgcccaaaaaaattaaataaataacatgtgttatcccacattgtttatacatgaataatttatagggtttatataattatacttaattttataaaatttatgttacactttaatatcttccaagccttaatcccatttttatttttggtgtgctttccccaaataatattctacacataaaatgagaagtgaactaaagtttgaagaaaacaaagtagaaagtagggaatgcaatatgccaataattcaatagagtatatgaaggttttacaataatataatccaaaactttgtcaattttcaaacttgaaaagataaatagtactagaggaataaagcataggattatcatggtgtctcttacattaaaagaaaaagatacgttaaaaggtacgtgtgatttgttttatatattttaatttaataattattataaaaattcactaattatttataaagcgtcatcttatatttgatcgacattcaaatattaatacttatatgtaacgtaaaacttatacttaatgtaagtgtttataatatttttcagaaactataaatattttaagtgaaattagaaggaaaagaaatgaagtattttgacattgggatgttaattagcctgaatccacaacacaagagagtagtattaagctttgagccttcacaatggagttttttgtattagcatttttgcttgtctgaagtttttggatctcttgaacagtggtgcaatgactgtatttataggtagtcatgcactttgggctggactaatcctaacccaataagaatataactacggatcaactctctaatggagcttattacaagtaggatgctcgaatgtgttaatctaaggcccatggggctaacccaaggcttgttggacatttctagctgtttagtagtaatgtcaattgaatccccaaaaatatcttacattttgtgcacaattcattgtgcatgttggtagaagagaccaaccatcgaatttcatgagatgacgtcagagattaggtgacatgtttgtcttgctcatcttcactgggatgcaacagtgttcttggatgaatccttggtagatgggttcttcttattccctaaaaacaattacattcctttcaatgtggcaagcctgggaagtatcctagctagttcaatcaataaggacggatggagtcagagctactgtccgggtctaaaattgatgttgggactttacttgtttgtaacgctgagaccaccattataatgatatatcaccgtccggatgatataagcttgttctagtgttgatctggggaaccctaatcgaaatcttttctatggaataagtcgaagaatatttttttttaatatttgtatctattattaaaaacacttttaaaatatatttatttttgtaagcgggtgttgaatatatcattaccttcagttaaatttagcatataacttaagaaatataatggcacactgtctataaaaatgaatatatcttaaagaatataaatgaaggtaaaaattgttggaaattatttnnnnnnnnnnttagatctactcacaagtatgtctattaacaccataaatatgaactttctaatacgataaaataaacacatataaag

SEQ ID NO: 116943 - DNA, 1898 bp, Cannabis sativa
actattctatttccaaaaaaattttgtaaataacatattacaaatattgattctgattatttttcatttattctgttatatttctccattaatttattcggattccgaatactttatagtaaacgtgtcattagatcccacttaactatataaaataatttagggtaaataacaattttaccctttcttacacaaaaagtaactcaaatattctagggtaaaaatagtctaaaatcataacaccaaacattgtcgacatccaattatctaaccaattttccccactaacactaaggtactaaaccataactaagtaacttataggcgaaatgtcatcacattccactgttatcgggcataaaatatgaaaaacataaaatttcatatataacataattaatacacctagaatttaaatatatctccataatcacaaataataattaaaagcttacttttaacaataagccctaattatctgctaattctcaaaataaaactaagtcattagtactttagggttaaacaattaaaaaaataatacaaaaaatgcatatatcgcttgagatggacaatcaattttcatctgaaatccttctagaagcttatgtttctcagggaaacacatggcatccatctgatgaagcctgaaaccctagaagtcatttacatactagaatatggttaaagttttaccctatacgagtatactaccttatttattcttggaatgttttcttaaacctttcaaaggtcattgaattatcaacatacacgaacatgagaatgggttttaccatgtttttgctcttcatgaataattccccaccaggggccttgacaatgcttttcatcaagtcacacatttgagtttcattggtttctaaatggcttcaaaaaccctaaccataattttcatacatgcgcaaggacatgcatttttatgtacctaggaattttattcttgatttgttcttcatattacatgactaagggcatccttgatgccttattcatgtgtctcacctaatttacctttagggtttttcctttgctcactttaaacaaggctttgctaaataccttattcaagatttatttcataaatcttcacaagatacgaacaagggcttgcatgatgccttgttcatgtatatgccttaaaatctccttgacatactcaaacaagggaaactttagtaccttgttctagtacttcacttatacttttgaagttgtggtgtcattcttcttattttgtacttgatatttgattcaagtagtgtttagaaccctattgaaatccttccttgattctttaaccatgttgcacgagcaaggtgatgcatgttaccttttccatggcctttcgtgttagggttccaacattttgacttgaaagggaattggctttgctccactcgaggtgttagaaagagaatccctaggttcacacgaacaagggcttattgtaccttgttcgtttatgccatttcaatattccatgcatgtggcaccagaacaagttatcaaatgtcacattttttgagtttggcttcgattttgtcttttttcgctttgacctctgttctcaatcctcgataccctgttccaaaaccttgggactcttttccccaaccctagtactctgtacctaggccttggtccttgtcatttgttgtgtaatgtcacttgatcaaattcttttctattgacttttctatcttcatcagggtgtattcttatcttggggactcgatctcatggggattaatgaatattatttacttttttttttacgaaatcagactataacaatagtcactaacccaaattgtaacaccctaactagcataggcgtgttgacgtgatttttaacgtactgtgcagctcattgc

SEQ ID NO: 116944 - DNA, 5741 bp, Cannabis sativa
caaattttgataagtagaatccaacgcataagatcaggtgtcaacttgggtgttgggtgcttcccggggctcgttttgatacttctatggcatttgagattgaaaaccaggtctcctaccccgcttttgacaattttgagaagaattcccatagtagaatttttatttaaggagcaaaacatgtgaactaggttgcatgttaaactgagcgcaaggcccagtaccatgtcaacctaggcactaggggcctattcacgctccctagaaatctcgttttctccctgagatcacttgtatctttgtctcttctgataacaaaaagaatttccagaacactttttcaggagaatgactagaaatagcccaggttgataaattgtcaacctgggtgttgaatcaagtttttggccacttgatgactccatttgatcccccaaaacacttgtatcttaatctttaaaaaaatggagaataaatctggaagacttcttagaaaaacttcttggaaatggcccaagttgacaaagtgtcaacctagacgctgggctcagtaccaggtcaacttggacattgggtcccaattttgaccccaaacaactctatttgctttcggaaagcactcaaatctttattgttgatgaaaatggagaatatgaccaaaagatttcatttgaaaggctgatgaatgtggcctaggttgacaaagtaacctgagcaatgggttcccattttggcctctagatcaatccatttctcccacaaaaaagcacgtgtttcctcgttttggatgaagacgaagaaaatgctcaggatatttctttagtattgcggtttgaatttccgcatgttgacaacatgtcaacctgggcgttgggtacctggagcacctggtgcttcgagtggtcaaaactgaaagtgctctgattctaattttgttatatcaaatatgtttgtgaaaggtctaattcatattccaataaaaattttacttcatttgcactaatacgggcccagaaaccaaaaccttagttgggttgtcagcctgggcgctaggcacttgggttgacttttgggtttttgtttcatatatttttagcttgcaggccttggatttggatttttcatgtcttcatggtacaaaatattgatagatagttaaatggaaacaatttagcggaatccaaacacccatatgggagttctcgaagtcaacctaggcacaaggctagggacccctctcccaggtcgactatcatgacttaggactactcaactttgggatgttttctttcttatcacttgtcaaatattgatgtccacgtcaccagagttagtttttaggtaaaaatatctgttctatgaagtttgggcaatttagattagtttttgaataggttgtagaagaagagaactcaaaatttttctagttgtaggttttgtagcaggttagctttgtaaaccggtggactgattgcttaggcctggggataccccgattttcatatgttagggtatttccaccctattgattaatagggaaaacctagattatgtattttagtattagaaattattttagctagtcacttaccagtttactgctaatgtgacttagggcctctgatcaccgaacaaatttccactcaagttgatcgacgcatgtttagttatacatgtatgatgtttccatatagctatcatattagagatatcagtatgtgtgtacgtagagttgcaccaagatactgatatctagtatgttatgcaatattgattagtatggattaatgctacgggcattagtacgactagagtactgaaatcaggttggtattatggttaattatgctataggtacgaatgtttagatctcagttcacgcgctagatgcggttattttattgatggtaactgagtgtaagggtgcttagttaaaaataaaatttataagttattatatgcatgcttttttttttactgagcccgttaactcacatatatgttgctatgtgtaggtaaatgaaagactaaagttgaacaacagtgaattcggagcatgaatgaagattgttcatatatgtttgtctaaacctaaagggttacgatctttgagacaatcacaggaaaacaattgtattttttgtcagatgacactttttgtctttatgatgcaaaatttttgttactagattttgggatccagattgtaaacatttgataaaagtatttaattttagaaaagttttaattatcacaaattttttattaaatacacttttaatcttaaaactctttgattagtaaaggttagcacaataattagaaaacatgtaacgcaccttaattattaaggcattagactttatattggtaggctaataggccacatatttggaacgtctgatttgactctataagtccaccagactggaagaaattgcctccaacctctttgcaactcctaaatgtgacgttcatatccttttccactgatctggtcgggatagtgatggtgttgtggttgaggctccagggagtcacttagtgcttcccactcagaagaatctgaggaaagagatatttcacctaaagatgaggatgagtctgtcgcacagagtgttagattatcttcaaatagtaatttgagcagatcatcatcttcttggttatcacctccccagaatttagctggattcatctacaaaagaaggaggacaaagacgtgagtcaccaaacagcttgggaattgcttttcaagaaaaaacatcccagtactcaaactagagaaaagaaagagatttaactaaaagaatcgatctcctcaatgtacttttggagaaagaagttgtaaggttctggaaaccctaaagacctcaaaaagggcgtaagagatcgatatgagaaaaatacacacataaggattcaacacggatcaattgaccctaatagtcagcatctgggttcgttttaatcaattaaacttgaagatccaagagaaagcaattaatgttgagatttgaaaggactgagcaagattttcactagtcatgcaggagtaacgtcccatctgcgcagacacgtgggtacaaatgcgtgtcacttagctgtacaacttgtaagcttaggaagtcctcgtatgactagaaatttccatgcagacttggagggaaaatgttatcccaaaatttgcatggatgatgtggcacctgggaagttgacacgtggtagggaagtttgatcctagacagtgtgtaatactactgtgtaccgatcaagctagatgattccaagacacgtaaacgagcttaagatctcatcttgcgctgagcaatacaaaccacatgcataatgagagttacagaccagaaaaattgctgaagaaatttcaagatactttccttattgtttccactataataggaccagtttaagatccctattttcatgggatttaacttaggagaatgagaaaatcatgggattcatattcaaatccacaatgatttttctcctagtatttcaagattaaatgtactccctctcccctataaatagggaggccaatttactattgaggagtcttttgctatgcactttcaagagagaaaatactctgtaaatatttgtaacctttttgagagatattaagaaactcacttgggcggaccttgtgatgttaaattcttttataagcaatacaacaaaaagggaagtagattgtcatcgctgaaagggtctgaacctctataaatttcctatttcgtatacagttattcataatctttattattattcaaacactagtatcatcttcttgagaatgtaagaacgggaccacctataatttaaagttacccgattagttttatagactctgcgtcgttgactagcaacaagttcaatagacctcaaagccaatttgagaaactcaaacatttactttggtggtgttatagttgttgacaaagataatttactttaggagattgatgatggagaaggtgaattccctataaagtatcttggtatttcagtgagatctacaatgtgaaaacctgaagattatggggtaattatctcaaaaaatcatagctcaattcatacttgggctagtaagaatttatcttttgttggtcgggctcaacttatacattcagttttacttgggttgagaaattattagatgggtatctttatcttgcttcacaatgttacaaaggaagttgacaagatttgtagatggtctttatggggtcacaatgagactcacagcaagatgcatcttgcttcttaagagaaagtttgccttctgaagctgtatggtggaattgggttcaaagataactctaagtggaatatagccattttggcaaatttcatctgggctattttaaaaaattaagatctcatttgggtaaagtgggtccataacttgtaccaaaaagaataggatttttggaagtaccaactcaaggctgactcgagttggtactgacgcaagctctacaatattctgaaaagtttcaataggggagatattgtagctgcttgttacaaggagaaatttcaggctaggaagctgtacgatagtataattcagcatgaaaacgtggccttcatgaaggcaatttggtgtcgtcttaggttgcccgaacatagatttatcttgtggcaagcaactcattcctatcttcttactagagacaatcttatcaagtgcaatttgaagattgactcccaagtttgtacggtgtgtggcgggcatgatgtaagtcacaaatacctcttatttgagtgtcctttatcaaaaagggtagttcgacatctttttagttggatgggttttgatgcttggccaatagagtttttgaattggctagtgtggatggggaacaagaagatagaccttttcgctgatataatctatgctcttttagcggctactttctattactagtggagataaaaatgtgtattcataatgattttttctattctgttacatacataggaaaagagatgaaaatgattcttttgtatagattacaaaatgtaaaacacagaaaattttggcttcattgtttaatatgtgttaatactttggtttgttggttgtatagattgactgattaataaataaaattattttcttttgacaaaaaaataaaataataaatcatgtttctaatttcgtatcacctcaataaaaaaaattattgaagtatgatcaaatttgcgtaaaatgtaatttaattcctttaataaaaggtgacttaaatattatgaaaaatgtcttaattgagagacaccagaaaaaccaatttttttttttttttggtttgacaaacattaatatcatctttcttaaagatgctttaaataggtacatttcttgaaacaaatatttacaagagttactactaaatgatgacaagcatgatagaaaatagttagtatattttttttagagttaattgcggcataactcccaatacttttattttacttacacttaattctcaaaatttaaattttagcagcaaaacccccaaaactaggaaaatgttagcaatttatagttttcatccattttaggtgttaagtgccatgttggattttccatgtggacatggtatacacatagcacaattgtattggtccacgtaaaaaattatttaaaaaattaaaaaaaataatttgaaattaaaaaaattgtaaataaaaatatacatagaatacac

SEQ ID NO: 116945 - DNA, 4500 bp, Cannabis sativa
  modified_base (4455)..(4457): a, c, t, g, unknown or other
tttccctcgaacactgtttgatagatacatgatgatagtgtagtacgccatctcctccatttatactttttcctctggtttcttttctgccaacaacttctcatcttcaagaaccttggggactttttggtgaggattccttttaggttttctctccatagtgcaaagtccctagttccatcgaacttctcctatttaaatcttgccattgatgacattcaaagtttctttagaaattacaatggaatgactcttgattcttcgatcttgatcgattaccaagctttgatttgtggaaaaattacgactaatggtgtaaatcaagatgtcaaaattttaaacaatcaagcgattagcgatgataagattaatatatcgagaataacagtcaaataaaaaacaggaccaaacagagtattgcaaaactagaaaatagtaaatgtagaaattaatgaaattaacaccaagatatacactggttcaagtcctatagatcgatgtgatctatgactctactctagttctagaaccctgccgaaatccttccttattgattgagcaagaataggtagaatacagtcgagtcaggattctctgttgagttctcactaagtgtttcaactctcacacttacacccaaaaatctgcttcatctacagaagattcttcatataaatcccaaactcaatctctctcttttctctctcaaagtctcaatcccaatctgaaccgagctctcaatgtcatgtctcgaaataaataacaaatcaaggtgatatttataggcttatgatcaagattctaaagtcggtagctgcaagaaatgagattgttaagttggttagaaataactaagttaaccaacttctttttgaacgaagtctccacgtcagcttaagtatcagagcctcagagaacatatatgagcttccagactcactgaccaatgacactcgctaatgacgcttccagataggataaagcctattcgagtcgactatccagaactaccattccaggttggacaactagccaacaggagctccatcctagagagaggctagttcttcctgatgctttttcccaaaaggacaagggagccttaggaagaacaataagcaatcctgaagacccttcccggagggacatgactgtcttctaggattggtttccacgagtgaacaactttccatgaataatgtttgcgaagaccttttcctttagaggaacaatataccacatttgggttattaaagaatcacaaaattacaaccctaaatcataaaaatggaagaacaacacctatatttttttttccagatttttagaaaccaccaaatttctagaacacgaaccttaaattctcaaaaaatcaatcaaatgtgactctaatactacttgttagaattctttattacttataaaatatatatcaaaatttaaccgtataaacttaaatctaaatatatctttgttgattcaaagagaaaaactcaaacagcgaaagcgtacctgaatctataaatagtgatgattttaatccatttaatatagataatttttgtagtgtttttaggtaacgatttttcaagaaaataagacttagaattattttttttttaattttctctcttgatgaggaaaaatgagaatagaattgactcaagaaaattttgaaatgtgaccaaatcaaaaaatcataaacaatttaaatttatcaaactatttacaccaaatttatttggtccagattaaaataatttggtggtttaagtttgaaagagagagaaatggtatgaagagcttagaaatgatgtatgaataaagcattattattgttaagcttcttttttagttgggcattattggtaagttaggggaaggaaacatcgtgtagtcttctaagcacgtgcaaatcgttgttattataaaataaataatattctttgcacagtccacaatccgaagcaatttttaactgacaatgtacctaaataaactaacatgttttaagcaaaagataagagtgttgaatcagaggttttccactttgatttagaaaaacttgtctttatcatcataaaactacaactacaccttaatattttattagctacgtttctcggatacgagtcatttgattattctttacaattttgtaatgaagtaaacatgtgcatttgtctggaaaaagcaaaactctctttgtttaatacgctaattgtacccccaaatggccagagagaaacatcctcgatcattcattctacactctccaccacgtgtacactacttatataaatatatgagaattgttaaaatgtattactcttaacatctttttcggtattatattactattagtgtaaagttgtataaaatttaagaaaataactttaaaaaaatatcataactaattataaaaagttacttatagaaagtgttagatattacttgtgcctatctatatatcatttgagcattgttattgggtattagtagtggactagtaataccttctatacgtgttgtattgcgattgactagtaatatttcttaaaaattattacattaaactatatgggatcagtggactaataacggtattaacacgtaggagggtgctagacatcactatgttttttactatttctcaaatatatagggaaatgttaaagggcatgatgcttaacattcttgtgaggtgtaatattgttatttgtacaactcaatatcggatccgatttattttactttaataaatattataaaaaattactaatcaactataaaaaggacatttcattgtagtatttagcactatgagtatctcatagaaatgctcaagttaatactaataatactacaaatcctttattagtgggttgccgtttctggtttcatgaacaaacaactaaaccattatgatttaatattcaagataaaaaaacagattcttcataaaaaggaaaatcagtatatatttccagtataaatatttattttttctttataattgtactgtttaactgctaataaaagttgtataacaaacaccaaaaataataaactgtaatatttttggtatgtttatatatttatactttgacagtttttctataatgatctaaacttgtattttctatatagagcttgatattcacattaatttcattgattttttttaggcaaaaatatctaatttaaattatcatataaaatgatcatttattatgtttcgtttattaattcaacccaaaaaatttagagcactttcctaatagaaaaagtaactagcaatatatttattttggaaatggaaatagaattaatgtgtggtgaaatctataaataggaaactactaatttatttattttcttaaggaaaaattatttgaaagttaagaattcaaattattattattttttttgtgaaagtaaagaattcaaatgacaattaaataaaataaaatccaacaaccaactttttttttttaaagaaaaaaaaaaaaaaagagagagtagagagtcaaatgcctttaatcttagtcagctttccgattcatatgcagcaaaaacgccgtttctaaaagaaatggtacgtagttaagaaggcattagttggattcagcaaccgaccacttaatgcttatcttttgagttaaaccattaactaattaataaaaacctattaaaataatgactaatgatccttcaaatctacaagtacgtattaattatattaaaaaaaaaaaagaatcaggtaattaattaaacaaataatcagaattaattaggagggtgtcacggttgtcaacatccgtaccggttgacgtgtttaaaagctaaacggcgacgttttaccttttatgataatatcattcggtgaccgcctcgtgtcggtggagttatggccgttagtatattaccgcgcgccaggtatacagcctgtagctggcagcttgacagtaatcatctactttctcattccacgccacccaatttgtcgttttctccacgtcagcatccccaattttttttttcaaaaaagtaaatgaaaaaaaatgttaaaatatgaaattgcaaataataacataataagtttaaatagatttttatccaacaactataatatattaaatttaataatttttatcgaattttagtaaaaaaaaattaatatgaataaaaatttataagataaagcattatttaatatataaataattattaaattaataaaattgaataaaatttgacaaaattttttaagtttaataatttttaaagtaaaattttagcgttaaaaaaatttaaagaaatgattttttatatatttaagtttaggggtaaaaattgtaattagccacataataatatataggggagttatatttgcaccccataaaattataaatacaccccattatttaaaaaaatataaacttaaataannnttaaaaattattcttaatattttaaaattttttactcacatta

SEQ ID NO: 116946 - DNA, 2144 bp, Cannabis sativa
taacaattattcttttgggattgattcatttataactgctaataaaacgtgaacaatccctacgttttattcaatcacacatgggataatatctaataactacccaattgctctttatttttatccattagacggttacgctgaattggaaggttgtgtctcgttagacatgagttctccttctcgtccatcttgatgataaaaaattttaagtgttgaaaaataattcatctcgtcgtatccctttattggtattttaatactgtgaggtgatcttcacgccctgtgtgatgcaaggcggttgagtgttgtcacttttaatctacctgagtagttgagtatcctctccttgtatatctatctaagtgtatcccgaggcagacatatgtctcgtcaatactagtttaatagttattatccttgtctcgcataagactacaagtcaacgaatttgaacattatctatcaaacttatattcaattgatacgagttatttaattacatttaatgatacaacatcattattatattctttaagttgattcacattcaatctgtgggacacgtgtcagcttctggcacatagtcgaatgttgggtataacaatattcatgcaacttatttataaggatttttttgtatttttacggaaattcacatagaccccatagcaattaatggagcaacctaaatcgcaaccaaaattcacatagcaactcacatataaaccactagagtaatccaaaccatgaatttgaaaaaataaagttaaaaaaaataatatatagagtaattcttctatttataataaagatatttgtggcataaatattatatattattaattttatacacttatataccattttttcgacgaattacttaactaccaaacgttatatttttgttacttctctcactcctacatctatactaagtactaattaggatagttagattcaaacatgttagctaatcacttgtctaggtaataattattttaaaatataatttctttgacgtgtaaaatataatttaaatatgattaaaattatcaaaaatatactttgaacaaaacaaaattcttatatttattagtttttccaacatttccaaaacattatttttctttttgctttttcacaaaaaacccatatgtgggttccgagaaaatgttgtttgctgtatcattaatatttggctaattatgatttttatcctcgaattttgacatgtatcaaatcacgcctcttaaacttttaagatcgttaaaaatgccccctgaactatggtagatatcaaagtttagggagaatggtttagtacacaaacaattactaaaataataaaattgaatgaaattagtcaaaagtctttaaatctaacaatctcaataattcaagagaaatttttaacagccaaaaaaaatttagagaacataatttattaaaatttaggggataaaaatcttaattaactttaatatttacaaaattactacaggagcaatcagatttttctttgtcttagaaaatttgtgtggatggaaatggaagtcaatttacacttgtttagttaattagtgtatagtcaaacatgcctcttttcaaacttatctagtaagtatgatgtgccctgctatagatattccaaactatttggatgattatacatatttatatatattatatataattaaacatttgaaaactatgacaaaagagaagagagagagagcaatggccccatcatatgaaaaaaatgtattctttcatgaagattgaagccatagaatttccaatcatgaacaaatgatatattttttattttattaagagaaaatccaacctaagagaataccactttctttgtgtaaagcaagtttaatcataatatttacatcaatttttaaaataatattactgattttgtttttttaagggagcattacagaaactaaaaatatattaacaatcaataatttctttgaggactcacctatgaggaatatctcagtaaaattattaattaagcttaacaataatgcaactagtgcattgattgcaatgttaataacaataaattatttgtgactaaaaaattatatggctttttttataaatgtacaacaaaaataaaataa

SEQ ID NO: 116947 - DNA, 2930 bp, Cannabis sativa
ttcatcattcaatgtttgtacccaatttattttcatgatttttcttttattataccaaattttattttttgggaattctaggtttttgttaattaggaacccttgctttccaattttcttatttggggaaagatttttaatgaggattgtgttgttttggatggtgatctagataagaagactctggttgataatgatgatgcagtgagtgacttggacgagttgtgcatagttggagagaagggtccggtaacatttaatgtttaacttgattttcattaagggatttttattgagtgtcaacttattgaaattgttatttttgtttgaggataattttgggataatgaagacctgaatttgtttgaataaaaattgaacaattctactatggccaagccatgaattagtttatagactaggtttttatatgagatggttcaatttggatgaatttttatttgaaaagttaaattgtcccatggtgggattctgttaacttgattttcagtaagagatttttgttggggtgaacttattgaagttgttattttgggataattaagacctgtaattgtttgggaaactttgaatgaaaattgaataattctactatggccaagtcattgattcatttacagtctaagtttttatatatttatttatatattgtcacatgttattcttgggtttcgttgatgatatttaatgctattattacaagttttatctgaaaaatactttggattgttgggtaggattcaggtcttgattttgattttgatttggctcttgcattgtattctttcaaaatgatttggctttagaattgtgtgatattgacaagtaacactccctgggacatagtggcattgatattgacaagtaaataaactatggatctgatcttgaacactgcttataaacaaaatgaacaaattagtgaataaatcccattaataaataaaagatgtctgttgtagttgctacacaacaaacttaatatgaatgctttaatacttagaattatatattatacagttcaaatagtgttttgaactgatttggtagtacttggacatggtatttcagtgacccaaattacatgatccgtgtgacttgctagccagatatatatatatatatatatatatatatacttataattatatatatgtgtatgccctatgtctttgtgtttttagctaaggggtaataaggacatccgcaaagcaactgatttttctcttaagattttggatcagaatttgatggcttatcataacacattctattatatatcataagaggtcgtgggatttcaaatttgagttataattgtgaccaaatatgtttttcacacaataatgtgagtgcattatctactacttagtaaaagtcacataaatttaagtgcattgctatatagccatgatatctctttgtctaaattttactaagggggttttgacaaatttggagacaaacaaagaaaaaaatgataattttggtttggcctagactaaacttgtgcttgaaactttgactattttttttttcattaagaacttcttttctttatgagctactttcctttttagcaaaagcaaaatttggaagttaaccaagtaataatctctactttcctttccaaacatcttttagttcaaaacctccaaatattgtattgggataacccatatagatacatttaaagcacttgccacatcaatttgattagttaaaaaagaaattgacattatatatactttgttattgtattttttgtaccaactattacttttgttgatatcaaatgcaattagattaaagaacaattagatctatctggaatttgaatagttttgttgagatttgagaccatcttattatcttgcttggtctgttaatcagtgtttgacatctaattattttaagctaattttgtttatttaaagcttaatacacatatatatatatcctaattttaccttattgagcttatttatactttactaaaatggttcattataattattaaaccaatatttgtgttgtatactaaagaatataaaataaaaaattataacaaagtaatgttgatacttgataatttgatgtaagttgtttttgtctgaataataataataattattgaaaggttagtattattgacttttgttgggtactatttgatctttattcatcaattttggagtcatactctctatctctctcctttggcatgcacatataaagttttgttttttagaccaaccaatatgaaatgtgtgatttaaatttaaattacttgttaaagagattgaaatcaagtggttatataagcctcaaatttaaatatatatgcttcatgtttttcatccttgcaattttcttaaaaaatcatgtaaatataaataattcttctttaattagtttttatttacagtaatgaggagatcaatacagtacgagatgagggcaaaatttgtaaagcctttaattatttgattgagtaaaatgttaccactaacgaaaacacccttttttgtagtagtgaaacttattggatatggggttgaaggtggaatgcaccttgttcttgatttgtctccacatgagagtcttttatctattctttatggtttgtcctcctctatataatgtttaaatgtatatttaaatatttctatgtacaactaggtgattatgaatctatatatatatatataaatgtttggtatataaaattacaaattgttaaagaaataaagtgtatactactactgttctaagaaatgaaatatacacaattagttagtttgagtgactttttactattattgatgttttataatttgataatccaggtggggaaaattgcatgaaaaatttgtaattttcccttacttatatttgtgcttcatttt

SEQ ID NO: 116948 - DNA, 2237 bp, Cannabis sativa
  modified_base (2183)..(2187): a, c, t, g, unknown or other
aataagaaatgtaaaaattaaactatttatataattttttgatatttttacatcaatttttatcattgtactctattgtataattgtaaatcttgatgcaaaatttaatatgttatttaattctaaaaaataaatataaaatttaataataataatataagtcatttattatattaattaaaatttaaccataaaatattagaaaagtcataataataaatataaaagtataaaactcaaattttacatcatgttatattatgatttaaatttggaatactttttcttatgtaacatatttacattacaatttgacacattactattagagtaaatttttaacaaaataatatattttacatttacattacttatttacatctttattagagatgctttaagaataatatccattatgattgcctgccctttagcatttcacttaatattaacattaaggattatttgttttaatatctgagttgcatgggtaagtgtgaaaaaaatttgcttattgggaactttattctacaaaaagtttttagctttctttcttacactacaaaaattttatttttagttacaacaaaatttgtggttaaaagtaaaaaaattatgactaattataaattatcattgctatgttatgactaaaaattccgtggctaaaagtattagtcacaaaaattgtaatttgctgtgaccaaatgtatttttagtcacaataattgttgtgactaaaactaaattagtgacaacttgtaactaaagactatattttagttacaagaagttaacattttagtgattaaaagtcacatttagtaaaacaaaaattatgttatgactataaagttgtcactaaaagtagcaatttttttataatgttaaaactacttaggacccaccaaagttaacatttttttcacctttaaatacacatctctctaaccataacctaccaactacactaacactccttaagaagactgtcaatgaaattgtcttgtctcaacatcatttcatgctatttgctaataactattgaaacgactagttaagttttataaaacttattaaatgtgtaatatttgttgagcttatttttcataccttattagttgagtacttttttaccaagagttgcttcaatcgagggtgctggctttgtttttgtaagagagtcttatgttattaatgtgtggaaggataatagcatataagattcatgagctacctcttttatagtcaattaattttgatggaaccttatgtatcaaacaattctaacatggaatcatagaaaaaaaaaacctagtacgtgtattcgatccaaaaaaaaaaaagttgatagaaaaaaattagaaccaaaaagagccaccaaaaaattcaaaaatcggtccaaaaagcagagctaaaaagagtcattcgtaattctgagatgagtgaaaaagatccaccaaatatttaaaagttgatccaaaaagtagagccaaacgagtcacttgttatctggggttagtgagccaaaaatagtagcttgtgatcgaactatccaagatttgtgagtaaaaaatagccaccatctttaaaagagatgttagagagtctcacattactaatgtgtgaatagataataatatatataagatctattggatactcttgccaattagttttaaaatagaaccacatgtatcttacaattctaacgcttctcaagttggtatgaggagttttggatgaataatgatgaagatactgttaggcgtatctctgttatgtgttggggtatttggcaggcaaggaacgagattgtatactaccaaaaaattaagatgttgcatgggtggtccgtacactactactaaacaagcttttaaaggtacttttttcaccaaattaataatggataaatgctcatttggtaccttgtattttattaaaatgcatagttggtaccttatgttctgaataatgatagatgagtaccctttatttgtaaaaactaaccgctttcgtaccctttacacatttaaatttttaatatttccatgttacccctaatttttaataattctattattttatttttttatctttaaattgtgtaattatattttctgaattaaatttataaacaataaataacacaatttaaaagggaaatttacacccattannnnnttttcccaatttctttcttttatactgttacacgctcaaattaactttta

SEQ ID NO: 116949 - DNA, 2640 bp, Cannabis sativa
tggtaaaataattcccaacacttaactcttcgagtcacgaagaacacgaagaatgttgtttgaattttagaaaaaataggattttgattctgttgagcttttggtcgacacataggatatgttcgtgaccctggccgattagtggtctttacacgtaaccgtggccgattcatgttttaaacttgggaccctagccagttcgtgacttttgactaaaaaaccttgtcggttcatgatacgtagttttgtgtcatgagtttgatttgttctggacaatagttggtctttataaagactctgtttggcattttgagcccatttcacccttatccactacttgattcccataggaactctgtacgacatgtcttaggtagaatctatcctaaccaattagtgaccgaaaacttaatatctgtttaatttattgaatttgaattctatacttttccaattaacggctttgtacatcagggttgtcgggttaatacccttaggttttggacagttgacctacgctttgtctaagtctttttatttcgtctggttgttcacctccctctgcctttttacactgatgaactcgcgtgacttttggggaggtgaaaattggatttacgaacacttgctcagtcttctctatgaagaccatcgtccgattcagatagctagttcttcttccaagggttcttttgatagttcctcgagcattttcgaagtcagcagtgattctctggaacttgagatttagcaccaccactatccgagcgaataggcagtgagttttacagttgggtcatctaggaactgaaccaggggtggaggcagttcctccccaggtcgtggacttttattttccaagaaggtgtgcctgagacgttgcccactggacatgcaactcatacacttagagatcttcctgcagctggggttgttgttaccatcgctagatactttgagccatatcctgccatgactaggacggagaaaatgtgtcgtagggcacctcctaaggatcctcatatttccgagctaatggcaagaggaagggtccgacatgttgaggaggctgaatagcctcaagctaaacagtctgaggccagccaagttgaagagcctttggctaggaaacttgtggccagctagggtgaggaacccttggccgatcaagatgatgggtctggtgtcaagcaggctgaacccgctgcataaccaagtatttctaggagacagtataagacttgtgtcatgatccagggcgatcccctgggcatttatgacaaggctggacgacctttaaatgttaggggtcaaccgtcagaggttagggttgaccatgttgaggatgaagctcttgagccttgggtccttgagttcgcagaggagagacattagacatctcctccctctaccctgtttgttggaaagtttgatcaaattaagacaaagggactcgttggaacagtccggtgtgataggcccaatagggctcagttggcccatcgtcccccgtccaactagatggcacggtcaggcccccatggtaagcaaggggcaatcttatccttgcatccatactttaaggacataaccaacttctttagcctgtgtccgactcagattagccaaaaggcattaagtacctttcagcactcttcattctctatgaagaattaggctagccacagccgtcaccttacaaggtacgttactactttgagctaaaatccactccaaagcagggtaggtctagataattctactttagccagctaggctattagtggcttagaggtactaatgacaaggccatgtctaaaattgggaagtacgccaagagctacttcctcgcttgggatgttaggtacatccgtcatcgctttcaaagggtcccgacataccttcgtccaatccttactatcatgctgagggacagagccaaccatattttgtctctccctacaaaaaggcgcaacatctataggttggcatatgaggagaattttagaaagtatcgcctgtaccctcatggataggataccgagggtgttggaaacccttatgaagatctagataataattctgtggtgaaggaggttagccaaaataaaagacccgcgcccgagtaggaaaagggtgagtctaatgaggatgtccctctagccaagattgccagaacagtatccatgagggaatgggtcctttggcaatgtttggcatggggaggcacaactgtcgatgcccccgtgttgatcaggctcaaaagacaggaatctgctaggcctgtcaagccaccacatgcgtctagagacaaaggaaaggctactgattctaaggaaaactctgatgattcatcttcagaggatgagaggctcccaaacaaccctccagacagtagtaactttttttactttcacttgcatttagtacttataacttgtattcgaactttgttatttttctttttgcagatatggcttccaggatgaaaaacctggtgaggggatcttcaagcggcttatcttctggtcggcctcaggccaaggtggctaggactgttttgtattctgatgtgatccattccgtcttgcctcttcctcctgcaagtccctgttggaatattattttaccaggatctta

SEQ ID NO: 116950 - DNA, 1109 bp, Cannabis sativa
aattaatatttataattaaatttgtttagtaatcatttatgggtaatacccattaagaagtgtttcatatatatatatatatcaaaatattgtattcagaaaaacaaaaacaaataaatattgaaatatttgtaattactatattattcctctcaactttttctatatattatgccttttttatttttggattgactacattcaaggtgaacgattttttaaaaaattccttctaaagttagtaatttggtttggagagcaattttgggtacattgcaacatgtatttaattgtccgagagatatgttcctgtaagtagcatttgtcaaatttgtaatacacgtgatgaaattattttccatgctattatcgattgttctgtggcttgagcttgttgaaactgtttggtggtggatctttataattggtctggtactaattttggcactggtttatggagctcatggctaggctaggtaatggaactttaaggttggtgtaagtacttatatgtattggactttatgtggtatttttttttatcaatgtaaatgttgatggaactttacttaaattagttggtcgatttggaatgggttgtttagcgtgtgataatagtggtaaagtccacaaagctttcaccgtgggaaaaaggggccacgttaagcctgaaatagcttaaatcatttatatcaaagaggcattgagttggataaaggattatgctaaaaacgaacaatttaatttgcgtgcaagctattaagagtaatttgtgtctttaaaatttggtttgttagttcatgactttatgaatcttttgaataatcttaataaaacgatttgtatataattgttcactgattggtgtgtaaattttgtttctctccgaattatatttttcaagcttctaatttattgcacgaattacacattattttttttattttttttaaagagaattacacattatttgtaaagcagacttttctctataataaaagttattctttaattaagaaaaataaacaaataaataagattaattaggattttttttctcgaactttgacatgtaccaaatcatacccctaaatttttttggccgttaa

SEQ ID NO: 116951 - DNA, 1142 bp, Cannabis sativa
  modified_base (29)..(42): a, c, t, g, unknown or other
ttataaatatagatcagaaataacatttnnnnnnnnnnnnnncacatgatttatttcatgatttatttcaagtgggaggtttttttttttagaaattgtgattttacctaatttttacaattaggttgcttacgttttgaaaggaatcaaatcgaacgtagttcatgtgttcaaagattttgattttgattctttagagatattgagtttattttggattaattaaaactcttttttttagtctcactttagcgaattgtgagatcaattgaatacaattttattttataagaaatgtgaaatcattcaagcttacttgactttgtatctttaattatgaaagtaatttgaataaataggaattgaaaggatgacaaagatatatatcattctatatcttgtcatatatttgatgtttgaatttttgcttctaattttcctctcattttagctgattgtaccttttttttaatttctttgatcctttagtgtaaattaaaaaaaaggtacaatcaacaatacataacatatcatatatgtcatttgttgttaaatctttgtatgtactcttcacccatcaaaaaatctaattgtgtaattttgcttcgtgaccaagtaaatatacacaagacatagattcataatttcgtataagtaattagatataccgtagtttatatatggatttttaaataatatcttttcttgatttatatatataaatgaaccacaaaatatggtcaagtttttctcttatttggcgtgaaatctttgccatgtgtatatacacatatataaaccatgcacatataaagctttgagacgtttttgatcggtatgctttccattcaacttttgaacctatccaaaattattttattgtgttacaataattaatttctgacttagcccaactatagtattggcttagtcaatttcttttttgattaattgcagtttttacaccattcgttcggtgcaggtataaatataccaactgtttctcaattaagattttgacagcatggtatctttctttattttatatttttattttcttctttgattatgcaccccatattgatttactttttgatgtctctagaatcaaagagaaatataaaaatcatcaataagaaatt

SEQ ID NO: 116952 - DNA, 4847 bp, Cannabis sativa
  modified_base (2035)..(2041): a, c, t, g, unknown or other
gtaaaataaatatccaacagttatcattgctccaaatcctacctctttccccatttcttctattaaggaccaatcccagagtaatggttctcccgtagaaactgaacctcaccctttacctagtaaaattgaacatcaacttttctccaatcttttggttgctaaaaacttttcatcgggctcctcagaagtaataagcatgaaatgaaagagatggagaccatctgcctccggtttagtcaatttgaaccctcaagctcattctcccaagccaagaagaagagggtggtcgacaaaagcttttacgagtttcaccgtgaagcctcaacctcttcataggaaaagtaaaggttctgtgaaaagaagacaaatggccattagaaccaattaggagagaaatgtctttgatctaaaggtggacctgaataatcactttgtgattatagattgcaacccaaagtcgaagtcattttgctctattcgggaggttgatgatacgaatgggggaatggagaacaccagtcaataggtgtttcattttgggactgtgaagacttgcccagaaaagtcaccacaatccaaatgaaggccctggcttggaactgtcatggtctggagaatgcagcaaaagttcaacaactgaaggatcttatccgaaagtcaaatcctaaaatcttggtcctctccaaagtaagactcacacaagataaatttacatgtttaatgtctaaccttcacttttccggtatgaattatgtccccccctttgggctcagctagtggtcttggtttgtgttggagattaggagtggatcgtaacatacaacttgctaataaaaattaaattgttgcccttatttcctctgaccccccggataggccttggatccaaatttgcgcctatggtcctcctatctttggtgagaaagaattcttttggaatgaattaggagattttattctccagtataacctgacagttaccattttaggtgatctcaatggcactttaatggatagtgattgtgtcaattattccaaatcaatcaacatcgtaaggtattcctttgatctcaggagaatggttcatcgaacagggctaattaatttggggtatcaaggggtcaagtttacctagtttaagaaatgctcaggttcttcgaacgtcacttgtctgaagagggcaaggctcaactaagctcttgtgtctattgattggaggcttgcttggctagatgccattattaaacacctcacaacctctgttttggaccacaaacccatcttgttggacacgaacgtgagcagtagctgtaattaagcttaattcaaatctaagctcatgtgggaaagggtgttgggatttatgtcttaaaatcaagtaattaatggattatatattagacaatacatataatatgattataagataagtgatgtattaattatgagagataattattaaatatctaaaaattcattattcatatggagaaggtataatcttataaggatgtataagagaattaagattatacgatatgaataaaataagtaagtagtttattaaagtattgggaaatctttaatatgtaactaccaagtacggtttactatacactatacttctagtgtgtgtaattttgattcaaatcacatatgtagatggacatgtagtaaatgtactgtgtttaattagattatacatgactggaccgatatgtaataaatatctttaattaacatgtcgtttaccatgacaatagcgtatcatatcataataatgatcattagtagatcaacctgaatcctgagtatacatgaactcctgtttgtgtttattgagttctttgattcactcattaaagattctcatagaagacaattcttacaacttctattttgggagcttaataacatgagtggctgagaacatgttatacaataataaaatctaagctttcctaacggatcgaatattagttctcttatagtgttaattctgagagtgctaacagttggatccaaatctatnnnnnnntatagattaactgttcacattgaattaatggtacgtaaggaatcaagagataattaaaagggtaaaatggtattttgaccaactctaattatgaattaataattagagggtgaactgcttatgttgattttaccaatagactacaagtaagaattctgtaaatataattatatattgtcaaatagtgcaattccatatttatagtggagtaataatgaaattaataaatcagcttattttattgatgagattgataataatcttgggtttattagagcttcaaaatataggtccatagttccatttgccaatcgacaacagagttgtatttaatgatgatgcttgccacgtgttacacaataagaataataaagtaaatagacacataattttatagaggattagccctcttagttagcaggtaatgacctactcctcttttaattgtattgataccaagagataatactactcagatcactatagtgatgggatcttaagtagctctcttataattaaaatgtagaaatcagagttggcaaatcttaagtatgagtatagcagtgggcgtgtaagagagagatgtgagttatcagacatagagctagggtttgagacttaatgattttagatttagcactcaaggttttagggtttgattaaggctctttatataggtgagcttatacccttcaaatcccttagaaataggtaaaataagatattattaacatattaaattaataaaatacaaatgactaaaatatctctcaaaaatagatattttccctctatttttatgagttgttaaggctcaagatttggcttgttatccacgtatgaaagttgcgcactaaaatcctgccaggccaaaagttggtaggccatgcacctacaggatgcatgctggttgaccatgggatgtccagaacttggccggcctatgctagccatggggctggccaggggttgtcggccaacccccttgaggtggatggttgtcactttgtcattctgcttgagtattagacttctcgttggttgaagtgctgagtagattacttggccttcttgtcggtgagttgtattgccatgtagcactgttgttggccatgtagacatgccacatcaggtggataaaaattgagataacagaagggtaaaacgatattttaaccaactctaattatgaagtaataattggagggaaaactgtttatattgattatatcaatagactacaagtaagaattctgtaaatataattctatattgtcaaagagtatatttttatatttatagtggagtaataatagaattaatcaattagattattctattgatgagattgataataatctttggtttattaatgcttcaaaatatagttccatggcctccgagtcacctttatacaacactgtacaagggaaaattttatttgatgaatgaatttcgagtgagaattaatttatatgagaaataatttttaagggcaaaatagtaatttgaaaaattattattttgactaattatgataattatgaattgtgtaataaataacatttaactatttaattttattagataaactatattaattagttaaatatcatattattattaaataatattaaagagagaaatatattattttagaaaaataatatttattttaatccttgtgagataagaaattaatgagaattaatcatttattatatattggtgtaataaataataaatcttatttatgacaaaattgaaaaatcaattttagactttaaaatatgactcacacgtgtatgcacattctacacatgtaggtgacatataaatgctcatgattaatttggcttaattattttattaagttaaaaataatttaaattaaattaagttaattatcttttaattagtaagttaaagtcattataaaagtcagttataaactaagaccaaagagttggggtttgtcttcagtgtcggttttagaaaaacacatcccttgaaccgataccaaaaatctattatataatagtgtaactacagtgtaagataaataatactttcacagtacattattagtatacattttttaataactttttttgttttttaattatggttgtatagatgcaattgatggaacacatgtgagtgcatgtgtccctatagataagcaagtcagttacagaggtcaaaaaaatatagtaacacaaaacattttatatgcttgtaacttcgacatgttctttacttttgtatctactggttgggagtgtattgcaaatgatttcaagatgtttatagatgcaattacaacacttgaatataagtttccacaacctaaagaaagtatttgtaaccaaaattaattattattttattatttagtgaccgtacttatagaaaactaattcttttgtaggtgaatactatattttagattctagattttcatgtacaaaaggttttttctcatcatatcgcggtgaaagataccatttacaagaatataataatggacgtaatggaccacgtgatatgaaagaactattcaattatggacattcttcacttaaaaatgtcattgaatgacattttggtgtgttgaaagttcattttcctatattgaagatgatgctaccttacaaattgagtcgacaaactttgatagtaattgcttgttatactctttataattttattcgacaacgcacccaatatgatcatatatttagagagttagaagaaaaaaacttaagagtgttagagattttattacaatggaagaaaatcaaga

SEQ ID NO: 116953 - DNA, 3133 bp, Cannabis sativa
tggaggcttgaagcggggacgttacaagtgccctatcattaaattcatttattgatttggttggtgcccttgcaaatcatcccacaactcgcctcccacagtagacaagtcagtaggtatcccagcctggagtgctatcaactaaatactatcattcaagtttttcacctttgttgctttcgtgttaaagcgactcaaaaatgccttcaaggattccccaagatgtggcttgatatttgtcaaagatgatgcctctagtcttctatccctcacagcctagaattgctttttaaattctttagatagttgttctcatgaggtgatggaatgatttgtaaacttatcaaaccaactatttgctgcctctatcaaggacgtagggaacaatatgcaatacaagttattagaaatattacttgcttgcattatggtattgaaattatttaaatgtgtaaccgagtctgtggttttggtgtactacatggcatgagggttcttaaatcctctcaaaaactgcaagtttaaaatatttgggtggaaaggttctaggtcgtcgtctgaatcataccttggaagctttccatattctctatcctgatattttttgaaccgatcatccagctgaattatcctttgttggatggagttatcaacaagttgattagtttgctcattttcttgctgagcatttctattcaatctctctctgtgatctagtgcatttctatttatctgctcgcgtagattagggcgcctttaatttatatggtctcgtaaattaggctgatcacacatgttttggcgtcaatcttatctgtcattgtaactgctcaccgatcgacttggggaaatactttttgattggtaactgcttgccttgatattcatatcaaggtgttctctccccacgcggtgggttttcccatgtgcgtgacctcaaggatcaagtttacccttgactccttgacctactctggctgtattagcctctaattcttatggtaattcttgagtaggtcttcaccttttaaataagttaatgaatctacctctatccaagtatgtatatatactgtctctttcttctctcctatgtctttgtggtggacgttgaggacgaccagaccggttttaggtggttgatcatttgtattttcattatttctttgagatgttagttgtccccttgctcgcatttgctgcaaagttgtggcaccctgattttggggacctcatccatcaaaaataatgtcccttgtttcccctggttgttgctcttgggggtgggtgggattagttagctccgattctttgatgttgggtccttgtgcccttctagttagtgaaccacatggccttcctcgcgatcatcgtgtaggttgttcttcttgcactggcagtgctttgttttgagtcattctatgtaataccctaagattaaggaaacaaattagcaaaccctaactagttaaatgtgtattaatgtggaattgtattattatatagtatacttgttttttccttctacatgtgttttttgacaagtcggcacggtatagtcgcaatcgggtatctcgggcggaactgggttcggggccaaaataccttttcaggattttatattggcttttattgataattgaatattctgaaaaaaattatttaaatgtggtatgtgatagaatgacttatttgcccttgagttgtgcatatgttatatattggccctaagggcattttggtctttttgaccatttaatttattttcaactaaacagatttttggaaaaatgaaaaggctttattctctgattttcttggccaaaatcgatcccctctccctctctttttctcatatcttcaattaatcaattcttggaaaattgccttgaatcaagcttggaatttggtgattggatttgaaaggaacttgaggtagtctttctaccactttaattttgaattttgttgctgaaattaagttgaagaagcatgcttttgtggtgaaggtgttcttgtatgcatgtatgtagaaattggttttaatcttgatgttcaatgcttaatggtgatgagaatcaatggatattgctcttggtatgttttagatatgattttagggttatgttatgtttaaaaagctgttttttagctctgtgtatattgtggtttttgagcttgagttttgaatttgaggttcaaggttttgagtttgtaattgtgttgaatttttgctcaatgttttggagcttatgttgatggttgtaaatttgtccttgaatgcatatattgatgattttttagggtttaattttgtgttattattttcttgttgatggtaatgttaatcagtaagaaattggattgaatttttaggtatgttttacttggttttgggtttgagttggcttagcgaagtgggatttctgggtttgaacccaagcatcgcggccccattcattgggcgccgtagcccgcccctaataaaatcctgggttttcaacccaggtaccgcggccccttggggagtgtcgcggccccccttgtgtttttgggcatattcgaatattcataactttgtgatccggactctaatttgggtgttctgagtaccattggaaagcacgtttcgagctctatatatttatctagatttgaattccaattttataattatgtggaagtggatttagggattaatcctatttgtgaatctcaaaaattgtgactaggattaccagcacttggtcaggagcacccggggatttggaatctccacgtatacgggacatcaggtaagacaatagttagcacgtagagttaagcacggtggtgctcatgttgaatattataaatgtgataaattaagaactgggattagggttattaccctaaagtgaacgattatatggactagggttattaccctagtgattattgatttttaaatgctatgccatgctttatatattgatttaaagaattatgcgttcaaggcataatttggttggactcaataattagaaccgagaagaaccaatttaaggccttattgtaaataaatgtgtgagcgtaacacgtgggtctatgccatatagacgtaattaggcgtgtgagcataacacgcaggtct

SEQ ID NO: 116954 - DNA, 1857 bp, Cannabis sativa
gttactaaatggcacctatatattatatggttactatatatatatatatatatatagaaattaattcattaatgttgtgacatagatattggccgggaagctggcaatgtcgtatttcgtatatattaagtcaatttatatattctttccatgatgtaattataaaggattacgcatgcaatatcgatcgcaacattatggcattgatttgaatcaatatcctctcttactttttggcacagttataccattaatagatatttaaagtaaccaaacgatagccagagttatttaaaatgcaaatatatatatatatatatatatatatatataattggagctaattcgattggtacgtacgtgacaaatgtaatgtgaggatttggtaggtttttataatattgcacatcgatcataagcaatgacagagttagagatgagcaaaaaaagaaaaagacaagaattagggactacaagtgatgtacttacctttttccttttttttttttttttgttgttttttctgcatttggtgtataatataaatttataaaaaaaaacatatatatatattactatatatttagtctttatattaaaaataaaaaaaataaaataaaagtttggccacccctctaataaatattaattctagctttgtttataataaaaaaaaaaacatatatatatacatattactatatatttagtctttatattaaaaataaaaaaataaaataaaagtttggccacccctctaataaatattaattctagctttgtcacttatcatgattcaagaaaattttagtttgcttcctctaaagatgtacatccatctaatttaattacttcgaacaaaatacattttattgccttgtattctaaacaattatacactgtaattctgatatgtgtgagatgatatatatatgtatattatactttatttttgctaaagattagtagatttctttaaatgacagttaaaaggaaataatgaaacagtcattcactctataagaaaataaaaataaaaatagtgaaaggtctagaaggcaaaaactgtaagactcttatttccaattattaatttcatctttgtaaataaattaaataatacgttgtcttcgtgggccgggtcatgatttgggaagggagaacaaaggagtctctttcacgactaagattccaatattccaattcaaaattgactaaaattagtagaattgggtttttgttttttatgtcaaatactttcaagcattaattactgtggcctatatcaacgttgtcaatcaatgcgtttgattctaacttcaatattatgtcaaaggaaatttctacaagctaaaataaatcaatcataaactgttatttataaaaggtgttggtgtccaataataacgttaaattttatagaattgaataaaaataaaatgatttttactttatttttacattttaaaatattgaaataaaatgatcacttttttattacctatttttatagaataattattgtatttaaaaatgagaccgtcgttctttggaaaaaaaaaaatcgagaaaaaaatataaatataatttaattagttatgacatatatttgtaaaaaaaaaaaaaaatttatagacataatattaactttagtataatggttaaattggattacatatagaatagaggtcaatggttcaattttcataaagagtattattttctttttctttttaagtttatttttgcctccctaccttaaaaaaatatatctattctatataaagtgtgtctatataactgaattcttggtttatgagaaattcgtgggttattttttatttttatttaataaaa

SEQ ID NO: 116955 - DNA, 1012 bp, Cannabis sativa
  modified_base (963)..(966): a, c, t, g, unknown or other
aaatatataaggtgtggagttttggttaaagggcttagaagtaaaggcacagaagaaaatcacaatgctaattttgtggcaaccaaaccaaataatatataagtatatatgttttcatgaaaagatagactaattaatcaataataatcatatcacaatgatgagaaaaatataattaaccatatacttgtgattagattcgacacatcctagttgtgtctggtggagagttgtggtagttgagaagatatatatacataccaaatattggaagaaattaagccatttatatatatatatatatatataaatatatatacttaattatatatatatatgatatcagaaagtcatgatgagtaactacatttaagtgtagagacattctttgatgtttgttggttaaagtggaagcaggtggctgatctttgttgggtggtgaaatttattaagccttatctccaaatttgagtatgaatacgttcaattttaattgcggcttggtagttggttaattcacaagtcatgagtcagtaattactaattagtttgttcatttaaatttactcactaattaagatagtacacgtgtactaattgtactgcttggtcaaataatttttagaagagaattacacgaaacaactcgatattctttaaaaaattattgtattaaacggaaccgaacacttaattacacgaatagaaatacgacaggttttataagtatatcactagtgtctttagtaatttttttcggagaaatgttacaagcagtgttatgagatataatattaatacgagtataatttaatatcgagttccactattttattttaataaagattataaaaaaaattctaaccaattataagataatactttatagtagtgctaaacaccaactatactctataacaatggctcaatatataatttgtgtattgatatatatatatatannnntatatatatatatatatacatgccctaccattattgaacagatgtt

SEQ ID NO: 116956 - DNA, 1409 bp, Cannabis sativa
tcaaaaagtagcaactctcatcaatggaaggccatcctggagactagagatatactgttaaggggctcaatgtttatagctgcttcaggggcctccatcaacgtttgtatgcaaccgtggataccttggatggaatatcaagagttcacagaattaatgcagtagatctgtttgagaaggtacacgatttcaaccttagctgatgtttctctaggtaatgaatggaatgaggagatcatactccaaatttttgtagaagagctagggaatcgtatccttcagattcctagaattcctacccctttctcgaatcagatttactggaaatatagcctcacggggcaattttctgttaaatctgcttatttcttagatcaatcttggaggtttgcacctccaaatctggtttggaaatggatttgggaaggggggatacatccaaaaaattctgttctattatggagattgttgaatgaagctattcccacaaagaatagacttccttttgttggtgataaagattacagcctgtgtggaaggggaggggaatgtgcaattcacttgtttcgggattgtacctttgctaaggcggtgtggctaggatgtagtctacccctgaagattgaaagtattccaagtgataccatgtttaattttgtggagaatctcatatcttctctgccacttgaggataggaaggaacttcttaattttattgggtgtgttttctctgaaatttggcatcatagaaatgccctctgggctagaaacattgttgcggatcctatctcagctgccataaaaatcgataaagcatctcgagagattaagagttcgtttctctgtagagagggggaaaccagggaacaacaacccaaccatccatccttagctgaggtgagattggagatgtgttcacgaattgaggaggtcaggcatgttcttttcacggatgcttcttggattaaaggagtagcaggaattgctgcaattggtgtggatcatgcaaatggaagttggtttgttaaagctcaaagaacatatactcaatctgtacttgaagttgaattaagagccattctaatggcgatgaattgggctattgacgaaggttgaaaagaagtccacattctctctgattccttggtagctgttaaggcttttgctactgaaggcaggcctcctgagtggaagtcctctaatatttacttttctattgttaatgtcttaaaaaatctattagtgtgtaagtgtttttatattaactgtagtttaaactttctggcggatggggtggctaagagcgctagagtcgctaatgagcaagttattttgtatcaaggggagggaatttcccctgtgattcctatctatttttctgcttaatgaacttgatgttctttcaaaaa

SEQ ID NO: 116957 - DNA, 3350 bp, Cannabis sativa
caaaagaggatctgagatatcattcagatctgatctatcttttgttttcacagagtaatatagagagagattgaacatatagtattatatattgattttattttatttattacttacacataatttaaatgagtaagaattagattgatcctcaatcgaattgatcgaagaatcaaaattagaataaattaataataatgtatatttagttgaaccattaattaaattatcatcagatcaattgtatttaagtattactaaatatatatttttatttttgtaaggaagtattaattaataaaatttagatcttgttttcctgaaaaaataaaagtactgataaaatttgactttttttttttaaaggatcaaatttgacgttattacaatttcaaaatacaatatgccccatgggcattattgaaaatatagattatagagtaggaaaggtgattttagaaaaaccacaagatgtcaaataagtatattctggatattagtaattgaagtgagacaacttatccaggcttgaaacatttattaataagattttgggaaaaaaattaaagtacagaaaaaccactttcttacagctgaaaaaactgctgtaatgttagtttttgttgtagtgtcatgtttgtttcttttccttagtgtggatatcttgtcctctttttgcatttttttttctttcttaaagataattttgtctctcatcagaaacaaaagctttgttgtcaaggttagtctattggatttgtagtatagttcctctaaataaaatggtctctgtaagttttctgtctacatggaaaattagttgtctctcggaagagttttctcgaaaggcctttgtgcccatccggaaggaatcttcagaaaagcaagtcttcctccgaaaaggagtttcggatagctagttcttctctcctggaaaggagtccagatagtcgagtctagctgtcgtttctcctatctgggaagaccgttcagcgtgtgcttcaatcatagtcccggaagtggttgcttcattcgggagcactataacttaagctggcgtggagattttgttacgaggagtttgttaacttatcaacttagctcatgcagccactgactttgagatctaaatcttgaatctataaatactaccaacacttagcttttcaaaaagaatgagaatcagacgagttttgagaggtgatcgtgagagagaaaaattatgaggtagagagaggtacagagaaaagagagagattaggtttgggttatgtatggagaatcttctatagatgaagattcttgggcaaaagtgcgagaaataaacacaggagaatcgatctcgattgtattgtaccttgttcttgctcattcaataaagagggtttcggtggtgttctagaactggagtagagccatgaatcatatcgatctataggacttaagtcagtatacatcttagcgttattttttttattgttttactgctttatcatttttgtttttaatactctgtttatccctattttaatttccaattattttttgtgatttgttaattttgtcaccactaattgtttgttgattaagttttagttgatttgattctccacaatcctagttgtaattttcccacaaatcagagcttggtaatcgatgaagaacgcagaatcaagattttttctgctgcaattcttgaagaaacaattaacggtgtcaatcgcgagatttgaatttggagaagttcaatggaacaggagactttgcgctgtgtagagaaagtttgaaagggatcctagtgcaccaaaaggtctccaaaggattgtcttcacttggtactttggcaatcttcacaccttctttctttagaacttctcttatgaaatgaagttttatatctatgtgtttggtacgttcatggtgcacacaattcttgtttaattgaattgcactttgatgatcacaatgcacggtgataaccttctagttgagttttaactcttccatcaacctagtcaaccaaagtgcctccttgattacttccgtcaagaccatatactcagcttcagttgtcgacaacgccaccacattttgaaggtttgctttcaactatgtgttgtaccaaacatgttaaacacataaccaattaatgactttcttgtatcaatacaccttgcataattagagtccacataactattgataacatcaaagtcttcactctatttgttcatgccaaacaccaatcccttgtcaacaaatctctttaagtatcttaagacccactttagggcctcccaatgctcatttctagggtaacctatgaatctactcaccatactaagtgtgtatgttatgtctagtttagtgcagaccatgacatacatgacggagccaactgcactagccaacagaacctttgacatctcgaacctcccagtttcatctttaggcatctaagtagtactcagtttgaagtgttgtgcaagtggagtgcttattgcctttgagttactcatttcaaaggtatccaaaacttttttgatgtagttcttctaattcaagtacagtagtctctttcccctttcccttattatgtccatgcctatgattctacttgttggacccaaatccttcattttaaactgattcttcaactggagtttcaagtatttgatctcctgcatactcttgttggcaattatatggtcatctacatacaacaatagatacagtgcatctccatttctttctttgaaatatatgtagagttcaaattaacttctctacaaacctatcttggtcatataatcatcaaatatcctatcccattgtctaagagattgtttcaaactttacaggaactttcttaacaagcacaccacgtgttcctttccaacctcctcaaatccttcatgttgtttcattagaattctttcttctggattttcgtacaagaaggtagttttgacatctaattgttctagctcaagatttcggcaagctacaagagccaacataattttaattgatttgtgcttaacaacagaagaaaatacctcactatagtcaactccttccacttgagagaacctttgaggaaccaaccttgctttataccgtgcctcttgcacatctggaatgccttccttccatctgtacacccatttgcagccgatgaccttaccatcttccaacattggtattaagtcacaagtatgattatttttcaaggagtacatctcctccgacatagctccattccatttcttttggtctttgcttttcattgcttgtgcatagctggtaggctcttcctacacaatctgattagcaacatgaaatgtgaa

SEQ ID NO: 116958 - DNA, 875 bp, Cannabis sativa
  modified_base (819)..(833): a, c, t, g, unknown or other
ctatgtgttagactgacctcctcccaagtctattaggaagcctcccctttatggcagatactgctttaaactatatcatacaagaaaaaaaaatgtacaaacaaaaacgaacttttcttataaaaatgaaaactttaattcacactaaccaaatatgatactatctctaaaatacaacttagttaccaactaaaaaataaacaagacaaacagaaaaaagaggaaaaaaatatgaaggttgacctggataggaaggttgaggccaagaagggaccggttgaggagacgcattaggatcttccaagtgcctaagccatacaacatcgtctacggctttggaaacttccggaattcgaaaagccttgttagcccatttcaaccctttaccaataccagtcttgataaactccacgtccttcccaaccaccgaagcaaagtgcccgaaatcaccaaaagcccgtccctgtttccgctctcttttcggcgccgctttggtgcttctcgctgagcacagaacattggtcgtcgccggcaacgacgccgctaccaaagccataggcgaccggcgaggaaccaaaggctggtgttgggtttttcagtagtactgaatttaggtttattactgtgatttttgtgtggtttgttggtttgttttttttgctggataacaatggcgaagtgaagtgggaatgagtggcggaaatcgagcagagctaagttgccgagtggaatgagtaatctgatgtggttgggtttacagcccagtaattttccatcagaattgtatataattagaaggaaaatttacatggtatactnnnnnnnnnnnnnnntttacaaaaatactgtcaagcggtattttttacttttttact

SEQ ID NO: 116959 - DNA, 2943 bp, Cannabis sativa
  modified_base (55)..(59): a, c, t, g, unknown or other
cgtggtcgcgcgtctatcttcggacgagagagagagatagatagagagagagagnnnnngagagagagagagagagataagtgatggtggttctcatggtggagctcatagccgtggctgaccatggtggagtttgaacggactttcgtctatggtggagctcgtgaaagagagagcgagagatgagatacgagtgatggagcacgtggaccgccatctatgagaaagagagagggcagagctctcgagagagtgacaaaaattttaaaaatatatagatttgaaaaattttagatctaaacgtgttatattggagcaagagaaaacgcgttatatgaaaattttcaaatttgaactaattgacgacggttaaaaatagtagcctataacactataaatgacggttttaaatcgtggcctatagtataggctacaatttaaaattgttatctatagtataggccacagtttaaaactgttgccaatagtacatgccacagtttttaaccgtaggtaattctcttttaaaaaatcgtaatttttaagacacacttaaagaccatcggaaataacactagaggcgacggttttaaaccgtgaatagttctcctttaaaatgaatttgtaaattagctcacttcattatgtattcattatataatactaattttttagttattaatacatataattaactcaaagaagttataattgattttggaatcacccatcaaataaaaaagaaaacaatattaatatttgaacaaatcaataaagtgcatgaacgattaatagtataacattcacaattgaaaaaaaaagtacattttcacacaaaacttcaagccttttgtattcaattattagaagtattaaacatacatatattaagtttttgtttgatgattaaatggagcttaataatattggattgtacatatctatagtactcttaacaaattagaaataataatcattatccaaattaacaatgtagtgagtcaataaagaatagtattggaagaaaagatgatgatcactatcatccatgggcagcattcagctccaaaaaatggtctaaaatattcttagcttcatgtgtgattggagtctccattgatccattgttcctctacattccaattgtaagagatgaaggaaagtgccttgacacagacaacaatatgaagatcatagctcttgttttacgatctcttaccgatttcgcctatgttttacacatcatatttcggcttaaggatgccctaaccatctctatgcaacttggtcaatccattttccatggccttccttggccttatcttctaatcgatgttttagccattcttccaattccacaggtacctattatatatatttatataatgtacatatcacacttactaatttttgaatatttttaaataaaatgctcacatgccaattttttttatgagtgcaaatgtgctatattttaaattttattttcaacaatgcaaatacttttccaataataggtgaaatggttagcatatatatttatacatatagctaattaatttattatatttattcatctataggtggtagttttgatacacttctcaaagattaccggattagattatttggatgcaagaaagttcatcaatttaatacttcttcttcaatatgtgcctcgaattcttcgtgtctacttatcagcaaaagagttgggatcgagtttcgactcacttgctagacgtgtatgggtcagaggcaccttcttatttttcctctatattatttctggtcatgtgagtaataatccatatgcatatttaattttaccaataaaatattatcattttaaactttataactagtaaattaattaaatatgtgtgtgtttatagatatttggagcgttttggtacttttattcgattgtacgtgagacatcttgttggcacaaagcatgtcataaacttcgaaaagatcctacaaatgaacacgaatgtgatcccggtccatttgtgtgtggtgaagaacatcccatgaaaaattggagaaagatgaatgagtattgcccagttaatccaccaaatgcaactgtcttcgatttcggaatattttctcaagccattgaatcgcgtatagtttgcaatgcaactgattttcccaaaaaattctttcgtagtttctggtggggtttgaaaaatttaaggtttgcgaaactatatacacatataatcttaaattagtagctagggttttgctcgataagattgtttcgagttgttttgtcttatataagttatttttttttttttttagtaacccatattttgactttatatactgtttggattaacaaaaagcttgttggctaaatatctccttttatttaattctgtctttttttttttttttgttgcagttcttttggtcaaaaccttgacacaagtagcagtgtacaagaaaatatcttttcaattatcatttgtatcttgggtttacttttgtttttatatcttattggaaatttgcaggtatgttttaactacaaactcaatattatataacttcctaatataattaaatttaacatgtattttatgtatatatatttgtatagacatgcatgcagttggaaaccacagagtcagaaaaggcaaggagaaagataggtagcatacaaccacaaatagaatcttatttatcaagcattaatgagattaaaccttataagaaaaaggtcatcaagaaatacctaagtcaaacaattagacaaggcaaagattttgatgctcgacatcttttttctcatattcaagatgagcgtgctaatcctaatgaggtgagtatttatatatctattatctattatatataaagtgtgcctatataactaaaattcttgatttatgagaaatttatgggtgattttttatttttatttaa

SEQ ID NO: 116960 - DNA, 1655 bp, Cannabis sativa
aaaaagtacgactgcaataaaatcataagataagatacttttttcgccatttttttattagaatgtagggtcatatatgtaataattgtaaatattaagagagtttcgccccaaatatcacttgtatataaatactctgtaattgctttatttattctattaaatgagagaaatcatttcccaattcctttattctattaaagcatgttatcaaagttagaaagaactgctcttgatcttcgtctctttcactcttcatttcttgtttcgttcaacaattgttggctcgtcctcaactcacagagatcacgtctacagagaaccagtctccttcaagcattctctctcatccaaacttgatgaaaaccacctcctttcatggaaacattgaattcttattgttattcacagtcattgtctccaacgattcttcgaaccaaattgtgcaagaagagtgttatgggatttgaacctataactttaaacattatctaccttaacaaattaagctataaatatttgttgcttataatacacttaaattttacttaaataaaagtctaataatttttttttatttttttattttggatcccgaaaagtgtgagccctaaaaacgggcctagcccgcctatgcctaaggccggccatgctctcaagtacgatacaaaagcatgcaaatacaatctcacaagattatattgattgggaagcacaagatcaacttcttttttcatggatgctatcctccatgaacgatcagatgaatactcgcatgattttggacatgaaacttctacaaattcctggattgtgcttcaagagttttttactgctcaagaacaatatctggttggaaatggatcagattttcatatcactcatattggtcattctgcattttattctcccctgcatccaaaatctttaattcttaagaattgtcacatatctcaacaattacaaaatatcttttgaatctgtcacaacttactaaagacaataatatattttttgagtattatcctaactcctgttttatgaaagatcaagtttctaagaagattcttctactttgtaaaattgatcatggtctctatgtgtttgactacacctaaaccattgatttgcactttccacccttgtatggtcaacctccaccaaggtcatttcttttcaattctactgcatttttttttgttcaacatgtaccatttaattttcaattgtggcataatagattgtgacatccaactacttaatttgtaaaaaaaataatgtcatcttataatgttcttcaagcaataaaattgtctttgatttttgccatgcttgatgtttaggaaagtctcacaagctttttttcctaatttcaagtagggctattcatcaaaccgctcaaactgactgtaccgcaaaaaaaataccgcttaaaattttttgcagtgcggttgcggtttgaatttttcctaaactgcgtggtgcggtgcagtttacgattttgaattgttaatatgcggttcaaactgcaccgcatcgtatattataaaaatatcaatttttatatttatttaagtctaatatgtgaaggcctagtctaaagcccatcaattattgtattgttgaaatttaaaacttttttttttcatatttat

SEQ ID NO: 116961 - DNA, 2054 bp, Cannabis sativa
  modified_base (26)..(35): a, c, t, g, unknown or other
ctgcgacagaaaggatacaaaggttnnnnnnnnnngtggaaggagacatattattccaacaattactttcatgatttcattattgacaatattttggatgttcacattgctggtcgtaattgtcctgacgtccttatttgggggaaagagagctcagcgatattcagtgtcaaatatgcttatcatcttgctgttagttctagagatatccctacttcttcttcttctttgggaaacaaacgtttctgatctaagctctggtcctcatctattccttctaagattgagcattgtgtttggcgtattctccttaatgccatccctgttgcttcaaatctataccatagacacatcataccattacctttttgtcccctctgccatgcagcaccagaaacggtaacacatgcttttcttgaatgttctaagttgactaagttgcatccgtaaatgttgagtaaactgctagcaaaataaaagaggaacgatattaccgaatgaagaattctgggttgagtcgcgaactaagtcgttttctttaaaacgtttgcggcactgcccaggagtgtgcaaccagtcggaatttgccagtcgtcctcaggataaaacagcccagtcgacactgtatcgaaactctattgtacgatagagtaccatcgaaataatacactcaaaaccgactactgctcaaaaatataaatatgtattatagtagtatgtaaatatatcgtataatttttcagaatgaaaaagatatttttcttccgctgttcagtcacattatataggcaatgcgctgaaagtagtaacgggaagaaagacgttactggaagggaacgttggaacagatcgtgggaacgattcaaaaataataattaaataaataatttttttcccaaaaaataaggtgacaccacacccgctcagcacggtcggcgccgcgcgtgtgtgggggtccggtgtgtgagtcctcacccatgcgcacaaaactgggtaccccttggggcccaaacccatatctcaaacttgcactaattatacacttcaaatgaagtgtttctatcccatatgggactcttactcacactttatttttgtattatttcacaaggttcaaacagtaaatgcaggcaaaatctcaagccaccttatgtgaaacaattagattaatgtagaattcctgaaaaaaaaaaaataaccaagtcagattgactatagagaatcaagaaagaacatttgaaaaacagggtcactaaaggcaagtgttaataattcgagttcaatatcatggtcctgaagaaaaaaataaataaaaaagaacacttacacaaacagtatagtctaagaatccaaaaaaaacataatcttcaaaagagagaataatttttttaaagagaataaaaacaaaggatctgaaattttctattaatttttagtttaacttgatcaaaagaaatatataaaagatatgagataacatcatcagtgaaaggaaattcacattcatttaggtaatggacatccctttgaaaagccaatgcatgaccaataaagtcaacaatataatcatagaaactttattttctattaaaagatcagatgtgtaattagaaaatcggtccaccatccttaaaatctttatttttaccatatatgttaagaaacccaacaaatttcttattatcaatgtaaattaaaattaaaaaaaaaaaaaaaaacaacataaccaaaaaataaattgctatttacaaatctttgagtgaatttcttcttgttcaggtgataagtgagtttggaacacttaattcaaaaaaactaataaatttattgtcataaattatcttatttccatctaaaattgaaatttaaaaaaaaaaacaaaaaaacaaagaaattgaaattaagataaaaaagacattatcatatcattttgggtaaattgaggcataaatacctgatgtttcaagttttatacacttaaatacataatgtttatttttggaggcaaaaatacctaatgttacatttctcttacaccgttactaccacttccg

SEQ ID NO: 116962 - DNA, 1693 bp, Cannabis sativa
ttttttttttaaaaaaaagtaactttccttatattgatatcacaaaattttaaaaaaaaaataatataaaaggaattagttaaatattggtattaaatatgggagtgatacataatgaaaaaaaatgtctatatgtacatacattttttgtgactccaccaaaaaaacattatcctaaatttaaaatatggttcaattaaaatttaagtttttctaaaattatacacaatcattatattagttacaatagaaataatcaatcaaataacaattacataagaagatttatccttaaaatagtatttttcgtttaaaaaattcaaacttgtttgtgaaaagtccatattaaacatttttcatataagtaataaggtatagatattgaccaaattttagagcaccaaccagctcttttatgtaaatatatggttaaatttagccgtatgtactaaatttgattggaatttgtgtttttaaaacagaaaatttttattaacattctaaaaatttgtaaagatacattattctaatcatttttattttatataaaatttatatttttaattataatttttttaaacttttttttcccaatttatattcttattatgtagatttttgtaaatatataaaaaaacttttttaaaatataaaaataaataatttattttaataatgtgtactttatcatcttatttataaggtgcaaatacaactccccaactaacaaattgtgataaatatgtactactttgatagcctcttactaaagattccacaaaagtcaaaactatgaaaaggtatagcgtacgaatacgactgggacattttggagtttacgttttctcaaacatgtataatgtagcctataaataccactttcaatgaatgagttcaaataaccatttcataatttctctgaattgttctctcactcagtctttcgttttctttattaattttctttaaagcttctcaagtcataccaaacaaaaacaattaatttagactaattaaatttccaattaaacatcacatatgaacctatcaaaaatcacactccgtccattcaaactaacggacgtggatgatttgatgatatatgcaggtgatgatcaagtgactcgacaccttcgacgaaaaactttgacctccaaagatgaagcattgactttcttaaaacatgtttgtaaccctcattatcaccattggcaccgctctatatgcattgatgaccgttcgatcggctacatctcagctttaccgggtagtggtgagagcatgttcaaggccgagatgagcgctggcgcggccgccgagtattggggccaaggagtggtcaccaaggccatgaaaatagcagttgatcaacttttcaaggactttcctcacttggtaaggcttgaaggttttgttgatgtgaaaaatacggcctgccaaaaggttatggacaaagttgggtttcgaaaagaaggtcttcttaggagtcattattttcttaaaggaagacttggagattattttatttatagtattttagccactgattttcttcctgtctcaaagttgtaactatatctatatgtaatactattattgttataaaataaagtgtaataagtatgccactacttctcagtctttgtaataattttattccgtgttgtgtaggatgcaatataagagtcccaca

SEQ ID NO: 116963 - DNA, 2292 bp, Cannabis sativa
aaaaaaaaaaatctcttcttcctttcaatttttctcaaaacaattttttaagtgtaatcaagcgctattgttcggtgcaaagcaattcgcatacagagcatgttttatcctggaaacgtcatgattgataaactgtagtgtacacttcgggcagagccgcaaaatatcttaaagagagcgacataatccgtggctcaactaaaaatatcatttgataattcgttccaatttattaattttcagaataacaaataagcatcgacaaatgttgtatctgtcctctccaatgatggtggctcacacaataaatcaaagcacccctccaaagtgttggggttgtagacctttgcaatttcctgttaacttagattaatcctagttatcatgctacctatattcagtctctcttttccatgcagcaacacattgtacctagccgtccagatgcaatcaaagatacaagcagaaaaagagagcaagcctttagtgtcaacattattgtcattttcacagtaccacctaattagttgagtcattctcagcttcatttctcacttttgtggcccaaccatgtacctcttacaattggacaagacttgagaagatgaatggaggtttcagcttcattgttgcaaagcgagcaccgatgctcttcccctgttctactcgccaaaatatgcaacaaatctgcccttgaaaaaaagctctatttgccatgtgcaatagaagaaatttcagtagtctcagtgggaagagcagcccaaatttttggccacaaatttggttatttcaaatatcaaatagtacttcggttcaaatcttaagcttaacgtaatatattatataatgacgatctaaaacaaaacatagtactatcataccatatgataatatatgtttcacatacatttccacatcataaactagtacttgatgttactacataggaaaataatagaagcacgatttaacagacatttatagataccattactcaatgtttaaaaaataatatggaatttattcttcttcaacaaagtgaaacattcagtagaatggaagcttacatttggttatagtatgatgtttaccaaaactgcctgtgggacaatctggtggaagtcgcaaatgatctttattgtacatgacattcacaagacaaagcccgtgaggtggagcaaacatgacatatttagcaagctcccttcgatcttgcgatgccagcatacttggaacgatatcaggaggaagtgcttcccttccaacttgaagcagtagagcaacctgttacaagttagtcagcagaaaatgttctttataattaataaacattattgtgacacatacaaacattatcattttgataaattgaattatgacaaaaacaaacaactattattaaaagtgactgagattattggtactgaccatattccggacttgtctatatagaaaacccgagccttcaacctctagctgtaaaagagctccctaaatagtataatcagccagttagagacatgtaatgtcactgtcattatgaaatatgttctaaactataatcaccagcacagaaagtgataccatttcaacaacatcaaatctgaatatactcttgactggattccgcactctgtcgctgttggatgtgttagcaaaagcagagaaattgtggattccaacgaaatgctttgcagcttctctcataacatcagcattgagcttacaagcactgtggtaagcaaaatggcgctgcattgggtccatgacagcatcattatatatcttgtaatgataagtcttgccttctgctgaaaaccgggcatggaattcaggcactgcggggctaatctctctaactctgatatcatcaggaagaataccgttcagagcagcatgaatgccatccaagctgccatagttgaaaggggtcacaaagtgtgccacctgaaatctttactaattgtaaagtttgtgattcatcaatcaatagatacttctttgaatccttaaaagtagtaaaatagacggacctggcctaacgcgtgaactcctgcatctgttcttcctgctccaaccaagcagagatctttcctttctaactttgttgcacagtttagagccttctccagaaagcactgtactgtcggtggtgatacctgatactgccagcctgaaaaacagctatcatggtcataacaatgcatcatatatcaggaagtgtatcttccgaaaaaaaaaaaaaaaaaaaaaagccattgacatcctccaatgcacaatgtattacaaaat

SEQ ID NO: 116964 - DNA, 2101 bp, Cannabis sativa
  modified_base (118)..(130): a, c, t, g, unknown or other
  modified_base (251)..(255): a, c, t, g, unknown or other
  modified_base (340)..(354): a, c, t, g, unknown or other
atattgaatattctttgaaaataacataactagatggaataatattcattataaaaaactgtttcttttagtgacaattttttagttataacataatttttttgtgattaaatgtgannnnnnnnnnnnncaaaatgttacttgtgactaaaaaatagtatttagttacaagttgtcactaatttagtttcagtcacaacaagtattgtgactaaaaatacatttagtcataataaattgtaatttttgtnnnnnatacttttagccacggactttttattcacaacataagaataataatttataattagttataatttttttcacttttagtcacaannnnnnnnnnnnnnnaaagtaagattttttgtagtgccacttcaaagtcacgtgacttttacagtttaaggtctcatcttcaggggcggacccacgtacaggcgaggtggggcagtcgtccaccctgaaaaaaaaaatcggaaaaaaaatatatatttaattagttacaacatatatttataaataaaagtgatatttataaacataaaataagctttggtataatggtaaagtcaaaacggaaggcacaattagttgagtctagcattcctgtgcaattcccttcctttaattcaatatgctcttcccgcttaggttaaataatgtaattaaataatgaatctcatatgatttattattttaatataataacttttatatgctacttcttgatggtactagacaacattagtctctaatagtttaacttcacattaattttaaagttttgattaaagaaataattgtgatttttttatatttaagtgatgtaatttgaacacacttctccttaactatattgttttttttgttaaggaaaaagtatttattataaaattattatgaataaataaaaaagataaaaagagaaagagaaagtgaaatgagaatttgtcaatactttagttcaatagtaatctattatttatagaaatatgcgagttatagattaagaaactaatgagtgaaatagtaattacaattaatggtaattaattgttattcaagttttcggaagagggacacgtggcattcccaattcaaaaatcaatcaattaaggcctagttagaaggcctaccaagaggacaagcctaacatgtacagagggatggatctaagctcatcgaaggcccaagatatacacctccaagaatggttctttctggatacgaaagggccactcgctctcatgagaagaagtaattgaaaccctataaataagcatttgggacgcatccagagggggcactccaagaggtgcctcgaaggcatggtacaggatgatgtggcagccctctgacactagatcccatagaatcaaggcattgtcccttgtgtcaagcgatattttttattttagtcacacatcgctaaatatgcaaacatttattattttatagtcaaacatcactaatcatcgctaaacttcatgcttaacctcaaatttggtttattattgtaaatatattgctaaatactgcatattattgcaaaaaactgggaaaccacgaaaaaaaaaggaaaaaattcaaaatttaatttttggaaaaaaaaaataaaaaagcaataaaacacaaacacaaatgtgtagatttgttaaaaacatacataagagcattcttttgggttgaactgagaactctgttggtctagttaagttgagaacttcgataattagttgacttgagtgtgtgtgggtgtgactttctagagagagagagaggaaaacattaagatgagtttggttttattatttgaggaaaataattggaactaaataaacacactaggatattttctttgatgttttgtatggtggtatacttagggaccattcttcacatttaagcatgggaagccaaatttccctaatcaaatcacaattatattttctcattatttaagacttatttcaatcaatctcatgtctatacaaattttgtacaataattattatgtatacaaatatacatatatgtaaatttctcattagaaattcatattcttgtagaaatatttatttgcacaccctacaggtct

SEQ ID NO: 116965 - DNA, 1803 bp, Cannabis sativa
ttaacggtcaaaaaagttcaaagggcataatttagtacatttcaaagtttaggaagcaaaaatcctaattatcctagatttatacacaatttgtacaaaaaatagttgtttcttaatcgtaaaatacttgcacaaatagctaccaacatagtgaaattaatctgctttgaaaaaatgcaaaacttattattccaaaagccaccatttgtgttcataatttgaatgacaaaaagggaagaagtgattgaacctgtcagtgatagctctacgtgctccattgtaaactgaattagtcttattaatagtcacttccccatttgaagagcttccaagccctggatcctcacagtcaaagtcttggtctttagacatgtcacaaaaccctgcaatcatcatcatcatcatcataaatttgtacaaaatacctttaaagtagaagattaagtaaagcaacaacactcacaatattctcttcacttgggcagctttgattcacaaaaaagactaaatttttgtaataaaagatgaaaagttgaaacccccaaaaacgaaaatgtgaacagaaaagagaaagaatcatgcaaaatgggtgaaaaaagctatgtttttttattgaagagcacgcaaaggcaacaccaaaagtttacatttttctgagagaaacagatattgtggatctgatgagaatgtgaaatgaagaaagaagtgtgtgtgagcagcaatagagagtgtgggaggaagcgagattcgagggtttgaaagtcaaaggggtgagaattaaatttgattaaaaatggactacctttagcttagcttcttccttcatgttccaatcccagatccagaataggaggaggaggaggagcaagtgagttgtgttgtcgtacaattccattgacaacgttgtcatatgcttctttcttctgcttcttctgccccagaatttcggttatggagtttaaagcctctctctctctcattatattaaattgataaatgttaaagggcactaaatagtgcctaccatcttttaatatgtgaatattgttattggtccaactaagcatcgagtcccatataatttaatataataaattttaggaagtatcgctaactaatcgcaacgtgacatgtcgagaaggtgttaggcaccactgatgtcttatagcaatgctctattaaattatatgagactcaatatttaattaaaccaataacaatatttacacaagatatttaatcaaaaaggagagagataatatgatagagaaattgtgttgtactattactacaattatctaagttatcttttggagaatgattaatttatggagtaaatatttaaagtttaatttttgttactggaacaatataaagttatatttttaaaacttttaaaaatatttaacggttaaatgtgaagttatttgtgagttattatctacatgttattttttttattggtaaatttaaattaatttttaaatgaaaaataaaaatttaatgactattgacttgacattgaacggttaaatacttatagaaattttgaaaatacaacttaaatattttataaataaaaataaattttaagtatttatttgtaattagaaattaaatttaagtatttatatcgtaaattattttttagagaaatgttcattctgagagaattattcttataacttttattttgaaaataataatgtggacgatgacaacttgatttacaatatgaaatcttgactctctagcaaaaaaaaaaaatcttgacttttgtaacgtccccgcttcaagcctcca

SEQ ID NO: 116966 - DNA, 1790 bp, Cannabis sativa
gtaaaataaattccaacaaaaggtacatggagaggacctgaaatcaaatttgtgtctattgtaaggtcttatattgcgataaatggtgcacccaaaaattcaaaaggttatataatatgcggtcatatgaaataatacttgtataggtaattttttactcaaaatatttcgctagtctgttatttaagtaaatagttgttttaaaagcctcatcccaaaagtttaaggacatagaggcttgagctagtaggctaaggccattctgcactatgtgcctatggttcttctcagctaagctattttgttcatgtctagtggggcaagaatgcctctgcaagatcccatgctcctgtaaaaatggagtaaatgttctgaattccccaacccaatctgtctgcaaggtttttattttctaactcaacatcaactttagaattttagaaaacaattaaggcatatgttttggctttgagcatatatatatatatatatatatccaagtgaacctagagtatgcatttatgaaatagatgtagtatttgtctcaattaaaagaaacacctggtgagggtcccaacacagatcagaagcaaccaattgtaatagttcaataaattcaataagagagaattggggaaaataactaggatttttattactctgagtgctataagagttgtaaaaattttaaaaaccctttcagagggatgaccaaacctattatgccaaatggctcagtaaataaactagttgagttataagaagaacaacaagacacacaagatgaagatacaactagaggagataacatttggagatgattggaatctaaagaatacatgccattcacttgcttcccactcaacatgatggaattggtctccttgtccttgacacaacaaacatgagagagaaactcaaagtaaacaaaattgtcattaacaaagttagaagcactcgtgagatttttggtaatagatggaacatgaaataaattgctcaaaagtaagggatgaggacgagagatagaggtaagaaacgagataccaattaattttaaacacaaacttgaatcattacccataaaaaaaaaatcacctccctcatagtcagatccaagagtcatgttttgagcatctggtgtgaaatgatttgtggcacccaagtcagggtaccaatttgagtcaaatccaatagtttgagttgtgaaattaacttgagctagtggtggagtagatgtaccttaagggtgttgaaacctggagttcacaagtagtagagggaaactactatcaaagcagtaataatagtcttgaaccacatgaccaacacgcaaacaaagttaacattgagtgcaattattggtagaagagtatctaccactgcctctaccaagagtgaagccaccacgataagtcacaaactgtgcaaaattccctccaaattgagaaaaagatcctcgacaatagttgtcagggtaatcagagcgccctgcattgttattgaaatgagcgaaggaatatggtggatatggtgataaaaaaatatctctatttgttaaatcttctagccatgaacacaggttcataaagaaaacagagtaaccatgaaagtaagaaagaagaaatgagagaaagaaagacagagaaagaatgaatgaaagatctcattaattaaaggagagtagtacactggtttatatacataccagttgcaactaactgaatacaaacaaactaacagatacaactaactaataacagaattaactaactgtctattccaacact

SEQ ID NO: 116967 - DNA, 2822 bp, Cannabis sativa
gatgttaatgaaacatacatgatagtaaatctagatcctggtaaaattttccaacaccaccatccagctagagacagaaggataaagaaatgctcggcctctaccaggattgcttaatggttgaggttaacgagtagcttactagggtggaagatatgcctatagaactcctggtcagtagagttctaaaagagattaccagggtaagctcttattctagagttctttacacggattttgccgcccctgataatctaacatgtttgtttctttttccaagttaacttaaaattggcctatacttattcctgagccaagtctacagctctcaaagccaatacaaccatagatgacttgaagaaggctttggaggaggctaagaaagaggctgagtggaagaaccaacagctgggcgaagtaaataaaaaatgagttgttgcgaacaagtctattaatgacttaaaagtaaaaaatagaagacatgttgtccactgcgaagctcgaagcatacctcaagatagaatccaaaaggatgcaggatttaaccgatgaaaggggaggattcttcacactccttcaatactaggaggccaaggacaaagaattgacagaggttcttaaacaaaaagatgaaactttgctaaaggagaaaatttccttagaggaaacttttgctgctaagcgaaagtcatataaaaaggaggtcaaggactatgaaacaattgtcatggaggtcttctatgagttctgggaggcgagtccaaatgcggattttggttatcaaaacaacgaaattcatgctaagttcttcggttattgtgaaatgaggaaggttgaagatgaaatgaagaaatccgacaagagttcttcatctgctcaaaactaagaagactcgacttctcaagatcaagtccttgtgaccccaatggagtaaatttttttctttgttcagcctactggcctttttctaatacaatatggccaaccaaacggcttttagacttggatttatatttacatgttgcttaagaaaaacggctggtcgggtagcttttaagcccagacttattctgcttctttatcttaatgtagatattttcctttagctttgaattttgatttttcttttgttgtagcttattttctaccaatgcttgtatgggtataggtaatccccaagtgattgagctgacttttgactcttggtcacttgcattttacaagttctatttcgtctgtccgactttttgttaatgtcacttgagcatataatagatttgttaatgtcacttgagcatatatataactattgtttatactaggttagtgttacgtgcaatgcacgtataattagtttttttaattaagtttaattaggtgatgttaagtgtaatacatgtatgtctaatttttttttaattaggtaatgcatttttttaatttttaaatggggtttgagattttgatcttttaaaaaaaattagctattactacattggtgtgtcattttgatatgattatatatatacgtattttttaaattttttaaatttttttaattaagtaacgtatactatattcttaaccaaaactcacataattaaatttgagtgtgtctttatataggttgaagtggtaaatttgatataaagattttttatttccaaactttacgaaaaaatattatagtgtgtgaatcgatttaccataactaaaatagaaaacaatcaatttcttattataaccattacaatttaaaatataaataaataataataataaggttaaaaatatttataatattttaaatttaaatttctttatataaaatatttacatatttttttattttaattcaaaagttaaactaataaatttaaaaatatgattaaaaatatctataatattttaagaattttaaatttaaattaaaacctttttatataaaatattacatataaattataaaattaataaataatattatgttaattaataggatattcttttaaagttaacgtagaaacccaaaaagtattactaaaccaagaattttgttacatagccacattttatatagaatatatatatatttatatatataaatatatatatatatatctacaagggtgactactcaatggttatatttttattgtaaccatcatggttacatttttcttttacctataataggaggttaccaataggtaaaacttctttttcttttttagaatcaattaattataattagttattttcttaaaataattaattttaacaagacctcttttagcaattaataattataaatatttttttatataaatccctactataattattttaacaataaagctacttaattataatatttacaatgaaactttattttctctttacaaaaattaaacttcttttacacaaattattttcttcttgtataataaatttttaaataattaattattttcaaatgatattaaattataattttataactagaaaacctaagtatgaatttttctattcgaatttgaggttgcttcattttctagggagcttgactttgttttttgactctggtttagtttttttgagtaaacgacccccttataaaaaaaaatgaaggagtttagcaattttcttttttagaaaatacattcaacatattccactttttactttttaaatatttaaataaaaaaaaaacaaaataagtaggtgtaataattttaaattaaagttataagtataataaaattttaattataaaattatttatatgtgtataattgtaaattataaagagttttgctata

SEQ ID NO: 116968 - DNA, 2985 bp, Cannabis sativa
  modified_base (2947)..(2960): a, c, t, g, unknown or other
catcgtgacacttaactgtgatttttagatggaggtgtacagagcaaaacgaaactagggtttaggtagttatgccgccaaaatttcggtttttatgattatccgttacaaactgtaaagttcaggtggtttagccgccaatatctctataaagatacatctcttttgtggagatacagaggaagatgaaagatatataatttgggacatgtttattttgacataaattgaataattagtaactttttttttaatctcatacaaaatctgtatatctgtatatatatgtacgagagttgagaatactctttgaaaagtatccctcattatttggtcttagtttgacttacctacacatctataattaataactatcccctcaaaagaagaagaacaatggctaatatgaaaaacagatagaatttttataagaaaaaaaaggaaatagatagatatgccactcattccgacgaacctcctcgatcgagaatctttctagtaatgtattctttttcacttttttagttttttcctaattttgtctcactcttcagtcgacttgggatttgacaagggaatctctggtttttacttttattctttggtcattatctcgattcaattaactaacatcagatccaactattgtaatattgactacacttcatatcacaaattccaattaatcccgcctagtcggaaactttatagagacgagagatatattgctatggtgtctaataatatataattattaaattaaattataaagaatacttaattactcacattaataataataataagaatggtttgagaatgatcatttaccattctccctctctagtctagataagtgtcttgtagtttggttaagtgactgagttagtttgagtctagtttcttatgtctttctttagatgttttgtttctagtttttggtgtctttttttccatctcggttaacttttctctttggtttttttccatccttttcctctattttttctttcttggccttttatttctttatttgttgctgtagggaattggtagttagtcctaggtggttggtgatggaagcacgtggttggttcagtttagttattgtttctcttggtgtcgttggttggtggttgggatgtcatggccttagttaatgttggtcaagggaatcttagcagtaagtatgcgagttttaatgatacttttgtttaattggacccctgtgcaactacagtgtctaaactttctaaatattgtctggttggcattgtgttgtcccagaagcctatttttgtgagagatgtgaaggtttttactgctaaagcctagaagagacttgtggttgtgtcaagtttctcccatgattctaattgtttattgtgcttcaaatttggtttcgaaaaagttgttgaaagagaatgggtcttggagaataaaccttggtgtattaatggagatcatctcatccttcaacattggaagcttgagttgaaccatgagaatcttgttgctgatgatactacattctgaatccaaatccatcaactccctctagagttttttttctcataacaatgctttaatccacagatctctcactaataatgtgctaaaagtagattttgatgaggaaaaactagtgtcgtgggccaagtggctacgagtcaaggttgtgttcttaactttgaatctcttgttctcagggtgtttccttaaaaaaccaaatggtggcaagctttggcttcaatttaaatatgagaaattaggaaaattttgctattgttgtgggagacttggtcaccaacaacgagattgctcacaaagggaccccgacactatctctaacaaacagggtatccccattcccattgtttggtccatggctcgatacgttctcccattttcaatcttgtttttggggtgaggttcgcgtcgacgccaaggaggtaggtgcttgatggagttgaaacttatcctggtgaggttactctagctccggcgactatagctatggcggccatggctcgaccttcaaaatcgactacacaacaagttgtggcctcaggattgagacaatttgaaaaagactgctcagacaattcaaaatgtggctgcgatttcaaggaaaatctaggttcccaaggtggtgaagtcgactactgatcagaggagagatagctttgctttttttggtgttggttttgttaaccagaaactatataagggaaaggagcctgaaccttttcccgctttagacaagagacaccttcaactttgtaatgaagagggaagtaacgtcggtagaagtgatagccctattttgttggactctgtgtttaataagaaggcttttgggctgggctgctctcataaccatgtaagtccaattatgatgctttctagttaattgtgtggcaagaggcctcctttggtagtaatgaaaatagatccttgtctcattttttccatgcccaagagttatatgtggatgagctaaaaaagtgaaataggccaaattttaattttaatgaaaattcttttagaaaggatggtcagcccaaggatgttgttattggaaacacatctaatagtaataaaaagagaaaggttgattgcatggatattagggtgccaatcttttctaacgttaacgagagaaccacgccttttaaacaacgcaagttagaccaccatactctctcgttatgcactaccccacgaccaatgctaaagcgtttctaaggtgttagaagtgggggtgttcatcaaactgctcaaattgcccgcaccgcaccacattgcaaaaataaaaaaaatgcagtttgaaactttttgtggtcgcggtttgaatttttcctaaaccgcgcggtgcagtatagtttgtagttttaaattgttaatatatggttcaaaccgcaccgcatattataaaaataccaannnnnnnnnnnnnntaggtccaatatgtgaaggcccaac

SEQ ID NO: 116969 - DNA, 1025 bp, Cannabis sativa
tcccgagcctaccctattcaagttctttgatagcccactaacttcatgctctccctcttctatcgtgtttaccaacccattgaactttatctaagaggtacccatagcacacttcctttgtttagggtccacaaaatttaattccccaaactcatcaccacttttcttattttgagcaccaactccatctaaatcatcattgttggagatattatatcccaaaaatatcggccctaacttagctccatgcatggaaacttgctttccacttttagtatgcataaactgcccaatttccatattagaatcatccataggttgccccgatcgaagtcatccccaaaacaccatcccactggagctcttctctactaccgccaccacctctcataacaacactgccaaatgaccctaccccacctccataactcatcgctccaatcaaccatttcaacccaattaagtggtccgtgcttctaccatgggccctcatccgggagcatatggcttgactattggatcaaaaggagcatcaaacagtccttcacaagttcattctgagtgtctgataataccgcatgtaaaacagaatgtaggaacacgttcaaattaaaaataaatccaaaaaaaaatctctaccattttttaggatctccattttgcattcaaaaggtagatcaatgttaatgaataccaaaatatataaataatccattcacacgccaataaaattattcggatcctccgacttgataaactatcccacataatccttcaaatccttcagaacacgtattgattgaaaaccaatcataacctcgtgaacttgtacctatatatccaatcagtttaacagacatgaaaagattaattgtatcttatcaaaggacaaaaggctcccgtcaatgactattaatatccacatcatggtaaaactaaaatatatagagtaatttgcggcataacctccataagtatttagtttattgcaactaacccccaactctaaaattttggtggtaaaa

SEQ ID NO: 116970 - DNA, 748 bp, Cannabis sativa
ctgctgaaccgctcttccgatctatctcaacttgttccatcatcccatatctctactcttgatgttcttgacatactagagcatgttgtcaactctagaccaacaagacatactcggaaaccaacttatcttcaagattaccattttttctgtttactaacaatgttcaacctcaagtttctaaagcatctactgctcatccaatttctaaaattatttactacagcaggctgtcacctaagtttcgaggaactatgctagcaatctcaagccattatgagcctgaatttttttatcaagctaaaggtatacctgtttaggacaatgccatggatcatgagattgcagaacttgaatccaatggcacttggattattgttagtctgcctgcaggccatcatgccataggatgcaaatgggtttataaaattaaatatattactgatggatctattgagaggtttaaggcaagacttgttgccaaggggctcaaaatatgagagcatttattacaatgaaactcttgctctgttgccaagcttgtttctatcaaatggatccttgcccttgctgccattcaaggctagtttttgcaacaattagatgtcaataaaattttttctccataaagatttgcatgaggaggtgtatataactttacctcaagggtatagtccccagggggaatttccacttaatgctatttataagttgcaaaaatcgatttatggccttaaacaagcttcta

SEQ ID NO: 116971 - DNA, 1824 bp, Cannabis sativa
aaaaaaaaaaaaaaaaaagatcccttaaaaacacaaataatagagtactacaaatatcggaagtggggaccctagtctactctaatccaggacctaaaattaaatgattgaatgtgatcctgcccaaattagtagaacttcggtcaattcaaggcccaaaaaattcattgttgggctacaatttttggtattctctaaggggcccaagaagttgacaaaggaaaaaaagtgatgaagattgaagatcaagttgaagagggattggcattgaatctgtgaggtgtgtgtgtgtgtgcaattatttaatggaccaccaacttgataatccaagttccgtgaaagttgtaatggtttccctttcactctaattttgtaggactctaatttccatgcaattcaaatggcaaatttctacggttctctcatattattgttcttttcctattcaggggtgtgaagtgttaatcactaataattgagattgagaatagcaatttgttttgtatttttttgttcatttctccatatttagagagtcaaagttctttttatttaatttttctttcaattataacaaattatttgaaagaaatgctataaaataacaaatgctatacaacaaactagtatattattcagtttcaaaaaaaaaaaaaaaaactagtatattatttatatatttaaaaaattcttttttagatatagaggcctaacttaaatttctattgtagggatcaattctctagttttagcttataaataaattacaattcaatttatatatataacaataaattataggcatccttttctgtttttggaaatttttaaataatttatggtatcaaaaataagatttaaacatttagttgtatgtgtatattttttgttttactagtgtaactaattattttgaattttatttttgacataattattacaattttttgaaaacatgtgacatttctgttataattatgatttatgatattattctaaaaaaaaaagctataatttatgacatcatataacaaaaaataggatataatttctcaaggtaatgcccccacttataaatctctctatatattaatatatatgaaaaatactagtattttacttctgaattataacttaaagaattgcatcatgcaaaattttatactatttacttagataagagttagtagggcctattgcacatattttcaatccactttatttttgttttttttttcaggaaaaatatttattctacaaaaagagaaactatcaaacagagagggggtttgagccagacaacaatcttcagccaacctaagttacaatcccacaaaccactcaaacaactcttattacttaagggagtaggctccaacaagatgagccaactcattacaaatttacaaggagagaagcaaatacaagaaagatgacaactctatatatattttgcgtaattaacaccatcaactataaataataatagcacacacacttaaactagtctctccacaacagccttgcaatcctaagttagtccactaaagcatcgaggccaacaaaagcaagcttcctctctcttttttaatatatagagtaatagctttatttttgtatatgatggtaaaattacatttctaacaaataatatatgtttatacaatactcataaaaaaatacggatacataaaacatttggtgggatatggtatatacttttggtgtaaatttctaagaaaatatggtagcgtttggtaacacttttttaatcagttttttgtttttaaaagtagaaaagtgaattttttttttcaaaaacat

SEQ ID NO: 116972 - DNA, 2417 bp, Cannabis sativa
cagctgcagcggcggcgacagcaacagcggttacagctggggcaacggcagcagtagcagcagcaggaactgcccaagccccattggcaggaacttctgaaaccaaacatgaagaataccctggttggtctcttcctgagatggatcatatggcaattgaccctattcaacttgcgcatcttagcacaaggttagatcaggaagacgaagattatgatgaagaagggtagtgtgacgaagtacttagtagatgcttaagaagtagttgtggggatcgaaattaataggaaactcaagagaacgcacgaataaaattacatatgcgtgcgtacaaaagaaatcattgtatggaaaatgtgccctctagccttgtatctttcctctctttctcactctcttactcaacctttaatccataagaacaaatttggtatgatagcttttactgacagttgtagaggtctttagcctcagcactcagaattatcttttagaagagtagactaagcatggtaagatcagtaatggtggtgatgatggccccttctgaaatacccttgtgatttatgaaattattatgttttttctgaagattttagaacttaatcgtatctctgattcttgagtttataccaccaaagaacaaacggtaagaagaaattttgaatttggcatcattttccattgcttgttaatcaaacaactatatgtatataacttttttacgctttaaactatactctcacttattaattctcaagtgcgcctactataacacacatacataataaggtttacactgaaaagtaacagtaggattataagcccacaacagttgttagcatgttacatcactttagcattattttatacaggtttagaaaagccataaccacatcgtaattaacagacttcaccaccatgtaaatattctagtaaaacggcaaaaaaggccatgtttgattgggggattgttgcacaagatgtccatgctacataaaacactagtgtgttggaatcaatcaagaggagtccgcttccatctggttaagatggaaagtaccttcattgttcttatgcacctcagccttgtaattctcttctttgcttcctctcttgactttaaggagcaggtcaaatttagcaaaatcatcaatcacctagtgtaaacatgtgttagaattgtttgaataaaaggggtatttgtgtatcaagatatattatgtacctcagccttggcatgaacaacctcctgaagttcataagggaacaaggagttggatctcttttgaagagtggtgatagcatggtttgcagcatcctgaacagctggatcatgcactggcactgcttgccaccctgctccatgtccatctaatcacaccaaaacagattccttttcacatttattattcatttccattcaaaatgataacttgaaatggaaaatagtccaaattgagaacttgggtattctagcaatttcatgaaagaaaagaaaaaagaaacctttcttaacaccgagatcggaagaagtaaaagaaggagtggcatcaccagcatgagtaaactcctggagttccttaaaattaagccatggcttaacccaaaccttggctttgtaaatcttcttctgaccagcctcaatcgcttcaagagtcagatggtgcaacgtaccagccaccacctgctcttccgatttcaccaccctcgcgaactcgatcatcgcattctatataaaaaaaccaaaaatttaaaataaatttatataaatttaacaataataattaaaaaaaaaaaaaagaaaagaaaattggagacctctttcttgttgtgttcttctacagcaaaacgacccagatcttggaggtcattgctgttctgacatgattgggattcgcgtactccaccgagagttgccattgatgattggaagaggtgtgagaggaggaggaagaaggtgattgttgtgaatgggagaatcaaattcattcggttttattgtttagaaatggaattgaataggaaattggggttataatgttttggctttggggtatccgaggtgggacctacctagtttaagtgatgcgtgtctcttacgcgtgtcgtttctttcccttacttgcttaatcaccaagttcttctcttctcttccatttctgccatcaatacccataacgcacctttattgtcttttacctttaacaaagacaataccaaatttggatattatttttggagatttttcttttaggatatgataggggagttatagtatttttttttatggatttttgcataataagcaactacttaaatataagaaatttttacaccaaaaatacaaaataccaattttattacagtagaacatctatctaagaatactcttgggaccaagtaaattatattct

SEQ ID NO: 116973 - DNA, 1802 bp, Cannabis sativa
gattttatttagagcataaaattccatagacttatggggtaaaaaggggaattagagaggccattggaatcagtgttccagaaagtaatgtgaggtacatcggtcttcctatattctatactaaacagaaagatgttgattttaatttcaccctggaaaagctttccaacaagttgcaagggtggaaagcgacaactctctctaaagctgggcgagctgccttatcaaatcggtggggatgactatgccgtgtactccatgcaaactaccaaactcttgaaccagcttgcgactagaattgatgcaataatttatgatttctggtggggatccaacaaaagtaaccacgggatccacctcaagtcctaagtcaaattgtgccttatcaaagctcgaggagcgctgggcttcagaaaaacaagagaaatgaatcaagccaacctggctaaatggggatggaatttactgatcaaattcaatcactatgctgccagattttggaggccaaatacctcaaagggaagaattttcttaattgccagtataaagagtcagatttctagttttgtacaaatgtggtcaaagctaaaactactttcttggcctgtaaagtgattacaaatggtaaggatactaatatttaggaagagccttgagttgcccaagggaaagacttcatatctaaagctgttggtaggctgccaccaaatattactaaagtggccgacctccttttaaaaaacagtgactggatactcgaaaattgagatgcctatttgataaagaatctatctctgctgtcttaaaaggaggcaagcccttagagcaaggaaatgactattagatttggacaaaggagagtaatggccagttctccaccaaatttgcctatctaatccaggctttggcttgtgctccattatgtgatgttgcccctgccctatggaacaaatttaaaatagtaaaacgttggagcatcacaagatcttttggtggtgcatcgtttcgaatgctctccttactcaatctatcctaaataaaaaattctcagttgaggatacaagctgtcctttttgcgaggttgaggatgaatcgatggaacaccatttttctcaggtgcaatttggctttccatctttgaagttcctccccttggggtatttttcctgtttctgactcaagtacacgagtgtgggattgggtcaagtttatctggagcctaaatcgtaaagggatcaattcaaatgaggttttcctttatccatcaactgatgtagttgcaatttaaaaagcaaagaataaaaaagtccacaacattgtaaaattaattaactctactactttttattaagctgattaagctaaactgtaatgtaaaagttagtttgtagagctcttgcctagcagatgttgctcgagatcttcttgttagtgtgatttgtgtgactacagctaacctacaattttctaacactcttcgtggacaaatagcagcttgttgtttggcccatgaagcagacaaaagatgaattttgttattgtaaaaagtgattctagaagagtgatcaactcacttaaaagtattgaatctaggcgggagatcgttaactactctaaattttgtaaaatcctttctacacttttattaggataatttttctaatattataggatcttataattttataaaggaaatttgaaattctatacataataaaccctaatattatttttctaaacctaaatgttataccataggccatatatgactacattttctatattcccataatacccctcac

SEQ ID NO: 116974 - DNA, 1507 bp, Cannabis sativa
agcaattgttgagaactttcattacaattggttaatttttgattgaataggatgctaatgccaggtaacttcttataacacaagtaaaaaatcacaacaaagaaagaattgactattagttaaaatggttctccaaaaactcaccagaggccttatcagagaaaccaagagatcgaaacatctcaggagcctgcttacgctgcacaacagtgccaacaagattcaaaatctcatccttattatactccccagccaacccataggcattcaaaagcagcagaaacccccaaatctccatagaattcaccatttcaagattcattttcgtcttccaaagagtggaaagtttggaagcctcttctttaactggaccatttatcaaaggtctaacatttatcaactcctccaacaaaagcacactacttctcctcatagcactgagctcaggatcaacaactcccgttttcattcccggtggataaaaccctttaatggcatccaaaactagtttcccagaatcttttaaacccttgagcgcgtgtctaacatcatcacgtatcgattcatgctctttcaaattcttcttcagataaaccatcaacgatttcccatcactcaccggaatcgcattgccatccactttcgcaggcgtcgattgatcggatttaacttgttttttcggagcattcaacttggtttttttggaatcaattaggggttgaagggttgagctcaaatgttctttgtgtgaactaggttggaattcctcgactttgggcaattgggtattttgggggttttgcaattgttgaaattcgtcaaatttggattggattgaattgtttatggattggagatgatcctcgaggtcttgccattggagggtgaaactggcaacagcggaggcgtgggccttaagaaagttgaaagctttgcggatttgtggtttgttagggtccggcgacgattgatgctccggcgaggttttgtcaatggtggttgacatggttgggtttggcggtgaagggaggattgattttcaaaaattaattgggactgggattggttcacttcagctggttaaggttaacctccaatccaatccaatccaatctccatgcattggaaatttgattattgatttatgagtcaactctctcaaacatagtcggtcctcttttgcttttctcttctcactaaacgttatcaaaacggcaagtcgtttcgttatttcactatatatacaagtttttgtgatgtgccaatggaacccattcatttttgaatattctacaaattaggaaatctatatcaaattttaaattgtgatagttttttatataaattcttttaataatatgagtaattattatagtgaactttttcttttactataaacaaaataaattaatattatagaattgtactattttttaattatatttaaggtgcgtttagaaagccataatgtaattggatttgtgtgtaattagaagtaattacacaa

SEQ ID NO: 116975 - DNA, 2222 bp, Cannabis sativa
ggcataaaacccaacaaaaatacctttgtcatttctagaatcttctaggcccaaaaaatatttgagttcaccaaggtctttcaacttgaatttatcattcaacctggtttttaagctctgtacaacagccatgttattacatgctatgatcacatcatcaacacaaataagaaggattataatacttgatccttgttgttgtatgaataatgagtgatcggttgctgaatgttgaaacccttcagcaagtaatattgtagaaaacgtttcaaaccattacctagaagcttgttttaggccataaattgatttttgtcacttgcatacaatatttggtggcagctcccccttaggactatacccttgaggtagattcatataaacttcctcatgcaaatctccatggagaaatgcattattaacatctaattgttgtaaaaaccagccattaatggcagccagagtaagaatcaatttaacagaaataaacttggcaactggggaaaatgtctcattgtaatagatcccttcttaatgactaaacccaagccttgttttgaacctttcaatagatccatcagcattgtattttatcttataaacccacttacatcctattgcatgatgaccagcagaaaggcttacaataatccaagttccattagattcaatggatgtaatctcatggttcatagcattgtcccagaaaggaatgccattatcttgatggtaaaattgaggctcatagtgactagatattgcaagcacaaaagctcaaaactgaggggatagcctgttgtagtcaactatttcagagatagaatgagcagtggaagcttttgcaacctgagattgaacattgttagtagacaaaaaacgatgataatcttgaagataggttggtttctaagtgtgtcttataggtcgagaatgagcaacaggtgttggtgtgtcaaatgtatcaagattatgtatattttctagtgtatcaagaacatcaaaagcatgagtatgtgcaggtatatcaagaatatgaggatggtgtataggtgatgggggagcatgtgggggtgatagtagaggtatctatagactaagcatcagcagcaacgaaattcgaaaaaaaaaaaaaaaagaaggcaaatgaccctggttcagaaatggaaaaaatatgctcatcgaaaaatatgtactgagatcaagcaacttatatgccttcattccagtagggtatcctaagaaaatgcatgcaacaaccctcggagaaaattttgatctcccaactcctaatgtggaagcataggccaaacaccaaaatgcttttaaatggtcataacttggagctttggagtttaaaaattcaaaagtggatttgtgtttgagattaggtgtaggggttttatgtataaattatgcagcagtacttattgaatccacccaatagggtaagggaatatgggattgaaaaagaatggccctagcaacatttaagaggtgttgatgctttctctccataacagagttcggttgtggcctttgcacacaagaatggtagtgtatgatgcgtaaagatgagaacaatgtaggaaactgtaattcttttgcattgtcagatctaatacctttgatttgaacattatattgggttttaattagttgtatgaaggctgatacggcatattgagcatcggatttgtttttgatgagatgaatccaagtgattcttgaataatcatcaacagtagctgtaaaatatctaaaaccttcagcagtgggagtgttatagggtccccaaatatcaatgtgtattagatcaaaacaatgattggacaaattatgaatactaatgataggcagtttcttttgcttagcaaaatggcatatagaacagtgaaagtcatgacagtgggaatattaaaaatgtaaacttttattcaatggatgtttctttacacaagaagcatgacctaatctataatgccataggttctcattttttattctagaatcagaaatggaacaaacaataggagctttcttctcatatatgtaataaaggtttccaactctctcacccatgcaatcacttgattcttggtgatatcctgaataacacatttatgaggaagaaacaagaatgaatagttagcaaaattggataaggcacacacagaaattagattatgatgaaaattatgttggaagttattttaccaggatct

SEQ ID NO: 116976 - DNA, 6339 bp, Cannabis sativa
taatccgatctaaatgtattatgacaaaactatttacattttatgtatttattcgtattaagaattgtctttaagttggttacattaaaaaaagttatcggaaattaagtttaggatcctattgttaccattttgaaaaataccgggttcattttatcatttaacaaaacagagaatccaatctataacttttgcaaacacatagtctaaaatggtatttactccaaatattaataatgttcttaaagttattccctttctccttttattctttctttcttatttctttcttttcactcaaactttaaaaataatttatggtcacattgttatgcgggtgagcttaaaaaagtaccattgtgatttactcttcaatgtgaatattccaagatgtgagaatcatatgcttttttgttatttttagaaaagaaaccatttgcttactaatatagtgattagttactgttttttaattttttttttaatcttagttaacatttattttagaattttattaattgataactaattagctttcaagataataataaaaaaaaaatattaaataatcagtatataaaaataatagcttgttgttatccacatttctggagggaagacatgtgacattcccaataacaaaattaattgattaaagcccgcttagaagtccaacaagataatgggccaagagtatgcgaagatttgggtcgcacaaccatctgagatacaggaaatctatgcctgaaactggatgtctccaaatccagaagggtgactcgccccactcaaaaagaatcagtcaagacccttcatattagcgtctgggatagatctagaagggttctccaagaaacagcccactaaagctagtctcaggtctaatcaagtctgtgggttgaatccactaaagaagatggaccgcaagtctatccaaattgtaagtcatccacgtattgatccgaacctttcagaattcgaaagggtatctcgctgagatgaagataacttaccgaaagccttccaaatgagctgaagggatacttttggaggagtaatccaaaaggcgtttggaatccacaagctgacatggaaaacttctaacaccgaatcccacaagcttaggaccttgtcccctgcgtcagatcaaaggattgcgcgtaccaccaaagagagcatacactttgtccgacgaccacctcattgacgtaacagtgtacggaaacggctcatgcacgccgcttgtcaacatcaagtggtccccatccgtatgtaatatcacagtctcacgggctgggcctcattctatgggcctaaagtcattttattaagtgtatttactccattagtggaccaagtttaatgcaaaccctatcaggtcacgagtatacccatatccggatcgtagcctataaatatagcattataccctcatgcaaaggattggaagattgttcctcaagcactttagccaacgtctagggttcttaagccattacaagaatacttgtgtaatacattaaagactatttagcccaatacaattgactcatggactaaagctctttaactcctcaaccatgtaaaaattatcatctccacttacttattttgaatttactttcttggctttcactttcatataatcagttattttggtacttttattgagagttgaagaaagatttgaaagcacattgtctctataacaatggtgcttacaagaaacaccatccccaagcctaatctttgtgagcagaacgctgccatgggcaacgttaatcctcttctagcagtgtacacccagtcgagcactgtaagggaggtagagacgtctaaatttggcagtcgtctaaccaaaaaagccctaaagacaatgatgatggatatgaagatgacgatggatattttgagcgagatcctaaagtgattcgaatgggtaaggaacttgttgatacaaaataaaaattggctgtacaagaggagttctctcaccagatgcagcagatgttagagcggctaataaagaaattgcatatgtcattaatggatgttagcacagaagccgaaccctgctgatgatggaccccctattcctacaaaggataaggggaaaggtagcatgggtgaacctccacaaaaaatgtccccaccgctcctaagaataataagaacacagctaaccaacctctgcggatatataaaagtccacctatgctcctatgctaggatgcccttctcatctgcgaggcaaagttgagcagaataatagtcttggtgctcaggtggaaaagctaccattcgggaacaaaaaaattgtctcaatatttttgttaaccagagaagaggagagaagcttatctatctagaagataacatattagatgataccaccacttatgctaatattgtgggaaaagcactgtgacctaagggcgtagttgagtgtattcaagagtcttgatggactcaaattgttggtggacctactgctcctcctacctctagttatggtaggggtggcagtgactcaaccactgatcaaaacagaaaggtaccatttgcacctggtggctcaaacaagaataaaaggttctgagggaactaaggtcgtggtaaccgttagggtggtcctaagaacttatacacttacccaaaaggccctaattgcaagaaacatcatttgggcgtgtgtagagggcggagatgtttccagtgcagagtaactagacattacaagagagactgcccacagttaaagaaagaagagcataaggttgaagtaaaacctactccaacaagggtgtttgctcttactcaggctgatgcagctagcctctcagttgttacaggttagctctcagtcaacaactctagctattatgttttgtttgactctaggtccactaatttgtatgtggcagccagaataattggtaaattgggtaggccatgtgataaatatgataaagggttcggaaccctattgcctgacggagaattacttatctctaaatggtgtgttaggtctataccgattagaattgaaggtaaagagttgagctctactttagtggaattgggtttagcgaattttgatattatacttggaatggattacttctccaagtatgctactaatgttgattgtaagcgagagatggtgatcttccaacccaaaggtgaggaatcatttatttttgtgggatcagtttaaggatcctgaattctagtgatctcaatattgaaagccaacgatctgttataaaatggatgtctagggtttttaacagtggtgttggacaccacttggcctgaatcagttcagccagaaacatcaaagtagttcaagaatttctagatgtgtttcccgatgaaattctaggtttaccaccacagcgggaaatagattttgtaattgatttagcacttggagcggagccagtttctaaggcaccttatagaatggcttctgttgaacttaaagaattaaatattcaacttcaggggatgcttgccttagggttttctcgacccagtgtgtccccctagggagctccagtgttgtttctcaaaaagaaagacagatcgctccgtatgtgtattgactatcgagaattaaataagttgactatcaagaataagtatcctctacctaggatcaacatcttgttcgaccagcttcaagggaagacagttttttctaagattgatctccaatcgggctatcatcagttgagaatctaagaggaagatattctaaagactgctttccgcactaggtatggacattatgaattcttggttatgtcttttagactaaccaatgctacggtaacttccatagatctaataaatatggtcttcaagaattttctcgatatatgtgttatagttgtaatatcccggaaaataatgtgatatttaattggacatattttattaaatatgtaattattttagtaatgaagtacgattatgatattacttagattaattagtgtgaatttattaaatgattaaataaagcgtagtttattaattacggaaattttattggaatatatgggtatcgtggatactatttttgaaataaaatatttttgggcccggcgaccgtgggaactgaatggtgtggtcagaaatgtcacgacattaatggatgaattattttggaggtgtttcggactagtttaaaattttaaaatgtcggtttgatgtattagctagaattactaaaatgcccctagatttttataaagtttaagtttaattagaaaagggcattatgggtatttcatggattagtatttatttgtcttttagtgttaaatgagctgaatttatttaagtgatgttgaataaaagctgattttttctttttgagtgtaaatgatgagaaacttaaaaagtaagataccataagcttcatcctttcctctctcttttcgagcagctagaaccaaccatcaagggaggctttcctcatttttttcattgattttgagcaaattcttgtacctaggctcaatctagaagcaactaaggtaagttctatattttgtttaatgaatttaattggtttttaggttagggtttaattgtttcttggctgtagagtttgtttaggttgagatgttaagtataggtttgattttgaataagttgaagctgaattgaatgtttgtttagggctgcttagcttagattggtttaataatacctaaaattgagttttcttcatttgagaatgtgattttgagcaaattgatgaattgtggtgaattggtgattggaaaatgttatattcgttatatggaatagttttggaaggtttgaacagatttggtgaagaattggttgggttttggaacaacaaaccagaatttctcatttttgcagcagggaaaactagttaaccggtttcacaggcatagtgaaaccggtcaaccggttttgtcagcaagggaaatcctatttgaggcttcgaaaccagttttgttcggggtgtttcctagagcttagaatatgatatttttatgatgtctgagttattttgaaccagtggagagtaagatatgttcggttatgaagttagggttattctaaagtttggaataagttgttaattgagctttgttgtcgtgacataggacccgagatcgtcaagctttgattccacttaagattagcatgtacgctaaaattttgaactgaggtaagaaaattttaatgcaccgttaagtagctaaatatgaattggttataatcgttagtgcctcgaataagatcaagattaacgatatgtatttgtagtgactcgatcttgatcgagattaataatatgtagttgttgtgactcgatggtaattgaggtaatgatgagaaatgatcattattgtttgtgaattgttatgattgagggaagaacacgattatcaccgttgttgtgaatgaattaagaaacggtcattaccgttatgagtaattactcgttgaacccgcggttaggtttcttacttatcgttcgctttatcgggcaacgatagtgacatactcagctcattgataacgagtggtgaggattggaaacggtcattaccgttatgagtaattactcctgaaaccgcggataggtttcttacttatcgtttgctgtatcgggcaatgatagtgacatatgtagctcgtgattaatgagtggtaagagtactttatgaagtaccaaaattgggtggttacgatgttgtgaaatggatcaagtgtgttattatgtgatgagttgtaattgagtacatttctgctatagtgtgattaaatgaatgttatattgcttataaaaaatagtcactttctttgtagagcctcagtgactcacgggaaataagagtaaatgttcataggaatgtaagataggagtgctttatgaagcactgagaatatatggttatgagttggttaaatagtcatttagtataacgataaagatgttgtggttttcttattgtgtaatatatatgtaattggataagtgttaaaaccatatagatgtgtatgatgggcttgcgcgaatcaccaatatatatgtttaaggagacgggaatatctgcagttacaatgcttttgatttaataacttttcttgctgagtctctatgactcacaggtgctttttggtgcaggtaagaagtatagcaaatatgtttagccatgagcctgaggtcatctagcagtgtacatatacccatgttgtcttggctttcgagaagcaggatcaacccttttctatgattggatgtataacctattcttgttttaacgattttgtaattagttgtaa

SEQ ID NO: 116977 - DNA, 4257 bp, Cannabis sativa
taatttacaatataaaaaataatactcaaataatctattttatatgtatataaaataaaatagtcacgcgtgcaccatattatttgaacgcaattttcggcgtgttaaacttttttgaatttcttaaaattttgtagaataccttaaataattataatttacatgattataaaaaaaaattaactaaaaaattgtttcaaatattaaaatagatatatatatatagatatatcgatatatctcttttaaggaagtgaattatcaaattttcttaatttttttttcttcaaaaagaactagagataattcaccttacaaaaatttgatatttggattaagacacaaatcttacaatagcaagtaacttttaacatgttacattttcgtttacaattcaagcctaatgaatttttttattggtagtttttttctaacctcacaaaattataagtaaattttattattaaaaaaattaaattaatttttaaaattactgctaatattttttttacattatattacattaatttaaataattattttaattttattttgatatattttttaaaaaatcatgtataattgtatctatttttgtcataatattccaaatatattttatttttattttattggtaactttcttaggaaaatttacataaagaatacaaaaattcaaaaatattagccctatacttacaatgctactccattatactaccttcacatactatctattttccttccttttctattttttttttcagtttcattttatttttcattgtagctttctctttaaaaacttcttctagagtcaaaactattttttacccaaaaaaactaatttcatctatcttcctcaactgccttcctccatcacctgtccacatttttccaatttttttcttcttttttctattatataaatggtcattacttggtctttatcttccccatcgccattggtgaaaaaacctttaaaaataggtgttaaatctcttgccaaaaaaattaaaagaaaacaacctgttattgaagacgatgattcagactttgcttcgcctaccaaaaaaagtgattatcacactgttaagaaaaaattaaaagttaatgttgttgaaaatatttctgtccctaaaattaagaaagtgaagaatcaagttgatgagaggccgaatgtttctttctagtttctttatagtttgccctaacactaccctaacttttcttattactagtttctttagggggcgaaaattctatttattttatttttaaatatctctaaggattatgttttttttaatacaaaagtactgattattttttattttttaaatgactgattaattgtactaccgagtgtgtggtctagttggctagaatgctttacaaaatattcctcatttgattgtttatcagagttcgagtccccatggtaacacttaccttgggccttaaaaaattgcgctattttagttataaaaaacttttgaagattcaagagaatagtcaatgtaataagaaaaaatttgaaacttcacattaatgtatcaaatatgatgttgataatgctttatgtttttgttaatattttggataatgagttgctcattgcaaagaaagagacgttgttggttgttgttgtgttgttgatgaccatgttcacacaatggataccttatgaaggttcttttaattttacttgtatgtagaagaataggcttggatcgtcatttatcttcaacggttggtatcattctttcactcagtatttcagttgcagttgagtattttcttggttgcattccagtacctgtttcaacttgtatactaattcttcatatttccaatctattgaaatgcattagccagtagcttcataatttatataattcgtttcttgatcaaactattcattgcaaaatatgagaaatagaattgcgtatttttcttgacaatttgaaaatttaagcattgtaagtcaactatgtgataactgtcatgaaactgtaatgcaatagatatatttgctgcgagacaactaagattaaaccttaaaacaactaatataatgcccttatgtaatacatacaaaacttaccacaattgagttttctctgtacaagtcgtatattgccaattctgagccatatttttttaaaataataatattgtagtagcacaacaactattattcaactaatatacaacttaaatgcaactagaaatagaaaatgtaaatgagcattatcatgaaaaatttgttagtatttttttttttttttttgtcattgatcaacaatcaattgtctaaattttttgggacagttttgtcccatgtggcttgggataagaaattctgcaggtcatggtttggcaaagtatgcccttcggttagacgatgagctatcctggttcaaggaggtggagccaccgattatggattgtcactttgttaatcatgtgtgattttaatcaccgcgtcaaaaaaaattgtaccttaataataatattatgtggagaaacaactgttagaacatgtaaaccaactttataataactaaatgaatatatcaataaaactaaccatgttataatttttttttaaacagctttgtgttagattgtcgatatgaaacacttgcaaatatcataaaaactattgtatcgttatcagtttgtaaacattgatatgtctagtttgagagcattagtaaaatattaatgcaactgcaatgcaactacatagaaacttaaaaactataataatatttctatgtatgtggctttagataaatttaatttttttttttctattcgtgttgtcatgaataaatccaccattgaaaatttaaaaaacaacgttaatgtaacgggagaaatattagctagtgtattgatacattttttttatacctgatttgaattggtcaagaactctaggtctatttcagacagatccacattttatgaatttaaaattgatattaggaggattaattttctttaattttaatcgtaattcagggttaaattttagtttcgaactagtttttctgttcgatttttcataaatccaaaattatgtgtttagatttcttacggttttcttctcatgtaaagtcaccggaatttatggtgattcttcgtctggcttggtttctttacggttggcctactagtttgcttgctggaagctgttgttgttaaagaatgtggttcgtgcggctgaatggttagaacaagaggtatttttcgtatatttttattgttgggcttataaatgtttatagggctggtctaatgtatttgtgtaatacttttgttattttaatatatacatgaaaaaaattattttaaaaataaaaattattaatatacagtgtctttattaatttaaaatataattaaaactctgatttttatattaatcataaaagtgtgtcaaattgtatattgtttaaaaaattatattgtaattagtataatttaatattaaaattatatttttagtgtaaccatcataatgttggtacttgtgctaaatggaagtggaagtgtaagtgtaagtgtaactctttttttttttagtttagcgtagtggtattttacaatcatttaatagcttaatagcttcaaggtcctaggttcgaacccatgacctctccttttttcccatccctccctccctcaccactaactcttacactatattattaattcctacaattttttttaatattttaattgatactaaatttcataaataggtaagttaaatactagtatattaaaaattaaattaaataggaaatttgatataaatgtattttttaaaataaaaaagaaaataagcactactcgtaacaaaatgaaaaatagcaagcggagtttgacgaaacgagcccctaccagagaaattgcacgttcttgtataggattccaaccctgtgcacccctaaactacaagctttgaaactcctacttttttatgggatatttaaagattttttacaaacctttctataatataaggttatctgatagtctttgtatgcttttgcgcatcttttccttgacactattcgtaaggttttcaaaaggtagtttacttgcttacttgttaaaggaaggtcttgaagagtatgattaaattaatagtttaaggccattcaaaaaaaaaaaaaaatttatgatttagggtcatttgctatttttttttgaaatgaggacataaactaacatagtcct

SEQ ID NO: 116978 - DNA, 1095 bp, Cannabis sativa
atttattagagtttgtatttttttattagtgtataataaattaaattttttttagtgatatataagcgaccattgctattaagtatcaatagtgcttagcaccttcttgatatatcgtattgtgatcgggtaacgataattcttaaaaattattatattaaattatatgagattcaatacttaattgtactaaataagtggtgtcctttaatatttgtctgtataagtcctagcattacttattcagtatatataggtgaagaagtcattaatgcatggaaagaactagatacctattttatttaattaatttggggtggaattggtcatgtgatgtgcatatgttttcgttatgtcaaaatttgcgacttccacttgatcatgatttctactttgtgaggacatttattatcttgtctctgaaaataaataaataaattgccgaagacaatggacaagataattccaaaattaaaaataataataaagaaaaaacatgggttctagagagaagaaaatagggatgggaaagaagaatacacacatgtcttggaacttgtgacaataaagacctctacgtctttgtttttcaaaaattaattagaaaattaaatatctcttcttttcattttgttttacttttctatgttttttcattaaatgaagaatttactaattaaaacggagcacatacacaaactatatatagcaccttataatctaaacttctaaactgcagataatattacaaataaaatcaaaacttgttggtaatctcttgcagactttcctcttaaccacaagtaaatctagtatttaatgctactctaatcaatctatctacttaacaaatcataaatattttttttctcaaaaatataagttcaccaaataaagtatactgctgtttgcacaagcagctgcaacaaccttataaatcaagttgcgatatctttcgtatttaaacacagcaactaattgcaaccccagtaagtaagggtgggcatccgattcaatccaatctttttttcttcatctgatccaatccaattagtaattggatttgaaaaatcatcatccgatccaatccaatta

SEQ ID NO: 116979 - DNA, 1056 bp, Cannabis sativa
ttgaacccttcgtctgatgcaaccttcggccaaccaccctgcaaccatcgcctgattgaaaccttcatctgatataaccactgcgcaaccacgcaacaaccaccctataactattgtctgattatgtaagtgatattttggtaattaaaatcatataaaatgtataaatgttgtccacacattataaatgtatttttgtaaataaagtttcaatttatatttgttattatttaaacaacttaaactgttatttataagaatttttttattagtatgctataaaatataaaataatactataataatactataaatttatattacaaatctttatacataaagatataccattttgaaaataataattacgtaataaatgatccaatattgaattcattcctaattatttttttataggagaaatgttaaaaggtaacagtagtgcctagcactttctatgagttaatatcactattggtccaattaagtatcgggtcccttgtaatttaatatattaacttttaaaaagtattgctagtcacaacgcgacatatcgaaaaagttttagatactactaatgcctaataccaatactctttttatatatcaccagtttctaaaatctatatttgttaatgacaattattttatgacgatatattgatattattaattgtaaaatcacttaatatataaacaatatcataaaatgtaattaaaacttggtatatcattttctctatcaatattaaatcaaaaaaacacaaactatactaaaagaacaaagttaatattgtattaaaagtgtcaaattcataattaaataaaatagtacaaaattttgttatgttataaactgttatggacaaaatatgttgattatccataaactattatatttatttacatataaacaggggcggagctactgccaactcaaggaatacgtgtatatttataaaataaaatacagatataaataaaaaaataataataagtaaacatttaaaatatctattactaattaatatatatagtattaattaagtgtttaat

SEQ ID NO: 116980 - DNA, 901 bp, Cannabis sativa
tactaattagccaaataacaataaaactctataaccagacaatttaatgaaaaaataggtaatttgaataaaattgtaaaacaattcatgtaataatatcaagacttaaaatacttatctgtcaaatctcaaaagtcatttgcagaagtcatgaataccaaatgaaatctttctcttacctattgatcatactacaaatctaccctaaacaattaggggcacaccataatgatggcacaaaaactataaaaggcatccaaaccatcaaaaaatagtgcaaaaacaaagttaattaaatattaataaaagtatcaaaacaaaataaatatttgaagaaaatataaataatctcaaaaatttaaattgtaaaaacaattattgctaataatctctaagtgagtaatgagaggactgacttaatcaaaatatataatttacacctaaatgaatgcccaaatgaaaaaacataatacataagaattaaaaccaaacaaaaaatatttatcaataaacctaaaacaaaaataaaatctttaattaaaaagaaagaaaaaaaattgagtaaaacctttaattaaaagaaaacaaacaaaaatatttgaattaatatatttttttaatatttatcaaaaatattagaacgaaaaaataaaatctttaattaaaataaattctctcatttaaacattaaaacgaccacattacaaaattacataaaacataataataaatccccacataactgtattaaacactcaaataccaaaaatgaaaattattaattaagatacaatttaaatgattattaaaaaattgattaaatatatatatatatattatgaaatattagtattatgtaatattataatttagagaaagaaaatagagaagagatgagaat

SEQ ID NO: 116981 - DNA, 642 bp, Cannabis sativa
ttctaacttgtggtatcaagagcatccctaaattagttcttgagaatttatggtagttttgatctttcattaaattttatttgcatttggaatattcgattaagtattaatgtcaatatatatatatttcattatcgtttatggtggtatggtgtcgatatatatactttgtgtgtatatatatggtgtcgacaaaataaatggttttttgtttgatcatctaatggtttatgcggaatatatatattttttttagttgtgatcgctagattactgtgcaaatatgtgtgtgccgttcaaattgtgttctgcgtaaagtatatatgcgatgaaagatattcatgcgattatgttttagagtttgaagtcatataatctaaataattaagcttttattcaagcctgacttcattcgtaatactattattaatatcagtaagattatttttcagtatatgtgtatatatgatatcgtacatatttatttaaaatatttgtgtattgtgttttcatatatatgcataattataattatgttcaagaacaattaattcaaattttggtttagaatttattaaggatatctaatatttaattaaattaattgaaacaaaatatcaccaaagtgatctcttttgtgta

SEQ ID NO: 116982 - DNA, 1622 bp, Cannabis sativa
aaaaaaaaaaaaaaaaagagaacgtgtagttcattctattgtacaagaaggctcgatgcataatcttcggggaacatgggaacttcatacatattatcaaaaggagtaccctgattgttaaggataggagatatatgtctagcatccaaatacttacaaaactatacttggatctcaatctttaacatctccacattcctactgaattggttgcaaaggagatgcatgtttttatcatgctcgataaggacacacctcatctcagcatcctttctggaaaagacagttgacgcctgcagtagtttatatctaagaaagagtgttctcgaagatagctcctcaacacgaccagctaggctgtccagttgacgtaaatgatcatgacacttcatgtcccttcctcaattaacatcctttgagttattggaaagagagtctaaacaacgtactttatttcgcaaattgttaaggcacgaaagagcattaggaggaagttctttagttcactaatgggacttgtgttgtgtgaaaagtgaggagataaattgtgacctccaaaagacatgcccaaggattaatattcaaaataataataataataataaaaaaaaagagatagcatggaaaaagagatacatgaaagtaaaaaaagaagagtgataatttataggcatgtgagcttcctccccaaatctccacgtagcaaaaaataaaaagatgagtaatcattttttaacagtaaaattgaagtgatgcatggaagtaaaagaatagtgtgataatctatagacatgtagtaaaaaaatgaaagaatgagtattcaactttgaatagtataattatttatgcgaagaaaaagcattgagcattttttttttaaacacaaacaagatagctaatgttgatgagtaaaaagagagaaagagattgtgtgtaataaaataaaataataacatcaaaagaagtaaaatagtaaataaatgtacataaaaacatgaatggtagccacacaaaatctaatatgaatatacatttgggtttaggtgtgaatgcataaatataaaagcagctcgcacttgattttttttttacgaagataaggttcaccttaaggaggcacgacacactacttttatatataaatacattcacccaagctaacagacaaagttaaaggaagagggaaaaaaaaagatgtctagtcccatcaaacttgtcttattaatcttcaaagaatgatcctttctttctcttcctctacacaggctgcttgtaagcctcaaaacataacagcatgcttgtatgcaagctaccaacttcatctgaattcattgaaacttccacctcaaattcttcaaaaagacaaacttcaaactagtcatgtgcttacatgcacactctttgtttactttgtcttttcttttcttcttcattttatttctctctacacaaccaaaattacagtaataatgtttctattcactaacatacctaactatttacacaccaattcatttattaataaaacataactgttgaccgaggttttcagcaaccaataaaataataataattaagagagctttaaggaattaagagagaggtttttacgtggttggggc

SEQ ID NO: 116983 - DNA, 1811 bp, Cannabis sativa
aaaaaaaaaaaaactttagaaattatgaaatgtggcctatatttttgatattatgataaattataggcattgttctttactcttaagcaaggctttcccgtctttctttaatttttaaagttttagagcatatttcttcttaatttttagaattggaaacaagtttttttaaaacattttcaaaatataattgcttttaactcattttgtaaatattttgcaactaatttactatttttaaaattttttgtattttcatttaactttttcaaattaagtatataactaagtatacgtgcattgcacgtaccttctgcttagtataattaaaagtattatgattttgtttaataaattctcggtaatatttttattacaatgcactaatatacctaatttaaaatgaactaaaaataataattaagaagtgttacaatatttacaaaaaaaaaaattgaagttcttgtgtattgtggttataaacataatttttaagtagtacttatatctatgattttttcctctccagaccataatgtaaataaaataataaaattcatatatgtaaaccgaaagataaacataataaaattgatctctagttggtacatttatgagtatttttatgggaaacttacaaaaatattgaaatttaggttaaattttataaaaatactgtcacacggaatttttttttaaaaatattgtgttttataaaacaccagtaaaacacaaagcagaacaactcaaaacaacaatagaacaactaaaatacaccagtagaataccagtaaaacttaacacaatatactgccgtatgaaacttataaaaaaaacacaataaaaaaataaaaaataccacccgataatatttttgtaaaaaaatggcagaagttagtataccatgtaaaattccctatttttattaggcaacaatattatttaataactccacgaaatacttattatgtgactaataattctcttcatataataattattaaattaaaatattttaaaattgataaatatgaaattataccaatactctctcttttttttaaaaaaaaaattgtaccaataataattatcattttataatggtgtgaactgtgaacaccactaccttttatcaattctgtaaatttaaagtacctaaattttttaccattaattgatgtataccattacttattaccatttatttattataataaggtatgtaatttcataagaaatttataagtttgtgccagtaacaattatcattttgccactcaatacctatgaattttctaaatttaaggtacctaaattggttgccaatattattaacctaaacccatttatattaaggtacataattcataggaaattcattagcattagcaagatattgtatatagtatatactacaccgtgttctttatataggtacgttgggttcattttgactgtaactttttttggttacagtattataaatattttgaaatttttgaggcacttcattaatttttttatgagaaaagaaccatgtacattttagaagaattttaaatggtttaccgtgtctaaattaaattacaaataattaatttcatgccattttatatatttttgtgaaaggcttgtgatgactacaataaatagttctttctaaaaaaaatgaaaataaaattatttaggtgcttcaataaagaaacgtatatatatactggatgagagttacgtggcaagccacgtaaatattagttttattttaaattcttgtgtttttgtttaagaatttagtgactaattgtaaatta

SEQ ID NO: 116984 - DNA, 1729 bp, Cannabis sativa
  modified_base (413)..(427): a, c, t, g, unknown or other
tctctctctctctctctaatattcaaataacaccattaccaccacctctatgcccattgccatcaccccatcaccaccaccatcaccattaaaatattgacatccacaccactgcataacaaccattacaaatcaacacccaaacataaaatatcaaatcagacacttaatagaaatttaccaaatttgaaaaagaaaaaaaaaattaccaacccatatgacaaatattgtcaaacccaaatctaaaattaatttacaaactcagctctgaaaaaatttttgccaaactcataggttcagggttttcaaggtttgggttttggaaaagagatccgaggtccaactgaggtgagaggagaagagaggagatcgagagagatgaacaaacaagaaaaaaaaaaagaaaaagaaannnnnnnnnnnnnnnaaaaagaaaaaaaaaagaatttttctttttcagatttttgtttttatttttgaatgaaaaaaaaaaaaaactgaaaagaaaaaaaatgatttttttaatttataattgttttaatttcaaattattatttttaaataattttatatgtggactaataaaattttgtcatgtatacactgtgtccacgtagatgaacacatggacagtccaacatggcacttagcacctaaaatagataaaaactgtaaattgctaacgatttactagttttgggaggtttaccgctaaaatttgagttttggagattaagtgcaaataaagtgaaagtatttgaagttatgccccaatcaactaaaaaaagcaaagcaaatgtattctttacttattaattttaatattttaatgtactttatgtatttttttttttaaaacagaatgtatttttatgtaaatatataataattacaaaatatattatcacatgacctacccaacttatcagttactgtggctgccacgtaagaataagtggccttagagtcaaacaaaatagagtaataagagttgttgaccaagagctgacatgtaacaactgaagggttagcttccgcatcagtctgagtaagagcaaaaacccttactagagcaagttttgcctttacttctgttcttcctttattaactatggacaatctcttttatagtgtccagttacaccttattagaaacatcctcgacctttacactcgtccagataatgcttcttgcaattagggcattctgggtaagtgtattgattcttagacccaccctgacggttaccatgatcttggttccctcggaacctttttattttgacttgagccaccagacgcaggtggaacttttatcttttgatcactggttgagtcactaccacccctaccataaccagaggtaggaggaccagtggctccactaataatctgagtccatcgggactcctgaatacactcaactacacccacagctcgtagtgcttttcccaccatatcagcatataagtggtggcattatcagtcgtaaccatcaggtcgtgtctaatcttaggattcaacccatctagatacttctctttcttagtaaagttagttggcgctattcctgagaccaacctagcaagtctaccaaactatgtcgtatactctataactgacatattctccttagggctgaacattttgagcgggtttgacccgaacccgagcaacccgcccgaacccgaactggtgaacccacaaaaaaaaattttaaaagtttcgg

SEQ ID NO: 116985 - DNA, 1273 bp, Cannabis sativa
aaagatgtagtgatgtacctgtgtttttttcttttaattttgttaaattatattttcttaacttaattttagtaaaataattttttaataatttgatgaagtaattttagatttttatcgaactataatttcacttaagaaatattttgtaaatggccacaaacaaatttagcttctctggttattttattggcaaaacgataatttgcttgttagtcttggagacaagataacaatttctatggagcacccttttgagttttggagaatgattttaaaatagttatcaaagctctaaaagggaacttgctttaaatgaggtacatatattaatgtaatagattctctaatttactttgagttgtaatttttttactcttaaaatttataattttacggctcataatatgactaaattagcgtatgctcagaactttattgtacggttgagttatcaaccatactgaaaatcattattttgtaatgactttgagctctaattttctttttataaaccatttttttttaaaaaaaaaaactatgacttcaaatttagttatattaaaacattatttgatggaaaaactaaatttagagtgtcaatttaatccattttataaacacataatttaaattttcatttaacacaacacaagaattaatcacatataatcacgttaaactcaatacaccaattaatttttttcaaatatatattaactcaatacttaaagaggcgttaagttagattaaagagcaaggttggtcgaagataatactagttgattctcataagcagtatcacaaacagagaaagagagaaagaaggaaagggaaaacaagtgatcttttcatttttatgaaaggagatacaagcaacatatatatactgaagagagagcccataagagagctgaaacaacctaacagaaaagcctaacaaccttaactaactctgacagttagttgcttaatcacagctatcactaacttcctcaacatgccccctcaaggtgttcgggaagtattccatggacaacttgctacacagaaaattaaatttaggaaatgtgagggcttttgtgaacatatctgcaggctgctcttcagaaggtatataagaaacttcgatttgcttgtttaaaacaagatcacgaacatagtgcacatccacttctatgtgctttgttctagagtgaaaaacaggattagaggcaagcatttgagctccctgattgtcacaccaaagtttaggcttttgaggcaaagtgag

SEQ ID NO: 116986 - DNA, 3257 bp, Cannabis sativa
aaattgattggatcagatcggatggtaaaatctaacatccaatatatgattagatcagatctggataggcctaaaaatattagatgtgatccaatgaacacccctaggggtaggattagtcccctccacaacctttgttgcttgtctaactttgtcgtgattatgtgcattgtctactactgccttatactagatgaaatgattgtgttttgtagttcctccgttggacaagacctttgccatgatggacttgattgatgttggccccgaggaacgtgtcgcgacaccgactgcagctgccccaaactttgtggtgacctcaggaggactcgctaaggttagtttaaaggactttgaggtgtttgtgcttgaggagggggagataaccccgttgatttctaagagaggaaagaggaaagagagggctctttcagagtcttcttcaaagagggccaaaactatcaagactccctctcagggtactcacaagcattccttccaaagttgggaaattcccaagtgtacccccaatctcattgactatgatccttctggacccaaaacatgcttcgcttcatctggcctagtacaactttgtcgtggacgcgcaaactaaagggtctgcggaggctgatgtcctaaagcattggataattgaacatcatgatgcaactctctacgggcagtatactagggaagtattgactttgaacttggacctcatgattgattggttctccaactatgttgggtcttctggctctgttttcctctaagatcgtgagcaactttgcagctgagttagttcagctacttgtgaataggtttaatgcatgtgcttcaacgaatactgtctatcaagctcaggatttgagtttgataatggcctcaatgagtcatgtttatctaccttacctttttactcattttttggcgttttcatggatgtttacacatttttcctattttttagactggtagtctttcgaagaacttgatagatcagagatgcaacaactacaggatcttaaggggcagaggagacactgatggagttgagaaaggctaagaaagaagtggaagacctgaaggacaacgtcctagctgataggaccctaagggaaagggatgcaaagagagtcactgattcggagaaccatttgaaagggtactaggactgccaagtacaactgttaacgactaaacaagttggtctttagaaggatacatatctattcaaaatcaagttggagatcgagaccctccaagccaactgacatgcaaaagcttcatgaggtggaccttgagtccaatgccaaaatgtcagttgagctgaaagagttgcgcttgatccgagactccaacaagttagtgatgaggtcttagcgaagcgacccccaactcatcaaaatattttctattcaatggcccataggagtcaagccattttgcatattccatcacctcacttccatcttgctcattcacatcctcttcagttaaacttacttctaacgaatcctctatcaacttcttcttgtccactattgtgtccgtgagatcagctgaaaaattattatcactagcctttcggtaagtcattgccttaagaacattgaaaaccacctcttccccttgcaccattagcttcaactcgccttcctgaacatctatatgcttggcttgttgccaagaatggtctcctaaggataatgggtacgtttctatccttttctatgtcaagaataatgaagttttctagaaaaataaacttatctactttgacaagaacatctttgataaccccccttggatgagccaacgagcggtcagctatttgcaaggttacacttgtaggctttgcatctctaaatttcaatcttctaaacactgataacgacatcaagttgatactttctcctaaatcataaaaagcattcatcctttctatccttccaatattacatggtatggtaaaactcctaggatctctgagtttgggagggagtttcttctgcaatatcgcaccacactctcaagttaatgccactatcttgtaatcctccctttttttcttcttggacagcatttccttcatgaacttgacatagcttagcattttttccaaagcctccgcaaatgggatgttaatgtgcagcttattgaatacttacagaaattttgaaaactgcttgtccatgatggtcttgcagaaccgctacggataaggaatttttacatggtgctctatgctgacaggtggtgaagcttcttttaatgtaagactctcagtagtcttcttctcttctaatgtctgtgcctattgatcatgaaccacttcttccacttgttgtttctcactaggcccctcatactttttctcacttctcaaagtaattgccttacacttttcctttgggttcacctctagtgttaggcaagttaccttgagggcgagtagccattggagtagccaattaccccatctgagtttctaaggctttaatggatggtctagtctctgtcatgaactgaagtaacaaatctgtttgaagattagaccctccactagaaccttgttattatgactgttgttgattttgttggggatgatttctctgttggtagaacccctgttgctgctgattagaagactgcccttgaaaatactgacgacgaccccctccttggttgtccccatagttattgttttgagaatagtttccaatggctttagcttgatccattggcaaactgttcacatacaccgggcatgtgtcaagtgtgagcccccccacatagctcacaagtaacttgagcctgggtacctgagcagtcatcaacttagtcagggcctccacttggactttcaacttagttatggaatcaacttcgtgcatacccgcgactttcttctattggcttctctcagttggccattgttagttgttcatgtccatctcttcaagtagttcataagcctcgtttgtactttttctcataaaagccccatgacatctatgatggttcgggtattaccaactaactcgttgtcgaaattatggaccaacgtccacttctcgatcccatgatgtggacattttctaatgagatccttgaacctctcccaagcctcatagagaaattcgttgtcgagttgacaaaaattattaatctccccttgcagcttgacaactttagttggaggaaagaactttgataagaatttcattgccaagtcagtccatgtatcaatg

SEQ ID NO: 116987 - DNA, 1442 bp, Cannabis sativa
  modified_base (1390)..(1405): a, c, t, g, unknown or other
acatattacaaatattgattccgattatttttcatttattccgttacatttctccattaatttattccgattctgattactgtatagtaaacgcgccattaattggttgcagaagctttcaactgcattaatcgaaaggagtaaagaaaagagagattcactaaaaatatttaaaaactctattaaataataaagactctcgtgcactacgactcataaattaatgtttgaactacgtaaaagtcgcctgcattaatgctttcagatgctctcctcattatattatttagttggttaccgaaaatctcggtcaacaattattattattaattattaattattattattatatattattacacacaagtctttttttccatgttagaaattatattataataaataaacgcaatttgattttaactaattaattaaataaaagcaacttggttttagttattaagtgaagaaaaagtttataataaaatattagccatactacgtcaaaacaataaggtgcttggtgtcattattcaattttcaaaatttatgcaagtttaatatataattaatattaaattaaaaaagtaataatatgaacaaatacaaattaaaactatattatttttgcctcctcaattttagctaatctatattataaaggggtttttttatttttacacttctaaacaatttttttttgtatttttacaaaattttatatagaaactcatattaaatgcaactagcgctgcaacttaaattgcaacaaaaaatggtacagaaactcctattgcaactagcgctgcatcctaaattgcaataaaaaatcgtacagaaaccactattacaactagcgctgtaaccattttagatacttaaagcgtaaatttaaaaaaaaaaaaattatatatatataaagtaattctcctattataaatcattttattttataatattacacacacttataccagattatagtaaatgtaatttttatagtctataaaacatataattaccattaatcatggcctttatatacatactatatattatatatataataagatcattatattaactgtatatacattaattttctttattattatattaaacaaaaacacacaaaactcgtttctttgtcttgatgtctttggagtgttcctttcgttactacaaaaatcatgttattattaagataaagatttgattaattaattaattaattaataataatctcaccaaggatatgattacgccatagaaaggcatctctcaaccaatcaccatttgccacctttttcctttattaaatctccaattaagctttccttaattaatttgttctccaatcttttaggcctcgtttggaacgccgtattannnnnnnnnnnnnnnnattgtattatattatattgaattgtattttatgcaat

SEQ ID NO: 116988 - DNA, 2838 bp, Cannabis sativa
  modified_base (2601)..(2605): a, c, t, g, unknown or other
tatcttacaaatattagttattatttgtttagaattttttttttaaccaaatgtaagcataaaaaatcaaatttcccttttgaaatagacaaaatgctaacttaccttctttgtccaaaataaaaactagtatacctttagttactttaaggctagttgaaagacaaccaacattagtggtgaacaaaaaaaatgtaaaaatggtacttttaggaagaataaattacaaagagaagcatttgagaatttttttgtggtaggttaagataaaatttgagggtagttcataaaacatctagaagctagaatagttaaagaaactaaaactaagataggttaggtttgatattttataaagttgcaagcttttgcaatattttttagtagtagtagtagtagtgggttgcctatgtcttaaaatttttattaatttatattttggcttggtcggtcgaataataattagaataagtttagcatttatgagaagtcccgtgacacaatgtccactcttttcataaagatccatagagtcattagtcatagactatgctttactacaaatctgataaaaataaaaaataaaaaatgtttggataatggttgttgtggtatgtgcatatcaaggtaaatggagcaagtgggcagtcgacacgtggtcctatggctgtcgtttgtttcatctttggcgttgaatgaggaaattaataaaggaaaacgacaaaatgatgtgcaaacagtaaatgcaagtaaatgtttttgtcctttggtgctgttgagtaaagacaagactgaatctctcaaaatcaaattacggaccaaaactaactttgtaactttactatctctaatttttcacttatgaatggccactgtcaattccatttactatacgttgtcgtttcactgaccactcgtttaaacaaaaaaaattaagtttgctttatttacatcccttcaaataaatcaactttttaagttgtaacaacataactaaagacttaaatagtaaatcattgtaatattttttcattaagtacaaaaaaatttcaaccctattttcatttgaaataaacacaaaaatagtgtaaatttgtacgtgtcgtgttagtccgacgcgtatttattcgtgttttttaaaaaataacttgtattgtatcgtgcagaaaaatataaatcgtgtcatatcgtgctaatatttttaaagggtagatttagcatgacacgtaaatctaatattttcgcgccgtgctcagattcgtgccatgctttgctcgtgtcgactcgtattttttaaaatttttcatatttgggcttaagttcgtgctttacttttttattttttttttacaattattaaattatatattttaaaattttaattttattaataatattttacatataatcatataaaaattattaacattattggaatttaaatatttacttaaatacttaaatttttatatcacatataataaataaattaatatataatcttaatttttcatattttaacagttttacttataaattataatattaataagttttattattattttaatttatttataattgataaaatcatattattattattattattaataataaattataagattttttaatgtgttgtgtcatatttttcgggcttatcgtgtgacgtacttttcgggctagtctatttgtgcttacatgtcatgcctttcgtgcttctcgtaccgatcgtgcttaaagacatatttttcatgtcgtatcgtgtcaatttgtagcatcgtattttgtcgtgcctaaacccgtattttttcgtgcctaattgtgctcgtgccttctgagctcgtgctaattttgtgtcgtgtcaaaaaattcaacccgtatttacaacactatatggaagacattaaatagagaaaaatttcttatttatttatttttgtctaaagaaactccatctctttcacacaaactctcatcgaagcatcttttttcttttttttttcttttgtaactttgcaagttcaactggtaaatgatttgcttactaccttttgttttattattttgtgttatttatctttaccatgtctaatttctatatttctttaattggtttataattttatattaatgttaaatttctacacattattaaatgtaaaattttctaataatatttctctttaagatgatatttattttatccatgtaggactttataacattatcaatatcaaactctttaataagatttttttaaatagtaactattttatttagttatcaattttaaacgattcgatcacaaatgactcatttttagctcatcattcccaatcacaaataatttttttagctctattttttgaattttaattggatagaatctgaaaatatggttaaaaaataggatgtgatggttaaaaacaattagcaattaagcaaaatatatcttacgatcttaattataaaatgattagggccggccctaggtataggcgggctaggcccgcgtctagggcccactcattttagaggcccaaatataaaaaaatacttcttaaaaaatatacatattttttaataatttttaannnnnccatttatctttatagtaaaggctcaatttttttttttttttttgcctatgacccattcaactcagggccgaaatgatattaagtttttacacatcatacatgcatgtacacagtgagagacacacacataaagttgtaggggctatagctcccagtaaaaaaaaattacattaaaaaaattaaatatttttctttttatttaaaaattatagcacaaaaaattaaaaaaaaa

SEQ ID NO: 116989 - DNA, 1680 bp, Cannabis sativa
aaagtacaaaagatgattccatagtgaacataccatgcaatccctttggagaaagatcctggagaatagaaccacactctgtcacaaagcccacagcaacttcaacgctgtcgtcagttgggttctcaagaagcacagtgagcaattctaaagcaataatttcgtgtgccacttgttgatttaccagatgtgctataaacttaacagcagctagtaattgtggctgaaaacaaaatacatccaattgaaaatgagaatacaataaaaatcaacgtgaacatatactaatactgtctatagttgattaaaaagaaaaaaaggaaacaaactctaccttgtcattacgcttatatgctcgtttgagctgcaatactatccttcttaataaaagatcaccaacctcacgaaacttggtgttgacaacagcaaccaaagcagcaaagacatctgtaaatcctggagatgccatttgcgacttcatacaagatcggcagaacaaacccctgcccctgatcagattctctgcgaaaagttccggaataatgttttttatatttgtagcattgaccttattcacaagcccgtttatactcttccggagggcatcccaagttaatcgctggtattcaacactacttttatcgtcaacttctttcaacatcctagccaacttgaatggaggaatgtaaactccaccactcttaccaaaatttgatgtatccattgttggattgctttcggttgcagaatgcccctgaggtttaggcttttcaagtgccctaccagcttcaaattgttcttttacactctctttttccctatgagtttttaagtcatcatctttggttctgtgtccactctgcttttcatcacctttccagtccctttttctctctgatgttttgcgatactctctatcagaatcatcatctgaatagcgacgagaatacctatcccgatttctacgaccattatcatgccgatgggtcttctccccaccccgatgatcccttctcctacgtctatcatcttcttcagtaccttgatcgaattctctcacatcaactatctctccaggctctcgctctctgttcctcttatcatgttgacgaattttatccttttctagctgaccaacttttttatctgtctcaagttcaccatcaattctccttgagacctttccgtcttcttcatcacttggcctccatcgacctctatccttagcccccacatcagccacattttccctatcaccgtcactactacctcgctgatctcttatagtcttactcctcctgtcagaatcggaggaatcagtttccttgcgacgactgtaagattttgaatcccttctactaccacgacgatggctacttctgtctctctgatttttcagatcgtcatcatcactagattcactgctgtatttcctcgccatagcaatctaaaatcaaaattcacttgagggtattctcttcatacccaattcctggacacccaacaatccaaattttttgtcctgcaacacaaccaaaaaaccaggttcgtgaaggttaacttgaaccatttcccacagtataaggttcatttagatgatgaaatcagactctataatgaagattcggcataagaaaaataactaagactaaaattaaacttaatagtgaaactctccaa

SEQ ID NO: 116990 - DNA, 1680 bp, Cannabis sativa
cccaacgcggtggttaggaacttgacagcagcgacatcgaaccataggccgattcttcttgatactgagggggagtaaattgcagaagaagccatttcaaatatgagatgatgtggagtcgtgaccctatgtgtttctgggttgttcggaacgcttgggagggtaatcttcatggcaatccaatggtgaaccttcagcgaaagctgaaacgcactaaggagcacctccaagcatggaacaagactcactttagaaaagttgactcccaagttagagaggccactgctgcacttgagaaaatggaaaaatctaatccaactgatgtcgcggggttggatagtcctagaggcgctcttactgaagctcttgcgagggaagaaattttctggagacaaaaatctagagtttcctggctgaaagagggggatagaagcactaaatttttcatggcctccactgtgattagattaaggaggaactttattcagacagttaagaatgacgagggggtgtgggagaggaaccctcagatatcttggagttgtggcgccatgcaagtagctgtaatcggatcatgggacaactaggaaaccaggtacttaggattgtagaagtgggttaattcacggaccaagttcattttctttcctcattgattaatttgatatgaaaagtgtagcactttttagagagattttgcaagttacataaaattgtttctttgttataaagacactcctacccggtgaatattaatacatgtttataattgtcgacttgccatggatctatgatgactcagggaatgcttacaatattttggatttgcaggtaatttattatgacttttaaaatattttatcacttgtctgtcaggttattgttgttattacctttctcctgattcatatacatatacatagcatgtaaagaaatgtgattcttgacactttagacaagtgatctcactctctgtgtcttttgtgggggggtggggtgttggtcttctttaaagtggatttgtgattgtgaatttattattgaaaagaaccaagtgtcttgattagatcgacaatatttatatcatgaagcatatatttcacttaaaactaccacaactatctataatctgacaactattaatcttgatcatgttcactaatatgtaatgaaccataaaagaaatgaatgtaagagatgttcacgttcaataatcttgatcatgttagttttgatatctcagtcttatccattgttacatagaactttaatggttcagttgacttgttttctattttagcatttgcaagtgccaggtaaaacaaattccctgcttattattatagtattaatttgattctttaaaatgttactccatgatatacttttatgtaatattgcataaagtctttgaattctaagaaatgaaagaacattgttgagaagagaatttgtatgaaaatatctattatatgtaatgccaataatcgaatgtgtatttttcgatgcaggggaagataaagatctttctcaatgcatgatacaagttaacaaataattggatcaattggatgagttatttgatactgatagttttcttttgaaaaatacttattaagtggaaggtacattgatcaaatctttagggaaatttgattttctatactttttttttttttt

SEQ ID NO: 116991 - DNA, 1021 bp, Cannabis sativa
  modified_base (953)..(968): a, c, t, g, unknown or other
gtatagctaatatcatttatatataattaggagcttttcgagagtaatattatagttatacacatagttataactatacttgttgatttaatgaactcaaaaattgtacttttaataaactcaaaaaagtataatatatatattgatcgaacttcaatgtatggctcttatttggggtgttctgatctattgattcgggttacaataggatgtgtgagttgtcaacatctttttttctttttcttctttcttctcaacacttctccaatcttttatcaaaagctgttcggtagctatcaaactataaaaataaaaatactgataataataattttgccaaaattaaatgaggtatgggcatttgtatctataaactccttaattatatcttgaaagcaacacgtgataaatttgatagatattttctccatattgttataatatgtgtgtagcaatattatttgattatatggatcgacagagaccaacttacggagtcgtaaagctttaggaaaaccaaaataataattaaataaatggttttaaatatttaaatcatgattttcatttccattattaatggaccctggccaacctttttctgatttgattgtaagttaagtaatgttacgtattattttttcggccttcattttaatttgcaaattatttatgtcactaaactattaatgttttctttatttgtacataacaaatatttttgtaacaccatatatggatcttcttatacttttacaataaaaagacattaagcaaatttataaatgaagaaacatatgttaataaagaatatcactcacgtaccaagtagctagcaagtactctaataaaatgttcggacgtgttgggcctcattcatccagtttgttgggccacatgcacacattaactcacacactaatataggggaacttacaaaaatactggaattnnnnnnnnnnnnnnnnaaaatactgtcacacggaaattttttcaaatatactgtgtttttataaaacac

SEQ ID NO: 116992 - DNA, 1973 bp, Cannabis sativa
  modified_base (37)..(58): a, c, t, g, unknown or other
cgctcttccgatctaggttgttaatccaacatacttnnnnnnnnnnnnnnnnnnnnnnaaaataatttccaacaataactggattgaagctgaaactgccttccctcgatgccaaccatcctcaatcgaatccaccaaatcctggatccccatgctactaccaacaagggggtttattgccctcgaatcaacaacaatatgatcaccacacgaccatttatggaaccatattttcacatccgaatcttggcccaccacctaaacacaattctccctaataaaatcctgcgtagaccaaatccctctagccaccgcagaggcatttccaggaagactcgacgagagaaaacgattgaatttgcagtacttagagccgagaacatgcgtccagagggccttagagtccgtttccaacaaccaaccaagtttggcaatcaagctgaaattaacatctctggcccgcctaaacccaagacccccacattgcttaggcttacataatgaatcccaagctttcaaggccagaaaacggccctccttgctctgttccatccaccaaaagcgtctcaggaccgcgtcaatttggttggtaattcttcgcgggaggatgaaaaccaacatactatatatcgggatagaggcaaggacacttttgattagcgttcctctagcagcttgagataaaagacgagctctccaaccttcaagtctacccgagatcttgtcaagaataaaatcaaaatcgctgctccgattgcctttgaaaaagagcggattgcctaagaatttctcttctctccccatctcctcaaggcctagcaaactctgtatctcctcacgacactctcctaaacagttgttagagaagaacaccttggatttctgcatattcaccttctgaccagactatttacagtatttatcaagagatttcagggtcccttctacattacctttatcagtcgcgagaaagagaagaaggtcgtcagcatacatcaggtgtgttatcgggattccctctctgttcagcgagtatcccctcaggttcctttcagactctgctttagagaataaacgggacagaacctccgctccaaggataaagagatagggggacaacgggtccccctgtctgagccctctcttcggagcaaaagccttgatgagacatccattgagcaaaacttgatactggaccgacgacaggaaatgcattatcattttgcagaaatggggatgaaaaccaaagcccttaaggacttttataataaaactccattccatacgatcgtacgccttcgacatatcacactttatacttgcaaaagcttttttccccaccttcctattcatatcatggaatacttcattggcaataatagaattgtcggctatccatcttccctttacaaaagccgattggaacggggaaacaatcttatcaagcaacacacttaaccgattagcaaggatttttgcaataattttgtaggtggagttacaatgactaatcgatctaaactcatcaaaacggctggcatgaagctttttagggatcaaaactatgaaagtacgattcacctccttgccaaagttatcgcttgagtaacttgattccccactatatcccagtagtccttgaaaaactttatagggaaaccatccggacccggggatttcaacgcaagcaactcccaaacaactttctttatttccaccggggttggaagttccaccaacatccgattctcctcatcggttatacataaattaagcaatgaattggctaaagctaaaaaaaaaatggtaactagtaactagttactgttttttcagcatacaagcacaaacgtttttgagtctttcaacattcgaaaactcctcaaaatcacccatttaatactataaatgcccaatttataattggtaacatccaagggctttatggtggtcattcatgttcatatgggagt

SEQ ID NO: 116993 - DNA, 3718 bp, Cannabis sativa
gaacaccgcgagtatgaccaagtagctgacaccaagggtaccatcatacccttggatgacatggctcaccgctctttttttttcggacccaccgaggtgacggcgctaaggaagttagttcctcctcagttccacaaggcttccaccttcgagttgctgactgcatgcttgtggaaatgccgcacagcagctttgaagatggacgcagaggaagaggtgcgcataatctgcatagtgaacgcgcggtcaaggtttaaccctcctctacctcgggggtactacggtaacgggtttgcgttccctgtagcggtgactacagcggggaagctttgcaagaatccaattgggtatgcattggagcttgtgaagagggcgaaggatgcggtgacggatgagtatatgaggtctgtggcagatctgatggtgagcaagggacgacctcacttcactgtggtgaggtcgtaccttgtgtcagacttgacacatgcagggtttggggatgtggacgtggggtgggggaaggctgtgtacggtggggctgccaagggtggtgttggggctgttccaggggttgccagtttctacattcctttcaagaacatggtgaggggtgagcaagggattgtggtccctctttgtttgcctgcccaggccatggacacctttgtcactgagttggattccctcttgaaacctaaagccccactcatcaacactactcacctcattccttcatctctatgagtactgttatttactactctttgtgtgtgtcgtcatgattaatagtcttttaaatttaattaagtggcacaataattagtgaatcaaaggcatacaaattctaataatatatatggcttaacttattaagcattttattttgaaaattatatttctcaattaaaatatatatatatggaatatttctcaatgtgtattactcattgatggtactaaacaaatataactataaatattagttttaaaaatattaaaccattagattttaatccgataaccaataataaaaaagaaatttaaatttttatactttatttaactatttaatttaaaaaaatatatcaaaaaatacttgtttttatattatatcaaaaatatttttatatgaaaaatatttaagtcaaactcaactatttttattatttttttattatatttttttatttttattatttgttttcagctgatgaaacaaccccaccatgtataatagtaaaaataagaaatttttctaattaaattaaaaaattaatcatgaaaactcaattttttctaatattactcattaatgggtaatattcattaaaaatgcacctatatatattttctttcttttagcctaaaaggatatggttgcatgatttgggtctttaccgtttacaacttgtgggctactaaataaaacattttcttttggtatgagaactttgttatcagttaggtatggatgtacatgtcctattatgtatcattaatacatatctttaccaatgctaatatgatcatttaatgcctaataacaccctaaacaagtagtaagttagagtatttccaaccatactctttagctaaaataaagagtgaaacttaaaaaatgagctccgaccatataaaaactgactctatataacagaaaattaataaatagagaggtctttatttttttgctaatattttttaatatattttaattaaaagtattattactttttttattattttataaagttaaattatatttgacaaatgtaaattataaatattaaagtaatcaaatatgaactaaagtattattactttttttcggctttcgattccgtcaatttcggttccaatgatattctgtaagttagtttgaacagttttttcggtattttaaattttatgctcagtcttagtttttcacaagtattgttcttttgcatttttcttttctcattttattgtttttctttttcttttaaataattgtcgttgtcagaccaattcaaagtgtagtctatataatattgaatggaagaccaaaagaaaaacaaaggctaggttgttggcaacaacactttttatgtaaatagttctctaattaatgacatcataaaagttgtattaaataatttgatatatactaaaaaaacataactgctacattcttataaatagcaggataactcgaccctttcactccttgtcgatcagatcagacactccttttccaatttccctgatgtttcccttctgcacttaccgcgtcagttcaacacaactgctcactttcttgcgaggggggatattaggttgcgaggggatgccattgaggattcggtttagtctcctctgtttgctgctctctttgatttgtattgatcctctttgcagcttattttattgtcaaaaaaaaaacaatgtacaaaggacgaccaaatttctaatttagaaaaattttgcgaaattgtatcctcgtttataatctcctaaaaaatatatactcgtagagtatatagaattaactgaaaatcacgtaaaaatttctgtctttttctttattatcaagtatttaaattcgatgcatttgtttaacaatattatattcaaagtattaattatcaagtcctgattaatcttaacgaatttttaagttaacaatagaatatatgttttttatttattgtagttttgtttcctaaaaaaatccattctcatattcctataagatatgcttataaaatatattttaaattttaagataaaatttaaaaaaatttaagagtaattttctaatttttttatattaaagtgtacttataattttataaggtacaaataaaactattaacattcaatctcaattgaacaaatttaatatattgaatagatgtcaaaattactttcttttataaataaaactggatacgaaaatttgaactaaaatgaagatttagaaaagaaataatggaggaaagatcatcatgtcatatggactttattcattgccaagtcaatgatatttaaattcaaatacactcatactcatacatatgttctctatctgaatacatattgtttcattaaaaatgcatctaaacaaaaaaaaaaaattacagtaatatcttgagaaacatattgtttttagaaaaaaaaaaaggacacattaaacaacaatttttttgacagtagccggtagaaacacaattgtaacttgtaagcagtatcatattcaaaaagtaaacgctgctacattataatatattttgtcctatttgaggaatctaaaacctcatttgcaaatgagagacttcataagaagcctttatctaaatagttgtctaattaatgataccataaaaattgtattaaataatttaatatatgctaaaaattaagttgattcaatcaaatacatttaacaataaagaataactttttttttttgaagataaagaataacattattaattacaataatattactattatttatttatttatttatttttgtttaagtcatcaataatttaagtaaaaattgtgtttggatcggtgcatgtgtgagtgtgaactgtgacggtagtggctaatatagaaaaatagggatggcaaaacgggtttcgacacggcacacgaacacgaatacgacacgaattttacgggttaggatcgggaaaattagatgcgagtcgaaaatgggtcgacacga

SEQ ID NO: 116994 - DNA, 1002 bp, Cannabis sativa
acatacttggtagtaaatctagagcctggtaaaatatttccaacactaagtcaaaaatctattaaaattccccataaggagccaaggtaaggaaaaacaagagaacccaattctattgagaatttaccaagtatgatggcgatcagtggggcaaggagcaccataaaaacaagtgatattaaaactaggtaaattgacaccaaagacataataatgaacatgattaatagaaaaattatttataagtacatcaatgtctgaattccagaaaaaacaaaaagatccccctaaaccaacccgggggacctcaaaacgatgggcaaaacccaacctaactctaaacttgtcaatatcacccttacataatcgggattccataacaaaaagcgaagaaggtttatacatctaaactaacagggagagatctaggaatgctcgatcactcccaagacctcaagcattctaacttaaaacaattatttctgaaggtaggcctgttcctccataggacccgcctcttcactggagaccactccacaatgtcttcttgtggtagggctttttacctcttcaacatctctcactactcattgccgacagttgccaactttctcttgaaacaagctacgatagtctgcgatcctctcctagcctgcaaatgattaggtgggccttcagatcgaggtgccaacagcaaaagcagggatattggagcaccaggcaaagtgaaattagtaatggtggaaaggcgagattaggaatgtggttcctgaagggggcattcatagggttagttgttggggatatggaacttttagaactgggagtggagtgttgcttaggggaagcagaacaagacatggatcctcctgaggccacaatcattaaagcagtgaaggatggattttgtgggtggccttatggggggatggtgacgttggggtgactgcacagattgacattactatgtgggggggggggggggcagaaatatagaggctt

SEQ ID NO: 116995 - DNA, 3300 bp, Cannabis sativa
ccttcaattcctatacaattcctacaattctgatactctgttttactctattgataatggacaatcttctatccgatttaaaccataccatgacactatctgatagagaaagagatgttcaaatccttcctgtgttaccatcttctgggattgctgctacccagaatttcagtctctatgcacgagtagttacttctcgtgagtttaatcgcaaaaccttcaaaatcaaaatgagtgggcattggaaagggcagtatcatgttactattactgatcagcctcttcttagtttcatttggttgtttgggtgatctaaagaaagttttatttatggagccatggcactttcagaatcatcacattgtcttatgtcctcctactgcacctcaaattgcttctgctgaatcgctacacctatctcctttctgggttaaacttcatagattgcctttttttaagcaaaacaaaaattatggctaaatggactggcaatatggtgggaacctatatcgatgttcatgaggactctctcaatgaaggttggggccctttcctccgatttcgtgccactattgatatctctaaaccattactgaggggtaaaatggttaaactgaaagattctagggatgaattctggttagaatttcgttatgaaagactagcagaattttgctttgaatatgggattattggtcatccctttgagcactgccatcaatttctcaaaaaaatctataatggtgttgatcccccactatcctatggcccagagatgattggttcccctctcccacaatcgggttatgacagatacaaaattggcttttttaaaggagaagtgtggcctttaatgactagattggccaaaaacccttttactgatgctttaccacagatatctaccaggcctcaatccttcccctcattcttaaccagtggagaatcatctataacacccccatcgaaacacagcactctgtctataattgatcccaatccttccatctccaatctaaactccaatgccacggctccatctagcagtcatcctactgcagtaaccctcccaatacctccttatctacttacttcttttccatttgcaacatatcccccttcttccaacaccatcaattgtaatcaaactaaaaatatcccttcctcaccagtctctccagccatatacacaatactgatgttcaacccactttgcctagaaattttgcaccatccattgcaccactggaagatatacgaaaaggcaaaagcattgtcaatactgatgttgacaaggaaaattgtaatcccaataaaatgtttaaaaggcaactaaatgttgattctcttcgatctgtccttaagcgttgtcgatccaatgcctcctctagtcattcgggtgcttcaggcttgaatgatgcctctgctccttctatttctaacaccgcggattcagatgagcttttaactgaaagtttggcggatgttgctaagcaacaccgcccacagccatgaattgcttaagttggaatgcccggggattagggaaccctagtgcattcagatatctacgcttgcttgtctctgagcatgcgccctgtttgttgtttatcattgaatctaagttaaaagttggtagtataaataaagttcgacattctcttcgttttccacatggtattgaagttcctaggcaaggccatggtgggggacttatgttgctatggaaatccatagttactgtttctttaaacaacttttccaccaatcacattgactgttttgtagagaatcttgagggaccttcctttcacttcactggtttctatggacatccatgtacttctcaacgacatcacacatggacactcttgaaatgttgtcgtgatattgctcccttatccccttggcttgtacttggtgatttcaatgaaatactctcaaatgaagataaggtgggaggttcaattagaaactcatctcagattgaagctttccgtggtgctgttacaaattgttgtctcaattctcttccttttgagggagataggatcacttggagtagtcaaggtcaatgtagaggggctatcaaagaaaggctagattatggatttgtgaatgacttttgggaatctactttccaggcatgttcagttcagcatctcgactactataagtcggatcatcgagccttaaaagttctcgtggaggctttgaatgaacaagcacgagatgttcacttcaagtctcggtttagatttgaaaagatttagctacaggaggatcaatgtgcggctttaattcttgataattggtcaattggatcaaatgacaatatttcccaaccaacaaccaatatctccactgtagcaaataaactccagacttggcaccattccaccttcggccaacttaagcagcagatcaaagacactcaaaagcatgtctctacacttcataattccaaaaaaaatgatagagaccacctgcaagctgttcaaaattgagaacaaattcttgatgaattgctggctaaagaagaggattattggcatcaaagatctcgcatatcatggttacaatcgggggattcaaacactaaattcttccaccagcatgctagtaccaggaagaaaaataataagatcagaaagcttattgatgctaatggaaatacacaaacaaatccaccaactcttttgaacataatttcagactactatcagaatcttttcacaagtaatggtgttgatcaagcctctttggatataattcttgaccacatcccctccaacatcgatgctgattcaagaaacctcatttttgctccatatactgctactgatgtctatgaagcacttaaaactatgagtgatgacaaaagtccaggcattgatggcatgtcagtgatgttcttcagtaactactgggacattgttggtccaccagtctcagctgctgttttagatgttctgaatcatggtgccgatcctagtacatttaacaaaactctgataacactcattcttaaagtgaagaagccaagtcacatttcacaatgtaggcctattagcctttgcaatgtcctctacaagcttgtttccaaagccattgtgatgagattaaagccttatctccctcaagttatttctgaataccaaagtgctttcttatctcagaggctcattacagataatatacttgtggctttcgaattattgctgtaaagaccgcctatgaatagtactatatattattaattatttaaggtttatgtattaataattatggaatgcatat

SEQ ID NO: 116996 - DNA, 1841 bp, Cannabis sativa
taaataaattaaaatatttccaatcataaaattttatcatactttttaaataataaaataatatatcatattaaatctataaatatattgattaaaacttaatatatattaatatgaaaaaagaacaaatctaggactctttaaacactaatcaaggggaaatgatttaaccttatgtatttcattaaatgcaaccagcagaacatgagaacaacccaaacatcatcacccacttatctataaattattatgaaaaagctttttattcctatagaagaaaatttgtgtatccaccaactaaggtggccctccctccaatcttttggagacaaatcaaagaaaacccacaccactatttctacttagaaccatttgctttttttattgcttttttttttttttattttgattggcatattcaatcctatatatgtttttctctcttaaccccatgtgagagagagactcaaataagtttaaaaaattatgcattatataatttgatataaaatgatgaattattgtaattatgtgagttggataagtactttggtgggattcttccaagttggaaccattagcattagttatagtggaatgtattaggaccactttgaaatcattgagaccacacctcactcttaggattatgtgctgaatttgggtttgggatcttcttgaggattcttattcttctttctttattttattgtttttttcttcctaatttttgtacaaggaatcttaatttgctcactctctttttctaattacaaaaaaaaaattaaaattgtattgtttgtgatatgtatcatgattcatacatatatagctaagtttagtttcattggtaatttggagcccaccctaatatttttagaggtctagtaaattgtatttgaggatgtgattttttaatttttttttttttagaaatttcaaaattttaacaaaattgggtaatttattaatattattattattattacaattttataaatttaaaaacctttaactaataaattagcacatgtgtaaataagggagaaagttgggtcgggtcttagttaaagcaggctagatttgcacctagagtccatccaatctaaaagctcaaaaaaatatttttcatttaaaattattcatatattttagcaattttttaaaatactacaaattttttaaataaaagatctaatattttttcctcttaaggtcctctaatctctagccgacttgagagaaagtatacgatacaaaaaaattctctttgaaaaagattacaatttaggaatcataattataattagagtatcattttcccatatgtacatgaatcaataaaaatatttatctcttgttatgtgtttttttttaactaattacatgtatttcaaataaataatataataataaaaaagacccatagaacttaaaagttgattatgtacacatgagtgagtatttttcacttttcaagattgcataggaactatcttcaaattatatttaacccatagaaaattctcttatttctccaacttctactatcatatttatccgaacattgttataaaatattaaggtacttaactccattataaaatggccataaaaataattttagccgttttcataatttttattaaattaaaataaattaatattaatattaaattatactaatacaaatattacataacatttaacatatctcaataattacttgacaataacatcaattccatcacaaatcacaattatacacttatcttattttaaagtgtaaaataataataaatatgacattaaatatatatatgttttttttttcaaacatt

SEQ ID NO: 116997 - DNA, 5955 bp, Cannabis sativa
  modified_base (3359)..(3363): a, c, t, g, unknown or other
  modified_base (3843)..(3848): a, c, t, g, unknown or other
actaatcagattgtaaagagttttatttagggcataaaacacaacagttttgtatgaagcgggcttagttcacatcatcaagtcaacctcacacaagtgtaaagttgacttgggggggaaaacgtttgctcaaaaatcgaccctgatgatgtgggcatcaatgtttgacacatggcaagaagaaaaatattaacagagttgagtagtcccgagtcataacaagtcgacttgggaggggtccctaaccctgcgcccaagctccataatgggtgtttggatctcgccaaattgtttccatttcagtattcttcaatattctgaatgaaaaagacaaaaagaatcaaagtctgaggtttgggtattgaaaagagacgaaaaaatcccaaaactgaactcgggtgcctagggttttcacctagcacccaggttgacatggtgctaggtcccagcgcccaggttgacatgttgtcaacctgggccacttacaacagtatcttaggcgaagtcttacaatcatattctctattttagtcaacaattaagatataggtgctttcgaaaacaaaaagagtcatctgagagtcaaaactgggacctaacgcccaggttgacctggtgccaggtcccaacacccaggttgacatattgtcatcctgggccatttccaaacattactcctgaaaattctttcgagagtattccctatttttgttagcaattaagatacgagttttttgggagtcaagcggaatcatcttatggtcaacacaggaaccttatgtttaggttaacctagttcttggtcctagcgcccaggttgacgttttgtcaacctggacaatgtccaagtgttttctccaaaaactgtttcaaacatcttttctattttcagaaataatgaagatacaactgatctcaaaaagcagacgatatcattagagagccaaaactgggcccaaacgcccaagttgacatgggtgctaggccttgtgcctaggttgacatacaacctggtttgcatattttcactcctcaaacacaaattttgttctgggcattcttcttattttcgtcaaaaacaaggtaggatacctcgttcgcaatctcgaatgccaaagaagtatcaaaacgagccccaagaaactcctcgtggagcacccagcgcccaagttgacatatagcctagtgcgttgggctctgcctatcctcttacggttccatctcgagcatctgactatttttcatagtaaacgaaagctatgaattgtcacaagttaaattcacactttgatatttcaccttttcgacaaaatagaatatcggcaaattagctgcaaatgagatgttttgagtctatcccatttttcagaaaagcaacatctccaagaactggagaacaacttcgtcagaactaagaaattgactaagcactacatcaaaattagactttcccatcaatttaaaactatcttttataatatttctgtcagttcttaaaactgttggctacgtgggtgtcataaaagtacgatactttaaatgacagtttataattgttggaaaagatcactttaaatgaccatttacaactgtaaaaaaaaatcactttaaatgaatgtttataactattggaaaaggctaccattaaacgggtaacttatgggaaaagtcactttaaatgatagttataaccaacgagaaaacaactttaaaaaccatggtttataacctatgtgataagtcttttctacacataaaaaaaaaattatgtatattaatttacaaaaatcaaaatacataaaaaaatatttgttttcaatttttcccaattttcatattacagaatgaaaatcatcaaatacagatcttggctagaaaaattgtaaaataaagaacatatccaaaagtttaaggcacagctactatctcacttgcaagccataacaagatgtttaacaaaaattaagaattgcattgtctcaattgcagaaatctttaagagccaatcatataatatcctttcaatcttgtaataagtataagactttagaaatagagaaacaatcacaaaactctcatcaaaataccaacaatatattcacaaaactaaacaaagcctactttgatatatgatatctacctagaatgctctttctgcctaggtgggtcgcaatgtacaataccatgcttgaatatcattttagcaaaattaagcttgtaatagttttgtaaactccaactatattcaagcatttttatttctgaagacaatgaagtataaaaaatatatatatatacataacttgcaattgaaaagataaattttaaaaggtaaccttaccgagcgcgccatacaactcttattcttgcatatccttatctttaaattcagcttgtgctttgtggtacatggtaacttgtgctggaaaatttcccagctccaataactgataacataagcaaaatgggaaaacaaaagttgtgcctttgtactcacctgtgcttcaagttctcaacataatttaactatgattttcaccacatgctcgagactgaaatcatgacatcataggaagactaataataaaattacaggactacttgtttattatttaaaatttgaatctttcacatcaatttcactaaaactacaataaaatatttaagttttccttctcagatgttaattcactagttataatcaatagtcattgccaaagaaaaaatacacaatgaatcatgcccagtatacaaatcaaggtccttaaaaaatctgtcttctctccataaatttatattgaataatctacaattagaatatataataaactttctttgttctggagcaatacagaagtacacaaagaacaaataaataagaaaactaaaacaagttgttaacaacctaactttcaagttattagcataccacacaatgtttccacgatgcatttctttcaaaagagaaatttctctaatagttgtgcttggcacttccacatcttcttgctccaattcagatcttcttcaaagcaattacaatgcaagaataagtacatctcaacgtcacaaatcacatagtagtcaattaaaaaggtgtttacttaaatactccatggagccaacaaatcaaaataaatcaatagtacaaaggtgcaaccagttcaccttagccttacattcaccccatttaagatattattaactattgctatgatgataaataatacaagagtaatttgcagcatcaatacctaagtttaacttccggttgcaaataaatacctaagtttaatttttagctgtaataacactcaagtcattattcacatgtcatttttttattgatatatttaaannnnntttttttttaaaaaaaagtagaaattcataacctggaccaatcaggaattatccaatggcaatttactcaacacttaacaatcaaatacctacatagttctataaatataacttgctgtcaaaaattaaacttaagtatttatgccgcaaattacacataatacaagttcaaaatcatgataaataagattttatagagaaattatagttgaaaattgcagcattgcagatgtaaaaactatcaagagatgatagcaaaaggcaaaaagcatactcaccgaaggaagtagagtcatagaagtttcctctgtcaaagtacatctctccaaagtaaagcacaattaattaataaagttatcttcaaaattatataagaaaaaaactaagaccaatctatcttacaattatggaattaataattcaatgcagaaaactaagaccaaaaactactactacgaatactatttttttttttttttnnnnnnagcgtttatatattacacaatgtataacctgggactcgaacctaagacctccaacacacacgcacccttctatggccacttgagctagcctcaagtggttctacgaatactatttaatgttcttgaaacaactctgaaaccaaataagaccttatgaccccattttcttccatcaaatgttgaagcaaattccttaataaactcaaacactaaacgatgacctttatcaaaacccaaaacgacattattcaatctactgtatttacccgtttccaaatcattagtttgagctcgaataaagtttttcaatttagaataaatcttcacaaaaatcatatctgtatctatataaacacaaccatatttgtaaagaagagttaatctaagcaaattagagagattttgacccaaagaaatctccaatttttagaaaaatcttttctccatctataaatattaactctctctcttactcaatctcttctatagataccttgaataaatatgcagctgattttgtgtactgatggtgtatgtgtgtatatatgttattatgatttgaaatcagatgggagcctagcaatggcatgtaagaaacacaatatactccgcagctcagcatgaccagacacctcctcaatctccatgtagaggtttgtcttcctttccatattcccttgcacaacatcaaagattatgtatatatatatagagagagagaccacactaaaatattccagaaacttgtgtcgtatatataggaaaaattaaatcttatatatatgtgtacaggtactctactcttgttatcacaaaccaaataacattattcaatctactccatttacccatttccaaatcaataatttgatgtccaaaaatatttatcaattcagaaaaaatcacaaaaatcatataatgtatctatataaacaccaccatatttgtttggaagagctaacataagtaaattagagagattttgacccaattgaatcacacccaaattcactttacccgttttaaacaaactaaatcaactctcagttggaatctaggcaacaataatttcaaaatctcttacacatgccatctaaacatcctaaaagaaattgaaattgcatgatgaaaaaaagctttcccggcaaccataaaacagagagaaaaaaacatattgattcaaatatataatttttacaaatttacaatgagatgccgaatgaattgagtgagtgagtgagtgtattaagcttcaaggaatcaaactaaaaaaagttatatcaatatatacttcaaaaagaaattaggaaatttcagttacagagtgtggtcgaggtgagaccagtccgacagtccaacaatttaagctcccagctgtactcgaaatgatagccacagaaggtgccggcgccgagcggtggttaaccgctagagagagaggttcgatggagatgggtttgaggatttctctctgaagttttagattgatcgggatgagataaaatggagtggaaggaaggtttggcgaggtatggtataaaatcactgttttccaacagtgtataattcttggatatagtttttgcgtgtgttaatcccacatggaaatagtattctccacagttttacattgctgagtcccactgttttaaagaaaaactgtattgtttggtccacattttttcaacgttagaaataggtctcctaacattttctttctatcaatcatctacttaattatttcaacagttttcataattaatcctctaattaactgttgggagtaatccattttatagtagttaagtgatgtgaacatatcagtatttatccaatccaatccgtactattttgctcatagtatatccgcttcgcactaagtgcggatttcattttggattcaatccaatccgtacaatagctcaaatccaatccaatcaaatccaatcataaaagtgcggattggatcggttagtttgaaagagaattacccatatacttttttttaaaacttattttttttcaaatttacggtttgagtttctaaagtggttgcaacgctagttgcaataggggtttcgatatgattttttgttgcaatttaggt

SEQ ID NO: 116998 - DNA, 1471 bp, Cannabis sativa
  modified_base (49)..(52): a, c, t, g, unknown or other
tgatttttttggttctaattaaacattgtctcatgactaaaaatatttnnnnctaaaaattagtcgcaaaatctaactattagcgactaagttgatttggtcataaaaaatatagtcgctgaaaatatattttcttgtatttgactcttgttgggctcaatcaagtgttgttgggctgaattgttgggccgaattgttgtgtgtgttttcaaaaatactttttttttatggacgcatagaatagtgaagaatttaaaaaataccacttttgcatctgtattaattgtgtctctttgaggtgttggaaaactgcaaattttcaacaataacaaactcaaaggaaaatgaaacaaaaattatatgtataaagaaatattaaattttgatttagattatatgtttttttataaataaaaatcaaatatatttgatctatgttttaaaatatatttgtatcatacatattatatttttaaatttgtattttctacattaaaatattaattgtatatataatttttttttaaaaaatatatataattatgttaattgaatttgatcagttaaatgtagattttaaattttctaactaatccaataattgtttaaaaaaagttatttactattgaaaattctcataatgactagttttaaacactctcttaaaaagtgctatgctaattaaggtaattaaattcttaagagtaatattacacatctctgattcaaatattaaaaagaaaaatagatgtgctatgctaaacgaaactttacacacacataagacatgacaaaacataacgactataaatatatttggcaaacaaattaatatataattttggctatatatatatttatctatttaaaaaatttggtcacatggacgtgggaaaattgattcgcagatggaataaaatgatgcatgatcagaaaatacaaattaagacctgcatgcatgattacgtgataaatgagaaaagaatatatataattataatctgtattctatgattgctcatctttttctctaatattcttctcacaacatattaaagatgcatggtcagctagctgtcgtccaaggatgatcaagattcaaaacatatacatatatatatatatgtaaagtatatcatactcttcctacttatctttaaagactgaagaaagtgattgaagacctaaaatcatcacaatttgagcccaatacgccaaccccatcagtgatcaaaagagtaaaatgaaaaagaaagcaagaaaaagaaaagaaaaggaaatatataaaagaagaataatatgcgtttaattatgggacctgcttagtagtacctgatcatttttaatttgcagagtatgtgtacttaagttttaagtacttttaaggaggcgtttggttgggaggaatgaaaatataggaatgggaatgggaatggaaatatagaataggaataggaatggaataaaattt

SEQ ID NO: 116999 - DNA, 1019 bp, Cannabis sativa
gacgtggcagtctccaaattcaggcgagttatttctcttctgggtcggactcgaaccggtcacgcccgattcagacgagctccattgccacctcaccataataacaataatactgaaccttctagagtttattacgctactccgattcaacagatcccaccaccagatcaaaacgctgtcgttttacccattactaaaaaggaaaacacttctacaacaacaacaactattaatttttctaatactacaacgacgtcgtttttgtcttctgttactggcgattccgatactaaatcacatcatcatcatcatcatcaccatagccataatcataataagccttcgtcttcttcgcctggttttcagattactaatctttctcagatctcttcagttggaaagccacccatttcgacttcttctcttaagagaaagtgtagctctgagaatttgggttccggtaaatgtaccagtggttcatccggccgatgccattgctccaagaaaaggtaaaaatctcaactttaataatatatatagcttctctttcataaataaatatatgtattgatttttgtttgttgaaacagaaaactaaggttgaagagagttgtgagagttccagctataagtttgaaaatggcggatattccaccagacgattactcttggagaaagtacggtcaaaaacccattaaaggatctccacacccaaggtatatatatatatagttttacccagttgaaattttgagttgtttatctattttagcgattaaagattagatttttatatgataaacaggggatattacaagtgtagcagtgtacgaggttgtccagctcgtaaacatgtagagagagctcttgatgatccatcaatgcttgttgttacatacgaaggtgaacataatcactcactttcagttgcagaaacctcaaatctcatcttagaatcatcttaaaaaaaagaaaaaaaattattaagtaaagttttttattatagaatagcttacgaa

SEQ ID NO: 117000 - DNA, 1173 bp, Cannabis sativa
  modified_base (87)..(89): a, c, t, g, unknown or other
aactaaaaaccgaatttataaggtaagaaattgggtatgaatgcacaacaatcttaccataaaagaaaaaattattttgtcaactannntgccaaaaaaggactttacattatctaaggcttttctcgaacttggttcaatattgggtatgacaagaatggacattcaattttctggtgcaccttctcacaagatatttggcaatgtgagtattttacttttatataaacccaaaagaaaatctcttttaaagaaatgttactctatgtttcacaaattctaaaaaataaagctttgaaaaaccaataattgcagctcgaataattaaatttgaaaagaagaagaaaacacgagatagactagtgagaaccccacaacaagtgacaagttaattgactctcttcctattaagtggaaatatgaaatcagcggaattaaactaataaaatgtgacactacctcagaatacgaaggaggaagtggatacccataattcttaactctactacgtggatgcagtgatctctaccccataatatggccgaaaacaaattaagacaaacgttttcaaagacactattatgtataaggtatatactgaatatatagagctgaaattttatttaactaacagtaaaaactagtcaaagggaatgccttttggttagtgactgactataccaaaccaatcttcaaaatattatattgccaatattaagggatatcttgtggggtaacttgttgtgatacaggtttgctattagttttccacgcagaagtgttagtgactatctactattgagattttttgttggttcttgcattatagagtagtttagtatactagaatgaattagtgtttatttttttcctcatattaaagtttataatgccttgtacgtacacttaatatagattttgaagtactatttctaaccatcgcttactctcttttatctttaatcttttgtggttaccctaaaaaaaaaattcatgttaccaaacaaaaattattcttcctaaacttattaatctgcccactgtttatgaatcacaatttttgtaatcatgaaagtgtttttttactgcatcagaccatgaaaaggtatacggtgtagttgctaatgttaattttattttagtttttaatttttttcaatatcataattttaa

SEQ ID NO: 117001 - DNA, 1424 bp, Cannabis sativa
ttggcctaggagagctatatgcatggcatggcaccaccatgacatggctaataaactccaataatccctttgcaattgcaccccggccataacaccaaccaattgctgtccaccattatcttcaaaaatcattgacttcaagttacctcctgcatgtgaacaaattgcgcattaggcaagcgacaactcatacgaccaagttgggttcccaaatttgcagcttcaagttcacaaactcttggcttttctttccttttcaccgttattactagccaaacttatggatgaccccactttcgctctgcctttctggaactgggactctcctcctggcatggagtgccggcgctttatacgaaaatcaattctagcctctttacgacacgctccgggacccttttccaccagtcacctacactactggtacgtatagacagatggtagaaaacggcaaaaatgctcacctgtttttgggctcgctttatagggccggagatgaggccgaacccggaccaggctcttatttggagagccttcctcatgggccgatcaacttgtggaccgatgagagtacccagcccaacttcgagaacatgggagacttttactttgctgctcgtgatcccatattctttttccaccactcaaacattgaccggttgtggagtgtgtgggaaacccttggaggaagtagaacagttttcactgatccggattggctagacaccgacattttgttttacaatgagtatgccctcctggttcgtgtcaagatccgagactgtctcgatacgagaaagctcgggtacgtataccaagatgttgacacgcgcgccacgcacaccgaccaaagtcaacgatttctttcgatcggacaatattctcgaccgctaattttcctttatataagatggtaagtacagttgtaagtagaagaggagcaagaaggaaaaggaagaagaagaggaggtgttggtgattgaaggtattgagctttgaagttggatgtttacgtgaacaacgaggatgagaattgagaagttgccgtgtggacctgagatatctgagttcgcgggaagctttgttaacgtgccgcacaagcaaatggatgggaagaaaacaaagactacttgtgtgaggtcggaataacgaacttggttgaaaatttggcggccgaagatgatgacactattctggtgactttagtgccaaagctcggtcttgccaccgtttctagaatcaaaattgagtttttgtcttgaaaagtcttactattataaagaagactttttttaatcggagaatgctaattaaaggaatgaatgtacattttttcaaatatttggtgaccatatctattctatataaagtgtgcctatataactgaattcttgcgtttatgagaaattcatggataacttttt

SEQ ID NO: 117002 - DNA, 1175 bp, Cannabis sativa
ttctttggcaattgcagtattctcggtgatgcatctccctttgatgaaagccgtttgcgtcggggagattatggagggtaggatatctcgtaactgggtggcaataatttttgagatacttttgtacacaacattgcacaaagctatggggcgaaaatcatttaccattgatggacattccttctttggcactagaactatatttgtatcgttgatgtagtgaggcaaatctgctgattcaaagaagtgcttaatgaatttgaggaaatcgtctctgacagtgtcccaatgagatcgatagaaagctactggtagctcatccggtccaggggctttgtctattcccatggatgatagggctttcaagactacctcctctgtaggtgcttccattagatcttcttttaacatattatctgtctgcatgtgagtccactcctcagcactaaatttagttcgtgagccattcttggagaaggtgctagtgaatttctcaatgaatagctgggctatgtcgtgcatttcttcaatcgtcgtcccctgttcattcttcaatgactgaatgtagttgcatcttctccttgttacggtgttggccatgaagaatttcattgaacggtctccatcttttaaccaggcaactctcgacttttgacgccaaaagatttcttctcttcttaacccctccgctagattggctctagcttcggtgtgagccttctcgtcaaagttttgcgcctcttcaattgaactgagtgttagacgggcctcattaatctgttttgcaagcttcttgaaatggatcttatttcacttggttaagtgagcctttgtgtgtttgattttgcggtacaagttaaccatcgggtgctcatgagttatctctttcaatgctctctttaccaccctgaaaacacgtgggtctctttcccacatcattttgtatttgaattgaggcttagtgcaatatttcccacctatggtgtccagtagaataggattatgatcagataaggaagttgtgagatgagacaaaactgcattcggccacgcaattgtccagtcagttgaggccagtgctcgatcgagacgtgctctcttgagagatgatctgatgtcgcccaattagttacactgcggtcgcggtagtaaacgggctatatgtcgtatccaca

SEQ ID NO: 117003 - DNA, 1168 bp, Cannabis sativa
agatagttagggtgttacaaaagctatagctgggattgaagttgaaagatagctggaggtatttcgatcctttcatcgtatatacaggtttgagatgtttacagtttatttcgtctttcatattgttcatatatgctttattttcatatcatattaagtgtaacacacttcaccaataccctcatatgttattctgatgacaactgaacatacacggtaaacatgtatgtatatatgcatctattatactaatcttacctcaattccacaatcaagtgtgttggccaacctaagtagaaactcctactcgatgattagtggccctaagtcacaatgatgtaaaactaataaatgagttgataagtcactctcagggacttaaaactcaaaactaagagctatcctattgataaatagcaaggcaatatcctaaatattgaagaaatgcaaaactcgacgcccccaaaatcacacaatctagtgaatcggatccccaaacggtggaccgtctcctggggttctgcttggggaaacggtttactgtatcttggggaaacggtggaaccttttgctgcaagaaacataaaactctcagtctaactttaattttaccccatatcaaacaaaaacctctagaacacctaataacatcatcataacataattcaaccagtatttacatcatcaatcctctaaaataaaaattttcattgaagagctaagtttgagttcataaactcaaacttggctaaacaacaccaaagcaaccttaaattccttaaaaccatcacaaacaatataaaattaaactccaaaaccaaccctaaactgcacaaactctaacataactaaaatcaaaatctcacttcaataaaaccatgcttagactctaatttaaaggaagaaaaaggagaatatgattaccttaatccttcttatggtacaatctcataaaaccttgctaaacttccttgaatttggttgaattcacagcaaaatgggttggggtttcttggtttagggtgaggccgaaagagagagtttattgaggagagagaaagtgtataaagaaacatactaaggaaattggattacctttgtcatccatccatttcttgaactggctgcactccttttttgcatgtcccttttgtttacaaaagaaaca

SEQ ID NO: 117004 - DNA, 3360 bp, Cannabis sativa
ttttgtaatttttttccttttttttatttttctatttttttccttaaaattttcgggtgccaataacatctctactaacatctttgatttaattcatctcgacatatggggaccctttcatgtagaaagtattgaaggatatcggtatttccttactatagtggacgaccactctcgtcatacttggatttattttcttaaatttaaatctgaagttgttattcacattcacaatttttctactatgtctccacagaatttcacattgccataaaagtaattcgatgtgacaacgccaaggaattaaatttaccacttttttatgcatccaaaagtattcaactttatcattcatgtgttggcagatttaaacaaattgctataaaggaacgaaaatatcagcacatattgaatattgctcgtgctttactttttcaatctcatgttgatcttacatactggtcttataaaattcatattgttgtttatcttattaataggactccatctcgcttactacaatttaaaacccccctttgagttactcaacatgacaaccccaacttacgcacacttgcaaagttttggctgtcttgcctatgctttcaccctcttgaactcacgacataagttcgctcctcaattgtctgcatgtgtttttattgggtagccaaatgggatgaaagcttatatctcctcgacattgacactaataagatttttcattctcaagatgtagttttccatgaaaatatttttcccttaaaacccagttccccgatcactaacatttttttttattccttcttgcatcaacctgctgccatacatcaacaggatcattccccaactgatggtccttccctccatgttgattcaagcatggcatccaaaccatcaatgacaccttcccctgctcctacagcctccaaatatggcagacccctcactcgaccatttcatttacaagactacacttgtatcgttgcttctactgctcatcctattgaccgttttttgtcctatggcaggttatctaactcttttcgggcagccatcttgtctgtacacgccatgagtgaaccaactagttacaaacaggcttcccaaatcaaagtttggaatgatgccatggatgttgaaactactgccttaaagcaaaatgatacttgggtcgttgtccctttacctccgggtcagcatacaattggcaacaaatgggtctataaaatcaaatatggccccgatggcactcccatttggtacaaagcttgattagtcgccaaagggtattcacaaaaataaggtattgactatcttgaaacttttttccccgtggccaaatttaacacccttaaagtcttacttgctcttgctgtcataaaaaattggtgtctccatcaattgtacattctcaatgcatttctccatggagatttgcatgagaccatatatatgacccttcccaaaggttacacaccaaaagggccaatcccgaaaaaatgttgtttgccaactaaataaaagcttgtatggcttaaagcaagcctctcgccaatggtttgccaaactaagcaccacctttctccaaagtggttttcaccaatcacattctgaccattctttgtttatcaaacatgacaaagatattttcttgctattttgatatatgttgatgacatagtcattaccaccaacaacaacatagctattgaaagtttcaaaaaacatttaaataaacatttcaaactaaaagaccgtggaccactccatttttttcttggtcttgaaattgctcgttctaacaatgggatctttgtctcccaaagaccttttcttttagaacttatgtctagtacaagttttttaggcactaagcctgcttctactccaatggagccaaactcgaagctcagtaaggacactagcgatctccttccggatcccactacctacagaagcataataggcaagctgatatatctcactatcacgcgacctgatctttcctttgctgtaaacaagcttaaccagttcatgacaacaccgagaacacctcatttacaagctgctcaccgagtactctagtacctcaaagccactccaggtccaggattatttttttctgccaattctccctctcagctcactgcctatgctgcatcaaccttacccgatgacaacctctctctcaaaaaaaattttgatgctgactgggggacttgtattgacactcgttgctccgtcactagctactgcatcttcattggtgattgaattatttcttggaagtccaaaaagtagcccactatttctcaatcctccgccaaagttgagtaccgtgcaatggccaacgccacctgtgaagtcacttggtttataacccttctcaaagacattgtcgtctctcatcaacttccaaccaatttatattgcgacaatgcagttgtcatacacctcttagagaatctagggtatcatgaacgcataaagcacgtcgaaattgactgccacattgttcggaaaaaactccaagcatgctacctcaagattcttcatgtgtcctccaaactaaaccttgtagacctctttaccaagcctcttttcccttctcaattcaaagatttattacacaagctaaatgtaagaacatttatacatcacctcactacaagaaaaggcctttttaccggcgcagttcgtcaaatgcaccggtaaaagttttcgacgtaaagcaaaagttgaaatcccatttacatttttgctttatttttgccggcgcaatattgcgccggtattactatgttttgccggtgcaatgatgaatatgcgccggtaaaagtgatgaaatgaagcgccaataggcacgaaaagtttaccgcctttcatttcatttattctggcgcttgtacacttttacgggcgcatatatgcgccagtaaaagtcccaaaaaaaagagaggaaaacttcccgcgtggattttcttggtaggtggggatacttttaccggcgcaccattgcgccggtaaaagttgtaaatgaaacgcgttgattttgacgtggcaagtggggatacttttaccggcgcactaaaagttggaaatgaaacgcgcgttttgacttaggtcaaatttttaaaagaacttttaccagcgcatccaattgcgccgctaaaagtgtatatatgaactagagctgcacgaagcccccccttcttccccatttctatttttgcattttcagagaaaaaaaaaacctctcagcctctcaccctctccgattctctcaatctctctcagtctctaactcaatccctctcaatcctctcaatcctctcaatcaccctctttttttcttca

SEQ ID NO: 117005 - DNA, 2070 bp, Cannabis sativa
  modified_base (1871)..(1872): a, c, t, g, unknown or other
aaagttgacagccgataataatgtgtttgtggaatttttttgctcaatcttgttttgtgaaggacatggacacaaagaaggtgcttctccaagggagacttagagatggattgtatcaactctcagaccaaccaagcttttccacctactctagttcgggtcctaagtttgctggttttacttcttttccttagactggtgttgtgtccaaatcaaaggataagcatgttgctatatccaagtttgtttccctaagagataaatggcataagcgtttaggccatccgtccaatcgtgtgttgattcttgttttgagtcattttaatgtaaaaccagttatgaatgaaaaacaaactttttgtgaagcttgtcaatatggaaaatctcatgctttgcctttcacttcaaactcaaatcgtgccaaatatccacttgatttaattcacacaaatgtttgggggccagctcccatcacatctaatctcaattacaagttctacattcactttgtggatgaccacagtagacacacatggatatacccactcaaaaccaagaatgaggctcttgctgcctttcttcagttcaaaacccttgtagaaaatcagtttgataggaaaatcaaggccattaagactgattggggtggagaattccaataatttgctaagtgtgtcatagagaatggaatcgaattcacacatccttgtcctcatacctctgcccaaaatgggagagtcgagaggaaacataggcatattgtcgaaatgggcttgacgcttcttgctcaagctcatatgcctctcaaatattggttggactcattccaaacagccgtctatctaattaatagacttccaacaccaattttgaaagagaaatctccttatgaaatcatccatggtaggaaacccaattataagtttctcaaaacctttggtgttgcttgtttcccttgccttagaccctaccaaacacacaaattccaattccattcaaccaagtgtgtcaatctagggtatagtgatgcacacaaaggctataagtgcttcagttctacagggagactttacatctctcgaaatgccatcttcaatgaagatgacttcccctttttaaccagttttctaaacactcaccaacctgaggcaattgtaaatgtccaagttccctcctggactgctttgttccaatctgacaggtttaacatgtacaatcaacacaatccatctgctaaaatccctggagaagacactgatactcagtcccactattgaagctcaaaattaagagaatgaaacgctggttgaaaccagcactgctacgtattcacaccagtcaaattggactgctagtgctggtgttgaacacagccctgtcaccatcaacaactccggatctgaaacttcagtacctagaattactcatgattctcctcagacagccgctcctcttgctccttcacatcctatgatcacgagatccaaggctggtatttttaaacccaaagtctatttgggagaagcaaaatggcagtgggaaaatgaagaaccgagttcagttgaaaaggctctctgtcacaaaggatggaatgctgcaatgggagaggaaatgatagcattagagaagaatggaacctatattttggttcccaaggctgctggtatgaacattatagggaacagatgggtttttaagaagaaatggaatgctaacatcacgtttctgagatacaaagcccgtcttgttgctaagggcttcaatcaaagacctggtattgattttagggaaacatatagccctattatcaaggcttatacagttcgtattattctcacaattgttgttataaataactaatttacaacttnnataggaatatttaatgaaatatttaaataattaagcttcagaagaatctaattagttattaattctttatttaattaaatacagaaaaatacatttagtttaccttgaatttgaatttcatttaactaagtgtgtttttctaaattaatttcaaaatattcaaatgaaaaattaattcatatatttcgaaattaatta

SEQ ID NO: 117006 - DNA, 2011 bp, Cannabis sativa
tcctattttctctgttattatcgacgattataatcaataatatcagtgaaaattttcaaaaaaaaaaaaaaaaatacatataaagacatataacttccccacattaaacatatataatatctgttgcccaaaagaaacaaaacagtaaacagtatattaaaaaacattaccataataaaattaaaataaaatataataaaacagtataaaatgtaaatttctcattcatgtttggccatattgactatttgtccatttgatatgttatgtccactcctcccatgcatgttcttagttccatgggtattaataccatcttggcaattactcctgtatccatcaccaattaatgtcccaaccgtttcctttgatcactagaaaattcttccacctctctaacctgatcttgatcctgctgctagtatatatgccataaaacaattaggcactggatcatcatcatctttaatatgtaccaactttttgaccatcaacagctccttgtaaaaccactccactttggcaatccttttgtccatatatagcataacatcatgatcactagcctctcaaacttcacaaaaatactttgttttgttggtagcagcttcatcattttcctcccattcttccactcccaatttactattaattgccatattcacaatatctcaacagccccaggaatgccagtacccgtagtactcattaacattaatccaagcaaaaaacaatacatcaatcatctcactctgttacaaagactatcccttttcagcagagctctcaaaccaaaatgttgtatacttaaaagttaatatttgtatgtttattattaataaattaaattaatgttgacttttggcttacaaagtatattttaattcatatttttaaagtaaaatagtatgtgaataatattttataggattaggaacactatatacatatataaataataataataataataataatgtccaataaattatatattcttgacagaccaatatgatagatagcatgaatgaagagaaattgaaggaatacatagaaaacagacctgtggaattaaagacagtaaagatccagaagaacaataatactcccaggccaaaagtacgtacccattattaaatgcatttcccgttattaatttttcattaattgaatgttttgttggtttggtaacaatatattactttgttataataaagtcattataattaaattaaatataatataatattggtgcagatacaaaggattggcaagtctactaaggcttcaaacaatggaattatggcttcagtttggaagtttcacaaagatcacgatgatgacgatgaggactacctaaaccttaaataataatatttataagatcgtctttagatcaattaaatatttctcgtattttatcttattgaagagagaaaagaggaaaaaaaaaaatcatcacattaatcatctgatcggtcctttaattattagatcatacaacaactttagtttatatgtttttgttatattatttattaaataatataatattaaaattaaattttgatattgtaaagtcccttttttggcaatttagatgctaaaatattttttttatttatggtgagattgctttgtgtttccaatccgattttctcacctttattattcggttttattgttcttttgtaacttaggaaagattaattttcagttggacttttcttatatgaaaatttcttgtaagagaagcaattctcttatggaaagttggtttttaaaggaaactttgactattgctatttttcttatgaaattcgattgtgtcttcatacaatcagattatacacactatttatggcaggtatcaagaccgtactcgtttatggcaagtttccttttttggtttgctttgctgcgtcagaatatgtttctgatgctgcaaatcatgtttatcttaagaaagttttgtacaactgtagattcgaccttgtggctgtctctaggg

SEQ ID NO: 117007 - DNA, 1303 bp, Cannabis sativa
  modified_base (51)..(54): a, c, t, g, unknown or other
ctcgaacacagagtcccggtgcggcataatatacccttggttacccaccannnncacaggagctggtggtaacccttgattcactggggcagcctgttgcttgtagggaattctcagagttcctgggggacatcttcaccaatctggtttagggccctctaaagagtctgggccacttaattacagatcacatatcccctcttgagcagtttgaatttgaataagttcctgggtatgaggaaattagacaaactcttttctctatgggaagtttaaagccccaggtcctgatggtatgtctgccctgttctttaagcattactggaattctgtggttgcagatttttgtgaggcagtggtggatttctttcaatctaggtctatgcataagggaatcaatgatacaaatgtagtcttgatccctaaggttcccaattgtggtatctatttaaagcttgggatcagttgggccttcttaagtctgagggtgggcttggcttttagaagactttggaaatgaattaggcctcacaggctaaatgggggtttggctctccttactaaggatcaatcattgtgctgcaaggttttgagtgctaagtatctaaaaggtaggcctttcttgaagtgttccttcaagaattctgactcgtggttctggaagagtgttgtcatgactaaagaaattcttttgcaaggagcctgtaaacttaatttggatgggaaaaaaatactaatatttgggaagatctgtgggttatacatggtcaggatttttatccttaacttgttaacgctcaacctgagggtatggaaaaagtggcagatttattatcagacaatggaaattgggatgtatctaaactccataccctttttgacccagaaacaaccaataatatcatcaaaggtggtagaccctgtggtcaaggtagtgataagtggatatggactaaagaaccaaatgttttattctctaccaaatatgcctatctgattcaggccttgaattatgctcctctatgcaatgttgctctcgctttgtggtataaactttggaattctaaaatcttggatcatcataaggtcctttggtggaacatcctctcaaatagcttgcctatctattccattcttgctagaagaatgcttattgaaaaagtttcttgtcctatttatggagagggagaggaaacaatggaacatcgttcctctattacaactttgcctttcacgtatggaggtcttctgttacgaaaattatgtttattacgcaagtgtacgcaatcaagtagtatctcac

SEQ ID NO: 117008 - DNA, 1387 bp, Cannabis sativa
  modified_base (33)..(34): a, c, t, g, unknown or other
aacggtctagaacgccggtggagccttggtttnnttttttttttttttttaatatagtacaaattaaataagtgaaaaagtatcatattaattaagaagaaaaaaattgagagtgcgaatcataatgtaagacaaataattatcattaattgttgttgttatgtaggtgtacctttatggagcttttcctttggaggtggctgagtgaaaatgattttgtgaatttgttttctctgtgtacaattggtttggcagagcaatatagtcttgaagaaaaatatgagaatttaattggtttattattaataaaattatttatttcatgataatgagaagatgatgccttaaaattactacgaggaactaatttaaaattagttccaagggaggatggaaaactacaaactgatgagaacaccatagatgaaaattataaagaaatatcctatagcaatgaaaagaaaatggttcaagaatattaatgagcttctcaaattataagaggtggctatatatataattattcatatataatactatgcaatacttaattaggcttaatgactatattttttttttgctgaataattaggcttaataatattgatcgcttgtgaaattagttatagttgaaaggtaaactatatttagctgataaagtctttaaagagttcggtaaaagtactatttcttgtgttagggaaaaaagatggatcaatgtaatagtttatagagtaattattattaattaacattaaagggtaatctaatctatagagttgtaattaacgaaattgaagactatataacactagtactacattttttggtgtattaattctctttaaaagttcttagccaagccgcttgatttttttgtttgaccagggctccccgctgttcctcagccttacagtttagctctggtcgggtcttgttgaatcctacactattttcaatttagtcggtttgtttccatccttctgcttgagtgttctttttttttctgtctttttttttttctctggagactcgatcagaagccaaaaatatcacaacgattttaattagtaaggttgataggatttttgagataagtcgatttcaaaattactgaggtgttttggagtacttgaggttgactaaataccctaaggtagaaatttcttagtagctaagaaattataaaataatattttgttattattattgttgttattgttgctgttgttgttgttatttttgttgtggtcgtcgttgttgttaataaaagtttttacttatttaaatatatatgagggatatgattttgtcccgtgatatactttcacggaatgtatttcgtggtacattacatgggtctcagggtacattaaatgagtgtcag

SEQ ID NO: 117009 - DNA, 3013 bp, Cannabis sativa
aaaaaaaaaaaaaagaagaattgactcaaagaaggtcttggaggcttgttacattaacaagagtctcctcccttccttcactctccccaggaggtgcctcgccaatagaaggagggaagttgggacagttagggttgtagccttcaactcctgaagcttctttggcaactggttaaccaacatttatactgaagttagtctctttgaaaaattatacatcaaaacgcttttaacactactagatgaagtctgggacatcatttccatggaaactactccagttgaatgactagcatctatgattggcaacctaggttgtgtaaatggcattaaaacataagtcatgatagtaggtgaaattaagcagagcctgatctttaagagtaatcactttcttctccaaaaccttgacttggtccctcaggtcatcagccacaacaacctgcttcttaaagtatcacgagaagactcaccaagatcaggagctttcttcagagttgccagcaagttcttcttcaaaataccttcctgagacttggcacctctagccacttcttcgagtttggtcacctcactcttaagagaagaaactttttccttcaaggcagacaactggcctttagcagcaacaacccagtctttagcaactccaagctagtcagccaactccaccaccttctagtgtttgttattcatggtgtaagaatgatcaacacaagcctgaagataaaagaaacaatgccagttggtaatacaagaaaagaaagttaagtcagaaggagacaagacaaagaacttactctgaagatgtcggtgaagcatctttaagcaatgatatgtggaggcttggtgctaaccaaccgctgcaatggaatgttctcagccctagcaccaatcacgacctcactattagcaaggagctaggagccttgctcacggaaatagtccattaagtctgaacctgagttcgaagaaacatgtttagaatcatccaaagagaggtcaatcaaagtcctctcatctgcaccaactatgtttgacatctccctactagagtcataagcaataagagcaacatcaacatttccactcctcgtcctgactttcttctttgaagtagcaaaggcagtaagaatgccttgaaccacttcccttattagaggctcagcctccttcgacgttagaatcttcctcttcacattcaaaaaagatgccactgtagccaagaagctcatattgtctacaaagagtaaagagcaaaggttagtacaacaacaagaaacaagtcaacaagtaaagatcatgacatggagtgtcaacaatttgctgattcccccatccttctttggaatagtcctagcagaggtaacttctctgtcatcctaatctaagaacacaaatattctctctaaatatattctatgtcattttgaacagatgttacttcttccatcacagtttgagacaaaataatagtagaactctaagcatcttcatcactttgctcaagtggcattgtccaagactcgttaaagaagcctaaattagcatacactctctagcatgacacgatcaaccctgcctttcgaagattttcagcactaaatagggttttaccatctctctcccatgttgggatgtcgatcaacatgacttcaactctcctcttcatgtcgataagaggagcaggtattttgaaagggtcatatttttggaaggtaatatgtctcaacagaagaacgaaggccatagttactcttagtcatgtgctctatgaaggggccaaattggtggaaattgtaaaaacattgatctctataagttggacttcttttcaagtcgcagaggaagtttatcgcttgaggagttggaataggccagttcctaaggcaataaaatatgaagaaggtggctagaatcctatagccattggggtttatctggtaggggcagacaatgaagaagtcagctatggatataaaccatggattcaagagcaagtaagctcccgcattcatgtggaatctcgaccaagaactacaacaagtattttgggatcgcttgggagcaccatgttgaagctatcgaacaataatttcttggagacagtaatcaactcgaatgatttgagcttgaagctcagtaagggtactagacacaagaggccttagcttaaaggctcgatctctcagataatcactctcaatggcagctttgagaagcacagttgtcatcacttttccactgcgtgccttgtccaagttcttagacttaggcactgtcagcttagctctaattaactaagcaagatggggatcatatttctacctctcttcatcctagccatctcaagttcaacaattaaggctacttataactcaatgaaagttaaacttggttaaaaaaggtctaagtagcttggaagaatttttcaacacataagagagatgttttggattttttggaggttgggaaaaactattttgagggtttgttggagtttaggagtgcttggagtaagatcaacaaaggaagagaagaagtaaaaataataataaaaaaattggcattgaggaggaagaaaaaaaaaattgtttttctaccttgaagtggagaaggcttgaagacttggtgaagatgaaatcttggaggtgctctcaaaatactataggcatgtggaatggaatgggagttgtgaaaaaattggttttaactcacttatttatggttgagtctaatttcctaatcctaaagctacttcgagtcttttaaatttaaagattcctaagaaagaggtaaatgataagtaaaatatataattatatcttttcccttctcctttttaaagctaatttcaaattcctatccaaatatgaatagaaatataaatttaaaaagtaacaacaatttctaatgccattgagactaagaaaaattagagaaatcaaaggaaaagataaatgataagcaaaaggccaaaagtcttttctcttcttcctttctctctctaatt

SEQ ID NO: 117010 - DNA, 1366 bp, Cannabis sativa
  modified_base (36)..(37): a, c, t, g, unknown or other
acttttaaataacataaaaaaaactagcataaaatnnagtatacgtgcctcgcacgtagtttttgctagtatatttatatatatatatatgtgtgtgagcaacgcaatatgtatatgacaaataatgatcaaaattgcaaatggtatgatttttttagtttctattcatgttttgttatatattcctctcacaaatcgcaatacaacaacccatcaatatgaacatttttttaccaacaaaacattagcattgtcaaggtgttttttgaggtaattgtcaaggtgttaagcccacaagaaatgacctttggttattgctgtattttctttttcttttttttttttaataaattacatattgttgctgtattttaatatctgatcttatactaatcattaaagtgtgtctctaatttaatatcctctaaattttcgagggtagttttgtaccatgtggatcgctttgagattttcgccgcccatggcttggcagaatgtactttacggttagacgataaactatccttgtttgagaaggttcaagcgccagtggcgaacgtcctcgtgtaaattgatgagtgattctaatcactttgagaaaaaataaaataaaataaaacatggatcttcgataggattatagggtgcttgatcacaatattatttttcttatttcattttattataacaaattaacaattggacaaaaaaaaaatcaatccgtatgtatttttgcaaaagtattatatatggaatataaagcgttgcgtgtaacaaaatgtcccatcatgaattcttacctttaagagaaaatgctatttatcagggggtttgttcaacttcctaaccacttagatctgagtttataataattattacgtgaagacgaagattaactctagatctttcgtattcatggttggttacgagggcaaaacaaacatctatctatatattgagtgttgcgctatttggcacaagtgatgtcctacactttttatcggtggtattttacaattgattagtgatattttttaaaagctattttcttaagttatatgtgatttgatatttaattacaccaaatcacgagaaaagtgtactataaaaaattttatttttaatctcaacaaaatttgtaactaaaagtaaaaaaattaattatgactaattataaataatcattcgtataatattgtaactaaaaaaattgtggctaaaaatattagccctataattacaatttggtgtcgctaaatgtatttttaggcataatatttattgtgactaaaattaaattagtgataacttgtatccaaattttatattttaatcacaaataattttttattgtgactaaaagtca

SEQ ID NO: 117011 - DNA, 3237 bp, Cannabis sativa
taaatatttttccaacaaactcaatttgaccttctctttctctcacattcaaatgaaagatgatcaagaaaaacaaactacaacttctaattctccagacccacaaccaatctgtcggcaaaactccgtttaccgcccaggccgcggcgcaaactccgaatgctgcagccgttgctgctgcagctgcttaagactactcttcctcatattagttgtcgctatagtcctaacaggcctcgccataaccatctcctgcatcatcataaacccacaccagatgaagttccacgtggcccacgcagccttcaccaaattcgattacgtatcagccaagaaaacccttcacttcaaacttatcctcaacgtgaccatcagaaatcccaacaagagaattggcatccactctgattccagcaccgataccaatatctgcgcttattacgacgacaagtttctcggagttggcttgtcgaatctgttgtcgttgtaccttccgccgggggcgagtagtccctttgactacagttgggtgtcgtttgaaggcaagaaaacggtgtcgtttgactctggtgagatgaagaggtttaatcgtaggaagagtgatgggtttttccccttatttattaaggtgaagatggtaaatagttttaaagttgatcagatgcatattggggattttagaagcacggtcaagtgtcgtctgaagattccccttgtaaacggtactaataatagtaataataacaggtttaaggccactgaatgtgtgtatcatctaaatccatttcctataatttataccgaatagaactattatttgtcatgtctacatgattttgaaattgagatataattgtattgtactctaatacacatttgtataacttatgtttatataaaattatgtgtatgcaaaaaaaaaaaaaattaatattaaattaatctcttttaaatgaatcagaattgtgtgtcaacttctaataagtacaacctaatcaatcaacacccatttggcctagtattcaagatttgataatacattatttgtaggcataataaaagtaattctattctttatattttagtttgctttagaattgaatcagtagtcctataatgcattgactccaatagaaattctctagatgtgaaacatcatagcagcattggctttccaaattaaatctgctcatacgcttagcaacttcagtaaatatctagacctcatatatgctgctttggagtcttcgtcattaagttcacaaattttcttacatcaaataatatggaatgtgacattatttcttaaacccccaacaaaaatttggctaattagttagttatttattaactaacttaacagtcaacaataacagcatacatattgggttcgttggcctaggggactgctgatcttaattattttagaagatgtagacttaaccagaaaaaaagagagagacacagtagtgtagagagagagagagagagagagagagagagagagagctaagattgaaaaattgtattgagtaacattataatgaaagattcattgtgattatttctcggtagctcgtgagattgatgcatgtctcttattctcatctaataaaaattaattggtagcattgcttttaaattggagtagtactaagttcacattgaacttaagatctgaactagtgtaatctcgtgtgttattgttgtgtctggaaattatctaaattcatgtgtttatgtttttgatttgatacgtgtttgctggttttgttcttgatttatctattttgatttaacttttctttatttaaattttttattgaggttaattcatacatataagaattaaattttctacctgaaaatgagaaacaatttagcttgtccagcggccaagtctgcttggccatatatactcactcagtcaccatagtttttttattgtatatgtactttcgttttttttacataaataaggtgtaactgatttattatatttatataatagtacatgagactttaaatttttttttgagccaaaccttttttaaaagtacatttaaaataaaataaaattaattaaatgctcaaaccaaactaattactaatccatttataaataaatgcttttgtttataatcataaattgtattttgtagttgttttatttttttaagtaattattcataatttttacatttacaagtttataatattatataaataacaataaaaaatattctaaaaattgttctcaaatatttatattccactcaaaaaattatacaataagaatatataataagagaatatataaattagtctggtttgaattactagttagaattttaataaattcgtgaccaaattaagtaattgtaaatggtttagattaaccaaaacattgacagcaaattcatttaatcaagacgggtgggtttggataatttttcatatatttatatatatatatatatatatttaaatcaaatatgtaattttgaactattcttacttatattataactaaaaatatataatacatatattttatacattgacattcatattaataagacaatctatttatatatctataaacgagaaatatgaggcgatgacggtctaaaatttttccaaaattattatttttttcctccttaattctctcaattttttaatactttattatattctcttcttaattctcttcatttttcaattctttattactaaaaaatatatttatatacaactttaaaaaacacatataaatatctatttaaataaaccctacaatttaaaagagtttatgaaatatctatttaaattaacccaagaatatctatttatataaatcctacgatttagaagagtttatgaagtgatatctatttaaatcaatctaaagttcagtataaagttatgaagtttttaatttattttatttcttaattttttttttatttttttttatttttaagtatattctcttattgttgattcaactaatatatatatatatttatatatactttataatcttaaacttaattatttattttttgttctttatcttaaacctaacaaattttgctttcatatttataaaagagatttagaatgatatggaggacatcatcataccagttttttcacctaaaaaatagtttctaggcgtttggttgggaggaatgaaaatataggaataagaatgggaatgagaatgagaat

SEQ ID NO: 117012 - DNA, 750 bp, Cannabis sativa
cgctaatgtgtctataaataccccctccgaccgatcttctcccactttccccaattttttttttcaattcatcttcacccaattttctcacatttctccaccactcatgcaccaccacgacgcaccaccaccacaatcacgcacccaccacagaccagatgagacttgacgacgcaccactgagtaccgaccgttttcccccattttatgttatttttcttgttttatatttgaaattatatttgagtaaaaaaattttaaggatatatagtttttaggttttaaatttatatgtataatgtgtatttatatacaaatctgtatagtataaattatatatataaatttgtgtataaatgtatatatagatgattttaaggtttataagtttgggtatatatagataaatatataaattttggtatacataaatttgtatatatatctgtgttgtatatatataaatctagtttatataaatatataaatctggatatatataaatatatatagatgattttagtgtttgtatattttttgatttgtgtatatgtatattttgatctatatatatattttttatctgtgtatatatgtgtatattatatatataatttaaataaacatatatatataattttttgatttatatacatggggtgttatgtaaaacctcacatcactttgaggttttacacacctcaaataagacaaatagaattttactgtagtaaataactttttcactta

SEQ ID NO: 117013 - DNA, 1839 bp, Cannabis sativa
  modified_base (1787)..(1801): a, c, t, g, unknown or other
taaaaatataattttttttcaacaaatagtatcttatgtaattattcattttataaatactaaaataataataaaaataattacaaaaattgggtattattaatattttaaggatttttttttcttttttaataaaaataccccactatttttttctcaacaacaatgttgcttttatgtgatgccagagttatcaaatacagtcaaaattgaaaattgactgtggtgagggagtaatctttcgtttttatagtttgtcgtttttcatttgatctctcagggtcaatatcacaatctatgtagtttacaatcaacgttgttttatgggattggagttgttcatttgtgttgggtgttgttgtcactttccaattactttctttcatcagtcattattgttttggatattgtagttactagttactagttactggacctgaaaatccaaactcatcccaagtttatttccatgcccaaattctgaaaattgggtattatccctctcaatttcatagtcatacatctcaatatatattgacatgtttttatgctatttatgaataggtgatagtggcgataatcttaagaatgaagttcggagacaaccaagaactctcaaagggttactccatattggtcgtgattgtgatatgtctatttgttttggccttcggatggtcatgggggccattgggttggaccataccaagtgagatttttccattagagactcgatcagccggacagagcattacagtggcagtgaatttactcttcactttcataatagctcagtctttcctttctctactatgcgcccttaagtttggaatattcctcttctttgctgcctggattactctaatgactatctttgttgttgttttcttgcctgaaaccaaaggagtgcccattgaagagatgactttcttgtggagaaagcactggttttggaagaaaagggtgccggtttcatgaggaggaaaacctaatgagacatgtagtttagtcattgttaaaaaaaacgatgacttattttgtagctttcatttgtataatgtggagaaaaagaagcccagtggtttgtacatggagggagaaaaacagtgcaaggaaaaatcatttctcatagttattgcttctgtggagatttatattcagtttcattagaattttgggtctttttcctttttcttgcttatgataaaaagctaagctacttcagtatatgatccatttggtccatttatagtatacaaagtaaggaaaataggttgataaacatttttcatgaatcattactattttttcctttatataaatgattaatttaggcagccaaattgagccatgcatgattggaaattttttatttatcttttttaaaatagaatttatattttaaaaaaaataaactaattttatagatatttataacttcatataatacataatatgtagtttataatagatcaaactatttaatactagaccaaatgaatctagtgtccacggtttggtcaatccgaaccgtttttaattatatagtttggtcacaattttaaaattctcatgcccagtgcaaattaaactaaattaaactgcttaatttttaacttgtaattaataagattttttttattgaatattgatatttagaaacaatcataggcataatattaatggtaatttaatattgttttaagaatatttattttcattgttatttacatactataagttttaaaaagtaaaagaatgtagtaaatgttataaaataatataannnnnnnnnnnnnnnatgagaagaaagaagaagaagagagaaagagaaagtga

SEQ ID NO: 117014 - DNA, 985 bp, Cannabis sativa
gtaataaaaatacaaaattatagagtatgaatttaaaccagtataaaaaaaatgagttagtttatttaaaataaacaattgacccaaataaagtacgatacaaatttaagcatcagactaaattattggactcgtggatcattcagaactacgtaagtcccttataaaattattatagtatagcaatatcaccacacaacttatatttttttatgacatataatataaggatccatatttttttaatgacccggtacaaaatgacccgtattttcaaaactcaaaatggaccgttctagcaggagatacacatatttctagctctatatctgtcataatatgtgtgtttatacaataattaatctctattgaaattaggttaaatccacacacacagttatacataataatgttataatattattattgtctttttatctttttagggtttgactgagtcagcatagtatagtcacattttcatgtaacatctaatcaattggcataataaacaggagcctagctaagcttagtagtaaaaaagcgatgcatgacaaaggtgagactttatctgtttaccacctttgaatggacatattattaattattaataatagtttgggacactaattatagttttgatgacaaataatgattatggttttgatttaacggatccgaggtttaaggacatcaaaacctccaaaaagctagtgacaaattttcaagacatacctaacataacaaatgttattgattaatggcatttatcataatatttagaattaagatgcatcttcatttgtagtggaatatttaggccactaaatatgttaggagaaagaaaaaaatatatcataatcaccattattcgccacttaattaaagtttttgcaaatagttaacaacgtcccaattattagtcatggtctttttaattaattatcacacttagaggaatactagttaataagtcaaacaattt

SEQ ID NO: 117015 - DNA, 2792 bp, Cannabis sativa
tttggtttctcccccccccccaaaattacaatcagtacacattagggagtacaactgtcagcacgcacatcaagacccatttgtcgaagcaaagtaataaatgctcaaaatatgaaaggacatttgaatcttcgtacctcgtgacctgaccttatcaggaaaaggcaaacataaggatctagacatgtgtcacctattcaagtaccccatagactgaataagtttacatacgagtatatggttcccacataaacttagagggcaaatgttatcccaaattccacacaaggtgatgtggcatctaataaggtgacacttggaaaatattctcaaacttggacggatggtattttctcaatatgtcatttagggtgattcatgcccaagaatgatactctgaagattagcatggaacatctggacaagttaaatgttaccatccaagcagcttccaacgtgatattgaagctgagtactctacacaaggtaaaagcggatgaagcacaattcttagggatatttcccatttatatctcccatttaaattcctatttttatggagttaacatgcattgtaaagaaataataggaaattggcttagttttcctttttattcaaattcgttttaggaaactaatttaatatatttcttcctatataaacagtgaattcatttcactatcgaaggatccaatttctaattttctagagagtcattatgctgtctaaataattgtaaactttttcttaaaattattgacaaactcacttggccagctccttgtgatcttgataacatttcaaagtaatacaagtaaaaggggagtattattgccataatcatggggttgaacctctataaaattctggtgttcttattgcataaatatattaattattatctattatttcatcactttaattgactcagcgttattggctaaaagtgatgtcaagaagaccaaaatagttatttcgagaatatttgatagataagtccctactttttaataaaatttaaatttatctatatccttttactagaaaaaggtttagataaaaccttaagttttgtagaagcaattagaagacaaacacattttatactccatctctctctttcttctccattcggctcaaaccaaacctggagaaaaaccaaagttttcttctctatttggggtaagttttccttattttcttggtgaaattggaagtttataattaaattattgtgggacttcaggtctagggttgttggtgctattaggaattattttagtcttggttttaattagacttgaggcttatttaagttgtgtcgttgctagtgtgtttagaagtttcaagcttgagtttcaatggtgattttgtggtttttgaatactttttatttttgagttatgagatttgtttagaacttatattagagctgatttggagagtttgggtaggttttggtggagtttgggtaagatttgaagagttattattcgtgttttacaaaaacagtttaccatttctacaaaaacggtgaactattttgggtaaacggtgaaccccaaaacggttcaccatttggggtatttttaggtgcctaaatttttttgttttatcgatattcaaggtatttccacgctatttatcgatagaaaaatttctaattttgagtttaagtcctacaatggattaaatgagttgtttaccagattactgttattgtgacatagggtccgagatcatcaagcgttttccactcgagtttaccaagatgcttgaatttggacttgtggtaagaaaagtataattgtaccacatagcatgtcaatatgtgactcggtaattactgtctataagagaaagttaatactttatttagttgtctcattaggcagtagtgtaagaaagagttattactttattagattatctctttaggaaatagtgtaaaacaaagtactactctaattgaattgttgttaggcttcttacttatcagttgtttctttagacagaaataatgacattggattgcctcgttaggcgacgctgaggaatggttactgtagtaagtaacagtttagtttgttttataagatgattgtttgataataatgggtgtttgtattagataatgtgatttcttgcttgtgagagaagtaagtgaatagttggttatgatttaatgattatgtttgattatatttgtacctggatgtatcatgtttatgcttttgcttttcttgttgaatctttgtgactcacatgtgctttgtagtgtaggaaaggaaaggattgagctaggtcagccatgagttgtaggtctttttgacaaatatatatcaacttatccgatcggcaatgccgagtagttagagctttagtttgtggcaactctgaaaagtataagtatttgattgtaacattttaatggaatatttgtaagtagtttttttaagaaaaaaaagggatccccaaccctaattattgtatagtgctaaaaaatcgactttatacctcaaataactaaataaacttttaattaaatcacactttttcgttaaatcgttagtatattattataaactaatttataaaagcacacacgtggcaaccctacgagttatgacgttataacacaactctgtaattgttgaatagaatagaaaacaaacaatgaagaaaatgttatattattttataatataataagtatagattaaaatgtgataaatgttatattatttgatataatataatatagattaaaatatttaaatgtgacaaatta

SEQ ID NO: 117016 - DNA, 1326 bp, Cannabis sativa
  modified_base (1296)..(1298): a, c, t, g, unknown or other
ggctcacgggtgctctactgtgcaggaaaaggtaagactgttgttgatcagccatgagtgcaggagctggatgaagaaagtacatgtctagcccatatcagaccaagcgggttggggtctaccagtgttgtgtttttaagactctgttttgctgcttaggccgactgaaagaaaaggacttgtaataatattttgtaaatatttttttggatccccaattctgtaacttttagtttataaagttttaaaaaaatattacaatatttccattcctagtgttattaaagtttaaattctgcgctaattttattagtaatcctaagctaggggattagggttttataagtattttcggtagtgtgcctaattacttagggcgttacattatatgtcaactcaaacttccttatataggagctgagcatataacctatcctatcctgcatacaacctacccctacatataatctcctagcactaaccttatctcttaatcaacttgttgatcgacaaagtagtatctcattcgtaattaaatacttcacccaagagtttttattaaaggtaataacccttccttttatacctttttattttatcaataattttcaggtggagtttgacaagaatggcaaagcttatggagtgacctcagaaggagaaactgcaaaatgtaaaaaagttgtttgtgatccttcatatctccctgacaaggtaagccttttttggccaaaatgaaacatctatagaagttattcatagtttatcatattgtgttgtgacttctggcttattgaaaatgcaagtttgtgttctgtggctcaacaggtgaagaaggttggaaaagttgctcgtgcaatatatgtattatgagtcataataagattatgtatcaattagtatatataccagttagtgttagtgtgttctgttagtatgctgctatggttgttaggttgttgtctgttatttgttatttccatttatattgttcctatttttatggtgttccttgatttgtggaattttgttttcatactctctgcttgcctatataaaggcttgattccttttgtatttttcattcaattcattcaataaagacacattattgttcttccctttcttccgcaatatggtatcagaacaaggaagatatacttccttttgatcctgatttccattgttcttcctcaccgtgttctttgttcaacttccccggcgacgttcgatgtctgcagttgaagaattcatttcttcaatcgacattcttctaggggtgttcatcaaaccgcnnnaaccgcccgcaccgcaccacaccgcaaa

SEQ ID NO: 117017 - DNA, 2161 bp, Cannabis sativa
cccccttccactctttcaagccttttagatcaataagctctagagattcaagtcgagggaaacctcctcttgagcacaccatctcttcgcctaaaaaactatttgaaccaaggacaaggactcttaatttcggtaacttttctaatgttggcattggatcatcctcaagtctgagctttcccaactttaacttcataagatttggggagaattggttgacttgtggtaatcttactataggtgagtgtactccaagtttataaatttgaggacaacttaatatcaaaggaactatatctatcttgatgtcaaatggatgatatacttgtaaagaaaaaagatgagggaatgtgattacagtttggggactttgtaagaatgtgtcgaaatttccatctaccaacattactaatttcttgagactcttcagctgtagaaaatcactcagaacaagattcttggtatgaatacctaccaatgtctgtaaatttctagacttagttgacctcaagaatttaccaaattctaccccaccaactagagtaaacaaatataaatgccttaactgttccaacttgcacactgaattcggtaatttatcactaacggtccttactctcaaagtctgcaggcatcttaaattgccaaaagaaaatggaatcattttcatcagcatattaggaatactcaacatccttaggtggataagattcccaatttctttaggcaacttcatggtatagtgactagtccattgctcatcaataatcaaaactctaagcatcaaaaagtgattgcaagcatgtctcaatactcgtttttcaaacacaattcttgtcccatttacagtaaggcacctaagagagctgtctatatttcgaatagtagaaacaaaattattaacatgaatatttttatcaccattatagatggacattcttcgtacatttgcttctattggttcctccccttgaatcctcccgtcaatgaaatgtaaaaagttttcttctcgagctttagacacacacaagtctcgcatgagatcatgaacgcaaaatgatttaatccttcccattgaactcatttcttttacctgaatcatgctcctttccaccaactcacttaaccaatcatgtgcctcatcctccaaagtttccataaaacttcctcttaatgatataaaaccttctgctatgagtacatgacacaaatcttttactcttattgtgacatcttcagcgtaacgagccaagtacaaaaaacaaggctttaagtgacgtggtaactcactgtaactcagtcctaacacccacaaaacactacggtgtcttgagtcaacatcatgtcgattaccttgacctatgcagcgagttacattttctttcatcatctcccactcatagatggtgtgtttcttagatagaagcccagcgagcacaatgatggctaatggcaaaccagagcactttctaagcatctctaccgcaagttctttcttcctttcctcatcatcatttgactctgaatttaaccaatgaaaatgcacaaaagttcatatactgttgggattgtaggacaaatgatcaatattcttaataaggaaaatgatttaatgaacaattatagtcaaatggagaaacaaaggaaggatcaatatcatcatcataatggcattttgaggcataatttttctttttaccttttcatttataagcaatatcatatacttatttgttaacagcaataaaatccatatcaaactattgtaaggctaaacacattactcaagattcatcaccaactctattaatcatctagaattgtaaaccagtttgagtagtataaaaagggatcttgaatcctcaaggtgttctaaggtgtgtccagaaagagtaagagcatataaacagtgtcccaatgagtgtgtaaaagtgaatgtgagtaaattaaaagagtgagtgcttggtatgtgttcatgagtaaaatatatgtatatatatattatgataactgaaataaagaggtaaatatattacttggatctgttccaatagaagagtacttgctctgaaatagctcccaactctccttgtcattgaggaaatgaggttcatggatgaaaccatgtggatcggcatgcaaagctacaaccttattccga

SEQ ID NO: 117018 - DNA, 1161 bp, Cannabis sativa
  modified_base (1109)..(1109): a, c, t, g, unknown or other
tgctccatgagactgttctcaaatgcagtttgcacaaggaaataaccgaaagattcacaaacaatttaaagacaagaaaatagaagaaatcaagtcctagaataaaatatttaaactactttacaaaggataattcacattagaaacttacaacatacaattactactacaattgtattgatagcatcagggtcatctctctcagcttatctcatgttagaattatttttcaattcagttatgtcaatctttagctccttggtagcaaccttattctggctattaataaaatcttcaaatttaatcatattgtcatcacaattactactgcaacatatgcctttcatagctaatcttactgccaaactcttatttctcttttcaggtgcaaaaatatttggtttacattttgctcctccaatatttattaatggagcaggagacatcccacaaaacttagtcttattaattacaaatacttaaagaaattcctttatatatttagcctgaaaccaaaatacactatgttaatgaaaattagcataatgatcaaaagatttgaaaaaaaaattgatgcaattgcaaaccaaataaacatgagtaagtcacattcatatatgaagaaaaatacacattcattctaatgaaaaatacttgttgagatcatcataggttctccgaaattgaatgtttagtagcaaaaaataacgaaatcaaggtctgagtcatattcatgggtctagctcaaaaaccttgtttgaaagcgctaccaaatcggaaatgtccgaagtgagaagccatcaatatcttcctttgcttcttcgtctactcgcttcccctatgactatctataatttttttttgaatcagtacgaattgatttccttcacagatcaatttccttattgaagtaatgagaatcgatttgaatgattacggggatgaggatcgatttctttattgaagcagtgagaatcgattgtttctttattgaagcaaggatgagaataagaatatttgattatttcttgttgaatatttctagacgtctccttctcagagctgagaataagaatgaggaaaagatgttggggtttatgccctaaatnaaactccatttcaatgtaatctttgttgtttaaatatcaataaagaaataga

SEQ ID NO: 117019 - DNA, 1454 bp, Cannabis sativa
attcatcatctcatttagaaaaaaaaatgagtggtagttctgaaaataatcccaggagttaacttgacaattgctactaagctttttttaagtgataaaagagatgtaaaattaaataaaaaaaggtgatgaaatgaataattaagtgcacatatatttacttattcacatcttgggtatatattcacagatcaagcacttgtgtttgattatcattgattgagtaacatgtaatctagttaattaatatttgctagtattatttatttatttattgaggcatatattatacaatactaataatatttattccaaataatgaaaagagattggaaaaatggagaggagtggagtgggggcaaggaatcaaaagatggtctgatatggttgcttgctctgttatgtcggtaaacacatctgatcatcatgattaattgaattgaatttgttatgataaaatgatacataacagatatttgggttgggtgtaaggatcttaattcaatcattcatattaattaatgactctttaatgtttgtaccaatttgcatcattgtatttgtagctgtatctgtacctctaacactttgattgtaacggctaatatcatacgaatacatattatagaaatgcaactttttattattatttacgacaaatagcttttattttccttaaaaatattacttttgtagaattttaacacttcaactattttgtgtagcaaaaatttcttgtgttatgataactattattaaagtactttaattcttttaaagggttaccaatgaaaatattattgagataattagataatgtattatttttatattattataattttttatgttaataataaaaaaaatacatgaaaataacatcaaaacaacaacaaaaaaaataacatacatataacaaaaaattaataagtgtacaacaaaaaaaaactgtattttctgtaaataaattaaaaaaattgtaaaaatatttaaaattccgtgaaatcgtatttttataattttttttttgttacttttaagtatttgtgaaataatctcaatattattttcattgtaaaaaaaaaatagtgtagatagaaatataaaatttatggggacaaaattgagtattataagagaaacaactcattttttgaaagaattattcctaatcgtcctaggaagcacaaatactttatttggcataagatactgaacaagttattattcaaaacagctggtgcttttttcactttcaatttttgttaatactgcaacactcattgctaattttgatatatgcatccaaccatatattcctttttcctttttcttttttctgaaaagctatatccaactatattcactcaatgcctaaactatatactaaggtggcgtttggttgtaggtaataaaatggaatggaatggaaaggaaataattttcattccatt

SEQ ID NO: 117020 - DNA, 732 bp, Cannabis sativa
  modified_base (687)..(687): a, c, t, g, unknown or other
tggtatgtatatttttttaaaaataggataggaattgtaagtaagaatttttttttaaaaaaaactaatataattaagaatctacttttttatgtaaaataaaaattatcaagataaagtgtatttataaatgtttagggtataaataaaaattattaataaaaaattacaaaaatgtaatgatgattaaatattaagtgaattgaggacacaactttcttagattgggaaatccacttttttttaataaaagaataatgataagataaagagacatcaaaattaaaaacaatataaacaaaatgggccatctaatattctcatccacaaaaaactatacactctaaataaaacatttttttttaaaaaaataattaataaattagcttggccagcagccgatgatttgacgattttcataattaataaacaaaaaagttgagttgggcgactttattattatttttttacttaactttataattattttgagggtaattggtgtttaattgtttgttgtacacttaactcttctctaatttagtagcaatactcctaaatttctttttttttttttttttttttttaaatttgaggtattatttaaattttaatgtaaaatatgccaattaaaattatgggtttttttatttttacactttaaagtaattttttttttttgtattnttacgaaattttacatagaaatccctattacaactagcgctgcaa

SEQ ID NO: 117021 - DNA, 1439 bp, Cannabis sativa
gcttgattgaatggaatgcctattcttcttcttctttttcattttgaacgatatgggttccacgttttatatacaaaaaggtttaaataactgaaaaataaataatacataaagtaccctttatcggtttttcaacggttcataaattgttaaataaaagctaataacttccccaatagcaacaaaagtaaaacgattcccaagatgaagttatgatattattatatgtatatttatatatattggtcagccccacaatcagaatcaaaatcagaagatgtatgtttcagtttgaatgaacaaaattatagtgagattgtacggccactaagtggtgtgggtctgtggctttgggcctctccttgaatgctggactctatttttggtgatttggtgaatcagtactcagtcacaaatggaagttaaaaaaaaaaactcattcattcacatgctcatcacacaacacaccacaccacaccaccactgcacacgccatttatatcttttggttgatcaactcaatcaatgaatggtatcattacataaattcaaaaacaaatttcgtaccaacaaaattaaggtttcacagagaagggaaaaaaaaaacaccccaattaataagccattgcaatgcaagtatttatttatttatttttttgaatagccaaaaaccaatataattatctaagaacaaaaatatcacaattaaccaagataaaagaacacaaacacaaggcaatcgaaaaagaccatactctgccttaaatataagattcaaatatatataggatgcatgtaattattattaatattatatcaattttgagggagtaagtgccaaatgttattatagtaatgttaaaataataacatatactaaatttggtgctacaacatagcccatgccatgccatatgacaattactaaactcacctaaacaaagtaaagatatatgagaaaacacccaatacttaatttcgttcatttcagcacaaagctagtcaagaaataccaacaaaagacttcaatagccctagctaagaaattaaattaagaataattgaggggtttgaaattaaagcattgttttattgttttaaaggtctagcaaaagataacaaaaaaaaattaagataggaattaattacttattttcagcccccatatagcggctaggagtcttgtttattaggtactctacttctttgctgcctaattacgatttaaaagaccacgccaattaatcttaattagtgaataattattagtgtacacctaattttgcaaaattaataccccaatataacattaccttacaatatgaattttctaatattaagttcctatttaattgatgtgagaaaagctaataattagagctattaatgttgagcttcttttaaatgggaaatttgattttctatacttagaaaatcaa

SEQ ID NO: 117022 - DNA, 1340 bp, Cannabis sativa
tttatatattacaacatattttacctgggactcgaacccaggacctccaacactcacacacccacctatggccacttgagctagccccaagtggttttatttattttagcatttcttctactactttctttttttgaataaaaatttgctgtagtattaattaaataaatcagctaacaaatttttttccactactttaatttgccttgaaactagcattttttatggtaatttttcttaaaatggttttttaaattgtttttaataaattgtgtacaacaattcacgcaagtgtgatgttgactcagaaagttttaaatttatcaaatttatattggtatattacttataaataatataatatttaaattaaatacgtttaataaattaataagtgtgtatgacaatttatattagttttcatcattttatgataatttatattagttttcttgttactgtatgtaacttcataattatcacttatatagggtcagcctgagaatatatataggcaagttagattttgggaccttaaaaaatatataaaaatatattaaaaaaacaagtgttatgtgatttgaacctatgacattgtataacatgtgattcatctcaatcaactatataaatatttattgtttacaatacacttaattttacttaaataaaagcctaaactttttattttttttttttattttgggccctcaaaaagtgtaggcattaagcacgggcgtagctcgcctatccctaaggtcggccctacacttatattaagtgtgtaaaaaggtattacagatcttaatttgaattcttatccttattctcactgagttcataacatccataagaagttatgagttagaatttcaaatgttgatatcttaaaaattatataaaaaggtctaaatgctcttattgagtaaacaaattttctatcaacaaattaatcattttactagaaatcctaaaatgcttgataattcttaaagttattcttataagagttctcttaatacttagagatagggaaaataaacttttagacaaaagtgtactacctttatacggatctccacatttttatgtgagtatatagtgtcactaaaagcttaaattataataataatattttttttcttcttatatatatatatgtattgtactaatcttatttttttacatttatatatatactagcaaaatactacgtgcgaggcacgtatactacattttatgttacttttttccatgttatttgaaagtaatacaattaaaaattaaaaaatatatattattaattattaggtgagattattattatgtgtataggaaga

SEQ ID NO: 117023 - DNA, 1687 bp, Cannabis sativa
  modified_base (1442)..(1453): a, c, t, g, unknown or other
gttacttttctgttacttttatgtagttttcttgttgttttcgtgttatttctataaaaaaccgtaaaaatgtaaaaaaaaaaaatcttaaaatgtgaaaatataaattttttataaaaaaagtgttttatgtaattattcctataatagatcaaataaaggcaaatttagtgggtcatatgaaaaaaaaaatatttttggacccttatttaaaaaaatataataatttccaatatcagtaaaaaaaaatgtgcaactttaaaaggaaaattttttcaaacctctgggctaggtggactctaaatacagaattaacccgtctatgcctcggaccgagtcttcaagaaggatacccggccaccaaaccattgcatgattcaaaaaaatgaccaatttggccaaattataggcaatgatatttgtagctctatgatagtttttaaactctacaacaccctattacaattgttttttaattagtagttaaatatataaaagataatataaaataaaatcttcgaacatctaaatacagtagaatttttatataagactttatttaagaataatttttaatttagttataaataagaataacatctaaattattattaattaattatacatttttttaagtcttacattaagaaagtatacttctatataaaaataattttatcttaataaaattatatatagtttataaatttatttatggagtattaataattttatttcaaattataatacatgtataaatattatacttactaaaaaaataattttataatgatatacattaaagattgtttattgttagtcttggtacatttaatactttctggtattttaatttttttaatatacttctatttagctataacctctcaattaaaatataatttgttctaagcatgtaattatactgtaactgtgtaattaaaagtaattaagggttcaattacatttttcaatcctcatgtcccccttaagaaattactataaactttactgtatattaattattaaaaaaaatattattttttatgtaattactaagtattttgtcaaacaagacattaagaattcaattgtaattaccatctcatatacgttcataacttgtattataaaacatactagtaataacacgacttatcacttacatagtaacttccaaactcgctctaagtattttcctacttgtacatctgtttgataagtctaaagtaattaattatttaattatatattaatcaaataaaattatagtaaatatatatagttggaatatttctctatctttagattttttctttgtgcttatatttatttatttttattattatttgtataatacatttacaacctagaaactatttgaccaataatttgactacatatctttttcatctgggtttcctaataataataataataannnnnnnnnnnntaataataataataataatatcaccttaatgaacttcaaaaagaatttgtttagaagaccaagtcaaaatctcaaaacccatactaaatccagtcatcaagtgatcaagaaactataaatttataattatatataataataataataaggttaattaggattttttttcctgaatttcgacatgtatcaaatcatgctccttgaactttattagccgttaaaaattccccctaa

SEQ ID NO: 117024 - DNA, 1703 bp, Cannabis sativa
  modified_base (1553)..(1553): a, c, t, g, unknown or other
aattgcagacattaatatttttggtgtcgaacctataaaaataataaatgagttgttggtgggtttaaattagtgtcaacttaaactcctctttaaatttataagagtgatttaggccaaatttagagattggtgagatgtaattgcataaagggaaagggtttgacattatttatattttgttagtattttaaattaagtggtactagtagtggctacatttaaacaaaatttaaattattaaaaaataaaatttaaaagcttgtaaccataaattttacataaaaagaaaaaaagagaggaaattggttggagagttggtttttattattaactaaaatttgctcaactagttgtccaagacctattctggttgctgaattgaattggtccaattatatcttcaaccaacaaaacctttgaaaaatctcactctaatattgtctttacattgttaaataataacaccattaagaaatgaaaatgaaacatcagtacgtaatccatatttttgtgaggggattttgaattgaggaaagttaaaaaaaaaggtgtcatctttaatggtgcatcatcttactaaattagtgtacaatttttaaattattctactttaaaaatacactaaattaaattggcgcgtaaagtattttactgtattaataatattaaattttgaatctataagataattttttatttttattttaacccttctttctttttttttttttaaaaaaaaataagaatttctttaaactaattgttattggagcattattaaaatgtgaataagtattcgtccaaattgaaattcctaaagaagacgtaatagacttggctagtgcatagactacatcattcgtaaaacgcaaaatgacacaacaaaaactaccatcgaccgcagctaataaataagaaacatcatcaataataaaattaaacacaacatttttgtctaaagcattagtccaagaaatagcaaccgatgaattacactccaccttatgcactatacttcagcctaaccgcccattccagccccaacctctcaccatcagctcaaccccatcaacagagaaattccccaacacacccattgcccacgacgcacaaaccaccccaaaacaatcccgaattacttcacctaggccaacgaaactcattttaggtagggatgtcaattatacccgtgggtttgggtacccacggatacctgctcctaatggggcagtggcgggggtcaacttttgggggcggaagcaggtatgggtttaaatgttcatacccgaatcggaaacggggctagggcgggggaatagattcccgccccgaactcgtcccaatatgatatgtgtatatatttaagttttaaaattataactactacaattaaaataacttcatgctttaggctttttattgattatagtaataagacatttcagttttcatgaaaatacatgcggtgatgcatattaataaacacacttaactgctttaaaaaaatgacacttattatttttgattaccaattttgtatttacgaactncatttactatacacactattttactcatgtttattgttttgattagttttaatgattgttgttttttaaattctctttgagacatcattattttttcaaaaatatatatgtaatgggtacccgattggaatccttctcccgtcgggtaat

SEQ ID NO: 117025 - DNA, 1295 bp, Cannabis sativa
  modified_base (149)..(155): a, c, t, g, unknown or other
attctattagttccacatgcgtactatggtaccctcgcaaggcaatacccaagcaaagtctgtgaaacttagtgaatagcaagtgaccaagagcttggtatgcatggtcacttggggaacacccatactgtacaatgcatcgaactagnnnnnnnaacttatgcagagaaattttaacacttagtataagctactaacctgcctctaagtcatgcaagcattcttcggcttggcaaagtaaatccgaacccttacttgtcaaggccataagaagatagctaggatgaaagaccgcctagttggtcacacaatccatgataaaaaaaagttacaagatcaaatagtagtagtgttcaaaaaaagagggctcatggccaaagatacgaacatgaagattctgggactgaaaataaagtaatgctctaaaaaggcttctggccagatagacgtgaaaatagtgttctaaaaaggctcttggccacataggaccgacaatttcaaaatggccataggccacatggaacgtaaagtgagtaatgttcctaagccaagatgccacaagacctaaaaaagccacacgctacgcagaacatgaaaactaaactctatacaatacaaacataatgctgagtactaataaaaattcaatctacatgtgtgcatgggcaacaagaactgaatttggagccgccaagttgagatgtgtagagtccaggctggccccatcaccactatgctagctggcttggtgggcaacatcctagtcggccacctcctccactagtgggtcaaccaacacctcttcacgggtacctaatgatgacttctctcgataagcagcggtctggttcatctccatccggttctcaagcaacgccctcccacgggctagtgttttctctacgaaggccaaaatgcccatgtatgacaactcagcttcggggttgagcaggcggaactcgtaaataagtttagaggacaaatcaaattaatactccttaatggcctattggccatcaagagcctcttgtaacttctttttgtgcttctcaagatctgtctaatactcggagatgagagcagcttggttgatattctcgttgttcctggcatacagcatagtctcctttcctgatatcattcttaacttctctgctagaaaggcctccagctcgacattagctttatcctttacggtaacagatgcctctaacaccttcacacgctcttggaaagtgtttgaagaccctctagagttgttgtaacgtcctaatgctaaggcacgctacagtgat

SEQ ID NO: 117026 - DNA, 1975 bp, Cannabis sativa
tgcttattgttccaagtaaaaaaacaaccggaagatttaagatcctccattccccaatgcgccacacattcttgaaatttctccgaaggccttctatgattcctccttccaattctttcctcataactcaaaatctcattgaactcacctactatcatccacggttccataattccatcttgtagctctttaagatcttgccaaagcatgtctctacctttttcatcattaaatccatacacaaaagtgatgttgaatcgtctggtattctggtttggttgggcaatacaatgaatcatctgtgctgaacacttcttgatatctaaagtatacatactagggtcccatgcaactattactcttcctctatccatccaagaattattattagtaaaacaccaatccgagaaaagcttcatatagagatctcccatatttttattcttaactttagtttcaagcagaccaactaaaccaactctttttaaagaaattagttgcttaatttccctatgtttaagctggctattgatccctcgaacattccaaacaagtattctatccattggacgtagagggcacccccccctctccagtgttgttcctgtattccccagtttcaccttcatccgtatctaacacttcaaactgattcgagacaatcgcagcaattacttctgaagttctctgaccattgctactgccacttataacttttttctgcattcccacaagctgaaacccttcctcatccatgactggtctcttttctttcttatcctctttggccttgggcatccatacttgcttcacttggttctttttcctacaaacatcagtttcatgtcccattccagagcaattcttacatacaataggcagccattcatacttcacatctaactcaatatcatggttaaattcatctgtaaatgaaatcttcacaggaaactcttgggctaagcttacctcaactagaattctcgggaagaggagtctatctcggtgcttagtaatatcatcaacttgaattggtttcccaatttggccaacaattttaaagagagaaggttccccccaatatttgatgtctagacctctaacttgtatccatgtaggaacggaatcaatgttctccttagtaaaatcatccacagcattccaaggtctcataatgaaaggcttcttatcaaagaagatgaatcctccattcaagactttatctctctgttccagactatgaaatcgtataataaaaacaccatgagacaacatacccacttttacaacctcctccttccacattcgccttgcaaagccatctacaatattcaatggaggattagctccagccacataccccaccaacgatggcttccaataattcacttcttcctctatatcagttagttcaatcttcactttctccttaccctgcttcgctgaatcagtatcattaatagaacagaaggagttgtcaagatttcttaccagacgttcggatcgtagcactggcggagtgagcattttctcccccaattccacatcacgagctgttctgtttgcaacttctagccattctgaaaaatcatccttagttcgctggctccgatcaacaaaacccgaatcataaggggtctgcccatgtttcggatctaaatcctcatcatcctctggttcttcaagcacttccaattctgaaatccctaaaatagcatccatagatctcgttttaattaccctatcagacgacgattgaccagtcttctttttcgtcccctttcctttagctttccctgccactcttgtgcccttagccatggctgccggcgtttaccgagagaacgagagtcgagagaatttatattatatatcgatctttcattgtatatataatatcgatatgtttatagtttttctgcattacatatcgtttatatatatgctatatttcatatactatattatagtctaa

SEQ ID NO: 117027 - DNA, 4491 bp, Cannabis sativa
agttttcaaataattataaaaaatttaaaaccttattttaaaaaaaaaaatgaatttcggtttggtcgatttaaaccgaccaaactagattaaaacagtcgatttttttttacatttttataatggtcggtcggttttcggattagaaccataaaaatcgaaaactgaattttggatttttgtgtgtaaaaaactgaccaaattgaccgttgctcacccctattattacggtgaggtctatctcctcctcacgtatgtctttctgatcgactgtgctatcaggatcttaaatgtcttgagctagaacttgcctcgtcctgcaccagccttctccttcgagaagggttagatacacgtccccgccggagtatgtgtatgcctcctccctatcaactcgaaaaggacgttgggggtgtcttagctgtaacccacttgtcttaggttgagtctcaggatttctctcgttattacaagggatctcctgttccctagttttgggctaccttatgctctcgtttctacgagaagattctggcacgtcattgttttgcattcccctgattcgtaaatccctagggtttttgaggtacttcccaacgaggtgcttgattattctgttgttcgtcttctggaacatccctagtttctgcaggttgttcctcctacgtattctggtgattttcttaatttgtctcctacctcctggttctcgaaccttgaggtctaccttgtggccttcttactttaggattaggttggttttgtacacagtttccttgagtcgccctggctgtggttgcctctctctccaactaagcattttgttggttagactcagccagacgttgccgaagttgtcaattttccaattctactaacggtacatacctagtgggatcataggcatcctcgctcctaggtacataaccaccagcattagtattggtttcctcattcctagtttcttgttggttaggagggatttttctgagtttttatcacgtaggctcttaatgaaagcaccaaactgttaatgcagatttttgttaactaattaataagcattttctgtaataaattaagcacagaaattatgagaaatttgataagaataataatagtaataatgattaataaaaaaatagattgagagggtgcgtgtcacaggactctctctctcttccatggagaagaagaggcgtgctgtgcggaaacctagttctcatctccctgctattgattcgaaggaggatgatcagaaggaggatcaaatagaggaagtggctgattcgttccaggtttgtactgaggaagaatgagttgtgggtgcaggagatgtgagcgaaatcatcattctccaatcatctcggaatttctttctccaccggctagttcaagctgggtgagagaagtcgagctagaagaggtacaaaaccagtctaaattccatgaattcgccaagaacctttggaattggtttgccaaagaacaaagtaaatcgattgaggccagattgttctatacagaaccattactaaaaaatggcctaaaggtagcccaagttgatattaaggaagtcaaggaacaatctgagagttggaattctgccataatttgtatgatactttgagcaaatcctcccatgtaagtatttgaaggattcatcaagagaaagtgggggcaccttggtattgttcagatagcaagattgtcaaggggattggtaatggttaaattcaatgatgaggctacaaggaatgaagttttggacgcaggggtcatccaatttgatagaaaaccagtcatagtttgcccttagacaacggacttgaattcgatcaaacttgttcggtcggtgcctctatggattcgtctctttgatttagggttgcaatattggggtaataagagcctaagcgctattgctagtactgttgggaaaccagtgatggtggaccaaaatactaaggatagaactagggtttaatttgctcgtgtcttggttaaaatggatatcacgaaggaccccccgagaactttgcaatacattaatgagtatggtcaactaatggagaaaaaatcgagtacgaatggctccctatcaactgctccaaatgctcaggattcggtcacatggtggctgactgtcgaagggaagaattaataaagaagaaggctggttcagcaaaagaaaaatcaactcaacaacaggataacatagtgaaaccaatcatggttattgcagaaaaggctgatgaggaaagcaagagaagggggtcattaatcatgaaaacaagagtggcaaaggctggcaaattcctaagaaaactagtgaggtgtatcaaactcgcatcaagaatgtggagagtaaagcaagtggtacttcttttaatgctttgcaggggaaggagggcacgactcaggatgatgtgttgattctggatcatgttcatgaaattgagggtaacttgactttacctttatctcatggatagctgcaatatcatatgttggaatgttaggggtattaataataaagataagcaagatgttgttgctgaattttgtcaaaaaaaaataagttgggtattggagctttgttggaaacaaaacttaaggggaataaaatcaaagagctatttgatacaaaactagctaagtgggagtattacatgatatctattatagaagatcgcttacttattgtttggagaaaaagttttgctagagttattatcattgctgaatcttctcaacatacccactgttttgtcaagatgacgggttgtgataaagctttttgtgttacttttgtctatggtcacaacacgatacatgaaagaaaaagcttatgggaggttcttgctcaaaccaaactaccagtgaaaccttggttgattttaggtgattttaatgcaatgtttaatgtggatgatagagttggaggcaacctgattactctcaatgacactcaagactcttctttgtggttagcctcagtaaatgttgaatccttgccacggtcaggttctacttatacctggactaacaatcaagaaggggacagtagaattttttcaaagattgatcatgtttttgcgaacgaagactggtttgatacttttcctgatgcgaaagctctatttcagtgggaaactatttctgatcattattcttgttctatcactaatccagcaacaatcaagatgggttacaaacttttcaaatactttaatttctagagtgaacacccagactttaaagcaattgtgatgcacaactggaggaagccgattgctgctaaggggcttaaggctacttatctcaagctaatgagattaaaacattaccttagaaaatttaaccatgattctattggtgatattggcaggtctcatcaggttgcaaagtccaattatattgatgctagattacaatctcaagctcacccgcaggatcattcttttcttgctattgaaaaagaagcagcagctcactttatttgtcaggaataaatgtttcacacctttttgaggcagagaagcaatgtcacttggcttcacaaaggagatgaaagcacttattttttcatgctttaaagaaaaaaaaaaaagaaagcttgaaaacaaaatcacttcgttcatcaatgagcatggtgatgttgtgaatcattttcctgcagtggttgatcattttgtgtctcatttttggggtatcatggggagtagaaatctgattcataataaactgaatgttgattgtatcatccagggcactagacttgacttgaatcagcaactgggcctcatcaagccattctccaacaaagaaatcagagctgttttttttagcatcccggatgttaaatctccaggtgcagatgggtatggggctggttttttcaagaagctttggcctgaaatagtagcagaactttgtgcaagagtcaaggatttctttaatacaagtaaaatcttggatgagtttaacttgactcttatttctctaatacctaagattgagaatccttctaaagctgtagatttcagacctattgcttgttgctctacaatctataaaagcatttctaaactgttatgcttgagactctctgtggtgcttccaaatttgatcaatcaaaaccaaggggcctttattaaaggtaggtctattgctcacaatgtgatgattcttcaagacctcttgaaaaattacaagagaaaattagtttcttcgaggtgcacttgaaagatagacatcagtaatgcttatgatactgtcaattgggaactcttggaggacttgttggctgcctttaattttcctcaaaagttcatacaatgggttatggtttgtctgagagcaactttttattccattgttatgaatggctgagttcaaagaagatttaaaggagagaaagggttaaggcaaggggaccctatatctcctttattgtttgttttaataatggagtatctcacgagaagt

SEQ ID NO: 117028 - DNA, 1233 bp, Cannabis sativa
ctctaggtaatttttgccaatctagtttaaattttgtcttacccttttcaaattattaaacaccgattttgacttttacacaggagatggagatatacaatcattgtctaagttggattgtgaaggaataactgatagctatgaccatctcaaaagcattgatccggtagcagccaacagaatccatcctaacaatcatagaaaagtaagctaccatcctttcatgtgtcgttttgttattgaaatttgaaatgtgaagccactctttattagtaatatttattttactggtttacaattcgtgagaacgcttgatatgctttcattatttaaatgaagccatcgatagtgttgctgagccagagatgcatagtagggcgtcaaaacatctaatttatgttagtgttatacatgataaaggtttcatataagtacaggaagttaataatttagcgtattctggttgtagatgaatgttcgattaatttttgtttgtcatttcattctcatctctgatagaaaaaatttagtttactgttactgtcttcattttgctttaggtgttattgtttaaattatttcaagcagggtaaaatttaaacatctatataaatttatgtaggtgttagttattattgatggaattatgaagtcttcgtttgaagttccataaggtagattcagtgcttactggagttgaatcttgctgcagtcatacttttgatacattctattctttgatatttgtatatattcttatagatgctatatatttgatcactgatctcctagaaagatgcagctattattagagataacttgtatgcttcagtagcactttaatacgactgtgtttgattttctctatcgtgcaactatttgcagattagtcagtaccttagcttacatgctcgttttggcattctccctagtgaacttcttcaggggaaggctgctgaggtttgtattatttttcttataaatatgtacttattcactcgttttgtcatctatatataccttgcaaaagctgttcggtttcggaacctttttgattaaatgtgatctacacctaattttcatgtactttgtattagcatgttgctgaattgtgaaatccagtaagtgtctctggctgctctttccagttatgattagcccattaagatatttgtatatacgttttaattgttattagttttgaatataataaagcaatattgtatgtggcag

SEQ ID NO: 117029 - DNA, 1899 bp, Cannabis sativa
aaaaaaaaaaaaaaaactccttttaaatgtaaaaattaaaaaaattataaaaaaaagcctataatttttttcagtaattatttttgttgcctaaatttattttttattatttatcaaaatattctaataattaatcatggtagaaactttaataaaatatctcacttatataaatatagatattagaccccaaattcactgctcatattcattctaccaaagccatggaagagagctacttagagcttagaaggtctataccccactcaaggccggccctgagcataggcgggctaggcctgtgcctaggacccacctagctcagggatccaaaaaaaatttgtccccgtttaaaattacacaattttttatcagttttgaaatatacaatatttttttctaaatgagggcccaaaaatactttttttctctatgacttattaaatttcagggccgatcctaaccccacttatagatctaaagaataaagacatacttgattagtgggaaattatatacatcaatagttggaggtacatgttcgatcatttcttttatatatgttcaatacctaaagttttttcacatactataagattattcatatggctatagattcatattattctttgcaattcaaagcttaattatgaacatgttgtgtttcaaatattgtacttgaactcttgtaatacataaagtaattattagaaaccattgattatgttattctaatagtgtcggaaattgttgttcaaaaataaaaataacaaaccgaaaaatacaactctatgacaagtgttatgccaaatcctgcttggatgacgtggtgtatcctttgggcgacacatggtgtatttccaagatctggacgaaaagtatgctcttcagtatatccacccaagatgaataagtagtcaaatgcaacaataaaagaacaaggcaaaacttgatgtacgacgcaaatagagttaacatggatgacaataaacagtcgacaccttgcatgatctgaccagggtaaacgagtgagataagtccatttaagttagttttccattctatatgtgatcaaatgcctgtttttaagggatttccatgtgtgagatctggacggaaggatccctcattacggatctcaacagagaaaaagacacctatatcccacctggaaatcagcatgggccggaggttcctccagcgacttacacccaaaaccctcttcatgtcggaccgtcaaatccaaggccacaaaatacaaatgtggccccacgataaacgactaagtatttccagggcatcatcttgggcaaaatagtcaaaaaaatttgcccacacgtggacacaacaaactagcctagtggaggatttcgtgcacccataggtatttatgatcagaacgagcaagttcaatatctctagtatgtcctgtatacctcccaacaataagattagactaaaactactcgtagtcaatcattctcgagcaataataaagatggggcggatagtgcaatccgtgcccaaagacctcgagatcgacgtgctcggaaggatgctccaccgatcgattctgatactgcaaggaggccaccaggtcagtcagtctttaaaagaattagaactcagccggttgatcttagaaacactttaaaccagcaaagagaaaagacggatagattaatccctcctaatatacagccaattaatgtggacaactatgtgccgatcgaaactctaaggggacaacatgcaggtcaagttgatccaggagtgtaagcccaaaaatatcatctcaagagcctagtacagagcctgactggtctaaaactcactgttaggctaaaattagtctaagtttcgggtcgtattttcggttagttttcactctttgtttct

SEQ ID NO: 117030 - DNA, 715 bp, Cannabis sativa
atatgcatatgcatttttaaagttaatgtttgtatacttaatgttaataaactgaacttttaacagcttaaagttgttaatagaccttcgtattatatctatatttatattatatctatatttgtaactcatcgtcacataaacaaatcattttaaaaaatgaatagaatgccactaaaaatgaatatttgtaatgatatatatagttcagggagaatggtcacaaaaataaataaataaataaattaagacaaagctctacaaagatcataattaagagagaaaatatcatattttattcatttatatcgtcattatctctatataaaaattatgtaacgttttgagtaactgaatgagacgttaaaaaatgatcaattttgtatcatccgataagcgtaaaaaaaataagagagctaaatcaagatagcagacaccaaattttatagtaattcacttctcgtgtaaatcgataatggaactatgttttcttgagcttttcttaattgcaaaaaaactagtaactttacaagagaaaacttaaaaagacttagaataaaatcagagcttctaaagagaaaaagcactgaatctaaagagaaaagctctaaaatagcaaagtgtgagtaagaatgtaaaatgtgaaaatgaaccagattagcatattatttatagaaatagaagcctcttaaaataataataaaatattacaagt

SEQ ID NO: 117031 - DNA, 1558 bp, Cannabis sativa
taaaatttaatttattttatgatatatattaaaaaatattaaatattaagttttaaaataaataaataaataaatgtaatgcatcctaaccttacatgtgtccataaatatgacttaacagaagtagtagtaacgggtgtaagagaagtgtaacattaggtatttttgcctccaataataaagataaggtatttaagtgtataaaatctgaaacattaggtatttatgccgctatttacccttgttaatactatgcatcttcaactgtgaaacctttaacttttctattttactccaattaaaaatcttaggaatcccaatgtttgagtacaatgaacgtttgccaacaacataaggacaacactcaaaaaaactaaattttaatagcatatagaaattagcaacctgtcatccttatttcgatccttacatttcttaagttcagcattaatcttgcccttgaaagactcaatggtcatttcataacactctttaccccaaacatactcattatatcaatcgctgttaataatgtcaagctccttaacagacacaactttactaggaggaccacccatcaaataacattgaacaaagtacaaaacaacaaacttgactacaagatcatcatcgtccccaaagttcttagcattaatagaaacttgaattgcacttttggtgattttatcacccccttcaaacactgttcaacaagactgtttatcttctgcctaaattcaaatatatttgactcaatatgataatctagaccagtaactaaggcaaattccttaatactaaacttaaggagtttcccagaaacgctagcctaaaattccatctcatttggttgttgaacttccctcaataatagtccgtgaagcagttgaaggtggattgaatactcagggatacaaagaaaatgactaaaaatagttttggaaaataactctaattgggacttggtcaaaatatttaagatatcactaattaccctataattcccaataataataattttggaatggtaatacttagaaagtaaatatttatgataccaatcttagaataataaaatgaaaaattaactaaaacaacataaaaaaaaatatgaatagaacataataaacaaaatcacttaaaaaaatatacctcaataactcttttcccagtaggaacttccaactaatcatcaaagggaagcttcatctttaaagatttcctcttaccctaaatgcatgcaaaaaacaatccagaacaataaaaaaacaaccgttaaaaaatataaaaatcgtgtatataataagattcacataataggattgaaaaataaataaattgaaatgagtaaaagacataaagtagtgaaaacactcttaaaaaataactaacactaaacaatgaaaaaaaaaacccccaaaaaaactaaaaaaaaacaacaaaaataccttcatcactttgtctatctcgaaatattcatcttaaaattaaaaatcagagtctaaatcttcaatattacgcttggaacgtttcgattttttcttttcaagggaaacaa

SEQ ID NO: 117032 - DNA, 2327 bp, Cannabis sativa
ttttttttttttttttgttctaaattcgttgttgcatcaacattcaacttgaaaccattaattctaggtggagaccatggaactgcctgctgcagcctgatattggtggctggttgaatggccaaatgttgtgttgtagcagctggtgtagagtaagttttggcatgggtatagtcctgatgaaaaccagttacatatgcaatgattgaagatctcagtcgtgcctgtccaccatgaaagaccttgtttcgatctgaccatattccctatataagacaaataagcagctcaaaatcttcttgattgtaaatggaagataggtgttgcaggtagtctccattatgcattgtctgagctttatggaagtcaattgagaattttgaatccttctgaattcctttagcatgcttacaaccaaaaagagcatgtccaattgattcccaatttgaagtacaaagtgaacaagtagctgaatcaatgatttttttcttaaaaagggcagcaactacaggaagcacattgtgtaggactttccaagcaaaaatacgtatttttggtggtaaattcatgttccaaaaaaacttccaccaatcacggtttggatctaagatagaagaagtattttgctcttccaatgttgtggctaaatgaaaatcatatttaacagtgtaggttccagaggatgagtgatgccatatgagtctatcgttagcagtaaaaaactctaagggatggtcaaaatcttttcaacatcaattggctggaaaaaaattatttaacaagccaatattccattccctctgttcagttataagattagagaccgacatgctagatggaccattttagctaactggtttgaagttagtatggctgggaatccaaggatcaatatcacaagctatgtgaagaccatttcctatcttaaatctcatacctttaaccagtaggtccctaccccaacaaatgggttgccatgtataggatggagagtgaccaatgttggcatataagaatgatgtggttgaaaagtatctatgctttagtaggcggctcagcaatgaattcggtatataaaaaattcttcaataataatattacatgttggaagtactattagtttttgcaaaaatagacaaaaagtagttaaaatcaatgagtgacatgataacaaagccaaagaatttttagccaatatttcaaaacaagataatattttgttaattagtattggtcctgatctaatcaaaacaagataatattttgttaattagtacttataatccatggtttctaacaatactaaagtgatgtttgttttgcttgtgatgtaatgggaatagtaatagtaatataaacagtaatattaaccaaaatatccttaattttattattttaatatttaaaattaaataaaaaagggcaaaagaggtcttttaaccatatgtaatcaccatcacattagttttatgatgcaatggggattacaatatatgaggcaatgactattacaaagctttaatggagcagttggtatgaggtttaaacttgatcggaatgagaatgtaaaatttaaattaaacttgaatgataaaaggtttgtgttttcaagtatgtctcacttttaaaattaaaatgatggtaatgttgatcccctcaaacgcatgggtttcatattccctccaagtctcctctttctaactttactctctccaaaggctatgaaagtatgaatgatcaaacaaaatgcaaatgttgcaaaggagcagtaccaaaaagaaatgctgacaatagaagcaagaaaatctaaatatgaaacaaaaaaatagtttggcaatttttcattcacgtaatatgaaacaagaaaatctcacttaagtgtcatagtaaactgcccaagtatacacaagtgtacatgtgacaatttttcattcacgtaatattaattattaaaatattataaaaaaaataattttaaaattataaaaaaaatatataaaaatatatttttttctcttttctttctccttttttgtttctttttttttttttcctgaaacctaatcctctccaccctaacctatcttccttatcctttttcttcttcttcttctttattatcatcgccaccacaatcactaccaccaaagccacggataaaactattaccacaccactatagccaccaccaccaccacactagaactaatctttaatcacaaaaaaaaaaaaaaaaaaaaaattaccaccacaaattacaacagccaccaccacctaaacctaaacccaaaattataaacaaaatccagagagagagagagagagag

SEQ ID NO: 117033 - DNA, 2175 bp, Cannabis sativa
  modified_base (51)..(61): a, c, t, g, unknown or other
gttacaataaaaatttaaccattaaaacctcttccattattattattattnnnnnnnnnnntattattattattattagaaatacctaaccagttgttcttaacaacaccataaaactcaacatcagttaacagtgattctcaaatctaaacctatggcaattatgaaaagaatcattaagaataatatgtatatccctgtgattcgaatcagagagaaagacaagtgttcaaaaaaaaaaaagttggaaaaaagattcatccaattattattaacaataccccaatcaaacttttctaaaataccactatgttttcaagtaaatttgctacctaaaaaaaggtaagagaatatatttattcacaaaagattgaaaattatacctaacaaggaagatcctaaatgctaaatgaaagtcaccagtgcattgtcatattatcgcctcatataatttagaaaaatttacactccatactgtttaatcttattttattttaatttcactattacctaataattgttacattttactgttctattttaatactgatatactgtgtttttaataaaaaaatttgttgttctatttttaacacacgtggcagctcattgtatttgcatgtccttcattgttgttatatcatcgcctcatataacttagaaaaatttacactctatacttttttttcttattttattttaattttactattaccaataattgttatatttttacaattctattttaatattgatatactgtgtttttaataaaaaaaaaaaattgttgctttatttttaacacacgcaattcattgtatttgcatgtcctttttcattacattttatgttttaaaagagttttgatttgacgtagtgttgtcaaatttgtctaagttctatttttgttaatttaatttgatgatgaaatatatcacaccatttatactttacacgttcttatatatttgaagtcaatttactgttcttacttcatctcgccagaattaatagttattttctaggtgttctcatgttgctgtggtgattctgtctgtgagtgtaaaaaatagagactataaatatatttttcttctttctctatgacaatttttgaggtttttttttttttttactttgattttactataattacatttgaggagcttaatggcaaaatgattttgaagcgtgtggctcttctatgttttttaagtagttatttttactcaattgttttacatttatttttgtattgatttagatttattttaacagtttttttattttaattttttaagactgtacttgtaaatatagtcactattacatataatgttaaaattatgcagaaaataattagttttttttcttttgtttttttttttttaaatttgttatagtagtattttaagttattttactatgattatttatttaacgtggatttcagtatttttttgtcatgtgttataatttaatgtgatcatttttattggtcgctgccattgtgttctcttaaatgaacttgattggcattgttctgtcttgtggaatcattaaacttgagttctttgggcttccaagtgtgtgtggtacataagatcttgcatctacgcacatcagcttctctaaaatagataaattttaaaaaatataaaaaaaattatactaaaaatacactacaataaatattctaaattctttcattttaaatttttttaaaaaacttactatcattcaacacactatatttatagaacactatttatttttctaaatattttattaattattttaaatttttataattatgtttatattaaaatgtatgtatattaataatatatatttaaaataaagaaaatatattaaaaataaaaaaataaaattttagtaatttaaagaaataatagtgtaataaggtgtgttatacaataaaaaaaaaattactgatatatttgaaaatatactagtaaaaaaactgacagtagtgctctaataaaattcctaagttagttggttggtgaatattaggatgcaaatcagttagttgatcaatgtccaaaaaaaaatgtcattagtttatttaataaatagtgctgaagtttctccttattctctatgattgtaagagtcttattctttatgtttttataaggtgttcatagcacc

SEQ ID NO: 117034 - DNA, 1435 bp, Cannabis sativa
tcaccaaccggactgtcagctggcaaaaattctcaaagcaatttacttcccttttgagagcttctttgaagctaaaaaaggtcactatggctctacggtttggagtagcatactgtggggtagagaacttttaatacagggtactcggtggtgtatcggagatgggagtcggattcgaataaacgaagaccattggattcctcgaagcattccctttacccttcgcagcaaggtccaactcccggctgaggctactgtaaactccctattgcaaccaaatggttcttggaaagaaaatgaagttagaagttggttccattctgaggatgttccctgggttcttggtattcaaccttccatgaatcgctcggattggcttacttggagtttgactcccaatggtatgtattcggtggcaagtggatacaaacttagattcagaaacccaataatagcagaatgctccaataaatccagaattaaagcttggtggaaatttttgtggggatctcatcttactccaaaaatgaagaacttcatttggcgggttttcaaccattggatccccacaaaaatggagctggcaaaacgaggtatggcgcttgatactaaatgtaacctttgtacttttcaagatgaaaacatatgccatgctttatggcactgcccgaaagtgaaaaacatctggaaatactttgattttcataaaatcattcccacacacattcaacaagccgctgatgtactttggtggctcaaggatcatctccccaaagagaattttatcaagttcatgggcctcacttggttggtttggcaaagaagaaataattttgtcttccaacacaaaatcattgatgatagaatctggacaaattgggcgcttgatctggtttttcagcacttggaacagcaccaacaaacaaagaaaaccaatgccgaacatcaaatatatacctggaaatctccccctccgaatgtttttcttataaatactgatgcttccttaatccttggacaggcagggtgtggtctcagtgctgttatcagagatcacaatggtgctctagtggtggcagaaactacgtttcttactggttgtctttcggttatgttagctgaagctattgcaatcaagttaggcatcaagctagccatccgttggtcaattaaacaggctcaagtgggatcagatagtcaatccatcatccaagctatacactctgctgctactaacccaacggagtgggggcaacaggtgcaagagattaataagatgagaaaccagtttcaaaatctgcaattctttttttatcatagaaattgtaaaaaagttgcaaatagcttagctaagtggagtcgtttgactcaaaagtccgagatgtggactgatttgttaccaaattgtgctgctgcttttttaatagcagatgtg

SEQ ID NO: 117035 - DNA, 1848 bp, Cannabis sativa
  modified_base (1341)..(1342): a, c, t, g, unknown or other
  modified_base (1734)..(1735): a, c, t, g, unknown or other
ttgtgagaactattggaaagcccatcatgatagacaaggttactcacaatagctcgatgataaattagctagagtgctagttaaagtagcaattgtggatgaacctccaccgagtgttaaatttcttaatgaaaagaaaaatagctaatggagaaatcggttgagtatgaatggtttcccacaacttgtactgcttatggaatcatgggagaaggggttggtttgggttcgtaaatccaaaactacttaggagaaagaaaaggaagtggtgaacactgctaaacctgaaactaattaagatggcaagatggataatcaagagaaggattcaaaagtagaaaatggtgataatactgatatggagaatgatacaaacactgaacttatagaggaacaaagaactgattcgcctattgatttctcaattcgtgatcctaatattcagcaagttatgcaacatgttggagattggatcactcccaacaaaactaggaataaaagagctaagtgttgtttggatttttgtaagcatgacacgtggaattcgacaagagaagccgagtcaatctttaactatcatagcgtacaggccagacttctgggaagggtacgtctgtcacaaggcaagggcacgtaagaaatcagtggtgcatgccaactcttgctcctgtgtgcagaaggcaaggtgttgcttctaggttcgaaaggacctcatggtagccaaggccctcctcgagtacctccatgcaagtagtggaaggactctgaacgagttttactccaattccgtgtcacgaaaggccaccgtccgtacttgtcagaccattgagtgagaacaatgcttttttggatacaacgtcaatttttgtccctcacatcaggtcatagtacgaggcattcacacctccatacctgccaattgcccagcgaccattcaagagagtgattcttaaaggaatgacctttgggttacatgtatggtatgtccagacagtccaagtcgtaccgctgcgcaccgcacaatggagcagccacctcccaaattgacggttggatctcttatagtagggatgttgggatttattttactaggatctagattactaccatgtatgttttattgacatcctaaaatgaatatctctaaaactatgaaattaaacacataagagtttagataaccttacattgatggcagcagaataatatgactccttccgcttagatatctaacccttgttcctttttgtcgtagagtaataataggatctgagcctaaatctctttctctccatagggtttggttaccatcgtctaccgcactatgattgagtacttganntgctatgtgtgggcatgacactcaatcactatgggtcaagtatgaagaacaatgaaagaggctcgaaatcactatagaaggtgtctctcatctactagttgacagagaatgaaaactaggttttgttttgttgaagtgaatagttggatgagatgagagcaccatgttcctttagtatttcaactaaggtttaggtttgaattatataaattaaaaaaaagaataaaatattaggcaaataaataccaagtggtcgaccacactttgtgcgcttcactagctataatttttccactttatttcaaccacttatttttccttcaataatacaatattttccaactacaatcctataaatgtcaaaactatttattcaataattataattaatnntcaaataaaatttctatttattttatttattaattagacttaacaacgtttccaaattaacaaataaatcccaaaatatcttttcttcacaattaagcccatacttagtgaaa

SEQ ID NO: 117036 - DNA, 2252 bp, Cannabis sativa
tctgttaatttttatgtatagttcatcacattaaagataactttatggaaaaaattaggtgagatattcgatccaaatttatattagaaagatggtggtccatttattgtgatagtaacttctactaccattaaaaattttgagataattatttatttaaattccactattcaatatttgaatattcaataatatatgtttgtgtatatcaatttatatttttttaaatagatgaaattaacttctctgctacaagtgcaaccaaattctatattaatcttcaaatagattatgtagcattattactacaaaaaatttccaccaactctaagagtgtggaagttatatattgagagttacaatattaagaagacaacttttgaagaagatttttttgtattattattactagtatttaaaagtttcattaattacctataatattattttatgataattgttttattataggcataggcaatacattaatttggatggtattatatttcatgcaaatcttacttgagaaaaattgtacctaaaaaaggtatttattagtgtcgcccttacaaaaaagaatttaaatatcctattatgaagtaagaattttatatttgatttgctcaaaattcaaatttattatgttataagtgttcttcataatttttgttttatatttatttttttttctctactttttcaccttaatatataagttcaaaatacatatcaatgtaaatgacaaaattgttaaaacaaatttaatcttatttaatgaagtaactgaaatgttattggacacatcaacaaataaattagttaacgcgttgtctccaaacattgattttcctatagagatttaaggctttgtgggaaatattatgtttacaagttgaagttgaatgagtacaatttgaaagaggagtttctaaatttaagtgtgtcaaaatttttggactcgaatgagaaattcaaacgagaacatgaattaaacgaagaaaaaaaataacaaattcaagaaaatacattttgaaaataacatatcatcattttagaagactttgatgaagattattgtgatactgttaacaaaaaaaaaaaaaaagaacaaagcaaataattctcaatgatgatgaaaataataatagctaaatagtcaatatacttagtgttaatttttagtgttagttatttttagtgttattagttgctagataaaattattagtttagctattattcttttatattattaatttttatttttagtgttatcagttactagatataattattagtgttagttaacttttctataaacttttatttttagagttatttttaatttttgttttactattttttattaatttttagtatttttatctatttttgcttctttttgtatgttcgtaatttttctgatggataaattaaaaatattttgaaccaataaaattaaattttatataaaaaaaatttaatctaatggtcaaatttgagattcgtttagtgagcattacatcgtaatattatataaaatattttttgaaagataaaatacataaaataactattccctattagtggcttacaaaattcttctagaaaaataaaagcaaatcttacactcaatttttatgacatatttaacgattcacatttcacataaattcataatagcattaccatccattcacacacatatctcatatgtatacataaatttataaaacacaggcaacattttatatacatacataatggaatcacaatgttactatttgtttgtttagtggtactaaaccaaatacgtaacagaataatagtttctgattatcatcgtaacacatctttaggatcagcatatgtatatacattaaatataaaataaatagacgaaaaaaatttacctcttgaaacctatcaagatattcttgtttcttttcataagttgtattgtagtgccctcatgctaagggacactacagtgctttttcaattacagtgcagtctttgctaatcaaagaattttcttgaaaaaagtgtcaaattaaaaattttatattatatattatactttatattataccaaattatttacaagtaccgggaccccgtttttaaacttttaaaacgtaatataccaaactacatattattcaggtcgcacagcgactacaaaatacaattcccagatgtctcgagaccgaacactctaggtcgcgatgcttcgacatgtacaacctcatc

SEQ ID NO: 117037 - DNA, 1524 bp, Cannabis sativa
  modified_base (1455)..(1459): a, c, t, g, unknown or other
atcttcttttggtcttttagtgcatgatgttcgtgcgttgcttttatctttagacaatgttgaattgtgttttgtcaaacgatctgtaaataagctagcccactacttagtcaaagattttttttctctctaggtcgtgtgcttcagttggaagattgtttctctgaaacacgttctattgtttttaacaatttgatgagttaataaagatacatatttataagtgaaaaaaaattatatatgattatctttttaaaaatatatattatatatatttatatatatgactattgtatgggattcatcaagaaaatttcaagtgtgcaaaataaataaataaaatcctagctagtgtttacgtgtacaaatatttggaaaataattgtgtatattactaagtacactgtaattattaagtggtttttacatatatagttcagtaattaattatattatattttaaaatacaaaatgtatttggatataaaaaagagtaattacttatgaatttctattttgtttggcaaaataattagtaattacatgaaaaaaataatattttttaataattgatatttaaaatggaaagtttttgtgtatcctttaatggttgaggttctttattgaataattggcgatcaatacaagagaattacactaagagcaagggacaaaagtacgtaattcctcacattgagagactcagatcaaacatgcttgagctttgtagaaccttttgtttctctttgttatattctcttagtgacatttgattggaggtaatgaaataaatataatagaaaaaaaaattttattccattcatttatttggttgcattttgaagtattgaaatgtcattctagtgaaatgacttttttattattttggtggaatgactattccattttgaaatagaatgagtgaccgtattctaatgcaagatgacaaaaattttaatatttttttcatcattatttttatgtattttaaattttattctattctattcttattctcatttccattctcattactattcatatatttattcctgccgaccaaatgttatcttagtcacaagttcaatacatctaaaataacttaggcttttccttttatagagttagatggatttttgataaaactaagcaataagaaaattttataaagcttaaatctacctcaataacactaattgcttgagtgagtgacataatcacaacaattccaccttagatcagtcactaaagctaaaaagagtaaataaacgtgttctctaacaatcggtgaaactcatcaaacctatgttaatgatgagtaatgtgaagtcattttttggcaagttagttgacaaaataatttttccatttatggtaagattgttgagcattcattttcggattcttacctttcaaattccatttttagttgcccttttccttgttaggaaagtnnnnntttcagctgaactttcctttgttgaaaacttcttaaaagagaagaaattctcttttggaaagttg

SEQ ID NO: 117038 - DNA, 863 bp, Cannabis sativa
ttaaaatgttgatagtattttttgaaagtttaaatatattttaattaaaataatttatgtgtgcaattaatatacagttatatatacaaatacaagagtggttgcagtttaacattattaaactattaataaacaacattaatcactttgctaattaccaattaattaatgagtgatttaacaggggaacacatgggttactctaggaatcaaaagtaagacatcaaccgtattttttttggtataaattattatattttagtatatactcgctctagaaattaatttcatgttagttatgtttaaaaaaaataattaaaattgaggtctggatattattttgtaaatatttttaaaaatacaggttttttttttctgaaggaaaatggtaactttatcaataaaaagattcaaccattacaatagaaagaaaatcagcaggaacattatcctcgctaaaaatacgatctggatacaaacaagagctacgagcaagacaatgtgcagctttgtttaccgaacattttacaaaattaattgtgactaacgacagatcgaccataagagaacgacaagccgccacctgaataaaaatttatgatttaactaaaaatttataggattcaatttataatttaactaaaaatttatgagtaacttttacaaaagtcttaaataatatttacttataaatatatatattagtattatgtatttaagagaaaaataaaacattatcctatattaatgagtacataatatatattttgagagagaaaatatatatatatatactaggtgattgttacgtgctaagctacgtagtgttagttttatttaatattttagttttttattttaat

SEQ ID NO: 117039 - DNA, 1246 bp, Cannabis sativa
taaaaatcacgtaatacgccgaagatagttagggtgttacaatcacagactccaaggaatcgcaaggatgaagaggaaccccgtgatccctatttggccgataaaggtatccctcctgcaaatgcaaatgacacgacaaatgcagtgaaccagccaattgcaccagctgtgcctaaggacgtggtggtactcgcaaacatagcagcaatagctgctttgccagtaagaaagcaaactaggctcaccaacaatcccataataccacgagggattgatcaagaaaatctcttacaagcactgagaatgattgagcagcagagaaagcccatatacaaactacatgaaatatcacctttcatcgaagaagtgcgacaagccaggctccctaaatgctttagactctctaaatctctcaagtataaaggtaccgctaatcctattgattatcttgataagtttaatacggttatttgaagttaatcaagtgccctaattggctaaatgtcgtatactcgctgcaactctggatgaaaatgcaaatgattggtttagccagctacctgaagcgtccatttcaacatgggagacatttgtagatttgtttctaacccatttttaggcgactatgacatacaagccgccatatacaaccatagcaaacattgagatggatgtaggtgagtcattacaagattagtttaagcattttaacattaaagtaaccaaagtggagaaggcccccaagtctttgcttgtttgaatgcttatcacaggtgtgttgctaaggatagacttttggaaaaagctgcaggcgcgacgacaagaatccctagttgagttttttgccatggcaaagccccacaaaaggattgagaactcactggcagaattcaagaaaggtaaataaaaatgaagatctctagcaccaagattacaatcctatagtccacgatcaagaagtttcaagggacgtaaccctagatgtagtcccacaaggcaatgaagtctgcagcgtgctaagtccccaaataagaaggacacttccctgaattagaaaggaggtatgcactttgtttactatatggagcttttcatctctcgcgaccacatttatgctattgaagagcacatagatgtcttcaagaaatcacctctaattagaggaaatcgtaataaaagagactcaaagaaattctgtaagtatcataaggatattggtgatacaacatgtaaagcccgcttagtt

SEQ ID NO: 117040 - DNA, 935 bp, Cannabis sativa
  modified_base (901)..(910): a, c, t, g, unknown or other
atcgacgcaagcattattagcgtccgttggtagatgacgcataaaagatttttctaaaaaaaaaattaaagtttgtcatcggtttaaattttagcatcgtataataaccgacgcaaactcctactctttattgatgtatttatgattctttttatccattttattctcagtcctgaatctggcagatgcccaagatgcccttataaaacataggcgagcaaaaataaagtaaattgttttctatgtgggaggaaatttaagccctacgatcctgcatcattccacccacatgattattacataaactctcaggtaattattcttttataaaatgttactactaattattaaatgtaagagtttggattaggcaaattaataattgcatgcattagtgttttaattaaatgtattaaatcttagtaagagtttggattaggaaaattaatacaattgcatgcattagtgttttaattaaatgtattaaatcttaataagagtttggatatatgaaatcttatgaccaagttcttttatggttgagttgacacaagagtctctaaggttaaaagatatcaatgtgccatggactattacatcataaaataactcattataaaacagaatatcatctggattaaaatagtttgtaagttgtattttagtccaagttatgtcacacagttattattatttccaagtctaatgaaagccaactccttcatatcactaaatattatacaagaaggatgcattccttatttgaatttgctagaggatcctctgtgagtaaagccttgtaaatacttaagcagtagatattatttggatcatcagtatcctcgtaaaacatatattagcctcctcctcctccttctcctcctcctcctcatcatcatcnnnnnnnnnntcatcataatcatcatcatcatcat

SEQ ID NO: 117041 - DNA, 2165 bp, Cannabis sativa
  modified_base (2113)..(2115): a, c, t, g, unknown or other
ttttttttaaaaaaaaaacagtgtggtctacagtgttctactaaatttggtgggacactgtagataaagtcatttatgaggataaatttagtgtcccattgagtaaatagtaaaattacactatatttagtgttttagtgtctcattggagatggtcttaagaaagcaagcttttataaccaaacttgcaatgctttttaaggtcaccatagcttatgtaatgaacactatacaatgaaaatgaaatgattatttaaattttattttctacattataaattatttaaaaattttaaaaacaaaaaaaaagaaaaaaaaaaagaaaaaagatatataaatataatgtacatcattatatcaaacaaattttttataatttctctgtgtattagaaaaaatactcttatcatcttatgattaaaacaaaagtaatactcgtacttgaaaattataattataatataaatcaaggtatactaaaacgtctaaagtattactttttgcactgagtttgcaaataattgtttaattgtgattaaatatattaaattgggtaactaatttattgtgttataaattagtaagaaaaatagtacttactaaaaggttattctttattaaatagtatatatattaataatttattatatatatatatatatattagtatgtaagtatgaattatatttcactaaaacagaaaaattataactgccttaaagaggctcaattatatctaaggaaagcttcacctcacaatttctgagagagaaaaacatgtgagaagagagaagctctgaccttataaagagaattctgaatgagaaaaataatacaaaaaattgctaaattttggagtgggtttgcaagttagctagcaaaaagatcaggcttgaaaagtgatttccaataccacttaaaccgcgtcatttggataagtaacgaatgagttataggcaaccaagtcaacataaaatgtcaacatgggcgcccataactctaatatttgagttttcagcatattttgagatgtctaagtgatgtgaatgcataccatagctaattctttgacttcgatgaagttgttcactgttggtgatttcactcggtgtgcggatagatgatgactgggtgaccactactgtgcatgggtgttagcttgcttacatgtgacacatttacatgtgacacatttacatgatatattgcttgttaagatatccaaatcttactttgaaaaagaaataagacctatgactggaacaaaattgttatttgatgaacgaaaccctgagctttaggttgaatgttaacctaggtgcccagggctaatgtctggtggtgcttgggattgaaccaccacttggatgatggatccttctaattctacatccatatgttgttttgggagaaaaataagagttatgcttgagacaaaattgcattctaagcagtagaaccacacgaactgtggaatacatcaacttgggtgccgagtgatagggaaactgtcaacatgggcgcccagcatgtgatctgggcttcatatgactttgtttgttttctagaagaaattttctcttcatcattgaaaaaaaatgaggaaaattcttgagatacttcctcgaaatatgtgccaaagcgccccaggggtacatacgtcaacctaggcgctcatagatctcttgggagccaccctgggtgcccaagtctggggaaaagtccctggaatatgttacgttgatttccaatcttctaatctagtgaaaagtgcacagagaatttccattttgtctaatttgcacgtgcgttactcagtggagtcgagtcggtccgaggtttcaatgtcaacttgggaagtgcacctttgggatgtctttgtcaaaaactcaagtcctatagtgttgttccttgttgaagttgaggaatcggggtccaatgaagttcccctaaacctaaaccctagctgtagtgttgcttagggtgactggatgtcaacctgggcacccatgcctccctggggcatgtagggagggcttgttccaaaattgtttcttgtgtctaaaacttggttatggcatgtctctcatgtatttaatgttgggttttatgnnntaaataaaacttcatttcaatgtaatccattttattcaacatcaataaag

SEQ ID NO: 117042 - DNA, 3395 bp, Cannabis sativa
  modified_base (2266)..(2271): a, c, t, g, unknown or other
aggctaaggctgagcaactgtgagggcgagcagatgaagattgtatatgtcggggcggttaggcttggagcgtacgatctttgggacatcagggcttttactgtatggtcgctaggcaacaaaatttttgtatatgaatagcaaacttttgtaaatgtattttgtaaacgggatcccggaattttataagtatgttactttatgtttttaattaattaagcaaattttaattaatcacgatttttgataaccttgttgattagcaatgagctgtacagtacgttaaaaatcacgctaacatgcctaaattagttagggtgttacatttatgtatgtgatttaatcattagagttgtttgtgataagatgtatgtaataaaggtgatttgaatttatgtgtctataaaatgtttgatataattcttcaatgattttctaaagtattattcataattatagtttagaagctaataatttgaatgagcctcgtgctttcatgcttcattttgtttcaatttaggagctaataatttgaagaatgggggactcattttgctttggataaaataagtattaattagattaagtccatatccattttgatattttctatgtgtgactattctttatttcaataagattttgatgttttctacatttgaaattcgatttttgttgggaaagaaaaaagtaaagaaatgtaggaaaaaagtgtggaaaacaagatatatttttatttcggtagtccataatttaagaagtctaacgtttagtgtaattgaccttgagcaatcttaggatatgtgatattttcctaaaaaatgtgtgagtaagaataaaacacgttgaaaagactcattttaatttacagggtcagtcatcattctagttagttgctaaagtggtttacttgctatgtaggtatgggagtatgagaatacacaaatgaaacatgagcattacatatagataatgttggagcattctagtaataattttatacttataagtgtgaattatacaaaatatgtatcgaagaactatggtttttcaatatttcttgttttttttataattaaagtcgatatattaaaaaacactaacacaaagtagtaaccacaaagggggctacttcccttatacaaccaaaagcatggatcttctcaacacaagccccatgggcaaggagatccgtaaatgatttaatcgaacgattaatgtaaatgaaatcaacagacacaaaatccttaatcttaactaaacattccgaaaagataggataaccccacccaattgggaagctaccagaatttaaccctcgaatttcagcagaacaatctgattctatactaatcttgtcgaagcctttgttcttagcagcagtgagagctaaagatatagcagccaattctccttccaacatgctgcttacatgaatgaagttgagagcagcgaaagcctcactccaaaccccatcagattttagaattgcagcaatacccgcctcagaaccaagcaccgaagcatcaacctagaaattaaagataacatccgagacaaaggagacaaatgagaagatagaaccttaccatccaaggttaaatccaatttaggtttcatagaggagaattcctgaaatctagataggcaatctttaaataacatctgaaaatcccattctttatggttatgaataatattgtttctccaaaaccaaagaacatcaaaaacacacattgcgaacaagcacagatcagagtcctcattctcagtccaccaagtgccaaaatccataacattattccatcccatcatgtcaatgtgtatgccccatttactattgaactaaattccacgcgtgatgcagcatttcgcaataagatggaatgaatcttcaatcttctctttacagaaaacacaagttctgtcagtaaagttaataaagctgagtctgccatacgtgggaatacaatcaatcatcagtttccacatgagaagcgagaaatgagggtgaactttttgcttctagagctttttccacactgtttttgtaataccgtagaattatgagattggattagcaaaaccctaattagataattatgtattactgtgaaattatattattatataatttaatatatgagaattgatatgaattatgacatgttaagactccgttggtgagtcagaggcattttagtaattttaacccgtgaagggtagaatagtgaaattaatttattaacgtgcttatgggactatnnnnnnatatagtatgcctgtgttatcttttttaggtgtgttctgacaggttggagcagtatagtcacaactgggtatttcgggccgaaccgggttcggacccgaaatgcaatttgaattgcattattggcattttatttattggtgaatagtctaaaattgaattgggtttatttatatgtgaaatgacttaaatacccttgtaggtgtgtgagtgtgtatttttagccctaggggcaaaatggtcattttgacctttatgttatatttgataaaaagatgggatttttttaaggaaaacaaattgattttctagttctttcattcctcttacctgaatcatctctctctcaaatcctctttgaattttaaatttgatttggtgaaaattgccttgaattgaagctttgagtttgtggatttttgagcttgtctttggattgagtttgaggtaactttctatgactttaatctttattttattgctgaaattaattgttgagaaagcatgaaaatgtattgtgggttgtgatattgaatttgagatgcatgttcatgtttgttgggttgtcttgagcatgcttagagctttaatttcttgagtttgtttgggttaggtttggacagaaattagaggatcttattagtgaaattttctgttattgagctctggaattaattatttgaagcttgaattcaagttcttgataatggaaatttgtttgagatttagctcaagttgaagctttgattttcatggttgattaatctgaatttttcagagtatatagtgggttttgatgcatgttatatgtattctaatgccttatctttgagcttgctaattcatggggaataactttgagttgtatgtggatttggtatgatttggggtgtgtttcttgctgaaattcaagttgaagcttgctggtttctgggtttggaacccaggtgccgtggcatggcttttagcatgccgcgaccctcccctttgagtggaacatgggagttggtcccaggtgctgcagcatggcttttgcatgtcgtggcccgccctcgagtttctgggcagatttgagtaccaactttgaaaatgcataactttgtgatccgaactctgttttgggagt

SEQ ID NO: 117043 - DNA, 1908 bp, Cannabis sativa
  modified_base (1875)..(1883): a, c, t, g, unknown or other
cctggtaaagtaatttccaacatccatttcacgagaagcaaaattgtcgatttttggtttagcttgtgcagtaagaattgtgcctgtagagtcacgaaccacagccccaattccaattatgtttagatttgcatcaagagcggaatccacattcaacttcaaatctcttccagtaggtggtttccatggaggattagcctctactcgttttggtagatgaacaatgtctctgtttgtttcatgatacttgttttttgttgccttgaaatttgtcaagtaattgacagcaaaagaagcaactgctggtactggtttggttgtggagcgatgaacaatgcgatttctttccgtccaaatagaccaaagagtgcaaatgataagttccatctcttgctggttgtatacgattgagagatataccaagtagtcacccttgaacattgttgatgcctttctccaatcaaaaaacaaattcagattttgccatacagctttggcatatttacaactgaacagtgcgtggcctatagattcccaagcagatttacaaaccgaacaagttgagtccgtgatgatcttttgcctaaccaaggaagtagcaaccgtagggcattatgaataaatcgccaagcaaagatcttcactttttgtgggagttgtaatgaccaaaaaaacttccaccaggccgcttgtgaattggaacttgaacagctattggcctctgtttcaacaatatatgtggcaagatgataccccgactacacagtgtatgtacccgtgatattgtagtgccatattagagtgttagtactctaaaaaaaactgagaggcaatgttagtatacaatcaacatccactggtgaaaaccattgcttaagaaggggaacattgcattggcattcgtctttgattaggtgggcaactattccattgtttgagcctgaatatcgaatgtgagtaaagaattcaatgcctagtatccaaggatctgttgcacttgaactagtcttccctcaccaattttccaccgtaatcctctaatgagcaactccctaccccaaataattccttgccaagttaaagaggggccatggccataatgagcattaaggaaatcattatgtgggaagtaacgactcctaagtaacttgccaagaagagaatctagtttttccaataacctccaagctttcttttgccaataaagcttgattaaattgttcaaaagatcgaaagcccattccctcatcaatttttgatttacaaagtagatgccaagctctccaatgtatttttgaaccgttctcattcgatccccaccaaaagttcgtcatcatagattcaagttggttgcaaatgtatacctgtagctgaaagcagctcataacatatgttggcatagcttgaacaacaactttgaggagcacttcatgcctaccagtcgaaaagatttttttgttccagttatgcagaagtcgccatattttctctttaatgtcactgaagagttgttgtttatctctgtcgctatatgatgggaggcctaaatatttctcatagcattcatagatgcgcatggagagatttctatggaaaaaaaacctgagccaccaaagtggtattaggagtgaaagacattactgatttatcatagttaagaagttgtcctgaagcccggtgataaaaatctaacactcgcttaattgcaaggcaagggctttcattggcatgatagaaaaggagactgtcgtcagcaaagagcaactgtgagatcgttgaagcatttcttgtgagcttgaatcctgtcaaccgtctagcttgttcttcaaatagcaacaatttttatagggcttctttgttgggttttatgccctnnnnnnnnntccatttcaatgtaatccattttat

SEQ ID NO: 117044 - DNA, 3414 bp, Cannabis sativa
cagcctcttgattaatattagtgcttacaacttttctactatctggagactctagatggcagaagtaaacccatttcgattgatggtgatccactggtattttcgattgatggtagaattcggtcttttgtttgttttatctggctttgtttacttgtttggactgtgagaggttgaggttggtttgaatttggttttgattgaattgtgcgaaaagatgtctttagttatttatgggagaaaaatgattgttcttatttgaaaaaaaataatattttaaagttcaagtcaaaataaaattaaacttcacagttctacactatactcagtttaaacttttggtattggtgttgtttatagttggtttttatgactctttcaagtgtttaatatttttcaaatttaaacttcaatttgtttttcttcaaaactttttgatgaaatgtctctttttttttcaaactttggcctttttatttagttttgcagaatttattactagaaatctattttgacctaaagtgtctttgctgagtaaagaaataaggcaaattaattcagactaagaaagatttccatgaatgttgcagggcctctaagccaaccaaagtgggaacatttgaaagatctgcataaggtcataaaacaagttgaaggagcattgttgggcattgacgcagcaattagagctcttggtaaacttagaggtaaccctttctaattctcttgctttctgtcaatcccaagtttgaaccaagagtgttcaaattttgctttaacttttcatagataattaattccatggctatgattccaagcttcacaatctttgatagatctatattatggattatggattaataaaaaggagtcgtaaatttatctatatcataacatatagtaaaaaaaatttatagtctttccttattatgcttttaatttacttatcaatttggattttagatagaagtgaaatatatcttttgttaatcatatgcttacgaagcacagctcgtgaagtgaaacgcttggattcctctgtttatgcacaatttggagaagtattaaatatgaattgtcaacaactcatgtgtacaaggcatatgattggatggctaacatgaaggggaagtctatgggcaataatatcagattcgctcttgcaaacttcagttcaaatcgttggctttccataagattggaaacattaggaggtatcctgatctggttgacagcaaactttgttgttctgcagattgggagaggagaaaatcaagtagaatatgcataaataatgggtctacttctcagttacagtctaaatatcaccaatcttctcagtggcgcatgaaggcgagcaagtagagctgaaaatagtttaaatactgtggagcgtgttagcgtgttggcacagcatttaaatcttgccagagaaactgttgccaaacgaagaaagtgcattctctagaatggtgcaaagtaaaggacctgccaatgctgaccacttacgtagctttgaattaggaggaaacagaacatgacccgaatttagcacaaacagtcgatcaaccagaggtgactaacctcgccccaatggagtgctgctgctcagtactcctgtttctctttctgcttcacaaattgatgttcaacaatctgatattgaagatgagagcaatatcctcttgaaaacaaaggatgcagtcgtaacactggagggatttctggaggggaagtatgaccgagatagagatgaaacactacacagttcgaggtaccaagagataatgggtggacaactcttcacagaatagttggaggtacatatccaattacaatgcaactacaatctatgaaacaatacacaacattcaatacaacaaaacattaatagaaaagcccacaatactttctagaatgccttcctacaattcattacactgtcaaatgaattctctcttggtttttgttgtattctcataattttttttttctctttgatttcattacaaaatttgagtccatttaattgagatcaaataatccaaaaaaaaaaaaaaattgtaaaacattattttccctttttagactttcttaatgaacttgtagattttatataaaaatatcatattaggagaataattgtgcttttgatccaactctttctcatcaaacattggcctttcaggtcttgctgtgatgatcaggccttcagcagtttgaaaatgattttggagacacatccttagattgggaccaaactaaatataggatccacactgaagccccaaggggaagtagttagtcgtcatttggaggatcataagtaatcaacccattaagggaagctgccaaagtgtccaaagtcagccttctctctcacatagtcaagggccatgagccatctacctgtgaaactgaacctccgtctccaaacaagctacctccaaacggttctcaaggaatccatctcagctcgaaccttctcaaggtcagcaagagcagctctcaatcggtcagcatcaccatcatgggaagctagttgttccttcaattcaccaacaattctagtaagctcattggacacattcaactgtttgatatcagaacgaagtgaatctcagtcacccctccccggtttcaacgcatcttgcatgccgtgcatctttatccaaattgaatcttgcaaacactacaaaacataaaaggcaaaagagtaagaataaatcgtaacattcaagtgacactagttagccagacactatgccttgaaaaagatgggactgatgttcctccagtactttgtctactctcattttgtccaaccattcttcatcttcaaaatcattatctggatgaagacttgttcccccttatctgagatatgcaagctgacaaaatcgaatatatcgaattcctttttgaagtgaagttagatcattaatatttttttgaggattagaccttagcagtaagaacataggcctaatgattggaataggcccaacaacgtcgagttcccttctaacaaattggttgctagctctaggcctttctcttattgtcagaacaaggaacacatactaggaaagagcaaagagctacaatgatttctcttatagcccatattgctcgttgacatcacctaaagcaaagagctacaacgaaaacattgaaggaacacatactaggaagaccaactttgtaaatggactccatattggaagtagtaacatgcttataagttataagcaagccagatatgttgacatacaaggcctccctatgacacaagtagtctaattggttatgaaagtgtaactagtagattttaatgattcaagttaccaagttgtacatctttagattgatcgatttcaagatatgagttatgaacaagaattaaactttaag

SEQ ID NO: 117045 - DNA, 787 bp, Cannabis sativa
atttcgatccttaattatagtgcatatatgtttttattaattccgcactttatacataatcatatatgttttagtttatacatataaatgtctaacacgtatttcactcttaccggacataaaatataaaaaaaaacatgaaatttcatatgtaacatacataatatacctacaatttaaatatatctccatgattgagaaattattattttaaagcctatttctaacaatacgtcttaattatttgctaagaggcatatattgataagagaataaataaattcttaattatcttctaattctcataataatgttaagcgattattacaccggagcagaccctaaatctcaaacctgaacgaaatcagagatggaatcgagtgtatggtaaagataatataatttatataactattaaaataagtcaataccaaatataatattgtattaaataatattaataatacaatactacataacataatacaatacattacaatactacgtaccaaacattcctaacttattaattaaaggaccaattcatgcaactcatgttaacattataccgtcaacataaaatatatattaaaaagatatgcaaagcacattgattgcattttgtatgcaatcttttgatgagtaaactcgatcaatgtacgtacctaatataaaacccatattatatatgagacacttcttaatgggtaatacctattgatgggaactaaaaaaaattaataaagtaacaatctaataactttttatggcaagtttctaacaatta

SEQ ID NO: 117046 - DNA, 1330 bp, Cannabis sativa
  modified_base (28)..(34): a, c, t, g, unknown or other
taatcgtgtataagagccattattccgnnnnnnnaagggcccaatggaggcttgatgcggggacgttacacttttaaaaaatacaggaatcaaaatagtatttacccttcttttattctagaaaaatagatcatgtagtgctaattttttcctatcctttcggcttttacaatctcccagactatgtgacaactataagagtttcatacctcattcttttttgattaggtcatcgataatatatcttgaagcatggcatctttagggttggacctaaggtcctttcatccaagaggtcttccaatctttttttcttttatgaaatttcgtttagcgtcatcatgccataagaccactgtaaatatttttgcttttaaaaagttatttaaattttattttatttctcaaataaaattcaattttaaaattttattacaagcctcataaaaactaaaaagagttcttatttgactaaggatgacactgtcacaataaattagtctctcaaaagttcaaacaaaatctctacgacgatgagaaagcaaaaatatccctacctacatcactcaacacatgtgtagtggttcatcaaataaacatgttctttagttaatatcatcactaatccttttccatatatgtagaggagggttagagatttttcaaattatttttatattattttattttatttcattttctatttctaaattaattatttttattaaaaatctctttcttttgatataaatatttgataaaataaaggaagtagggttttagagattactttttgaagggtagagggaactcaagtgttgtaaatacgagtttattttttgacacgacacgaaatcagtacgaatttaggaggtacgagcataacttgacacgttgtgcaaattattagaatgaaacgacacaaaaaatatgagcttaagcacaacacgacacgacatgtctgaaagcacgacacattacaaatttgatataatttcatagttataataaatatttatttatcaattataaatcaattaaaattgcagtaaacatttatattttaattattttttatatgattgggtttaattattgttgaaaaattatgtaaaaataattgaagttataaaaaacacaaatagtttagtaattagcttattattcataataaaaatgtgaagcacggatttaaatttggtgtaagaaaatagattggtctatttaagaaaaataaatcaacctgagtaaattatagtatgattctaagcacgatatataaaaataagagtaatttgcggcataaatacctaagttttatgccgagtag

SEQ ID NO: 117047 - DNA, 1582 bp, Cannabis sativa
taagatcctagtaaaataaattccaacagctcctactatttctcacatgttatttgctgatgatagttatatttattataaagccaatgatatagaagctgctaatgtccttaatcttttagctatccatgagcatgcatatgggcaaaaggtgaattttgcaaaatcttttatgttctttagtaataatactaaagctggtgatcgtgttcacatttgcaacttactagggatgccagctgcttctgagcatagctcttacttgggtttaccgcgtactatgggtcgaagtaagaatgctagtttgggatttctaaaggaaaagatgaaaaagaaaattctcagttgggaaccaggtttctttctaaagcaggaaaagagttattactaaaatctattactcaatcttttccaagctatgctatgagtgtgttccttcttacgaaggaaatatgttcttctctcgaggggttgatggctaaattctggtggaaatcacaatctaattcacatacaaaaggtgttagttggatgagttggcaaaaactaagtcgtcacaaggatgctgggggtattggtttttacaatctgagggactataatatggcgtttttggggaaacaaggatggcgcttgattactaataaaaaatctcttgttactaagctgtataaagccagatattttcccaatggtaactttttaactgttgaattggaaccaaacacgaactttatttggcggagcatttaggaagcaaagagcttgattaagatgggtgcgagaagagcaattagggatggaaaaactactgttattttacgtgtaacttgaatattcgcacctttttctgtcatgaaccttgaatattttcacttttagatagaacatgttgattgttcgcacagagtttggtaccagactatgatttcagactcttacagagtttgaaatgaagtgttcaccaaatgattgggtgtttcacagtgatttaatgtttgtgcatttgaataccttgagactttgttttattttagtgttagtttttgttgatattttttgcaatctaaaattgttatctgtttgaggacactcctccttaaattgcacacacaacacgttgaaaagatcttctatctttcagatgagtaatctctcggacaaccagatatttgaatttgggggtgggcatttgcgaatgaacctcagaagagcaatatttttatcctaacatcgctattagaagatgagctcccagaaagagtagataaaaaaattaacgtgttaattgtaggttcttttattattcttattttttttttgctgaaatattaatagtgctgggatttttttaccctaaaaaaaactcattttaatataatcagatttattaattaataaatcattttatgttgcatggttcacgtgattactttcatgattatatgtttattacataaattctattaaattcaaaacatatagtaatccacaattacagtgatgtcatcatagtggaaaatgattgtgattatatgcttcaaagtatttagtctcgtgatttatcagtgcactggattta

SEQ ID NO: 117048 - DNA, 1155 bp, Cannabis sativa
  modified_base (1076)..(1078): a, c, t, g, unknown or other
tatatacaactgacatttgcaaaaacacggtttttcaaaccataagtcatcgatgtagtgtgtagttaccaccatgtaaccccttttttgattagtggttgtccatatcaattgtgactacaattctacattgattgttgctcaatatatatatatatatatatatattttggtcttctcactctcatgtaaaatgatcattttggcaagctcctcccttgaaaattcttagacaaatgtgtgagcaccaagtgtagtagttccatcttttctcttatttggattcaaaatggtttgctttatgtctcgatgttttctaagaggacatctcttggaatgttcatgcaaatgtgcagttctattttttcttgttcctcctaattgtttttcacaagagttgcaattaatagtcttttcaattccattgactttttgctttttaaagtgattccaaactatagaagttagtcttttatttttttctccacaatctcaccatctataattagtgggatgctgcggttggaagagaagaattaagtttagtaggcggagctgttgtagattcattattattttcttcaattgtaagtgggaattttgtgtagcatcttgtggagaactttcagtttcagtcattgttagacttggactacaaagtacaaatcattacacaaaattaaataaacttacatctactaaaattctaataccagccatcaaatatataaaaaaatattgaacaactaatattatatttaaaatttgaatcaatggaaatagtagatgtagaattaatataatataactattctatttctagtccacacgtatacaatacaattaagagaaagattataaaataatagtaaactaggcacgtactgtctcactaagtagtaagaactaagaagaaatcttattctattagaacaaataaaacagtagaataaaacatctatttatcacctttttacagcaataagtactttatccttattgttgtattcacaaatcacattcacaaaagatatatataaaaccaagataagaaatatatataaatttatatatannnatatctattctatataaagtgtaaagcccgcttagttaatttggaaattagcagctgtttatgtttaatcaggaaat

SEQ ID NO: 117049 - DNA, 2047 bp, Cannabis sativa
  modified_base (1997)..(2010): a, c, t, g, unknown or other
agttttataaaacatgtttttaaaaaatattttcactttttcaattttaataacagaaaactgattaaaaaagtgttaccaaacggcacctatatttattattacagttgtaactaattgatcaattagttaagtttgttgagtcagtttgttagctctctcgtgtctatgattgtattgtgaattctatatctatatatatatatatatatgtgtgtgtattgcttcaatagttgagattgagcagtcaatttcctcttcattttccattcagtttattttccctctctttctctctttcttcttcttttcttgctttgttctgattttctacatggtatcagagctcaaatggccaacaatggcgatcaagatcaattaaatcatcaagctccaactgcagttccgattcaagaagttgctctgccaaacaacaatcctctaccactcaacctcagactcgatcgatcgaattacactctttagagatctctgattcttgcattgacacgtgcttacaacctcgatggatacattctgagaacaaatcctcaacctccttaaaatcttacaggtaatgttcccaaccctacattcttcacctggttaagatttgatcaatttctaatgcattgattaatgaactctattactgaggcgatgttaggtcatgtcatcaatgctcaaacatctgctgagatttggacaacctttgaataattgttcaccaccagattgagagctaaattgctctagataagaggtttgcttcagtcgaccaagaaaggttccctgtccataaatgaatacaaactgaaaatgaagcaatatagtgacactcttgctactggtggtcaatctctctcaaatgatgatctaatcttgtacattcttggaggattaggtactgaatatgaggctgtcatagtcaatctcagttcaagatctgaaaatctgactctccaagacttacaattcatgctccaaagtcaagaaatgagaatcaaccaacaaaccacagattctgtcacaaatgttcaagcaaatcttgccaatctatctttcaactgttgcactcgaggttctcaaaactatggtagtcgtggttatcgtggatcaaatcgtggtggaaaaacaaccaacaccaactatggtggcagagacagaggatctaacaaaccaatatgtcaactttgtgaaagaacagggcacactattgttaaacgttttcatagattcgatatcaacttcactggaccaccagcaacaaatggccgaagcttccactttctccaccccatctgagacccctcgaactcacctttctcaaacatccaatgctctagatctatcaacatcttggtacattgacagtggtgctacacatcacgtgaccaacaatcttaacaacctcaccacttccacaaattacaagggcaaagctaaagtaattgttggtaatagttctagtctccctatactcaaaattggctcaaattctattcatacacaatctcttagcaatcttttaattttacaagatatcctacatgttccaaatgtctttaaaaatcttttaagtatctcacaattttaccaaacataaccaatgttacccttgaatttgatgatgtgggttgtctcattaaggacaagaacaccaagcaagtacttatttggggtaaagttcatgaaggcccctatcgactataattcatccctcctaagtcacctattctgccttctcccacaccaaatataatatttttaaggccaagtgcttttaactttaccacatcaagaaattcagtgtatgataaaagtaaactttcaaatgtttggcattgtaggctaggacatccatctttacatgttctggccaaagttctttctaatgttgctcctcaaacaaagtgtaacaagcactctttttgtaacgtccacgcttcaagcctccatcaggcccttacacacacgaaataatggctcttatacannnnnnnnnnnnnntggctgcttcctggattgacgactgaccctacagacc

SEQ ID NO: 117050 - DNA, 878 bp, Cannabis sativa
aaaaaaaaaaaaactaataaaagattcattaataagaaatgtatttgatctgacaaaaataataataataaatgtatttgagaaaacaaagttgttatgtcttaaataatttatttttctttcccatgattttttaccttattttctcttaaatctatataataaaatatactcaattacttatataataaggtgaaacaaaatgcatgaattttgattagatttttcattctttttttggcagtgaaatttgactatatagcacaaaatattgttcgaagaaaactgtcattcttttttgaacatttgaaacctatcattcaacatcaagaaagagctaataatatgtgacttttttggtatataaatttaaacataagataagatcttattttatttaatttttgacaatatagatagatagatagattgactatgaaattgtgagtatattttcaattaataaaataaataatagtaaaatgaagagaagtgaaattaattataaagaaaattcacgtggcaattaggtgcatgatttgacggtgcagttagaaaggacggaagacgctccatgtggtccccacatccggttactctctttatccactttcttatgtaatatattaacttgcgctgctgacgtgtcttcggttagtggtggaaaatacagaagactacaccccattatcattgtgggctcgataaccagattttagtttgggctcgcctcgcctggcccaattcttttgtccgtgttgtttggaaattcctccacgtcatacaagtgtaccaataataaaaaaacaaaacgcaagctttttttttttttttttttttgtagtaaatatatttaaatgagggaaattaattataaa

SEQ ID NO: 117051 - DNA, 1151 bp, Cannabis sativa
  modified_base (1112)..(1125): a, c, t, g, unknown or other
ggcccgaagagaaacaattgaccttcaagttagggtgaggggccgcaccttttgctgctgagctcttagaccaagtggccaggagcgcctctgaactgctcatggagacctgggcatcctgcagcaacgcggatgctttcccgttggcccattttgccaagggggaaataattggggtaaggcctcgagacgctttcctctatctttctctttgtttatgtctgtctgccttgtcccctgttttgaaacttcaacctctctaacttggccttttttgacaagaggccttgttggcaaaaaggactttcgcagaggctggtgtactggtgatggagttggaacagatcaaggcgactaataaccgtgacttgtatgttgtcaatgagactctctgggccaagcttactgatgccaggtttcagattgggggcctctagtaggctaaccagcagttggagaaggagaatgcctaccaggcccgtttcatacagagtattaaggttgttcacgacctttatacagagatcgtggggcagatatctagtgcaggtctgtcttctcagtcaagcggtgcccaactttgaacctccagtaggccactttaaatttgttgttattttttgttttttttatatatcctccctttagctgtacttttcaatttgcggaaacaattaaaatttttccttggctgcagggggctataatagcaaaatagggtctttttttgttgttccttacttggagatttggtgtggtagacttttcaggggctggttgtgttattgaagcacctggttccaacggccagtgtttcaaccttttccctttagtcttaattatctcctggtcaagtcaggaactgcttttttatttgaccctttctttcctagggctgtgatggtttttagctcgcttcattcggaaggttacttgttcggagttagccaggaggtggcctctttctgtgaaataagatatttcacgatttcccatatcctcttcagggtctggttctgttacaagattgagttctcggagtgatgtctgcaattgccttagacttaggcatttttcttactttggtccttgtgttggaaatattttaccannnnnnnnnnnnnntaccatgtatgtttcattaacatcct

SEQ ID NO: 117052 - DNA, 4417 bp, Cannabis sativa
cttctgttaggattctggaacttctgtaggtacctctccgttaagttacatgtaagtgtccacatgtcatcttcgcattggtccacatcatttaatttatatttttattatttaaaattaattacaatatttgaaaatcattttaaaattaaataaacattaaaattaaacctaattataaatctttgcgcttgacctcagaaaaaaggaggttaattttctcatcctctgcctcaattagatttggaaattttcaatagagaattttgtttgttgggtagatctaaatatacctcaaaatctaaaggcatcaacccatcttcttctcttcaacaccatgaaatttttctcagccaaaaatctcaaaaaaaaagtctcagactgaaaatttcccttatcaccgtcctccaccgtgatttttggtctctatcaaccatcactacaagaatgcattctccctcctcacgaagcttaaccctccagtctcgagcctcctcgcgagtccttcgctgattaaaaaaaaggatgaaatgcaccgcaagcccaccagagacggctcagaacctcatgttcgaggacccatcaagataaaacaagagagaatgacgtggtctaggcaaatctaggctgaagaagaagaagaagaatgaagaagaagaacaggcgcatttgggttaatcataggattttgtgatttgcaatttatttagttttttaaattttgatttagttttttaaatattttattttattcatttatgtttttttatttcttgaaaagaactgagatttttatttaatttaagttttactaatttttttacttttaaattatttctaaaatttttaaataaaaaaattaatgatgccgaccaataaaataatggcacgtgtgtactggcctggcacttaacggccaggtacctagggaagttccacactagtgacagaaggtatttttaccgccaaaaatatgatttaggtacttatctgctacttgacataaaatttaagtatttatgccgcaaattactcaaaataaaattcaagaagttgttaccactcgttaaaaaaaaagaatcatacatgtaacaaaatatttgaactttatttttgtcactataaattatttaaaaaatttacaagtaatcctaaataattatgaaaagaaaaaaaaaattgaataaaaaaattctcttaaatatcaaaccaaatagaaatttatatatattatatatgtttaatgggtattacccatgagtagaattaagaaaatttgaatttttaggcttaatttttctatttaattaaaaaacttctcatttttacattatatgggttggaattgttctatcggttgaaacaaaaaacttaagaaaaaaagtttttcagcaaaaaaaaaaagataaaaaaagttgagtttgacttaagtattttgtatataaatatatattttttttttaacgaaaaaaactttttattcaaaaaaccaacaagatacaactaaggcacaaggccaacctgaaaccagcggctgctgctgcaataaaaaaaaccagcagcaaaagccttagacacccctaccaattgttgattacattaagtaaatacttgtttctcttacaatctttgaaaggacccttacaaacaattctcatatgcactattttcctaacttctatactcaagcagctaggagtcatacaacaaagatcatacacacacttattcatgctcttccacaaaaaatagtacacagcagccataacaacattaataatgcgtttagtcaagtcatttttcgtgttacagcagccctgaagaagctcagctgtcgtccgaggccaatggaaagtccccaaccacttattgacggcctcaaaaacttgataagagtaagggcgattgaaaaataaatgctcatgtgtttccacatcagcttcacagacagggaaaagattgttaggaatggccataatacgatgcaaatagtcccgagtgagcaattgggagtttgaaatctgccaataaatgaatctatattttggtacaacaagcttgtcccatatagcacctgcatagtcaatctgagtctcttccacaaacatgttataacatcttttagtgctgattttgcctcctctaacagcttgtctgagctttgattcatccaagtggtcccttaagctcaaaattttcttgaaataccaccttgcatcatctttctttgggcagtcccatatgttttgataattcaaataaattgagttgatccatttgacccataagcaatcctccttcttagaaagctcccacagatgcttagccaacagagccttgttccacttttcccttcccgaaacccaactcctccaaggtttttaggaaggcaaatcttttcccaagaagttcggtgaagcttactcttattccctgaactcccccataaaaagtcacgacaacttttatcaatggctgttgttattttggaagggatgatgaagatactcatccaataattcataattccaagcaacaccgagtgaatcaactgcgcccgacttgcaaaagaaaggtttctactcgcccaacagttcggattcagcttgtctagaataattccacaatctgaagccttccattttgttggtctgagttggactacaaggtacttaaccaggaacctaccttcctctatctgaacaatatcaagaatcttggattttatctcttccctaacccctccaaagtatatttgagactttgaggtgttagcagacaaacttgtgtcattataaaacttagtgaaggcttcaaaggttatcctcaccgagttgatgttacccttgcaaaagataactaaatcgtctgcaaaacacaagttaggcaagcgtagatgcttgcataaaggatgaaatccaaaacccttttgtctagagtagtagctcagcagtcttgtgaggtattccattaccagaacaaagagtaatggggacattggatctccttggcggagacctttcttccctttgaagctaccttggattctgccattaagaagcagatgatagctagtacctttaagacaagtcattatccatctgataaatcgagtaggaaaacagagcaccctaagtaaatcttccacaaagtctcagtcaaccgtgtcataagccttactgagatcgattttcatgatgcacctggctgagacattcttcctagtatagcccttcaagaggtcctggaatatcattattttatgagccaacagtctatttttgataaacgcaccttgattgtcgctgacaatagatggcaacacatctgacagtctggagcaaattattttcgagatgcaattatagacagtgttgcaatagccagtgggtctataatctttagccaaagaggggttgtccaccttaggaataaataaatgacagtctcatttaatatgttggacagccggccattttcaaagaagttcaagactgcagaggagacctcatcaccaattttactccataagtccttgtaagaacctgatccaaacccgtctaacccaggactttttgaagggtgaatgctgaaaagagctttctttacattccccttgttaaaaggccgaatcaatctaccttgttgctccaaactcagatagttaccctgcttcacgcaagcttcatcaatgatgcttatagctgaactcttgttgtccatgaaattctcaaagtgtttaactaagtgtttcaccacttcctcaaagtcgtcaataattacatcccccttcatgaaagtggttatcctattttccagtctttctttcctcattatcacatgaaaataactggagttttcgtcgctaaacttgatccagttaaccttgctttgttgcttaagagccagagccattatttcttttgctgtcaaaaataactgttgcttttatttaacagagtgttgtagaatcatatctgtggtatataaatatatttttgatataatgtaaaaggagatattttttttatctttaattaagtagtaaattaagcatataaatttaaattcctcttttattatttgtcattggatcaaaatctaatggtttattatctttaaaattaatatttatagttaaatttatttagtaaccatcaataaataatatatatatatgtaacacttgttaataagtattaaaattttctcaaaaaaaaaaatatagtacaatataggtattaaaattaatgtttataattaattttatttaataaccacaactcatatatatataatactatagattttctcttataataaataagagagtatttttttttttttgacaaagtgattagaatcactcataaatttacgacgctcacgtccgccaccggcgctggaacctcctcga

SEQ ID NO: 117053 - DNA, 1410 bp, Cannabis sativa
  modified_base (49)..(50): a, c, t, g, unknown or other
aggcggtgtgggattgcacagcttacccagtgtttccccttacggatcnngggactactgactgtcacacatatccaataggatttaaacaccaaactcaccacataaaattttactcacatggctatatataattaactacaacttgactctaattaatgccacatgttactttacctcaatactttacatgacttggtttgaacagtgagtcaacacattagctttactcaataaacatatttctttgtttcttttcccttaaaaattaatcaaaaggcataacccaagagtaagaaaaaattagaacacaaagaaaaaccatggagaaagaagtaaacaagttagtctttccaagactcataatctaatttattaatcacattaattgttttgaaaactattattaatcacaacgagtatagaaatggaacaactcactccattccatagttacacaagaaatattactattgagtactagtggtgtcccctgattgatttttattaaaatatttctcctaccacaagcctttagaaaaaaaaatgaaaataactttttaaatttatcaagtctaaagtgtttctagcaatgtgctctcttgatagaaacttattgttaccaaagtgatttcaaagacctctatttatagtattttgaggatatataacatataaaaatcaaaatcatttcactacatggctgttaccaacattttagttagtgtttatttggacaaaaatgttggacatgaaaactagaaacatactcaataaattcatatacgtttataaatgttatttcaaaacttgctccagtcgtaggagaacaatcataaaacatgttatcaacaataaaacatctgtttctagaaaactcaacattgagttttgtaactctccgagccaaacctttctctaacgtcccaacacccattcaaatgatataagtgaatattgtagcaattgctaacagattgaaatttatcctattaatttcataacttccatatgtaataactcacttaattaacatcacgatactttttagcatttttcttacataaatctatacacaaactaaagacatgtatccaaataatattgggtaaaagaaacaagacattgtactcggaacacacatcttcttaggaccaaaaccatgattagatgtctagcatgactataaggcagagtcctataattagttaaaaaatattaaagggtatcttatgatgccaaatactatagaaggtgacatattgttattaggtaatgtttgctttgatgtaatgtaatgagaatggtaatggtaatatgaatgataatgtaacgtcctcgctttaagcctccattggacccttacactcacagaatgaatgactcttatacacgagtacgtcactcagg

SEQ ID NO: 117054 - DNA, 2599 bp, Cannabis sativa
  modified_base (160)..(165): a, c, t, g, unknown or other
  modified_base (396)..(397): a, c, t, g, unknown or other
acaataaataagaatatcaatgttttaaggatttggatgaatttatgaataaaataagtgatcacatgaactaaataacatattaaataagtaatgaaaaataaatatatttctttgttgataaatgaatataaagcattacattgaaatagagttttannnnnngcataaaacccaacaataagatgctctcattctcatccaacctgtctaaacctagttttcattctttgtcatacaactagtaaatgagagtctccttctatagtgatttcgaacctctcattcttcttcatcaaatttaagcctttagtgatagagtaccatgtcccctcatggcaagtcaagtactcaatcatagcgtggaagatggtggttaaccaaactgaaggagannagatcctggttcagatcttgataatgctctgggacaaaaaggaacaagggctagagatctgatttgaaattgtcatattattctgctgccatcaatgtaaggtattttgaacttatatgtgtttatttcatcatattaggaaatttatattgagggtgttagattatagattataatcaacatagatgttaatataactagatcttagtaaaataatttccaacacttctctatcttcttcatggtcttcgcaagcttggagagggggatgtcatcatctagattaaaagtatgcctacctcctaggcaagtctcctctgctaccagggcataatttaggcctccagatgggccctcagccccctcaacaccagactcgggaaggtacataccatacttccaaaagatggcctcacaagccaacatcgatatattcctcctctcaacaaggagggacaagatctaattagctctatccctcatctagagagtggggatggagtgtgagtaggtcgacaccctctggaaagggtggtggacctccgggatgtcccaggtaatgaaataagtcctggcgtatcctcccacttttgacaaagttatgatgctggtgttgcctaaccactaatagccaagctgactgaagtagaagtatctgggccagattttctttgccacggatttttgctcaaagaagtatccaatctcgtagggagggggggttgaggctagcccaactctacatacaaatgaacatcaccgaaagatactttattccattcgagtgatctgagccagacacactctgaagtacatcgctatgtctctaaagtaagggtgcaggggtagtactgctccttactctatgtggtgctctgaccaggccatccaattgaatgtcagtcgatgagctcgctggtctctcataggccttacatctcctaccagcttgcatggttttgatcttgtcaagatttagggtagaaatacaggacgggggagatatccaccagtcctgctggtccccatgctcgatgacttggggcgctacagcctcctccataacatggcttatccagaccttggaaagatgaccaaagctattcaaaggtcacctggcctcatcatacaaacccaaggggttattgggcaatacaacacatgtcttgtatgcctcctggtaggcacgacttcttccacctcagacgcagggtcaatctcgattgaggcctcttcatctcggctagccacagcccccccagccataggtgcctcagcttggttgacccctgtcactctatcatattgaggatgtacaaccacctcagcaatgccgaatctccccctagtcgctagcataatgatgtgagggtcataggatggttccatgcggcacatctgtttgctctttgccataatggatcctgagtgcctagctacagtaactgtggtctctgcagctagaagatctctcggtgaagaaattgcaataccaacgagcaaagtatcgagcgcaccgtccagaatgatgtaagtctaagaaccaagaaggcactacctccaccctaagctcagctttcagatgaaccggctgtaaaactcactgcctattcactctaaatggtgatgatgctggaccttgggttctggttgatctcgaggagcggttagaggaatcaactggacactggtctttgaataaaagaccaagtaaatcttcatcgatatggttgtcacctccccaatagtcactcgggatcatctacacacaaaagacaagggcatgtgagcaaccagacaaagcgacaaggtttagacaagactctggtcaaccgtacttgagggtacttggcagataatttcattgtataaggctgggtatcaacgaagtataatttctagtgtaacaacttgtacaagtgtcgagtcttaagttgagaattgaactacaatagactcaccataaagtgccatatatcatttctaagggaaccacatgtaagacaaaggttgtataggttcgcaaggccatcacatgattcttatcgaggtgaaagaggatagaaaacttaccacccacttgggaccaaagccttgggccgatcagggtcccaaggcattaagagggtcgaccagggttccatgacccatgtaagaaccagccagggactcatgatgttggaaaatattttaccaggatct

SEQ ID NO: 117055 - DNA, 1526 bp, Cannabis sativa
  modified_base (35)..(46): a, c, t, g, unknown or other
ggtggaggagagatttttttttttgtttttttttnnnnnnnnnnnntttttttttttttttgaggaaagataaaacttatttgaaaatatgagtattaaaaggttctgtacggttctgttattttatttttatgtgtgaggctaaaaagacgccccgtgatgggtaaacatgttatgaattaaataatcaacggtgatgagtggttaaccaatggcaataaagcacgcggatactcccacgtggagtttggtgctgacacgagggctcctttatttcaaggatctctagaaagtctgagggacgtgctaatgagctggctacgcaacctctgtctcccatgggccccaccatttctgatgccacctacgtggcacacgtcatttactagggaccacactcaccgacatctgccaaagcgggtgggtctctgtgtacgtgtctgcatactttgttttttctttttctttttttatttcagaaatgctaacttagctaaaccgcaaacccaactcaggacccagcttcttacttttcaaatttacttttaactgtaaactttggtaactttcaatacatatgcccttccttttgagctaaataacaaacaattgccatacccactgccccacaagttcaaactattatggtagttttgctatttatcatcaaacaaaggacatattatatcactggagtaatattttttttagtaaagtgtatacgtggcagataccagaggtaggttacttttcagggccaagaagtgcctggttggcaattgtcataatacctgctgagttttctctcgcgtggctgattctctctcgttcgattaatgaaatcgtagccgttagttttgatagttacatcataagtcggtcccactgagtggatttaattttgatttgttgggtaagatgtggatggtgacctgtgctcctacacgcgggccgttgatggggtgacttggaaaagttcaaagagtcagcactgcctaatggacggtccagattcgatatagcgtgctatttgagtcaaaacagggtacgtcagacaaggagtgcactccgcgttggatagatcgggagaacaaatttgcaattgagaaattactccattaccctccttctgacgcactcattacacgcgcccttataattttttttttctttttttttttaaataaaaaattataatatttttttatataaatactattgggtgattttacaatgcacaccctcaaaagaaatatactgatgcaccctctacttatttcggtatctaggactaaattttttttatattcatgtacgttatatctatttaaaatatcctacaagattttaaaattttcgaaataatgttcaaccagtctaattactttacacgcgtataaaataaaataatcatgtgtgcaacacagtacttgaacgtaatttttggcgtgttaaatttttccgaatttcttaaaattttgcaggatgtcttaaataagtataatttacatgaccatgagaaaaaa

SEQ ID NO: 117056 - DNA, 1932 bp, Cannabis sativa
  modified_base (1884)..(1906): a, c, t, g, unknown or other
taattcaatcctacccttttttaaggtatgaacattaccctcctcaagggtagttatgggtagttatattactaggggaataacattctaaagctaaattctctaaaaaaaagtaatgtttcacattaccatttctttactagggttaacctattccaaacggtccctcgaaggaatacaagagactaatagtacattttaaccatctctttatttaaataggtcccaatcattactttctattttatttcaaataggtaggtagggtccactcactcccacacgtaagaagaacacctctttttactttgacaaaatcaaatatcaagtcatctcattctcaacaaccaattcccactcatccccactctgtccactcctcttaaatttaccaaactaccccttctccactacatttaccaaaataccctcaccctatatataaacacaccgtcttcattttatttttatataattcatatcattttctctttttttttttttgtcttaaaatacacaaaaccaaaaccgtgtcattcaagaaaagaaaatctttctcctaacccataaattcaatcatcttctcttcacaacaacaacaactcaaccaaactgtttggataccaagaaaatagcccaaagaaaatcatttgcatcatgatgatgggaaagaagagattcaataattttttcaagaagttaaagaaggaatcatcatcatcatcaacatcatcatccaaaacgacaacaacaacaactaatcataataataataatacgtcgtcgtttcgaccgaaattcttctttatgaaatggaagagactcaataatattattcaggtgtcgttttttcaaaacgtcgtttttaaggtcgtttcagtgcttgaggctgtcgttttggttacttctctcgcttttttctacctcttctgcggttgccatttctaattctattgtcgttttgctcatttactctgtcgtttttaacaacttcttttgagaaagaaagaaatttgaagagaggttgtgaaggaagaaattaatcgaaggtcaatgatttgacttttttttttttttgaagatggggtttattgattttatttatgttttttttatagagatgattaattttatttattgtacaaattaacataagctaattatgcttaattagttaatcatttctcaatttcttattaatgtatgtatgtatatcttcttctatttctttaattaatccaaagttcataatttcttgtttttcttcatttttttcgtttctgttaataaattctcttccctgcaaaatctagccaatttttttgtttttttttttctaatagtttatttaaatatagattatcacattcaccattaccaaaagaaaaattaattaattaagaaaaaaaagttatgcatatatctttgtactaataattaaattgtaacacaaataaaaagtctcattcacacacttcattctaggacatgcatgcacttctattaaaaattccaagattctattcctttctgatttttaaccttttcattttggtttaattaatacagtatatagtatatattaatgtactaataattaaatacaattttgagtatggatatacatatataatttatgaagagaggcagtagttcactgtttaagtaaatagacactaaattataaaatttgtaaaataatcatattaaattcataatggtgtaattcaattcgataagaaatcggtagttcttcgaccttggacatcaaacatggatattagtatggattagactcaatggtattggtcttcaatattggggtcgaaatagcttaagtgttttagttagcactataagagcttgtttggaacgccgtattannnnnnnnnnnnnnnnnnnnnnntatattgaattggattatatatcata

SEQ ID NO: 117057 - DNA, 1834 bp, Cannabis sativa
atatagttttacataaaaatattgcataaaatacaattcaatataaaatacgatacaatacgacctagtacggcgttccaaacgagcccttaatttattatcacaacttaaccaaaactctctctaataaatatagaagagtgggctcttgcccaataatgatacatggatgaacaaatacttgtgtcatgacttggtcatcatgtatttattattgtttgaccttgtaattctctttagaagttaatttaattaagacacatcgttgacttgtaaagaaatttagagtatgatttcaaattgaattacgactgagatatatatatatatattctctaaattcattgctacaattatttattgtctatttatttattattgtttgaccttgtaattctcttaagaagttaatttaattaagacacatcgttgacttgaaaagaaatttagagtatgatcatttcaaattgaattacgactgtgaaatatattctctaaattcattgctacaattatttattgtctatttatttattattattactattatttttttgataaataattaattaatttatttatttttgttatgagtaaacatacaatgtcagaaaagtaataccaaagtaaagaaatttattccgttaatttaaaataattcaatgtctattttaaggacatgataaattaattcctagaacgtaaaattaatattgcaattgatcataaaaatattttaatatcagtgaaaaaaatcttgagatgtgtttttcattcgaccaaaaaacatccacttaaaataataaacgatcgaatatagaaccgaagttaaccaaagaattaatatttttcatatttagaagaaaaatatgaaattttgctacaatatattatcttcatgtgatcacttaaatgactatatctttatatgtaattaagtattcaatcacaacgattgaattatatgtagttaactcttctgaaatattgaataatttcttttactatatatatataaatttaaatttatatataggacaataattacagtaagaaaatgaattaattctgtgaagtattgagatgaccaatgcaagctgatcatttttaaggtgcattggtaaacctcgtttttctcattttttaaatacattttatgtatggtaaattttagacgtgattaaaggatcaatcatggattcatgttacattcattcttgttcccacaaaaaatgatttaagtatatatataggtgctcgtgtgcgttttgaacaatgattaaggcctaactatataagcatgaagccccactaattgatttgaccatgataaagatactgatgcatgtgtggttggtctaaatttgtctaactgaaaatttaagagaaatattctctatatacattgacatgtacatttgaaatcattcaaacttattatagtgggatcattttgtatatttattttatttaaatatatgtatatataactcatattgttagatgtatatataacatccataatttaagtggttgaataccatacttgactcttattaaaaaataatacttacaatttacaaatgatatatcatttaatttatattacgaagaaaaacatataaaattacaaaaatgatagaataataagaaaatattagtataataataaaatataattattaatcattatatagatagagcaataatattttccacaagagtagtttgcagcaaaattccccaactatcaatttacttgcaaaaaactatctaacctcatattttggtgggaaaaccttcaaaagtactgttccgtttacatttttaaggt

SEQ ID NO: 117058 - DNA, 4773 bp, Cannabis sativa
  modified_base (2684)..(2691): a, c, t, g, unknown or other
  modified_base (4710)..(4737): a, c, t, g, unknown or other
gggctaacacagcaaagaactatccaatcaacccaagttttaataaaaccaataaaatttaatgtaagcccaaataaaagtctaacatgataatctgattttgtgttagaacgggccactacttgctcctttctaaagccccaattgataaggttgcctccaagaaataggcaaaagtcattggttgacttgcaatcatccatatttgaagcccaatttgcatagaagtagacttttaatgtcataacagaggtaggggaaaatggagactaggataaactattttgaaggactttttttacaagcattccaatgattcattgttgaggccttgagaaattatatgagtttgttaacaaagaacaaaatgtcttgtttggtgatagtgaggtattgaagtgttccaatgacacttttatacactctggattgtcactttgtggactctctccatgacatagttgttgatttttatgtccatatcagagttagaaaagtagaagcaaatttgataaaaaaaaaatatctaataagaaccataagctcacagatctcaacataatgtatatagattaaatctagactaatgaatagaaagattatacctcttgtagcctattaggggatcctcgttatcttttagtattattatcaaacatccaatccaagaactttgctgaagagatcactcgacaatcttccaagccagcctcaacacttagaatagaatatgctttagattctataagataaatataattatgtatcacaatatattctcaactcatgaggtactgtgatgagatgggattgattacaaactcacaccacacttaaatgtgtgtggcgtgtgagactgagagaggaagagagagagaactttatttttcaatcatattttctctctgcttgttacggttgttagtttataataatatataacatatatatattattataaataaactctttaatgaattctttttaaaataaaagaaaatatctaagatttaaattcataaatcaaattcaaatatgaatatcttataactgattaacagaatttagttaaatctttttattttattattatctttttaattaaatagattatccagtaatataattaattcaataattaaaagataattaattaatttaatttgaattattttaaccaataaaaataatcaaataaaattaacatgagctttatatgtcaccctacacgtgcagactaggcttatacgtgtgggtcatattttaagatctaaaattaatttctccattttaccataaataagattcttttatttattatgccaataaataatagttaattaattctcattaatctcttatttcacaaagattaaaataaatatattttaactaattaactaatatttgagagtaatactatatttaactaattaatatagttttatctaataatactaaatagttaaataatatttaagtatacaattcataattattataattattcaaaacaataatttttataaattactattttgcccttaataatttttttttagaaattaattctcacacaaatttactcatcaaataaaaccctcccctgtacagtgttgtatagaggtgactcagggaccatagaactatattttgaagctccaataaatacttgataattatcaatctcatcaataaaataatctgatttattaattccattattactccactataaatatggagttagttaaagactatgattgtgaaatcttttatcattttgggaaggccaacgtagtggctgatgccctaagtaggaagggtcctggacaagtatctaatctatttatgatttcacctcagttggtagatgacatggtcagattaggtattgagtttattgtgggcaaacttaataatctgacattgtaatctgatttgctagacaaaattagaactgcccaattaacgaattcagagttagtgaaagcccgaggagaggttctagttggtcaagctaaggattttacaatatcagatagtggattattactttataaaactcgagcctgtgtttcgagtagtctagaattgaggaaaaaaattctcgaggaagctcataccactccttattcattacatcatggcactaccaaaatgtataaacttaaaacctttctattgatggtgtgggataaagaaggacgtggtatgtatctcgatgcttgacttgccaacagattaaggttgaacatcaaagacctgcaggattgtttcgacctttgactcttactgagtggaagtgggaggatatcaacatggattttgtggttgggttacccagaaccacgagaacgtttgattctatttgggttgtggtggatcgatttactaagtccgcatattttctaccagtgaaaataacatttacagtggatcagtatgcatacctatatgttaaaaaaatagtgagattacatggggctctaaagtctattatatcagatagagattcaaagttcacttctaagttctggcaaagtcttcagcgagccatgggtaccaagctgaagtttagtacaaattttcatcctcagacagatggtcaatctaagaggacaattcagatactggaagatatgttacgagcctctgtgttagattttgaaggctcctagagnnnnnnnntaccactgatagagttttcatacaaaaatagttattagagtactatagggatgactccctatgagatgttgtatggtagacagtgtaggtctccaatttactgggatgaaatgggagagaggaaatacctaggactggaatcagtacagcagaccaatgaggcaacaaaaagatcaaggccataatgcttgcctctgagagtaagcaaaagagctatgcagatctgaaacgcagaaatgtagagtttcatgttaaagatcatgtattcctacgagtatctccaatgaaggggattaaacgtttcgggaagaaggacaaattatgccctaggtttacagggcctttcgagattcttgagaaggttggactggtagcatatcgtctatcgactcacagttattgtttgcatgtgtaggtaagggaaaagctaagattgaacaaatgtgagtttgagtgtatgaagatgtacatgtcggggtagttaggcctagagcgtacgatctttgggacagcatgctatattttcaatggtcgcgaggcgataacttttataattaatatgttgtattttgattgtaacttttaaaatacgggatcctgacttttgtaaagtttattgtatattaagtaaaggttaattaaaaaaagttttaattaaacacgatttctaataaaacatgttgattagcaacaagttgcacaataaattttaaatcacgataacacgcctaagttagtagggtgttacaggagtgcttatattcatctaaatagtctcgtccggattgactcttccagattgtccgtactgaaagcgcctttctaaaactgacgtggaatatgttggtggtgctaagttagagaatttaaggcaacattaagtagcgacgatagaatcagagattattttagcaactatccaaatctatattcagttatgacctttgtaatccaaggatcagaccattgaaagctttagagaaaattgtgattgtgtaaggttaaagtgagagagtctaaactagagagagaaagttcatcttgtaatctctgtaaaagtttgaaaggattattgtaatcgtgtaaacactgatatcaataaagatatgggtattgatgttccaatcgagatgtagagcattacacaaggcttgaactcgttaaacctggtgttattttctccttgattaactgctttaatctattatctagttttggtgattctttgatagtattattcttgattgtgtgtttgttggtccagtattcttgcaccgtaaagtcattcattgattcccaacatttttcataaaatctacttttacgttctactctgatttagaccataaaaactaacacaaatgccaccccctctttcttcaaaatctagctagagcctagttatgattaaaagaattttaggattgatcaataacaagtttgtttatttgatcttttatccaccttgcctcgaattgaaatagtctcttgattctaaactcaagaccccaaaaataaatagagtggtctatgattcgagttgctagtatggagagattttaaaaccactcaagtgaataatcaaaaccatccttcatttaccagccctttatcaaccgttgttttatatggtgatctccttctttgtggttctcccacgtaaaacaatcccctttcaccagtaattctataaggccatcgagaaaatgatctttttctgttgacccactctctcaaaagcatcgagaacaaaacacacatcacctaagatcttccaaggccttccaaattgctcgccttggagggtgttggaaggtaggtgagcgatttgtatggccttggatgatcttaggtgatgtaaatttttttcttactacttctgagagagtggggtcaacaggaaaagatcaatttatcgatagccttgtagaattacctgtgaaaggggattggtttacgtgggagaaccacaaagaaggtgatcaccatataaaacctaggggtgttcgcggtgcgggnnnnnnnnnnnnnnnnnnnnnnnnnnnnccaacccgcacatgcggttttttaaatttcccaaac

SEQ ID NO: 117059 - DNA, 4758 bp, Cannabis sativa
agggttgtaaatggagattgttcactcttgaagtgacttctctcagtgtgagatttcatttgtaattcttgtattcaacattggtgattcaagttgtactctttcctttcttagtatcaattcaattttatgacatttctgtttttcattcacctttagttcaagctcgattttcaataagtttctggttctgtttttaattcatgtgtcattgttattgttgtccttcaatctgttgttatggtgatcttgatcatgtcttataatccgcaacatttcctctatttttgagggagactaacttatttgaatattgatcttttgtaaacccaaaactatataaagatcattagacaaagtgaaaagggcctaaactctaatctcttgagccctagagcattctcaccctttcactccctctcatgccacttcctcttcatttacacttagtctattttctcatctcactagtttagaatctgtcatacaccagttttcaccatttcacaacaaaaaggggagtaggtcattacccgctaaacaagagggttgaacctctataaatcgttgtgttaatttttttatttgcttttacaatttacacatggtgattgtcagtaataaataaggctctgctgtcagttgaccaaatttgaggttaatattttggtgctttcattgagagcattgtttatcattctgatcaatcattatggacgtaactaggagaacaacaacctctacttcctcgggccttcctcaagatcctatgaggactgatcccaatgttcatgttcctcccaccacggaaggtcctactaatatgactaacaccgtcaatccaactaaccctgacgaccttgcaaatttagccaataccactaatcctgttgatcctgccaacccgctgaatcttaacaatcaacccttgccacccagaatagatccatcgacaacacctcaaactcaaggtcctgttaacacggaacaacctccatgaacaacaactaggatttttccccaatattatgtaggagaaataggaccatgaattagcgaacctcatatggacctgggagaggatattgagttgtccaggcttagagaagctgtaggccaagtcacccagatagaagaaccatgtgttgttggttgtgacgctttcgcccaacagagacgtgaattcctaaggtggatggatgaccaggcggccatcctccaggcccatctggcaaagttgaaccaccgtaacatggaggtcggtgacttgataaggcagtttaataagagaactaccgaaagaggccatgatataataagagatcatttacaaggaaggctcatcaacagttcaggcagggtctatgagcaccttgacaatgggcaaactgtccagccaggtccctcgagcacgaggatagaccttcttctgcctgaagatggtcaaatcttgccaaatagaccgtatggcaaaaacagccagttcctcgcatctggaggccttggagggcaaacaaataactcaagagaggagacattaccacctgaccagactttggccggctagcacagtgatgctccccttagaaatatttgagaacaagtcgttctaagacctatttttaatagactaggtcctaggataagcagaagtttgaagtgactttgttccaccactgaataataatttcaggcaggtggatccaccaaacctaaataattggtacgatcaacctcccattaacccacaaatcagcctagccggccagggaagtctagccggtctggccagccaagggagaacaaccagcttagggctagttggccatagccaagtgcccaacctagggttggtcggccaaggccagctacctaaccaagggctggccgaccaaagccagctgcctagccaagggctggtcagccaagattaattactcagtcaaaggttttagccaagcgctggctggcccaaggcatcaacctggctaagaaaagccattcagacaagtgtcaaccacatcagatccatttatgcaggcacatttggatcaaattagagacatgataaaaggcctgtctagcccaaggctgtcaaatctagaactagactagtcaagggggtccattctcagcatacattaatgcattacccctgcctatgttcaagattccagagtggaagatgtacaccgggagagaagatctcctagcccacataaagtactttttgatgcagacatatctccaaaaggttattggggatgtatgatgtcggatcttcctaacaactttatctaaaaataacccaataatggtatttcaagctagcctcagagagattcaattcttagaatgaattctctcgataattctatacacaattctcatcctcgagttagataccttcacaacttgaagaccttgtcgagataaagcaaagacaaggtgaacctttgaaagattacattcaaaggtttatggtcaaggccactaaggtcaaaggcctaacaacagaaggtctttatacaatcgtaatgggaggcgtccttccattgagtgacttttagaaagatatcaaaaggatcttaactaacaatatgaaagagttcctcaagcgagctgatgacttcataaagttggaggaatctgtctgacaagcccagataggaaggcaggtcagttgtagacagactcaagatgccatgcaacctcaagacctacccaacatacaagctagtacaagtagtgtcggccaagcctctagcagtaagaataattgaggcaaacgtaacaacaacagttctggtcagaatagtggcagaaaagggaatttcaacacttcccctacaccacaaaactaaagggaaaaggaggagagaagcacatgtgcttcaccctcccaactgaaactcctgagaccatttacatggcaaatcaagttgttgttctatacaagaagcctcctccaatcaagaaggatatcaaaaagagggacacatccaagttctgctaatttcacaatgactttggccatgatacaaacgagtgtctacatttgaaaagggagattaaattcatgataaggaaaaacaatccccacctgcctcgttatgtgtaaaatgaccaaactcagggataagctactcaaaacgaagacccgatgccaccactggtggcaggtcacctaggggtcataatatgtgaaccccacatagcaggcaaaacaagcaaagccagggagtgctatgctcgaacactttgtcacgagcagcatagcgacatcctaattatcgaagaaagagactccaagcaactcaagcttggagagcctacaatatcctttatagaaggagatgctgcccagtcaggttccttcataatgaccctctagtcataactgcacaaatagaaaacatgacagttgctaggtgcatggttaataatggagcctcctcctacatttttttcaaatcaacttatgaaaagatgggactccaattaacagacttagcaccttgcatgcaactaatgtacgacttttttggccaaggccttgcacccttgggatacatctgactgcccctgaccattggagaaagttccacaacaaggacactgatgactcaatttgtagtaatcgacgttccattgactttcaatgcaatgataggtcggtcagccttatacgacatgaaggcggtaacattaatttaccacatatgcctaaagtttccaacaaagcatatggtggaatgcctaaggggagatcaataatctgaccgacactgttacaacctggctttgtctaaagcaaagaaagaaaaaattccttccaagaactctaatcaagagtccaacaaagggcaataaagtccagcgcaaagtggagaggcagacatagatcctcacttttgggatcctataaatagatttggaccagtggaggaactggaagaggtagagatcgaccccactcttccaactagaaaactaaagattagaaagggtttagcaccataaattaaatcagccatgataaaatttctaagggcaaacctcgacctcttcatatgatcacatgaggacatggtgggaatagacccatctgtaatgactcatgcactaaatatagatccgaacttttgacctgtagaacacaaaaagaggttactagataaggagctcgcagaagctctaaaggatgaagtcaaaaggatgagtgccaatgacttcatcattgaagccttctacccactttgggtatccaaccctgtattagtgcgcaaaccaaacaacaagtggagagtgtgcatagatttcaccgacttgaataaggcatgtccaaaagattgcttcctgcttctaaggatcgattagttatagattctacagctgatcatgaaatcctaagctttatgaatgcctatttaggttacaaccaaatcaaaatgcattcactagatcaagaacatacaagtttcatgacatacctaggcctgtactgctataaggtcatgccttttggactaaaaaatgcaggggccacctacagagacttgtaaataagatgttcaaagattttattggtcgtaatatagaggtttatgtgggcgacatgttggtcaagtccaaaaaggctagaggcatgtggaggatctaaatgaatgctttaagatcctctgagaatataacatgaagcttaacccccttaagtgttcattcggagtaggctcaggcaaattccttggcttcata

SEQ ID NO: 117060 - DNA, 1272 bp, Cannabis sativa
  modified_base (368)..(375): a, c, t, g, unknown or other
actctctacttaagtctagcatataatttacattaactaaagatctaataaagaccatcatctataaagttggtatattttaaaagatataaaaataaacgtaaaaattaaaacaaataaaataaagtggatatacaatataattttctcttctcgtgtatttctgccttagtatgtatattgggcctattgggctcataatattagggaaatttataaaaatattggaatttggattaacatttacaaaaatactgtcacacggaaattttttcaaaaatactgtgtttttataaaacacttgtaaaatacaaagcagaacaacttaaaacaatagtagaacattagtaaaacaccagtagaacacnnnnnnnnacttaacacagtatactacagtatgaaacttataaaaaaatatagtaaaaaagtaaaaaataccgcctggcagtatttttgtaaaaaaatgacaaaagttaatataacatgtaaattttcctaatattaatgatagtgaactacaattgaatgggtcaattcatagttttgcgaattctaacaacacagaactcaaactaagaacaatcaaacaagtcaaaatccaattaattacgaacactcaaacgagaaagaaaaattgcaaaacactaaagtaaagaacacgagattttatacaagatcggccaaatcaaaaggtctacttcctattacttctctgagttattttctacattaaaatgatgaaattacaagattgagttgttaagtgcagtactctacagagtaattgcaaatgaatactcttgaaactgagcacgaatttcaactcgaagaagaccagtcttagtcccaactctctcttcactctatttttctctctttctatgtctctcttattactctctcaattcagtatgaattatgttactatatcagaatgactaatggcctttatataggaaaagaaagactcaactaactatattaaagtgcactaactaacatagcatgatggtgcaacatttcaaacaaaatttgcctaaccaatgttgtagaattcaaactcacaaacaattaattgttaaaactcttataatttaatttatttattctataaattaccaaacaacaaatagtactattatagtgtaactatgttctttaaatgttgtttttttttttttttgaaagaaaatggtaaactttattagaatgaactttccaccattacaatagataaaagatcagcaagagtattactctcactgaaaaata

SEQ ID NO: 117061 - DNA, 3576 bp, Cannabis sativa
  modified_base (3530)..(3533): a, c, t, g, unknown or other
taatttaactctaaatagaataattaaataaaaatcttatttgttagatataagttttaaatttgaattttaaaacttagggtttctataccaccattcacaaaggataatacttaccctcaagaatcacttgtaaagatcgctcataacaatctacggggttccgttggtttggattggtcaaaagctcctcaaccttggaatctgtcatttctggttcaaattgaggtttgaagtccttgggaacaaacggagaagaaaaatggttggtgcatcccgttgttatgaattggggggtgaactttcaaactcagatgtgacattttagcaagaaagagaaaatccattctcaagatggatcgcaccaaaaaattagaagtttgtgaaatatggcaagcttaagtcgcccttttatacacaaagtcgagtgacaagaaggccaaagattgggaaatctaacggttcggagtaggccagaatattaagagacgattcataattaccctcaaaactgtacagccatcagcatcaaaggatacatctttccaaaaagggattatgacaaagatgccctctgtaattattaaaaaacaccttttactaaaaagaagagttttttaagggaaaattgttatacccgaaattcgacaaccctctcagtgggggacacgtgtcaagataaaaggaatatgaatcgatgcaattgcttttttatggaataactcattaattaggttagtataagagtatatttgcatctgctgactttaaggtcttatgcgaggagtcaatatacaaactgttacttagtatattaacaagaaaccatatatcgctgaatgtgaatagcgagggatcaagtacgttacatttaggaagacaaaagcgacacatatcgactgcagaagcacttagtgtataatgtacaaactaagtataacagtcgggttggctcgagacctaataagcgaggtgcctatcttgctatgggaaggcttcctgtaacttcacccagttaacctcagagatcttcttagtgaggctcacaatcctgacaagtcagaagataacattctaacgagcctcgaagaactctttataattaacaactgcgatcatcacaatatgttcatcgtcgacctcgaaagaaaaaatggccccagatcactattatgatcactgcaaccaagcttctgtcgagacatccccggatacaacaattaaagacgtgtttaaatacacgatcattttgacctagtaaaagtgggaaaatcacagctatatgattttcaaataacaatcgcatttgcactacgtgatatgtaatcaaaccccatgattttaagggataactgttgtaaaaagattacagtcaattttgtaattaattgcccactatgtaattataaatagtggcaaataagatcaaaaaggcgattaaaactcatacaaaaaaggcccagagaaaacaatcagaaatctgaataagattgactcgtgaactatgcagaattttaactgcaaaaccacttaaaaaacgctgtgtgttcatactttacttttattttttttgtgtgaaatttacactgttaggctcaaaattggttgacaaaaatctacgttgacacatatatttggtttattttttgatacattttttaaaatacaaggataatttttttttcattttttttaattgacacaatgtgcatttgtagatattaacacattaatttatattacctattatattatatatcccattttgaaatcataatattttaatatttatactattaatataacaatttatttaatttctaaaaacttaaattatcattttaactatcactaacccaaaatggaagaaaaaaaattgaacgtatgaagtcgtaacaacaaatttcatgaaaaaagttatttagtaataatacagagggataaatcaagttatcaaaactaagtaaaaagaaagattgaaatacaaaaacatgttgagtaggttatattgttttgcatattgcaatgaggtaaatattttgttatttttactgttgctttttatatgtttttttaacttgtttcatagttttttttttaagaaaaagataattttattcaaaaattgattagtacaaagacaaagaggttgtaaataatagtcgcaaaccacttcaccagctctctacaatttttacaacataccagtcacctttttttgggttattaactgctgaaccaagagctctatacttaaccactctcttaatttttctactgataaaaccagtagtcaaacaacaagcactaaacacacaattgttcctattttcgaaatgaaatacaaggttgcagcctttaacacattgagcacctgttgtttcagatcacaagaaggctttagtttataatacagcagctcctggattgacttcggccaacagaacttcccaaactagctactaattttagctacaagcaactttgttaatagacattccatgaataaatggctgtgagtttctctttccagctcacaaacttcgcaaaactctgaaattgtgggcaaaaatttattcaaatggtccctagtaagcagattgttattacaaatctgccagaagataaatctatgcttagggacaacaagtttatgccaaactgctttagcataatcaacccccgaggcattgattaaagactagtagaaatgtttggatcgaaatatacctcccctaacatcatgttcaaggaaaatctcatcagttttcttccttagcttcaaaagcttcttgaagtaccagctcatttcttgcttgattggagtattcaacagacatcgatccttgagataaatggaattgacccatctcacccgtaaatagaattgttttatagttattttcatgttgtttgttaaattattttatagttattttttagtttttatttattttacaaaaataaaatatttttgtaaatttaaaactttaaaacagtatttttgaaaatttagtttagtgaaaatgtaaaaatataaaaataaccaaaagatttgtatctttgatttggcagatcaaattttatcaatttttatataagcgtatgcgttgttaacatctttgtttggctcatgggaaataattataaatatattctagttccttgaaaatatagcattaagccatattcaagaccaagattgcaaaatctatgtatgggctttgagggttcaacattccctgttttcgcttcttttggcgcatccgttaacgctcccatatccctttattccataggttcaggtatcaaaaaaatataccatcatttgtgtcatagtttttcacaataggcatctatttgtggcaatgtattaaatggaagacacgtaattttgaaaatatatatatatatatatatatattgatataacataaattacttgaacaaaaagtacattttttctataaaaaattgaggaattttcgtaaatatggaaattgagggtatgtgtaaagaccgcttagttnnnnttggaaattagcagttaatcacgtttaattatgaaaattattt

SEQ ID NO: 117062 - DNA, 871 bp, Cannabis sativa
taaaagtgcacttctttggatttagcttcattctgtatttttgcacgtcctcaaagcactcattgaggttagttgtgtgaccattggcagtcttggactttaccaacatgtcgtctacgtagactttcatgttgcgacctaacagattccgaaacatctggtttactaacctctagtatgtagctctggcattctttagctcgaatggcatgacaaaatagtagtgtactccattgtcggtacggaagctcgtgtactcttggtctgcaatttgcattttaatctagttatatccagagtaggcatccatttggtctattcttggcaaagaaaaacaatctttgaacacactttattcaaatcagtgaaatctatgcaaattttctagattctgttgggctttgggactaagactggattcgcgtaccacttcgagtttataggatccaaaagacgtctttttttgctgcattacgggcatgtccagattcacattcgatacatggcagatttcatttggatcgataaccgtcatatctttgtgacactaggaaaatacatctgggaactctcaaaaagtgctgacaatttcctcaaatttcttcctatataaacaagcttcaccgggtccgtgttacatatttgaatttcttttgtttcctccattagctctagtactttttttgcacctacatgcagatcaaatttgtcttcctcgaccgggtggttcccgactaccaggaccgactgctttaaggctacattataacattttttggctttagcttggttttcgcagacggttcttaccctaccgattgagtttggaacttgagacataggtgctgaactgaggttatgactctaacct

SEQ ID NO: 117063 - DNA, 1265 bp, Cannabis sativa
tctttattaattagtaaacatgatatattgaaatgggttttatttagggcacaaaacccaacaaaaatgagagggacgcctctcaggagtaagcaaacatttttgaataaagagggtagcgcggtcaaatactataagctccctcccatctgagtaaaaggatgatgaaataataagaggtggagactgctcaaagatccatactccctcaaagtaaaacccattgaccagaatgaagaaagatgcctggccaaagagtgatcccaagagatactcgaccagcatcataaaaaaaagagaggctaaagtagatgattcacttaccaaagtaaggggaaccactaagccaaagagccaaagccacttgaccaagggtgattctcaatgtcagacatatataaaataaagatagaagttctatagtcagccagaaatataaaagaaaataacaaagtccttagagttttcacggacatggccacaagaagaggagcccagtggttacaactactagatgggcatgcatcacatcgacatttacctcggcaagccatgattgcatcatcgaacttagcgtttaaggattcaaccatttgtgccatacaggaaccaagaatgctatagtcgatattagggttttgtatccagaccgtgtatagcaagcgttcaatcttatcctctgattcttccttgttccttactttaatggtgcaaaggtgatgttctagctcgtcaatcctagctctaagcctctttgtttagacgtgcgagtgcgacaaatacctctggcgaatggagaaggagtcctcaagctgttgggtaaggctggctactgaggattgctcattggttaacaaaacttgaagatgatttgcttccccttgaagagctttgcatttacagttggactcctccaagtcactaagaccttgtcagaggtgcgaaaggtctccctcctcaagagggttagagccaagagtatattattgtaagacaaatgcttgcaagcaaaagtcacagttaaaaaaaaaacagtagcaagtgacaaaaataaagacaatggtaatatgtgctaacccatatgttgcatttgagagtagcctgttgtcgtccctctgctaaggagttacgcagccaagtctagttagaagtgtaaactcacccaagtaccggttatacccattggagcattggtgtaaagcccgcttagttaatttggaaattagtagttgtttatgtttaaattatgaaattatttatagcta

SEQ ID NO: 117064 - DNA, 1853 bp, Cannabis sativa
gagagagagagagagagaagttactctgtatagtagacaaaaatggtggcatcccactcaacaacgtcccaacccaagaatgcagccataataagaaaagagagagaacgagtgagcaagagccaaccagggtgcactcctttccagcagctggtccataactgggaactcccaacatgacccctaggcagtgcaccagccgtaaacaccacctgactactgggttgagccactaggaggccgtcgtaaatagtgctgtcttcgagcctggaagaggagccttctcttctccaaattacccataaggcaccgcaaaaggaagcagctacaatgccaaagcaaacgaagtcataccaatatacttgcagtcccatatgtcagtcaattaaccgctgttgtcgttgttaatcgtgaactccacgtcttcagtgtagtgatgtggagaagagaaggacgacccgagtctctaaattcagaaatgaagaaagggtttccagagatttggatcattttgggagaaaatgtatgttggactagctttgtttggtttgggagctacgagttttggttgatggtttgatatggactagtagctttgactgtctggtcaattgctcttgttgaccattctttttcttcaattattttttttttgtttttgtgaagtttctacaaagtcgttaaatagcttcattgaaaaattaatatttaaatgaaataacgatggacactcattttatttgtatttgttactgtcgagttttgttatgctatgcattaattgttttgttaattaagaattgaatttcatataacttaacataataattttataaaaaaatatccctaacaaatcataaagtataatttctagatagtgctaagctaaggacctcaatgcggaatagaaatactcttttattaagttggtataattttcatagtacatcaaaacttgactgatccaaaagtgttgaaaaattgttcttttgcagagatggagatttagaattctacctgagatacatgttttttttatcattacatgaattaattaaagggaattgttaagttggtattgtttagttcttaattagtttaaatgatttctcattggatagtcaagcaaaatatatggatatggtgatatcaatggaggttttttttacttgatctgcatataaatttgtagaatttacatttattatgagactagagtcatattagtgcaatgcacgcatgctttgtcatatatttaattttatttaagtattttaataaaatatttttattacatattttattagttatatgtaatttaattaaataaaccttgtgatattaaaaaaagttatttaatacaatgtttgaaatgaaaatataaaagtatttttataaatgaaaaaatattaatactatcttgaaccgtttataaaagttactgaatagaatttttattttgtaaaataataaattgtaacctatattttttaaaatagtataaagtagtatatgaattcaaattttgataatgttttttaatataaccaacttgaagaccattgggtaggttattattaacttttattttgacaaaaaaaaaaaatcaattcatggtactattttataccattttgaaaaatacaaggcacaatttgttatttaacaaaatagatggtccaataaattttttttgcaaaatacaggatccaaaataaaatttaagttaaataccattctagaccctgtgttttgtaaaaattaccaattagaccctcttttttgttaaatgacaaaatggatcctatatttttcaaaatggtaaaattaaataggactctgagctcaatttt

SEQ ID NO: 117065 - DNA, 2851 bp, Cannabis sativa
cttaatttaccaaatattaaatatgatctattcaaaataaagatatatctaatcatttaagagtatttaataattctgtttaaattaatatttgctaaatttaatccttaaaataaaattaattaataattacctggcacgtaaggcagtagacaaacgatcccaaaattgaagaatgtgatggccaggcaaatctgaaccagtttctaacccattgacacaaaccaaatgcccaaacccatttgagtgaaacacaccatgcatcacatgcccttttgattccacaaaaatgttggacttattataattccctgagtccatcaccacttgatttttattatgatgatgactactaccaccgctaccgccactgtcaccgcctttgctgttcaaacaagccgccaccatcgattctttcgaaggcaacacaaaatggtacttcttattgcaaatcatgtggtttccccaacctgatcataatgaaagttactacaaaatgtgagctaataattaatcacaacaatactattcacactctaaacataataatatttttcgctactacaaaatagacttttttgtatcgaagaagaaaatgtaccgcaagacagttttgttgtacattagttagaaaatgaatacactttgtcaatattttcaagaaaaagtttatttgatggattaaaagagattggttgtaaaattttacgacacaaataaacgcctttaaaaaaaattgtataagaagatcgaaaaaaaaataaatttattttgtgcactagggacactttgttaatatttttttgaaatgcgtcggaaaaaaaaattatctagggcattaagagagagagtgtttgtttgtgaactttaccaacgtattgacattggttgcaactacggtcaacaatactatttgaggcatcattaataggctcttctacgacgaagagaagaacatgaagaggagggtggcgatgaatttctagctgaaaagaccaacatggcatgcccgtcgtgcacaaattactctccaaatgcccaaattcaagcaacgctttcacattttctctaaaacaccctgcgaattcgaccgggtaaccattctccccaaagttcttgaacctaaaaaccctctctcctctttttctcttcttgcaaccactcaagtccaaatgagatgatgacatagtacctaattgagatatgatgatcaagaaagaaagatggtttggttgagtagtgcttatatatatacatagaagaaatataaaatggaaagtaaagaaaaaaccaaataatgatcttccaagcttgttagggaataagaacaaaaaataaataaaaataaaaaagaccaacacatatgtagtactacttgttttgtttttagtttctttttttgatcacacacatattgtggtaagaaaaaaataaaaaaaattgggatgagacccaaaatagggttttattataatcaagggtaaggtgagtttttgcatgatttgattcaaaaatgagatgaaatgcaaatctttcgcggtggcataagcaatgagttgtgttttttggagtaaattattgaaccatgcaatgcaaccattggattggggtttgggctccgccaatttctatggtcacacctccaatttgcttctgtttttatcttataaaccaataataaacttattagaacgcaacaaaccttgcccaactaactcttctctcttaataattctataattattaacacattattttctcttttaaaattcaactaaaccttcttataagtcatgtcatcacttaatataacactacatgttttttgttcttttctttagtttgctatttgggaggtttacttggaaggtaacacaattacacacacacataaagattgaacaatgttctccacgtatgctatggctaattttgtagaatagtaatgcaattcgaacataagttttggccttttgcttttactagctgatttatattgcatgcatgtgtaatgtgcatgaatttttttattaatcatatgtgaaactggagaaatttgagaaattatgcatgatctaaattatcaaaagtaaaagtaaataatcttgtcctatattaaattatagctgacatggtatgggagtaatggaaactcgcccttaataatattaaggcggggtatggaagatatgaccagtggtgaactcaagatttaaagtgaggggagaagggacataattttttttttttttttttgtaataaggctaatgctctttatgagaattgaaccattgatctctatcctatatgtaatctagtttaactattacactaattaaaactaatattatatttataaatatcatctttttattataaatatatatgtcgtaattaacttctgtcccactctcgatcatttacatgtgggtcatgaacctcaagacataaccgacttctgtcccactctcgatcatttacatcctttctcacacattcgagttctagtaatcaaaagaacttttatttttaatcaaactttttaaatgtatagggtatggagtcacggaaacccgcccttaataaggtggagatagaagacctgactcttgatttaggatcccaaccccaagacgaaatataggtggagggagactgtcccaccctgtttacatctcttctaacactcggattctattaatcaagatccttcataaacaccaaataagaaaataaaactaaacaagaatataggcaccaactaggaatgcgacgaatgttatattatttattatataatataatgtttaagattaaaattgtgatatgttatatatattattacatata

SEQ ID NO: 117066 - DNA, 1655 bp, Cannabis sativa
gagaaatgccatatttctaaaaaataattatatcctggatttcaagccttctaacaaagtagtactagaagccttcaatttcgttaataacatgcaactctagattgcacatccaagaaaattgacaagcttcttcgtgacttttggtggggggactcggatcagaatagaagactacatacaatcgcttgggaaactctttgccatccaaaagtaaatggaggagtcggtttcaaagcaactgaagcaatcaatcaagctttcctaatgaaatgggcatgaaaagtgctatccgataaacaaagtctttggcaaaaaatcatggaggccaaatatttaaagaactcaagcttccttgacttagatataaagccaaccggttctctgctctggaaggcaattctgcgatctagatcaaatttggagaaggggctttgtcgaaaaattggagatggaaatatgacttccatctggtttgactcttgggtgccgggggggacactccagcctacgccaaggcacaatgccacccttggaatgagcatggtaagcaactttatctctcaaggttgttggaatgaaccactcattcgacaatggtttcgggaggaggatgcaaggcgcatactcaacataaccctccccaacacaccttgtgaggattcgtggctctggctccccgaaaacaatggaactttttcagtcaaatcggcttacaagattgtgaagaatctacaaaacatggctcatgacgataagaaatggaggacaatttggggtgctaagattcatgagaggcttaagatgttctggtggaaaaccatttccaatggtcttctcaccaaggatcggctgtgctatattcttccctccatagatcctaattgttcgctatgtaatggtgagatggaaacgtcccttcacctcttttggaaatgcaacttcgcacgagccttgtggtttggatgcagatggcaagtccgaacaactgtgacccctattgattcctgggaaaggtgacttgaatggttctcggctgagtcccataggccacaaaatatccatctacatctgttcttgggtgggggcagctatcatttttgaaagcatttggcgcgaaagaaacaacctatctcatggatgccctcctactaccattggggctataattcaacacagaaacctaagaattcaagaaatctctgatgacttcgaaccccaagctaatgtgttgaagacttggttccctccccctcctggttgggtggtatgcaatacagacgtctccattggcaagtcacagacagtaggggctgcagtgtttagagatgaatccgggactgtcattaattgcttcaccttcaggctgacggttagtgagccactcattggagagacaatgaccctttgcaaaggagcagaagaagcagccaagaaaggatttaggaaggtaatcttccaaaatgactgtgctaatgcaatctctgccctgaaaaccaaattgcaggaaatcagctcgctgaatttcaatatccaggagctggtgcttgagttcatcggtatttcgagcagtttccatctttgggaagcttcttggatacccagaaatctcaatggtgtggcccattcggtggcgaaatgggcaaatcaaaaca

SEQ ID NO: 117067 - DNA, 2073 bp, Cannabis sativa
aaacttcttttttgccatttttttgaggtttgacttttgaggcaaacaacattaaaacccatgtcgtggaaatcgctgtgcattcaaattgctaaaatgtattatttgtacttttttttaatggaaaattatcattttattaaccaataacttcagctaccaaagaaggtagcaaattaaccgggacagaactcaaattgaaattacaatcagaatagaataaagaagctctcacaaagttatgagctaccttattagctgatcggctaataaaaaagatagaaacatttttaagttcttttaataaagccttataattattaaccacttgaccaatcatgaaaatcatttcaattgaactacgcaagacttggataaatactaagcagttggtttcgaggatagcatgacatggttggtttcttttgatccaacttaaagcttcctttacaccaaatgcttccacaaattctggtgtggccgagccattaaaaagcttggtaactccttcaatgaaaagtccttgtgcattacaaatgacaaaaccaattccaaattgagtcgtgttggcaaatatagcaacatcgacattaaccttaatgctatctccatgctgccactgctcagctccgtcacttggaataaaaccaggactcgggaaaatggcattagaactacgagcagttagccattgattaaggtaagatgtagccgaaaacactatactttccacacttgacgttttgttgttccaaaccttatcattccttgcattccatattgaccaacaaagagcaaccaaaagctttttctgatctgcatcacacaccagaaatttcgaagcacaccagtcaaaaaatctctcctgctgcggtgctactgtaccgatcccgactctgttccagcagagtgcagtagttgggcagccaacaagagtatggtagatcgactcttcctggccattgcaaacagggcacaacatagacacatccacacgctttgttcttaattgactcatggttggaagagagccttaacaagctctccacaccaaatttttcattttcggaggtagttttaaagcccaaaacttcttccagaaattttcgacagcagtagcatcttgatcatcttccccattaatttcttgaacaagtttataggcactctttactgtatacaacccagaaatctcaccattccatgtaatgttgtctcgaccgtgaccacgaagcataggaatagcaagtatcaggttttgatcccgctgaacaaacaaatcagcaattatatcttcatcccatcccaacccatcaatggtcattaaattgcaaactttagcacctataagggctggatgtgaagatgtaacaaacagattttgagtgtcaggtaaccaaggctccccaagaaccgagatagaattgccatctccaatagaccaacaaacaccatgagttagaaattgacgagcttcaagaacactacgccaaacatagctggggttattaccaatatcagcagtgaaaaaagtaccacgtgggtaataccttactttaaaaattctcgaaacaagcgtatcaggttttgtaaggagtcgccaaccttgcttacccaaaagcgccaaaataaaacttctcaaattccgaaagcccattccacctttagatttatatttacacaactttttccaagacatctaatgaatacctttaggagagttgttcgaagattgccaccagaacttggacatcaagccttcaatatctcttgtaacctcttgtgggatcaagaacacactcatggcatagcttggaattgcttgtgcaaccgttttaatcaatatttctttacctgcccttgaaaattatgctactttagtaataagaaatttttgaagatttaacaaaatagtcaatgtaataagaaattttttggaactttacattaatgtatcaaatatgatgttgataatgctttatgtttctgttaatattttggatatgacatacaaccttaaaacaactgttatgtaactactaagttgccccttgcaaagaaagagctgttgtt

SEQ ID NO: 117068 - DNA, 7651 bp, Cannabis sativa
gagatctgagcaaaaggagtcattatatttcgctgtaaccaatgtaagattttctaaactcttatgtgtttaatttcattattgtagagataagaggctagctttccacccttaaagcgtattccaaatattactttggactttggcaaagacttctttcttcttatagcttacataggctcgtattcaaggataagtaggatggcatggaaatttaactctaagagtacttgcaataatttccacattatcatcactaaccctttggcccatacagattttttacttatccaaattaatgtgcaagctagaaagagacatttactcatctagaatttagactaaagtggacccatccactatagaagcattcagaaagactagaatctcgtatacgaagaaaagatgagacaaatgcccatttctaacaaattggataccatgaatggtatcaaccctatcagcttcatgtaataatcatgaaaaggcctcaatagacgaggaagaggtaaggggataaaggattgccctgccttagcccccattgtagaagaaaagtgcaacaaatctagccattgaggagaatcgagaaggggaaagaccttatacaattcattatttttttttatccatcaagcattatatcctagacagtccaacatgggtttgcgtaggtttttaggcagaagtgtaaaaacttaaagaaaagtgcagttccgtaggttttgttgccaaaaaatgggtttgtgtggttaagtgttacaaaccataaaattcaagtggttttacagtcaatatccttgaaagaaaaaataatgctagtcaaaaacatgttgtggttatagtttctccaaatgaaaaggtctctgaaaattgttcctggaaagttaggtgtctctcgaatattgttcccagacagctaccttgtccagcccgaaaggagtcctatggaatgatagttgaatctggaaggaagttcctagataactatcatgtccactcagggttcagtcttcaagatagctagccctcctccaaaaaggagttttggacagcttgttattcatcatagaaggtagttccagatagtcaactcctgctggttctatcctatttggaagtcgcttcagcgagtgcctttggtgtgtgatcctagaagcttgtatatgttctcggatgtactaagacttacgctaacgtggagatcttgcttacaggagagctggttaagttagttaaataataactaacttaacaactttgtttattgcagccaccaactttaagatcttaattctagggctataagtaccatccacactcaatcatttgagatgaatcgaatggacaaagatcagatgattcaaattgagattgagagttagagagagaaagtgatggagaggtagagtgtgaggttctgagaaaagagagagattgagtttgagttttgtatgaagaatcttttgtagatgaagaatattcttgggtaagagtgtgagagttgaaacactttgagagaactcaagagagaatttgtcttaactgtaatgtacttgttcttgctcaatcataaagaagatttgatggtgttcaagaactagagtagagccatagatcacatcgatctatgagacttgaactagtatatatcttggtgtttatttattttctacatttattatttctagttttccatactctatttttcatccaattattgtccttaatttgttaatcttgtcattactaattgtttgattatttaaagtttcatcgatttgattctacactattagtcgtaattttctcacaaatcaaagcttggtatttgatcaagaatgcaaaatcaaaattctttttgctacaattcttgaaggaaactttgaatatcatcaatagcgagattcaaattggagaaacttgatggaacgggggactttacgctatggagagaaagtttgaaaggaatcctagtgcacctgaatgtctccaaggttcttggagacgagaatttattggaagaaaagaaactagaggaaaaagcataattggaggagatggtgtaatacacgatcatcatgtatctgtcaaatagtgttcgaaggaaactcattgtagaaaagacatcaaaaggagtttggaataaatttgaagaactatacttaaaacaatcaatttctaacaagattaatttgctagagaggataaacggttttagaataatttcttcactcactttatatgaaaatatttatagatttaatgagattattgtatgtttggctaatataaaccacaacattgatgaaaaaagcaacgccataattatgttgagattacttccaatcgcatatcatgaagtcaaggtagccatcaagtatgacagagatgtgattactttgcaagatgttcttgtcgcacttaagtcgaaagattttgaactacaattggaaaaggaatccaagaaagaataagtgtacttggcaagaggtagatcacccaagaaagtaagtttgaatagtaaacaccattactctcaatcaagatcgatgtccagagggaaggaaacaaggaagtgttacttctgtggacagtctagacacttgcaaagattttgcaagaagtacaaggagcaacaaggcttcaacaaatctcacaatggagataggaaggataagctatgtcaccataggaaagattcagttatagtcacggaagatagtgacgactgctccatagatggagaattgttctctatctcaaaatcttcaatgaatagagagtgtattcttgatttttgatgcacttatcacatgtgtccaagtcaagaatcataattttaattataaattagttgatggaggtaaagttctaatgggtaatgatcattcatgaagggtcattggaactaggaaggttgtcatcaaacaatatgatggtggaattaaggtgttgacgaacgtaagtcacatcccggaccttagacgaaacctcatatccctagatgcacttgaagatgaaggatatggatacaagtccatacacgaaagcttgaggataactaaaggttctctggtagtgatgaaaggtgaaaagatcaatggtttatacattctacaaggagaaactgtcccagctagagaggcaagtatagtgaaagggctagaatcggatatgaagttgtagtatctcaaacatgaacatatcagcaaacaaggcctcaaagaactgcacaaacaaggtataattgaaaattaaaattttgtgccttaccattttgtgaagcttgtgttttagggaaacaacataactataagttcactctgacaaggcacaaaaccaaaaagatacttgaatatgtgcatattgatctttaggcgctacacaaagttcctactcactacggtaagcaatattttctttcaataattgatcattatagtaggtgtgttttgacctacttgctagcacctaaggatgagtgtttggaacaatttagaaagtagaaaactcaggtggaaagccaaacagatcttaaaactaagaaacttaggacgaataatgagtttgattttattaactccaaatttgacaatatgtgtcaagaatttagaatccgtgggcataaaacaatagtgaatacctcggaggaaaatggtgttgctgaaatcatgaaccaaaccttgttgaacaatgttagatgtgtactattcaaatctggattagaagaatcattttgggggaagctctagcaactgcaacctatcttataaatagaaacccaaattgagtcataggcttgaaaaccccttatgaaatatggtacgatagatagccaaacctagtgaacttaagaacatttgggtgtacaacatatgtacaccaatctattgataagctttaacctagatttgtgaagagaactttcctaggttatgccttaagaaccaaggggtatagaatttacattttgtggaaggagagaccaaaggttgtgatcgcaagaaatgttgttttcaatgagtatagaatttacattagtaggcagccattaatgatcgcacaaggcagaccaccatactaataagaagggcctaccaagtcaccaatcaacaatcggctactacgtccagtactcccttggacaggttagaaaggtatgaagttgggcataccacacaaagtctcaatggtcaaccatcgaattcaaggccacaggtccaacctgtaggccaaacgatcgacggatagatcctgccatactgtccttttggaggagttatacacagtaacttcaccactactaaaattccttgccaacctgccggccaaacaactaagacaccaaggtcgcctggtacttcagtgtttgataggttggcgctgcacatgaccttaggaatgacctaaatcaaagaagggacctggacaaacaatatccaccaactgtccaaccaggcatccgagcccaagatccagttccaagagatcccaatgttacacaagctggtcaacaagccaaaaaaaattcatccatttgtgcaaacacaactggatcaactaaaaatatgttacaagggcctgaccagcccaaaactcactaatctttaactcgactgggcatgcatatcacccttctcccctgagattgaagttcaaaatgtcatcctggaaaatgtatacaggtgaaaaagatccttacacacatctaaagtattttgagatgcagatggacttgcaaggggtaaggggtgatgtacggtgtgagatctttactgccacactcacagaggctgcccagcaatggtatttcaagttgcctcgaagaaggtttaactcatggaatgccttctcatcagaattcaatgcgcattttgcctcatctcgtcaacttccttcgcaccttgaagacctagttaaagtaaaacaaatgccaggagaacccgtcaaagcctatattagcaggtttatgatcgaggctacaaaagttaaggggctaactgaggaaggcagactggatgtaatactagagacatgagccacttggagagttgtggaaggacatcaaaaggctgactgtggggtcaatggctgaatttttaaatcacgcagataggtttattaagctcgaggaggctatttggaaggtggatactgtcgaacaaaacaaaagcaagcaacgtgtcacctctgtccgaacatccattcaaaatccacaataccccaacaacgcaaatttaaatgggaagaggtctaacaatggcaaaaggtagggtaatgaaagaatggaaaattcattggtaatgccaaacagcacccagggaaaatgcctcaaaatttactgtcttcacaattctgatagacaacctagagacaatctatgcggcaacttagtctatggtgtcgtacagaaaaccctctcctatgaaaaaggatgtaagtaagagagatacatccaagttctgccattttcatgtgggctacagccatgagaaaaacgactgtaataatctgaagtgggaaattgagtttttgatcagaaagaataaactgcatttgtagaagtatgttaagaccgaccagaaccaaagggccgcccaatcagataataatcagaacaaattgatgcctccaccattggacgagcacttataggtcattattgagggtccgcaccctactggagactcgtgcaaagctcgagaaaagtatgcccgtgccctacagtacggaaaaaattaaatagtcttagtcgtggaagagagaaaacaaaaaaatactacaggtatgggagccaataataacattcactgaagcagatgccagccacgtccatttcttccagaactatcccttagtggtggaagtgcaaattccaaataagacactagcatggactatgatagaccatggagcttctttaaacattctgtttaaaacaacttatgagaagatgagactccaactcaaagatctgatcccctacacttagctcgtatacagtttcaccggcccaaacgttgcacctttgggacaaatacgcatgcccctcaatgttggacaagctccgaggaccataactgtgatggcacaattcctgataattgatgtcccttcagcttttaatgtcatgttaggtcgatcgaccctatatgtcttaaaagctattacatcagttttccacttgtgcgtcaagttcccaacaaggattggggtgggatgtctcaaagaaaatcaaaaagttgcatgggaatgctacaaccttgctctaactatggtcaagaaggaaaatacctatggccagagtttaggcaagggaaaaagcattgctcaataggaagttgcccaaggcagggacgaagacatggatccccgacttgaggaaacaaacacaaatgtaaggctagtggaataacttgaagaagtggaaattgacgaaaatatcctagccaggaaactcaaaattggtaagggtttgttgcttgaaataaaattagctttaataaaatttcgtagaggaaacttagatgtttttacctggtcacatgaggatatggtccgtattgaccccactgtgatgtctcacaccgtaaacattgacctagactttcgtttggtccagcaaaagagaagactactagacaaagagcgggcataagcactaaaggaagaggtagagagattgcgcgagaataagttcatcattgaagctttctacccagcttgcgtggctaaccccgtactggtgcccaagccaaacaaaaaagggtgagtatgtattgattttgcggacctcaacaaagcgtgtcccaaggactgttttccacttccaagaattgatcagctcgtggatgaaacaaccagccatgaaatcttgagcttgatagttgcctattcagtgtataatcaaatcacaacgcatccaccagaccaagaacacacaatttttgaacaaaatatgggtctgtactgttacaaagtaatgacattcggtttgaagaatactgaagctaattgccagagactagtaaacaacattaccaaagactagtaaaaaaatgtttaaagagtagatcagacaaaatatagaggtatatgtggatgattttcgttgaatccagggggagcatatagaggatctgtatgaatgcttcaaaatctttagaaaataaaacatgaaactcaatcccttaaagtgttccttcggggtcagcttgggtaaatttcttaggtttattgttaatgctcggggaattgaagctaatcccaattaaatacaacccctcctggacatgaaatttccaacaaaaataaaagaagtctaaagcgtgactggtcggatagctgcagtcaacaaattcgttttaaaatcaacaaataaatgtcttcctttcttcaacatccttcgaggtaataaaaagtttgaatggacggaggaatgtgacaaatctttcaaagaattaaaagaaaacttgcaaaacgttctgtagtctcaaaacccctagacggagaagaattaggaatatacctagctgtcactgaatatgctgtcagcgtcgtactaataagagaggaaaacaatgtccaacatccagtctgttaaccaaaagtcaatcactcacttattttgatgataaacaaatatttg

SEQ ID NO: 117069 - DNA, 1205 bp, Cannabis sativa
ttttgattgcgatttaaattgttttgttaattgctatagaaatttttgtgtgaaatttcgtaaaaatgtaaaaaaaaaaaaaatatattattttaaagtgtaatttcgtaaaaagtatttttcttattaaaattactaatgtaattctcgttgaataaaatttataatgtgacacactaaccataataagaaagtcacaaaatatgattttttgggttacttactacaccgataaaatattaaaattgataagaattggtcttacatgaattctgcttgtcaccattttgcctacaaaatttaaattttcatctcatttaaattattatattttggtatgacataacttttttctaagaatatctcatatactaaatatatatatataaaatacttatatatttttcaatcaattttttataaagtttattaaaagtgatattttcatcaataccaaaaaaatgacaaaaaaaatattaatgagaatctataatattttcaatatttccattacattatattatattatttgcatatttctttattatgttttattatattattttcgcctaatttttatattaatttgaaaggtgctcgtaaaaatgtaaattgaagaaatctattaaaaaaaatcataatcagtaaaaatatataaaaaaaaatgccattttacacataatgtaaatcatattttgtattataaaatgtgttatttttgaaaagatatttttattgggcccaaggcccataatagtctggtccaaatccagtgggcccaaagcaaacaacgaatgtaaaaggttcagcctttcattcatgtcgtccttttccccggcaatcagagtgtccgtacagtaacaccaaacactcaaattagggtttcgggagttcaatcaaaaccagccatgacgcactttgcgtctctcaaatctgaaattttcggcaaagaagagagaaaacagtactttaatttcatatttttaacattttccctctcattattactctcaccattcatatttttaatcattaaatcaaattctgtgtttgtgactttatatgttatatcttcaggcagtaccaagctcacattagcggactcaacgcctacgatcgccacaagaaatttatcaaagattacggtgagatcagacccttttgtttttgttggatttacttagtattaaaatgctcaagttttg

SEQ ID NO: 117070 - DNA, 1365 bp, Cannabis sativa
aataaattatcataaattaataatacaaagctaataaacaatacaaagctaataaacaatttttcataattaaaccctaattatctgctaatttctaaactaaagctaagcggtctttacacctaagctttcgggactctttgagttgtagaagcttgcagtctttttccaaaacctggagatgagtcgacgacatgtggtaatttcatggaacgtggatgtattctttttgatgagttgttaccaactgagggttcatgtaccgatggttttgttgatgtggcacacatgcagtatctttgttgcatccgcttattaatatgcgcatgcaaggggtatgtctgtcagaaatggcaatgatggtaggtcgattgagatgacccttctttaatgaacacaggagtcaaggcaagcaatgatgaaaaatgaatgctctgagcaggttttaaatgccatcttttcaacttcccatccatcgaatcaaatcatgctttttggagaaagtatctgggccattcatttcaaattgcaaggatttggctaaagtataaattgaatcattcgacccatttttccttttttcatcaattcagacttttagaacccccatttttgaattccaaaccagagttttttgtttcagagaaatctttaaccttccaactctggtgagtgcaagaagccttggactctttgattcaatattttctaaacctcctttaagtccattttcccgacatagagttgttaaaccttgaataaatccactcctagcccaacaaaaactttgacgctcaagctagcttcgaccgcctaatcgattgggttcaacattcttgggcagatttccacgacaatctttcattcaccactcaaataccaagttagtatcccgacgatttgttaaatatttgctatttcatatctagcaaagagatgtgtagttcaagctaggtctaggatatctagtatgtatgaatcgagagatgatgcctgtagaattttgttttctaggacagagttatgtggaaatttttacgccatggaagcgtttatactatttgaatagttaggttacaacaatctggactctatagacatttgcatgtttttaggattctggaattagggcttgaactagacagggtgaacctttgactaagtactaggtctatttgtattccatgcacctatctggagttggtaggactctgaaagggtttgacttttgaaatttttacttgaaattggctctagtaatcctttctgggttctcgacctgtcactgtgtgttgcctagtaagaacaggcttttgggagtgataggtctggcagggactgttggggtttttgccctaaataaaa

SEQ ID NO: 117071 - DNA, 5151 bp, Cannabis sativa
gtaaatatcaaagtttgggggcacgacttagtatatgaacaatctacatattagcaaaattgaatgaaattagaaaaaagtccttaaatccgaactttccatgtctaaccatcttaacatgtacaatcatccccaagctttaaactcaccggtcctcagccttagcctttcctttacttacacatgtaaacaatatatgtgagcggtagactcaataagaaaagcattaacatataacatattaccgacttgtatttggacgcccataaacctatctacacgacttaatagacaatcaagaactttcttaacaaaaatatgacctttgtaccacatgcactaaatactcgtcccgtactagtgttggttgggctaaaccgtaccctgaacactactgagtgttgtaccacatgcactacgttcttatctgtactagtgttgttaacactggatcgtaccctttgatcatatactgtaccaatgcactccgtactgctaccgtactcgtgttggtagtatatgaatcacatagcgtagcatgcaatttacatacatacacacatatacatatatgttttatactaatcttatcttgttttttaattcatgtgtgtccgtcaacctgaatggaaattcacgtgctgaacggaggcccaatgtcccaatcacgtaaatcgggtaaacaacttactaaacttttttgaggatctaaactaaaaactagaagtttccctattgataaatagcaaagcaatgccctatatattgaggaaacacgaaaaaaaaaaaacgacattacgggaaaagtacaggagtctccaaatggactcaaaacgaccccaaacttcaaactaagctctagatcacctaaacatacacaataaactattcctaagcaacagaacaaaaaataaccttaacatgcatatttcacgattgttgagccaagtttgagttcttgaactcagacttgctcaactcaagaattaaccaacaaaatcaacttaaacaagttttaaacaacttaaaattaacccaaaaatcaaacaaaagccttaagggtttggaaagaagctataatcacaaaattcatattctaactaaaataaagcctacaaaactcaagaagaaaagggtttaagcttttacttttgttaaaccttcaattggtactcaaaacctagttgaaatcttgtagaatcaccaagaaaaagaggaattttaatcttgttttgtttgatttttagagagacctagagagcgaaattgaggagagagaactaaaatgacttttttatttagttatacttatctccaaatcttgttttattcacatataatcagcccataaattaatctttaattcctaaaaattccactaaataatataacaaatctttttaagactaatacccaaaatgctctttacttcacacttaagtaacctataggtctagagataaaatggtccaaaaccataaccccacctaatctcgatatttcaagtatcactttatgattgtccccctagataaaaggttgaaaactaacccatgggactctaatggccatccgtcacattttctatcgttaccgagcaaaaataaaataaaaaaaataataaatttcacatatgacataaataatacattaagagtttaataaaatctcaaaacttgagaaattataactctaatgcccattttttgaaaatgggacccacaacaaatatattcatatataatcataaaattaagtattaattgccctactaatccatgttttaagtatgcggcattacaacctgaaaccatgcaaacaacttatgcatggtttcggagtcgacattgcttcgtggggcaagataaaacaaccactcactgtcggcactactccaaggtagaccaccatcatggccatgttcatagtgttggatgtgaagtcttcgtataacgtgatgctcgaaaggctattcctatatgactttcgagccatctcatcaatctaccatttgtccgtcaagttccaaacgacagctggtatcagttgtctccttggcaatgaaggaacttcccgtgagtgctgtattgcttcgttatcacttgccataaagaactcctctgttgctacaaatttaaaggggatgaacaagacctcctttgctgttacgacaccaagggggacaaacaagacctctcctgcaaaagcctaagagatgacggagatctctagagttcacactacagagaagaaggaggcaacacctaaagccacttgaaggtgctcccaagagggtaatgacattgactcccgttttgggaaaatcaacttgggagttggtccgactgaggaactcaaagaacttaccctcaacacagcgggcccaacaaaggttgtcaagattggaacaaacctaacggaggtcttgagcagagatgctcatggcttgcctcaggataaatcaagacatttttgcttggctgcatgaggacatgattgggatcaacccccaggtcatctgtcatgccctcaacatagacaaagtaaacttcagacatgtacaacataaatgcaggctccttgacaaagagcgcttcaaagctcttaaggaaaaagttgaaaaactgagggagaacaacttcattagggaagctttctacccagtttggatatccaaccctattctggtgcctaagctaaatggtaagtggagaacttgcgtcgacttcactgacctaaacaaagcatgccctaaagactgtttccctctaccactgattgatgacatgatggacgcaacacattcatggatgcctattccagctacagccaaatcagcatgcacgcaccagtcgaagagcatactatttccgaactgacatcgagctttattgcaacaaagtaatgcccttcagacttatgaatgcaagtgctacttatcaaaaactagttaatcgtatgttccacaaccaaattaggaacaatatggaagtttatgtcgatgatatgttggttaagtcgaagaaatttgaggaccgcatcaaagatctagaggaatgcttcaacatcttgcaggaatatcaaatgaagcttaaccctctatagtgtgccttcaacgtccagtcaggaaagtttcttgggttcatcgtcaactcaagagggattgaagcgaatccataaaagatcaaggccttgcaagacatgaagtcgtcgttgtggataaaagacgtgcaaagcctaaccggacgaattgttgcacttagcacattcgtctccaagtcaaccgacaagtgtgttcccttctttaattcactcaaagtaagcaacaacgggtttgaatgggctggtgaatgcgagcaagccttccaagctctcaaacatcatctagccaggcttcccatcctatccaaaccaatagatggtgaagaactattcatctacttggccttcactgaggatacaacaccttgtctactacatcagcaagcgtctcattggggccgagtcaaggtatccccccattaaaaagctggcctactgcgtagtcctggcctccagaaagctaaggccttacttacaagctcatacagtcaaggtattaactgaccaaccacttaagcaagttctgatgaagctagaagaatagttgaactaggtgagtttgagatcacctaccaacctcgaacaacaatcaaagggcaggcattagcagagacttcattgcttaatgcactagccttgaagaagatgatcctatgattagtgaagatcaggtccacacgcccgagactgcagctcagaatgacactggatcttcttggaaactatatgtagatggatcctccaatgagcacagttctggtgctggactcatcttagttacttcagggggattccaaactcacaatgcattgcagtttgagttcaccgcaacaaacaacgaagtagagtatgagccactcctagcgagactacaattagcattagcaatcaaagtcgagtcactcaaggtctacagtgattcacatctagttgttaatcaaattctcagcaagtatcaagctcgagggtcaagcatgatcgcatacttaagcaaagctaaatatctattagcccagctcaatcactactccatccaacaagtgtcgcgtaaatagaacgccaacacagactcactagccaaactggctagtacaacaaattctgacacttccagtgtagttcttgtcgaatacttcgccaaacagagcatttatgaagactcggagcctattctgatgatcaacactagtccatcatagatgatcccgactgcacaatacttagaacaaggtattcttttaattgactggaacgaagctaagagattgatgagaaatttgttgttgagctaattttcagcatcaatatcaatagtagatagtttaacatttttcttttctttaaaaaaattaaatactttatgatgccaaaaataaaatcaaaataataaaataataaaaaaaatttttgaatattaatcatagttacaaacaatgtacactaacgaaaaaatgatatcagtgctctttgatggtatatatattttgaaaagtaataagcgtttggttggaaagaatgaaaacataggaataggtatagtataaaataaattttaaaatgcattaaaaaaattgataaaaaaattattaaattttttctcatcatacaatggaatggtctttccttctattttaaaatggaatagttattccaccaaaatggtggaaaggtcattccattagaatgacattccaatattttaatatgcaactaaacaaaggaatagaataaaaattgttttatttccattttatttcatttcattacctccaatcaaacgccacctaagagttattattggaacactgctcttcattgttaatggcaaaatgcttcaaatcattgaaaaaagacagagagagagagagagactacaattttggagttgcgtgctagtgactctaattattttttcagtttctaatgaaaagaatgtagaaggaagagaagatttacatatgagcagactttgttttctttaatatacttccacataaaaatataagatatggggttcgtttggaacgctgtattaggtcgtattgtatt

SEQ ID NO: 117072 - DNA, 1649 bp, Cannabis sativa
  modified_base (85)..(87): a, c, t, g, unknown or other
ataacataaataacagtataataaattatttaaatagcgataaataatttcataattaatcataaacaactgctaatttccaaannnactaagcgggctttacaatatttgcaccggtaagaccttcaccagccaaatgagaaaagtgtgccaacttgtgccaacttttcaccggcgctggtaaaagttttcatgaataattttgccgacacttaacaatggacagttatttttttccctcaaagaaatgtaccagtgtaaagtagttttgccgacgcatttcagaattgcactggcaaaactatttttaccgacaaggtattgacatcatgaattgtcagctcattgtgcctagtttttctagcacaaatttgcgccaaaaaaggtcttctttcttgtagtgtttgttggcacaactacgatgtcactggcataggtgattttcacctgtgaaaataatttcctatgaaaggtggcctattgaattttactcaacggttaaggttggatgagaaggttttgccaacaacatgcagcgcttgcaaaaccttcctgcaaaaacaaagttttttgcgagaaagttttaccaacgcaattatatttgtcgttgaaatatttacacatacacatatgcatatacatacacatacatatataatatatatacagacacatttatatatgcacatatatgatacatccatacacttgtacacaaataaatttactaaaaactagatattagagagagggaagtgttaccattcactagaggtcagagactttagactgtccatcgtgattgttcaatttgtttagaatggagtttttgatttataatattggcagtagtcctacttaaactatcatcttgttacacttaacctcacaaactaatttgttggaggtaaaacccttcaactaccattttgtttttctattcactattctgttagtgagcaagtattaaataccaacgtgtatggttgaagtatacttaagaggatacatgacatgctttcattagtccaacacatcattaccgacataattagaggtgccgaaataactggttaaaggtgccccttcttgttgttacacaacacagtattaccgatattttttagagaaaaacgttggtatagataagctttgctagaaaatttatgtgctgaaaagcttttaaatatagctaaaatattgactaagttataccaacaaatctagtaacttcactagaaaaatgaacttttaccgacgaatttcataaaattcactagcaagagtaatgattcttgtagtgtgtgcatatctttttcatttcatcctaacccttctatttatttttttaaatacaactattaattatttgcatgaaatttaccgacaaaagtaataatccttgtagtattggtgcataattttttcctttcatcctaatccttcttttgttttgaccaaacaagaaaaatttattcaaactaaaaccaacacaaagctacaaacaaaaggcaacagcaatagtagcccttcaaactagcaaacaagggaactaccagccaagaattacattataaatatgttgagaatattttacgaggatctaaatttactaacaagtatgttgaattaacatcctaaatataaat

SEQ ID NO: 117073 - DNA, 2600 bp, Cannabis sativa
  modified_base (43)..(49): a, c, t, g, unknown or other
ctataaataatttcctgattaatcataaataactgctaatttnnnnnnnaactaagcgggctttacagttttatacattattacctaacaatcattgcaattgatcttgtctatattaagttggggacttcagaaaagggaaatgggcatcctatatccactataaaacacgcataaaactaaacatatttgtgcattacaccaaggtttatgttacgtgcattatattctaaaattaatatcaccaaggcttgttaatttaacaagtagtaagaaaaaagagttgaatgtgttttatgattctgacaatatttttggttcccatattttaaattaacaaagttaaattgatgcacaatgaatttatttccttcaaaatgtggtaagaaaatagctgaaaatatcaaaatttcagacaaagtattctactcctaatttttgaggtataaaggtgcacatgatgaaataatatataaatatttttaatacattattataatacacaaatggtcaatttaagatatctattataacacaaatgatcaaacatatctaaatgttaaagaagaaaaaaactaaaacttcaaataaaactaacgatacataacatctacctagtattatatatatatatatatattataatatgagtgaaatgcgtattgttctaacaagaattgactgtatcaattatatttaaacatttagattctacatgtaattttttattaaaaaaaagtcactagcgattttatttcattattattaatattattattattatttaaattaaaagtttttatttttaaataaagtttcaaaaataaaatctttgcaattatattagatacaaccgagtaatttctaacaacaattcaagtataaacaataggagcctcacccttttgttggtactattctcactaccaaaaacatttgtaagagatcttgactgagagagaaagcttcccttgtttagaactcataaaatagaacttgaaaggaatatcaatatattagactaatgagattgagggagattgaaaatatagaaggttaccattccatttgtgtgacttagaacctccattgataatataaattgattctttgatactgcagcaactaagcttctctcgaggtgagctccattgatgttgcaagctcttcttgctcttctctttgaggtaagtttttagaattttctttgtagatcagatctgaaacaaaattgatttaggtctttttactttttctttcttttttttggttgaaagcatgactttctcaaataaaaatactttttgtattacttttaatgaatgaacatattgttttggtgtttattcctcagccacacgttacactctagtaaaagtctgaaaagtctctaagagtcactcttttttgcctattattggtaagcttcaataatatgtatgattgaattgaatgtatttgtcatcttgttctattttttttttttagatgaataactagtttcttttaatattttaatttgatacttttttttttcttgaagttgtaaatggataagagttggatgaaccattctagattaagtgattcttatgaaaaatgagttaatttttttcttgattttgcatttaaaaatgcaagtcttgaagagaaaattgtatgcccttgtgtaaagtgtgcccttataacacctgtcactcgaataattgcatttgaacatctcataaatggatttattaagggttacactaaatggatattgcacggagagacttcttcgcatgctgcacagaatattgagaatcctattgatactcgtgaatcaaactataccattgatatggaaggaactattcatgatgcattttaacataatattattggtgaagaagaacatgactttgaaaatgacagccttcatggtggaagcaacaaaccaaatacaaaagcaaaataattttacaatggtgtaagatggtgagaccgaactttgtccaggttgtataagttttacaaagctctcatttgttattcaattatttcatattaagtgcataagtggatggagtaatatatcgtttgaaaaagtacttaagttatttaaaagaacattaccagaaggtgaaacattacccaattctttttatgagacaaaaaaattaataaccgccctaggacttgattatgaaaaaattgacgcttgttcgaaagattgtatattgtatagaaaggaacatacaaatgacatagaatgtgaagtttgctctacaccaaggtatgttattaaataaataatatttttttttttatatttttttaattcatagatacttgttaaatacaataacaccattttatttatcaaaataggagtgaggctaaagtgttgtgccatttttctttgataccaagatttacaaagattatttatgtcatcgaaaattgtacaattatgacattttgaaatgttactatttacctagtccagaagcacctgaaaatatattgatgtatattttgagccattaattgaagagttaaaggatttgtgggaatatagtgttgaaacttttgatgcttctacaaaaaaaaaaaaaaaa

SEQ ID NO: 117074 - DNA, 1756 bp, Cannabis sativa
actactatacatccttattatcatatattacaatgatgaagctttcctttgtagcttttttcctttgtgctcttctcctaatttcctcatcatcaactatggcttatccctcctcatcttcaggtaattaatactactatacacacataattaatctttatggtaatgtgttttgtttttggaaaaaatgtgttaatgtatgtttgtgtgtgaattaattagaggatggaggaggggtttgtggagagaaatgcaagaatcggtgctcaaaagcaggaatgttggatcggtgcatgaagtactgtgggatctgttgcgagcaatgcaagtgtgttccttctgggacttatggcaacaagcacgagtgcccatgctataaggacttgaagaactcaaagggcaagcccaagtgcccttaactcttaaaattttagaaaaagtcttaattataacctcttattataatattttagtcgatctttacgctcaaaattatagcggtatttgttataattatagtatcatatttcgtaaaattttaaaaaatttaaaaaagtttacaatgccgaaagataaaatttttgatatttcaatttaccgtgtttaaaaactttaaatgtattttagcattgtaaattatttgaaattttttaaaaatttacaagaataatgttgtaagcataacaaatatcgctacgaaaaaaattgtcgatatatgtttttgagcaggaaagttgattcggatattgtaataagaagttgacggaagtattattatggtgtgtatatttcagagatttgtgtgtactgttaggtatggtggtgtgtcatgagatcattcatgatcatcggaaaaatcaaataaaattgttttttttttttgtatgattttaagattagtagccgtgaatctagtacttctggccatagtaattaagagttaagtgagtagcggtagctagctggtttgtggggttctctaaataaatatttgtataattaatcagtacgtagtacaattaatgtcatttggtgtgcttttgtttaaccttttcctattattggtaatgatgatgatgatgatattatggttgttggggtttccttataggaaactctaatacctaagaagttgttaataataattttgttttgccaactacatattaatgctaacacgtattaatattactattgatttaattaaataatggtttcatataatttaacataataatttataagacgacacacatattttatttattttgttatcagtgtaattaatccttttgcactttgcaaattagtttgtacaatcaataataataacatggaaattagtagcaccaatgcatattttttttcacattttagataattttagttttattttttatatgacagtgtatattaatataattatttaaaatattttattaattttaaaaaatttaaacatagtttaacaagttaaaaacatgatttaaataatttattgtaaatgtattttttttttattttatacacatgtaaaataaattattttcttaaataattaatatgtacaatatttatatatatatatatactagacagaaagtacgtgcaatgcacgtgatctttgttagttatttagattttttattttgtattttaaatcactttgaccaaagtttttattatgaaagttcactgtagagattattcgaaatgtcaataacaacaacatatattatactaaatgataaggtac

SEQ ID NO: 117075 - DNA, 3411 bp, Cannabis sativa
agagtacaaatgaagaactcttttcacacaatgatcattatcaattacaattacaacagcaacagcaaccagaaacacaaacatttatacaacaaagtgatgaagaattcctttcacgcaatggtcaatatcaactacaacaacaataattgctcatacaacaaagtgacaagagtgcaattgaagaactcttttcccacagcggtgattatcaattacaattacaacagcaactggaaacacatacatttatacaacaaaatgatgaagaatcccttttacgcaatgctcaatatcaattacaacaacaactgcagttcatacaacaaagtgaccagagtacaaatgaagaactcattttccacaacggtgattatcaattacaattacagcagcaactgcaattgcaaccacaaacacagacattcatacaacaaagtgatgaagaatccctttcacacgatggtcaatatcaactacaacaacaacaaccgcagttcatacaacaaggtgattagagtactaactaggatgaatcccttttatataatggttatgatcccattagtttgttttctactggacaatacctcacttaagtataaattaaaaagaaaaaaaaaatgtagctcgatcgagtgtaatctcgatttaagtgtatgtaattctaatcagtcaatctttttagtagttatttttgttttgttccatatactaattttattgttaaattaatgtatatatattcatattatttcctgtttaatattactcatagtaatgctgaagtccaaaatcaaaaatttatacgtaatatttttttttgttgttaagagaatgaattacagagctaatattaagtatttatacttaagcttttacaactaaacagtaacaatgaaaacagttacaaaatagtaacagctagctcaacagcctttatcaacactaacaacttaactaactaactaatctttcttttcttggtttaatacaactactactacttctacatttaattgtttgaaacttcaatctgtaagactgcattaaaattgaattgtttcacctgattcaagatttcctttcaaaaaaattaacatggattaaagatcatcctcaaagctttgctcaactctcttttaaaccttcatgtagtaattgataaataaataaacagaggaataaaaactgacccttctagtatgttgccatgtcaaatactgaattaaaaacagttacagcaatcaagaacaataacaatcaaaaaataaaaagagaaaccaaaaaaaagagaaattgaatccgagctatatacactgctcattgagtctaagatgttgatcgtcattacaattaaatctcacattggtgttcccttggtcaatcacacaagggacacttaacaaccctccacacacacacacacacacaagaagagttggacagaaaagagaagagaggaagagagttcgttctgaattgtgaggctcttattgattgcttacaccaaatgagtacccttttcaacatattttcattaacactagtgttgatcactttcttcattacttgattgaaaactgagcaaatccatatcagtctgattatcttccataaactaataaacattacaaactaagctgaggaaggaaatttatgccatggtttttaatgtctgtgcatacatgatttggaggacaaggaacaaagcaatagtttttggattaatatggttttctgagcatataaaatcaacatttaagagcacaaaaataaatcaactcattaattaatcgaacaaaatcaactcattcacaagaaaataaaagagaatatctcattcttaagcaaagtactcaagttcattagtataaatttactaataaatcaaagaaaatctgaaaaaggtctaaagtaccaatttagtgtttcagaacaaggcaatctttcaagtcgtactctctctcaggtttacgatcagtaataataactcgaagatgcttccaattaacaaacattaatgttttttaatgaaaagtaatcaaataaaatacacaataatgttctttatcagaaaaaggttgaagaatcaaatttcaataatacaatgcatttttcaaccaaataataaacagaaatgcatgctaaaaggcatttgtgaaacatgtactcatacatataaatcaatagtttccattctcttctctttgattattattgaaacaaccaaatacttagacaaacaattcagtatgcaattgcagagatgagctagtgatcagagcagtagtacagattttgttaacaagaattggcttgaatgattagtctgattatttagacaaaaacatagatgatggaactgattgtgagtttagaagccaagaaaatatatcataaatcaatgggctttaattctcatgcaaaataacaacctcaaaaggggataaaatatcacattttcattaatagataatgtttctaaagatggtgaaatccacaacaacgagtccttcaaatctaacaatctttcgcgatcatactcagtgataattactttgagatgcttccaattaagcatgggagaaatgtctatctttttcaccttttttggcaatataagaaccttcatttcatgcaattcaaacatataaacatatcaactaatatataatatgttagacttataatactaaattgaaatagcaattgggattggaaagaaatttcatcatattggtaaactttttgtcacagtgcaaccccctaatccttataaaaatgaaattctccattcaacgaattagatgatatcaccttgaaaacaaaaggatgttaattttggagctgaatcaattgtaacaccactgatcatttcatcttcatcttcatcacattgagcatgcttaaaattgaagcttttcaagtgttgactcgcaaagttaagatgctttgaattataataccgcagtagctcaaactcaaattctcaagaagaaattgtaattcaagactgtctaaaaatgaaacttccaggaatttgaggcttaaactttgtaattggagttgatcattaatctttaagaaagaggattcatttaaccacaatttctcaagagaagggaacccaacaaaaacttaaataccccatcatcctttgcaggagatgaatgttgaacatatcacaatgacaatagtaggtgaatggatctaataatggattatataattgaagaaagctccaaaaatatctcacttttactgtcatgattaccatattctaggatcgaaaggagccattcatctataacaaatgaaatgatgctaaagccctgaaaatttacatgaaaatttgtgatttgttgtatgaattctctatcgcccctcgagagctgttatgcttaaatt

SEQ ID NO: 117076 - DNA, 2410 bp, Cannabis sativa
aggtgatggggtattgttcaaatatgttatagctttattgtctaaatttccgggggcagttttgtcctatgtggcttgcattttgttttccgcagctcatggtttggcaaaaacatgcctttcggttaggcgatgagctattctggttcgaggagctccacagccgattgtgatgtgctgcattgttaatcatgtgtgactttgttcaccacgtcaaaaaaaaaaatgttgtctgtttataacaaaatcaaataaattaacaatttcaaattataccaagtttaaaattaatgtgagagaaagtagggagaggtaaaattaatgtgagagcatgacaaatgtaagaccatttcctctttcaaaaaaaaaatggtaagaccatctccactctccagtaataatgtgtataatttgtattaaaatgctacatttgctacaatatttattatattttgtttcattacataacattttaagatgtaaattaggagaaataatataattaacaattattcataaattaattatttaaaaactgttcatgacaacattgtaattaatgatattggaaaactaatttttttcaaaagtggtaaaatgtcttaccccattactttagcattccattcagcacctccaatggtgatgcttggagaaagtgtttaataatatggtagaatgcttagaagaagctaaccattagagatgtttgggtgtcaaattaaaaagtaatattgatgtcaaaatttgacattgatgccatattgataattttttaaaaggatattggcgacaaaactatctgaattttacgttttgtaacactaaatcacataaacttatttttttacggtaaaatttactgaaccaccattctgttttactttttacacttctgtgtctaaaaatctcagttaagtgccacagtggactgcctatatgtatgctacacgtgacaaatttttagttgtccatattatattagttattaaattattattaaaaatgatttaaaaattaaaaaattaaaaacaaaataattcattaaattttttcattcttttctttttctttcttttttcttctattttttttttcagttacagaacactccatctctttttcgatctctctctctaccaatcattctgtctcaccgttccttatcgacatcgtagcagcaatgttggccaacagggcatctctttagatatgtctcatgcttgcttcactagatcttctccacaccagagctgcacgattggagctactaagagaggatcgtgacagatcgagaagttttgggaactagaaagctaacagtgaaggttccttcgacgattgacggccgagaatgactagcatggcatagccatcatttttgtgcattttatttctaacgaaaacatgtctctcttctcttatatattcctctatttttttctacacgtgaccattgttggatgttcatatttgtccgacaggttgcatcgttagagtttgggtttgtgggtttttggttcaacgaggaggggttctgggtttatgggtgcggagatctcccaggtggtggttgttttgatttgtggtggtaacttcattttttttttttttttgtaattttaggttaattctagtgtggtggtggctttggtggtagtgactgtggtggcagtgataatggagaagaagaaggagaaggagaaggagaaggagaaggaagataggttagggtaaagaagattagggtttcaagaataaaggaaaaaagaaaaaaaaaaaaagaaaagaatattttttttttacaatttttaaattattttttataatattttaataattaatatcacgtgaaccactaaaaatttgtcacttttacacttctgtacacatgggcagtccactgtggcgcttaattgagtttttttggatggaagtctataaagagcaaaatagaatagaggtttagtaagttttgtcgtcaatacttgagtttatgtgattaagtatttcaaaatataaagttcgactaattttgctgcaaatattaatttttataaatagaattaaaactaaataatatattaaataataatgtgtgacaccatagtaaaaagtttgaagagtgcttataaattataatcataggagtactaaaagtaagagtaccaaaaataatataaaagaatgataaaataaaatattatattgattaagagagttttaacacttttaaaaagttccaccattgaagaacctaatcaaactacaaaaaaaaaaaaaaatgtactcattattactcgggtgttggccctacaaaaaatcttacttttagtcactataaaatttgtgactaaagataaaaagttatggctaattataaattatcattattgtgttgtgattaaaa

SEQ ID NO: 117077 - DNA, 2089 bp, Cannabis sativa
  modified_base (2050)..(2051): a, c, t, g, unknown or other
ccaggaaacttttctcacaccgatcagtccaaacaaacttttgattctttcgggtcagctctgttaagggtacttcaatccctgtctcacactccagttcaagtcctgtaatgccacccatatcaacttcaatccctgctcccattatgacagattctgtttccacccatattgccaaaggaaaagctattgcgttgtctccccctagccatccctctcagtttagaggtggtaagggggtggttatcaatgaaccataccccgtacttccactgccacttcccctgctacgaggccgaccttcacgcgtcaaaatgcccaagttggagactctgtgcgtagcatgctcaagcgcgctagagctattactttctgatgatgttgtggtcccctctatgtccaatgaagagccaacggcaggtgctgctatgcggccccgccgagaaaaatgagtctctacagttggaatggtcgaggtttagggagccctcgagcattccgtaatctctccctgcttgtcaaacaacatcagcctttgttgttgtttgtcatggagactaagttgccggctggtcgtggaatgcacctcaaacacaagcttcgttttgatagtgttttagaagtgcctaggcaaggtcttgggggagggcttttacttttttggaaagactctgttgatgttaatgttattactaattcccttaaccatgttgattgtattataaataattttaatggtaaagactggcacttttctggttattatggttctccttatgttgatcaaaaatctgttacatggatttacttaatcgattatttgatactgctcctcttttgccttggttagttatgggtgatttcaatgattatctgtctgttagtgataggaactcgcatctctccccccctctcatgctatgcattcttttcactcttttctgcatagattcaatcatactcctcttcatcatgttgggcctaaattcacttggcggcacggtttgatccttgaacgtctcgattggtgtacctcaaatcagctttgggctaatctgtatccgcaggctactctttttcatttaggtttctatggctctgatcaccgtgcccttaagatcttgcttcaggacccaaatttccacaatcttaactccactcggttccacttcaaaaatcattggcttaaggacccttcttttgtctccattgttaattcttcttgggccaaacctcggtccttctctttatcccccatgcaatcttttctggacagacaatctaattgcatctcggatattaggacttggagtaagtctcaacaccctcttcagattcaaatatctcgtattcaagcgaatcttcacagtctgttaaatgatactcagccgaccccccaatcttcctctcaagctgcttctctacaatcgcaattggatggccttctcctcaaggaggaagtttattggaaacagcattctagagtggattggctgcgtgctggtgacaaaaatacaaaattttttcattgctgtgcttctactcgcaaaaagaacaatctcattcggcaaattactcttcctgatggatccatctcccatgattctcctatcataatctccaaatttcttgaattttataattctctttttacttctcaaggtgtgtttgatatggcggttaactctctccttcaagggatctctaacaggctttcccctcagcaggttgcttaccttgaagaacctttcactgagaatgaggttaagcaagctttattttgcctttcgggcgataaggctcctggccctgatggtctcaattcttttttctacaaaagtaattggtccacccttggaaaagatttcaccagagctatgctccaaattctcaaccatcagggagatatttccctaatcaatgaaactatcattgttctcatccccaaaaagaaaaaccccaaacttgtccgtgattttagaccgattagtctttgtaatactctatacaaatgcctatccaaggttattgctaatcggttaaagcttgnncttcactccattatcagtatcaatcaaagtgcttttct

SEQ ID NO: 117078 - DNA, 1730 bp, Cannabis sativa
ttgactcacatttactattaaaaagatttgttgcaatattatttgactctgaaatttaatacccatttgcgagtgtttttatgaaaatggccctcttgaaattttgattataataatttgattgtaacaatgaatctctagatttaatttgtcttaaacaataccaataatttatagctaaagcatttcaaccccatatacttttaatcttcaattcagaacaagacaagccaaaaatggtagctaaagaggactagcttttatttcctattttctcattaaatatatatataaagtaaaaaaggaaaagaataaaggaagaaaacaaaattcttcctcttttcaattaaatcattttaattgagggtcttaaagcacctacaatggcatgagccttctatacttgaaaaaccatacaaaagcacaaaatatggtcatgcctgttatcccggtaacaatgaggacccatttaaaagccacgggactgtcaaacagtgctatggggaagttcatgccaaagattcctgcaaccaccccgaaaatggctaccacaaatgttgcagttgtgagaagtagctcaaattgaataagctggtttcgaacattatcctgcaaacataaatatttgaagcataagactaccacacacagacggtagtaatcaatcgaatgatattttggctattatcaatccaaagaagaagctgtgcacttaataggttcaatttagtttgtacaagaatcagaacagaatatatctacacactatgaattgttgtatatgcaatagagagatattatgaattgtagggagagcataataccagctgaatgttgatgaaatcttctgtgtcgtcgatgtattccttcagctgaaacatagaagaataaaaattgattaaacactgtttagatgtcgatgtattcgaatattgatgaacagcaattaaatgaagataaacgtttgtgaataccgatgtcagcttgtttagagtgctgtctataacaacaaagtacgcttccagcaacatctcaagctcttctatactttctgtattgctgtctgaactcctcatactctcatgtcgactccttgcgatgctcaaggtcttctcgagccttctagactcagggggtgaagagacaggagatacaggagcagaaatagatgcacaatcattagatctgtatccaattaaagactgatcgccatagaatgacgtttccatcctacttttcttctcggtaagatacatctcagccatatccccatcatcatccatgagttgctctatctcatccctaacctaaacatacaaataaaaggaaaaagtgttggatacctttttctgctattctgagataataaaggaaaataaatcaataatatgcatttctgtagaccttctgcactctccgagtcaaggcaacaagtctgctttttaggcgacgaacacgctccaagtttaatgtactgatcttcgatgtcagttcatccaacaacgggtatgcttcgatttctaactctgctgcctttagaaaagggaaaactagtcaatttaagatcacagggggaggaaaagaaaaacacaacaacataccagaaaggggtaaaaaagattaaggcaaagatcattctgtaattgtacatgtaaaaaaattcattacatgtgaaagtggcatttcacatgaaatgctaaacacaatattttacatgtaaaaatagttca

SEQ ID NO: 117079 - DNA, 3989 bp, Cannabis sativa
attgatattttttgatttttttttctagtgtaactctatttagttataacctcccaattagaatataatttagttggtccctgtattcttggatagaggttctactgtatataggtttattttttccttttatgataatttatataggtttgtgctttgttggaggttcatgtcatgtatatatctcaattgttaattattctccaccaatgaattattatttgcaagtcaactagttcatgtgaagaagcaaaacgtcaaaactagttcttagttcaaatcttgttaaatattcttctaatctctatataaatgcaagtgtctctacactacactcaacttattattagcatatattcttcatgtcgattaagatatagtatgaggttgaaaatttgtgtaatacatgtataactatatatatatatatatatatttaatttagggtaaatgatgacaaaccttttaagttttatacacttaattttttgatttttttttttttttttgtggtaatagtactcctttaacttcactttttttcttatataattttgtttcaccattaaatgttaactttgattattaatatacacgttacactaaaacttcaaagctaataaaaatatgtcatatatacacagatgtccaaagtaataatctagttgatatttattagtgagatttttactggtgcttcaaatttgtaagcataagtaaaattaattttatgcagttaactctttgagattttttgtgtagcaattactctcttagcttcacttctatttacaaatttcgaaggctgcatttcatactaggtacgagcattatgaatttttggttactgtctttcagactgaccaatgctctgatagctttcatggatctcatgaaccgggtttcaaggatttcctcgatatttgtgttatagtatttatcagtgacatccttgtgtactcccagtcagaaatggagcatgagcaacaaccacagatagttctacaacaactacgggaacacaagctttatgctaaattcaagaaatgtgagttcttgtcatcacaagtatcgtttttaaggcatattgtcagtaaagatggaatcatggtagatgcgaggaaaattgaataaattagggattggccaagactgaagacaattacaaaagtcaaaagttttttgggtttagcggagtattatcgtcattttgtggaaggatttctaagatttccacacctttaacagagttaactaagaaaaatcaacggtttgtgtggaccaacaagtgtgaagctagtttccaagagctaaagcagcggttgatttcagctccagtgttgactttgccatcatattaggaaaagttcgtagtttactatgatgcctccagacagggtttagggtgcgtttggatgcaacctgacagggtcattgtttatgcttctcgttagttgaaggattatgaacagtgctacccaaatcatgacctaaaacttgccgcagtggtttttgttttaaaaatttggcagcattatctcaatggagagagatgttagatttatactgaccagaagagtttcaaatatttctttactcagaaagatttgaacatgagacaaagactatagttagagttagttaaggactacgactatgagattctttatcatcccggaaaagccaacgtggttgcagatgccttgagttagaaagatctcgggcaggtttttagctggttgcaagggctcaaacagaacaccttaagttggttaagtctcaaaaggaagttttagctggtcgggctaaagactcaaacagatagtggtatgtttatttataaggctctggtttttttgagcagtggtgagcttaggaaagagattctaaatgaagctcacactactccatactcgttgtatccaggtaccacaaagatgtaccaggatttcaaaccatactactggtggtgtggtttgaaaagggatgtactggattatgtgtccaagtacttgacttgtcagcaaattaagactgaacatcaaagacctacagatttattgcaacctttgacacttctcgagtggaagtggaaagatgtcactatggaatttatggttggtttacctaggaccgcgtgtttgtacgattcgatctgggtagtagtaaattgatttaccaagtcagcacattttctaccagtgaaaacaacatatacagtggactaatatgtggagctttatgtgaaggagatagtatgtctccatgggggtccaaaatccatcgtctcgaatagggatcagaagtttacttctaagttttagaaaagtctttagaaggccatgggtgcgaagctgaaatttagtacaacttttcaccctcagacaaatggaaatatattagaaagttattttttaatattaataataaagttatttttaataaaaatattaaaatttacatcaaattttgtaattgtacattagagcataatgctaaaaattattgtaaatacattagaaagttattttcttatatcaaatatagcataattttttacatcttacttggaccattatcctcaatagaagatttaaaatttgtgctaaatttggtacaaaaaaataagtttgtgatatatttaattcactatttataattgtattccaatacacaagatgtaaaatatagaaaaaattgattatattgatgatgtagtttttctcaagtgtgctaaaagagaaatgctaaagagcatcagtggtgcctagcacccttctacgtgtcaatatcggtattggtccaactaaatatcgggtctcatatagtttaatgtgataatttttagagagtatcgctagccaattacaagacaacacgctagaaggtgctagacactactagtgcctaatagcaatgcttgtgctaacatataccaatacactatctttttgacactttattggagatgctgaccatttccaatgaaagattaaaaaatgagtttgtactgtatttataattgtgctccaatgcacaaaatgtaaaatatagagaaaaaaaataattaattatattaatggtcatttaatattttattgagagaataattattattttttattcttttattatttaaataatggtaatattataattaaaaaaaaaaaaggtaaatactattttggactttgtgttttacaaaagttaccaattcgactctctgttttgttaaatgacaaagtggacccaatattttttaaaatggtaaaaataggaccttgatcagattatattaaaaaataaaacatattaatggtcattaatataaccaactttaagacaatttataacacaaacagatacagaaaatgtaaccaattttgtcataacatctctagatcagattattattaagttttatttcgacaaaaaatcagttcagggtcctatttatacaattttagaaaatataaggtccattttgtcatttaacaaaacagatggttcaattaataacttttacaaaacacgtggtccaaaaatggtattaacccactaaaaaatgttaagtctagtcaaaatcaatgaatcataataattagtgacattgtagtaaataaaaaggaagcatctattctgggctaaatttggcacaaataatgctatattttgcgtcaaatttggcacaacttttagtatgtgtcaaatttagtacacgtttagaacaccattggagtagtagtttcaattgtgctaaaatatagtaatacaccacttttttgacactccattggagatgctcttaaagtagtagtttttctcgattgtgctaaagcctaaaatatagcaatacaccacctttttgacactccattagtaaaaaatatgctttaataatatgacaaaaagtgatgcaaatttaacacaatatttatagaaatttttacatgaaaaatccattttacacaatttattacaaaattact

SEQ ID NO: 117080 - DNA, 2458 bp, Cannabis sativa
  modified_base (287)..(288): a, c, t, g, unknown or other
  modified_base (2427)..(2433): a, c, t, g, unknown or other
gaaggagatgaggatgaacgggtgatagccattttaaaaagaaattggaaacaaaagtaaactgagagggaaaaaaccgtgaggaatcgtggctttagtgggagttcaaaaattttggaaaaacaaaaaatgagagggaaaaaacagtgatgaatcgtgggtagttatgcttcaacaatggaggttattgatctttcaaaaaaaaaactgaaaataaatcaaaaatcaaatgaaaacaaaatgaaaaaagagagggaagtgattggaagttgattgatggttgatanngaagccacacgtgtctgtgcatggaattgatgtgtaagtggtatatttgtaataaaagaaagaggaaatgtaaaaatgatgatgtaagcgtgtagaagtttttttggtaataaattgtgtaaattagatatttggtgtaaaaatttctttttttaacatctgttcactttttttattaaaaaaaaatcactaatctaacgttgaaagagggaatctaagtggtatacccatcaaaatcgatatacggtctggtattttgagtgagaaaacaaattaaaaaactcgataaactaacaagtatctcgaggaagagtcattcgttcatattatttctcactaatcatcttcctcaaagtctcactcactcttctcaattctccaatggtaacaattcttactaatgagtttttcttctaatagggcctttttgattgtttccgcagatgtgtatttcaatttaacattcttgtgttgattttttttaatgagcagtgttagacaatatgatcaagataggaatcaacagtaaggttttgattgtaatgtcaaggacttaagacctttttatttttgaaatttgaaatgtgtcttcttttgagaatttacggtatccctttatgatatatgcaattttgttgtaattttcaaatgtttcttgaattaattatgactatactttatattccatcaaatattttataggattggtttcaagttgcagaaaagcaattgtttttgtttaacacaacaaagaagcaaaattgtaataagggctcctgagttttcttctataataaaatttttatgttaattatacatattttttcaatgatcaaatgaaaggagcccacactatccaccccactggtatttttatctttattttctctcaattaatttagcagatccatatgagaaatgttaattaaagtaaattgtacatggaagagccaagtagtcagatgcgattaattttataattaatatatgtaatacaaaatagaatgcagggagcataggagcaatggcggctaaggtgaaaagactctaggatagtgtttaaaaactgaaattataaatatctgattgaacttaatatgtctatgtacctaactgttaagattatgacatttaacttttaaattttatgaaagattaaagtatagatgatgatagtgatgagaattatgctagcatttagaaatttatgtttgctgtcaaaatagagcccaattttgattttgcttttccaaaatatggacatggtatcttaggtgtgtaaggtattattaattctcagatgtctttttcattgattgttgatactaaattgccctaatattagcactttctttaatttagtaggagaagaattttcattaaaaatcaatagaaataaaagagatcttgaattagagttaataagagtattaatacttgttgcagtgatagaaataattagattttggaaataaagtgtcaatttacatatagagttaattgatatactaaattactgaggtatcactcacaattctccaaactctctttctaccaccatcttagtagttggaaatcattccattaaatctccctctttcgaaaggacctgctttagtattttttttttctttgtgttatgtataaatatattaaagtaagagattaccacacaataaatattttattacttttgtaaatactgctatatttatcatgctaatactcattattgaagtggtttatttttactttgtttctcagggaattattttctaaatttctatgatttcaatttaattataaagcacctaatataaaattaagtatatgtgtcttacgtaacttttttctagtatataaatatgtatatatattccctgaaaaataaatcaatgtgcatatttatttgtacgtgaaagggagccataaaactacttggactggtgattcttagtgatccagtttgtttcgtgtatatttatatatttatatatatatatatatgaatatgaatatgcataacaatctatacgaaaaaacgaaatgtgatcaaatgatcaatatatatctttatatattaaaagtgcctatttaacggcatttcttggttgaacagaatatacttaaaaataaaannnnnnnctgttaaatttaacgattaggtttg

SEQ ID NO: 117081 - DNA, 3499 bp, Cannabis sativa
  modified_base (3388)..(3392): a, c, t, g, unknown or other
  modified_base (3440)..(3444): a, c, t, g, unknown or other
agagagagagagagagaggtgtaggaaaattggatttttctttctttttcctttaatttttaatttcacaaataattggatacacctaggctgaattgaagtagaaaaagccagttgtcaagcttccaaacagccaccacatctcactaataaaatgaccaaaattcccttcatgcttaaccccgctcaaactcagtattctatttatcttaaatatttatcccactaggagaaaggttctagacttacccatatgactctaacggccatccatcgcattttccgtcgtcgccgaaaaaaaaatcataaaaattgcataactcatatataatacaaataatacccctagagtttaataaaattttcagaattgagaaattataattctagcgcccacttctaataatgggaccaacaatcaaataaatttatgaatattataaaaatatcaataattaacgctaattgcctttactaatccatattctaaaatgcggtcattacaggcatggactgagggaggaggatgggtgcagggccttggggtgccaattatcagacatcaggcatgagatgaccgagttttctcggacagctttgtgtatgaactaagtttgtctgaaggtttgggccaaaaaatcaagcccccacgcgcagaatttagcttcaaccctagccaaatttttaaaacttcaaaaaatcatatctcttcaattttattccaaattaagttctgtaaaaggctaatttgcttaattttcaccaactttccaaataaaataattcaagatctttcatagaaaattttgtaatatcacaatcaatcatcaaacataaataaaccataatgaacacatccaaatcaatcaaaaattgtttcaaattcatatttcatgaaaataaatcattaccatggctcttaggccaatcgctggaagttattttactaagatctaaatttattaacatcctaaatatgaattcctaaaacaatgaaataaacacgtaaaagttgtagaaaaaactttacattgatggcagcaaaataatatgactcctatcattcagatctctaacccttgatcctttctgtcacagagtatgatcatgatttgaaactggattctccttaatttgataaaaaatctacactatcttgagtattaccttgaattgtgtgggaaataactcaatcactatagacttcgaaaaacttaggaagaagaacacaggaatttgaatatgaagactggctctgcttattttctattttgtctaacaaagagaatcagttagggttagggttgtctcattgttatgaaaataagagccaacatattttacttataaggtagcttttagggttaggttttgaattaaaatggaattaaagaaaagataaaattggctttatttaatccatcatggccgaaccctatgtgggcctagtgaattttaatttttctattttattgaaacttaactttttttttttcataaatgccatattttaattctaactctataaatgtcaattctatctatctattaattataattaattatcaaataaatttttcatttaacttatttattaattagacctttcaaagtctcttaattaataaacaaaccctaaattctctttttcttttcaaagaagcacttacttagtaaaattcacaaataagacagtcttatccagaattctaattaattaattaatattaattaattaagtctacaagacaatattatattaactagtgttgggaccatgcgcctgtataatcaagctcccaataagtagttctagaatttactgagtaaattctctatcttattaactcctcctatctctactatagatttgaaattatactcctgattacatagaacactctattcaccaagaatagatatgctataagctgtccattatttcaatctaaataatcaaagatcctatatatatgacttacattgagtggggacaaatttactattccacccttcaatgtattttatccttaaaatacttagcttcttatgaatgatatttctaaaaaactaatataattactgaaataagagctcttccatttatgtctgttagccaagctctaaggaaattattatttcacttctaaatagttatagaaggcatagattcgatatctatgattagcgctcctactcaattgcagtaccatgttcccaagatgtaagtattgggccgatccaagtggtcagctttaatgaacaagtcaaagaacatatataatacaattaagccagaacctaaccatctcaaaattaagatcttttgatctaagatcaattaagcgatattgaattagaaaagatataacagtaagtttatgatatattttccactatcaatatcggtccagtctgatgtatagccaatacatttgatactagtatactttgctaatgcattggaaaggatattcaacatatcattgtgtaagtaaactttatcgctaattatcacgtcagtgtaaatctagtgcactgataaattatgggactaagtactttgaagcatataatcattattactttccactatgatgacatcactgtaattgtgagtaactatatgttctaaatttaataaaaattgtatattaaaaccataatcatgaaaattacttataaatttaaatgacttttaatttcctttcgatagtaaattagattatattaaaataggtttatttagggcatacaataccaacatggatgtgcttagcaaagtctatttctcagggtttttccagtatgagactaatttaggtcgacaagatattgcccttatgctagagagaatgtcccttatactaagataaatggtttagatctttctagcatattatctggtagcttatttttgtggttgtatttattgtgatttagcatgttatgtgttttgtttactttttgcagagcaaacttccactttccaaatgggtctcctcaatagttttttggacgccatcagttctaggcccaatgatgtccataaagtggccaaggaaggcaagaataaaggaaagaaggggcaagtctctaggagtggatctcagaagctagcacctcaggcctcaagccaggagttttccctaaaggctccagctttgtaagacttaatttcttttgtcattgacctgacagaaccaattcttgatgttgtgccattatgacaagtgcccatggggcatgttaagaaggatagttttgattgtgatggactagtcttggttcctaagaagcggtctaaaactgtagatggaggggccaataaaaaggcgagggtggagagtaaggaaaaagtgcaataatttgtaaagaccgcttagtnnnnnttggaaattagcagttaatcatgtataattatgaaaattatttatagnnnnntaaataattattatactgttattattgaattctaaaatgcattttatgtcattta

SEQ ID NO: 117082 - DNA, 1872 bp, Cannabis sativa
gggattcaaccggccagtctttttgtacatttatttttaaatattttaatattttgatttatttttgagtattattatagaacgctaaagtgtatagtatttttatgatatagtattttataattaattaatgtattttttataatctttattaaagtaaaataaataagatctcattaattataattcataaaaatactagataatatagatattctttagcattgctatgtataagtcatgtggggttggggataatacgaattaagagagcatagcaaaaacaagaaaaatatgtacatatataattaatggatcagtgtggttactgtttagtgaatcatgattatacaatttgttgcacgaaatcatgactggtagtgggtacgtgtcattattgtcaaaatgtcaatgatgtgtgctttcttttttcttctctttttctaatctggtcaagtactatcgaaaactatatatgtgtataaaaagataataattataactcatattcccaattaagatagtttttttttttagagagaaggaatgtcatgattcatttatttatgacgataatctgttctgcaatgcaatggacattgttgtaatatcgtacaaatgctctaatatatgcatgtagagaatatatgttaattttaatatacaatttgagcattatagaatcataaaatataattaatatcttataaattataataatgctgatcatgaatttaatatgcaatatacctcattcagtgtttagtattatcttaaagagccttgaaccattcttcatttcatggacgtttcatgctcttccacctacacacatagagaagataataaagtgagcttgggttgggtattactctaccactctcttcacacttagctacatacttatccccttcatcttataacaagggtgcataaaccttattcaaggagaataatgggcctattgggcctaaatccaatgggctgaccaaagatattatgggcttcgagcttgttaatatttgttatccccattgtggcacttagcaggataacacatgttgtacatgtttggactttaaaattgtaacggttttcaaattattaaaatttttaaatatattttaattgatttatataataatattattgaatcgaaattaattttgggccaatatgatgttatcataatgttagtcaaactcagagtgaatcacaacaaaacgatcttaaaataatggaaactaacgccaaatatttttgacatggatagtataaaaaagaactagtaaaggtgtttcaatgctatgatcatttataataatagctttgtataatcaatccttttatttgtaacattattagagttataagatataattaatttgggcacttttggacaaaataagaagggaacctaaaattttacttttttttttcttcagattttgacatatcattaatcggttactacttcccaaaagaaaactgaaagttatgacaactagttactactacagacttctttctttcatttttttaagcctaatcgtgttttgaaattatcaggctatatagcattagtaactggttattaatcggaattgaacaaattaacattagtaacaagttggcataaccggaccttttcactgttaatcatgttgcacaattgaatcacctcattggtctaggtgcctacacaacaatgtattggataagagtattaatatatgcacttaaaatatagggtaattaagatttttttgccaacttttacatgtacaaaatcatgcctctaaatttttaaggtcgttaaaaataccctttaagctattgaaattgttaaatttaagcacttttgtctaattt

SEQ ID NO: 117083 - DNA, 3104 bp, Cannabis sativa
aaaatttacaattttaatgtcatataaaaatttttacaaaaatactatctttttataaaataactgtaaaacaacaaaacagaacaaataaaaacaataataaaacaactaaaaaataatagtaaaacaacagtaaaaacttaatacattaacacagtataaaaaatactcagtatttttgaagaaaaaaatctaccccacagtaaaagaaaagggaaattttagtatgtggtgtaataaaaacccttatttttttctaatccaatccaatccaattagtatttagattagaaaaattatcattctatccaatccaattagacctcaaaattcaatccaattactaattagattaaattattttttttaattgaatatctaattatacacctaatttttaatatcaacttaaaaatataaaaaaatatacgtaaaaatatctttaatactatataaagatatcgtctttataagtctaataatacaactaaaaatttgaaataattaaaacaacaacattatcaagtaataaaatagatcaaacatatgaaaataaatgcacaaaataatcaagtgttacaaattcaacaaaaaaaaaccactaaaaatatatttaaaatatatattatttactttttaatatttttttagatatacataaaaataaacaattgttttagtatatataaatataattgaattagatcaatttttaattagattttgagattgacatccaataactgatccaattcaattagaattttttttaacatctaatcaaagccaattataattgaatatctatttttttgtaattagattagattaaattgattcagtttaattaaattatagattgcatgtttcccacctttactttttaccacaaattaagtttttttgtttttgaactataaatttcattagaccaactcggtctcaacaatatcaacaacatcaaaagggagattaaagttcgaaaaaatacgatgagcatatacagatactctagtcataagatgagcagtccaatcgttaaacaaaacataaagaaacatctctaaaagaagataaaagttgtttacaatcctcaatcaacaccaccaaaaatggatgacaaaatatttaaatttctaacttgtactaatatcagacaattaaattcaatataactaacacctaaaaaattatgcttcaaactatgataacacttctttaagagccacggcttcaataatctttaaaagaacttactcaattcgcagttatgtaatcctagtcacgacccgatccttgtgatcccaaaccatcccactaaaatcatgccttctcgtcaaacaaatgcagtattaatgaattaagatctcctgttaaaaagctatgtgtcttaccgtattaaaccaatctaagtttgacacatcaactaatcttttatttattaaaaaattaatcatttatacaatttttttctccttaaaatgctcaaattaattaatgtgtcacaataagattagtttaatacactataaaacacaatttttttttacagaagatcttgattcatattcactttgagtatttcattatctgttttagattataattcagtctcatttgaaagatactaagtatataaacaaacttctttcttgaattaatatataatatacacacaattttctagcttatataatatcagccattaattaggtgagatataacagaaagttaatatatctgtttgatcatatatagcttcgtggcaagatataaattaatttttctttttagaaaagatgcatttgcttaattaactctcaaaatatattattaattaaatttgtcgtttgggtctgatgaaaattcccaagggaacaatcagacaaaaataaagattacttttgtatcttatgttaaatatatattatgttgcattttgtttctttaattctttaaaaaaggacgaggtcatcatgtgggtcaatatataagagatatattgttttttttttcttaatgtaatgacatcattaataaattttaatggttttaattaaaatgacttatatatattattaatagttttcatttttgcccccgaacttttatatatttaccaaattatattttttaaacttttcaaaccgttaaaaattttctcttactattaaaattgttagatttaataatttttgttaaattttattagcaaaaatctaatgtgaataaaatttttaggaacataatttagtacatattaaatttttggggcactatttagtatatatagatattcgttgtgttagtaaaattaaattgaattggataaaaattctgattgaatccaaccatcctaataatttatgagaataatttttaacaacctcaaaaatttaaaatacataatttagtacacatcaaagttcaaagaacaaaattataactcacaaaattaatatatatgtataaaaaaaaacaaggttgtagtgacagaaaaattaaagcaaattagaaaagcttggggaattcgttacaggaacgaaagatatatataagagcaataagtaaagaaagtaacatgggtgggccaagggtgtttgcctcatcataaacttgattaagtctaagctttttgaattagactcattaaccgactcataattaggctttatgctcagaataaataattattatattacatatatatatatctttcactccacatgttaatattaattatgtagatatatacataatatatatatatatataacatcttaactatggtttaggaccacttaattggcttaacagtcacctattaggtgtcatccatagtaagcactcaactcaactcagatcaaactcatgctagctattaaagaatacattattgtgccaaaccagctatatatatagttgattttttttaatcaataatattttaaataaattgtaatttcatcttttttaaataataatatataaccgtgtataatataagggaaattttatttacaccccaaaaatttctaagtacaccctattttaataatttttatttaatataaaatttatatttttaattttactaagtattt

SEQ ID NO: 117084 - DNA, 1511 bp, Cannabis sativa
tttattttaattaaaagtttaaattaaacctcacttttcttaagctaacaaattagattaaaataagtttgtaaaagcacacgtgacgtggtgccccctgtgagaacaattatcatctccatcacttttactcttcatccatccttctttctctttcctaccaaacaaattttaattcaaaaatatttttttacgaactctattgataaagactatcgtttagtgtgagtttaaagtaatgtgtttaatgtatgtataatatacctatgtaaatcatttttatatttattatattctatgttctataagattaatttaacttaagtaatatgtaatgtaataattataaattttgtattgttacacagatattgtgattattttggattgtttttagttgttaggttcaaattgaaacgttcagttttatagtcgttatgttgttgaatttttaataaattactttatattaattcatatattgtgtattatgagacttagattattattttttttgtgtacgtaacatattattatttattaaattattttttatttattgtagcatacttattattgtaaattagtatatgtatataatttgtcaatgtattttaaaatataagtttgttaaaatattttttttgtgtgttacaataaaaaagaaagaaaataaagacctaccctttcggtgtacttatgttttcggttcattcaacttctatatttttctcttaatagttttcggtttcgaattttttattaattgaaaataaaccaatgtaaaagtcgaagaagtatttttcaaattttttatatctataataatttttgtgtgaattgagaatgtgacaatcattattttacattttacatataaactttaccaattattgtgcatatttgctcaactttaagccttaaatatacatatatataaatattttgcttgttgggatttcaatatttaattatgttataaatgagtcgttttattttagaacaaactttatgttaattaaaactttatttaagtagcaacttgacataaagggttgctgaaagtgagaacttgtgacttgttagacatggattccctctcttaagccgacaattaattcaattttaatggtaaagttgacagaataattatgaacaaattataactagtggcatagagctattgaatgacaataatacccctctattatatgtctagttcacattgagcacctctatcttggtcattcaaaattcaattttcaagggtattgttggaagttggggtatttaattatgaacacaagtaaaggagtcaacaatagccgcagaatacggatttatgtctattttgcccctctttgttgcactttcttttttctccttttttattttttttttgtcaattattatttttggttttccattgagcattattgggttttacaactttctcactagaaattaaaatatttgcaatataatgcaaagagaaatgctaaagggcacta

SEQ ID NO: 117085 - DNA, 2262 bp, Cannabis sativa
taaaattggcatatattagcaattttagtaagtatgtatttaggaaaaaaataatggggttttgtaagtatggaaattcaaatttcccattaataataggggattattttacaaatacacaaaaagaataaatttttttacaaaaatacggttgtacggaattttaaatatttttgtgatttttatgattttatttacaaaaaatactgtctttttatgttgtactcttgttactttgttgttaattttttgttatctataattatttttagttattattttgatgttgattgaatgttattctcctattacttttaagtagttttgttattgttttcgttttgtttctataaaaaaacgtaaaaattaaacttaaaaaatataattttttttaaaaaaaataatattttatgtaattatagctaataatatctatacatatgattcattagtccattgaagttaccgaacaacaaattaaacatcgacacgtgtacaaacaccaaataacatttatacaaaaatagaaatataatttatattattattatttttatttaataagcgaaattgcataaagatggtctctgtgtagattcattgaacctggacaccctttactttttagccctataaaaacccctcttaattcaaccaataattaaccacacataattttcacttaacaaaattcaagaagaagaagaagaagaacataacaatggcggtgaccaagccaactaataatgagtccttcgaagaccagacttcgctcatgaagaggaaccaggagctggaacaagagctgagccggagccgcgagagagaggaggagatgaggaacgagcttctcaaaacttggcagcggcttcggatagctgaagacgccgaggaaatgctctgttctcagctcggcgagctcgaagctgaagccgtcgatcaggcgcgtgctgaccacgcgaagatcgtctccctcgttaagcaactctcacgcgctcaacagctccttcaagctgcctctatttcgatctctctctgatgatgatgatcatatgatcttgacacgtggaataatctgagccgtttgtttttaaaggccctcgttattctctttattagtttgatttttgattaatgatttgtataatttacaagagcttttttcttctgtaaattgtatgtaaaatctgaattttgtaaaataagaaactatatgtcttttttattttcttttaattaattaatgtttagtaatgttatcagattatatatattacaaatttcagtaattaattaacgagaaatattgattataatttatatataataattaattaattaagagtattattattagttggttgaatgtgaagatgaagaaaatgaattgtagccaaaatcacattacgtgcaaatttgatatttgaccttgaattttggtccttacttaccagccaattcatgccataataatagatttttatggatcattggttaaaaattgaaatgttattttcagggtttttgagaagtttagacaaagtgtacgcatttttagtcctatatcgacctaattgacacttaacaactaaaaaaagatatcattataacaaaataaggtacttttgctgttattttttttattaagatcatatgtgtttaatcgtaagataagatgttttcatcgccactttattttattaagattatatgtataacaaatataaatattaaagaatttcgtcgcaactatcctttaaaatattgtaaaatatcatccaaaaaaatttgaaattagaacttgcaaacataaacaaatgcatagatacccctatttttaggttcctctaaaaatataaataaaaataaaaatttgctccaaaaaatatacaaaatgtaatttccattattgttggactttggccaatggaaactcttaattttttattttgaaatttgtacatttgacccaccatgttcgtctgtaaaaacaataatcaaaatgatattaaatttttaaattagattaaataaaaatataaccttttcttaatgtggacggctgagctttgagttgtaaatattaagaaagtaattatttattttagtcatatttattaattaataattctgtaatccatatactttaccataaatagccataatattaaggctaattagtaaattttctccctgaactttgacatgtagtaaatcgtgcctcttgaactttttttaccgttaaaaattccctcgaactat

SEQ ID NO: 117086 - DNA, 1235 bp, Cannabis sativa
  modified_base (1198)..(1199): a, c, t, g, unknown or other
agccatgagtccatgggggaaggctcaatagaagcttgaagcggaaacattacatcgacagtgcacctggtcgtccactgggcttccgcctgcaccgagatagaggaacaaagagagagggggaggcggctgggatggatgagatgcgctagggttttaagaaaggaaaaagaaaataatttttttaaaatttttatttattttttatatttttaaattatttttttataatattttaataattacaattacgtggaccactaaaaaagtgtcatgtgtatatttgtgtacacgtgagcaattcactgtgacactttactaagatttttgaatgaaagtgtaatgagcaaaatagaagttcaatagatttcacagtcaagttttttatttttatgattaagtgttaaatattataaaattcaagtgattttaccgctattatctcattataaaataatatcatgcaaaaatacaattatgcatatatgacacgaacatgtttaaataccttaataatatagttagagaaaaatgttataaaatttactttactttctgtcgaccaaaaataaataattaattaaaaaatcctagacaatgggtacatcttccatattgtatacaaaatatatattattgaaatataaataaataataatttcaaatagacttcaaaaattatgaaaaaaaggtctcatagcacattcaaagctaaaaatcacttttgtagataactactttattgttctttaatgggttgtttaatcaatattatagttcaacattacaacttcaaacatacctatattttaataaaaagataagactttattaagcaatattatggttcaacattacaactttaaacataggggcattactttctatctataatactaggatttagggtaaaaacatgaagctagtgctagatagtgagctattctatttggagattattttacaaaaataaataaataagctagaaggtagtaattattcttatcaagcaagtaataataaaaatattaaagtagtaaaatagctatgtttagattagataaaatttcaataacaaaaacaaatgagattttgataaaataatagtgcttgaaataagtatgcttttagtatattttaaagggtaaattgcggcataaatactcaatgtgtaagattttatacacttaaatacctnntgtttatttttggaggcaaaaatagctaatgttaca

SEQ ID NO: 117087 - DNA, 1060 bp, Cannabis sativa
  modified_base (831)..(835): a, c, t, g, unknown or other
actactgataataatactttaaatgctcgatgttctaggccctgtcaaaaattgagtcattaaggtcggataagatataagtagcagtgcttattacctcagtgatttggtagggaccctcccaattaatgccaaatacaccatgccttaggctatgagtattgggcatgatttaacaaaaaaccaggtctcctacttacaatttttgctccttaacctttgaattaaaatatcgcgtagtaagttgttggtatgctataaccttaagttgtgcttgattgcatttttcttccagaagatccaagctagtacgctaccctttgtcattgtcattgatgttgaaaacatcacgacgaatggatcctaagccaacttccactggaataatggccttgcaaccttaagataacgagaatggggttttacctgtagttatttgaggatggcatacttcactcctctcttgccttttggtaacttgccaatcaaatcgatcccccatattgtgaatggacatggactggtgattgaattaaggttgttgggcagactgtgcacatatggtgtaatgcattgtcagttttcacatttcttggcaaagttaattgcatctgtgcaaagcattgtctaataataccctcatcgtataatgttcaaagtgaaggattatccaccagtattagtgaatttactacttgttaacgatacgtacacttgcgtgtgtaaaatatcacaacaagttttaggcgtcgttgtcgggggatcaatagttaatattattaaaaattaaattttattttagtttagtttttcttttcaattatagtactnnnnntgtttgttttagaatcttatcttttttaggtttaagtcaagttgcaatcgacagattacctgttgatagagaagacttgtaaaaacaacagaagaaggaagagattggaaagagcggcagtagagattgaacaaggagtggctgacaacgccaataatggcaacaatggaggagttgtagaagaccaggctaatggtcataacaataatgaccgtagcttgaggg

SEQ ID NO: 117088 - DNA, 4446 bp, Cannabis sativa
  modified_base (957)..(957): a, c, t, g, unknown or other
aaccaaaagaaccaacacaacccaacattcaatgtgtccctagcagctgccaagaaactaaatgcaacatctctaagaaacttatctgaatatggcttttctttttctttcatgtaaattgataacaaacccaaatcatggtttttgctttggctcattatttgttctcgttttagtgagatgcattggtatatgaattcatcaaagatttgatttgcaattgaaacccttctctcgattcctatgtttaaccatctttgtaatttccagagacattttggtactatgtgtcggtgaattgctgcctcttgcatatcattaaatgccttttgatattcgtgtttgggagatttaaatgaataagcagtaagatctaacccgaaaatgaatagaattgcattatcgaatgtgatcattctttgtaatgtgtcttgtatatcaacctgttacacaatcatacaactacagttaaaataatgtgatatgggagaaaactaatcatgatatatgtatacgggcaaattacgtacatgcacacaaaatatacacatttatgcggtaaatattttaactaatctttatttaagatatgtctcacttgttaagagtaattaatttttaatataagtatgtgttaaatttgtgaagacaaatcatcactcctacaattgaatattacactacgaaaaataaaaatatggataaaaaaaaacactattttttttggtatattaggtaattaagtggtaaataaggtaaatgtgaaaaatagtactacattagaagatatattaatttttttattcaatacaatttggtttgctggttctatatatatgagttgtgatgtgaattttggtagcaatttaagttgtttcgttgattgaaatgtgagttactagctatgtaaattttcgtaaaaatgcagaaattgaaaaaaaaaattattttaaagtntaaaaataaaaaaattcttaaaaaattgcaaaaattatctcaatataatcaccttttgtgtacaaaactaatttttagcagagaaccttgaattcataatcatgatactctccaaattaacaaaataaaacatgtcaaatactagtattctattaaaatttcaaacttttatttaaaatcttacattacaaatttgaatgaaaaaaattattatattaaacatatgcataaaattaacattaattaataacatacctcaattttggtatcactagcatgattgagaaatgggattaagtaatcaacgacctttcgatgaagagttgttgcaacaaatgaatcaaaattagcatgtgttcttgtccaaagctgaaacattttcctttgaagtctccacaactcagaatcaacattcaaaattccatcaccaataagatcaagaacctctctgaattcttcccctttgggatagttggagaatttagttgtgtacatgtgttgaagattcgaaggatgagatgttaggatgaaatccatgccactaaacaatgggcctttgaactcaaatgctcccccacttttggtcattagctcagtcataaactcatgtagccttggagtgttatacattagcccaggtaacatccccaacattggccaatttgtaagtattgcatttctatttctccaccaatggtgaaaaattacaacagtaacaaatacaaggaggagtattaccatagccatattattgcatatatgtatttattaatcccaactatattatatttatatatatatgtactacactactgtgctagctacaatatgtaaatatatgaacatgaatatgtgatcatgataagatggatgacaatatatttattggagggagcccagcaattattattagtcattgtccacatttttatcattattattattactggatacgtggactgagatcgttcgttgagtatatatgattgaaggagggtatagcagggtgtgtttggagatgtttaactatatagtgccatggatgatgaggtgataaggatgatcaaatgtgtggagagggagcattgtacgtagtaataatgcaatattttgtactttatatatatccacttgataatattttatatattataatttatgtaggaaatgaagtgagaaaaggattctctatattgaatgaatcgaaatgtaaagaagccactaagactagtttagcggtaatgatgggaaaagggagaggtcatgattgttcagaattatgaagttacatctcaaaattaattagtgatgagtatagtagcccatattcttattcttatatatgacaatatttttacatttgattcatgtgggataatattatctaatattcagttccattttgctcgctgcagttgacttactctttgataggtgtggatcgaaagcccgctagagatatagctttaataccatgttgagacatgaggttccatatcaaaaccaattggtgatgagtggagtaacccatgttcttatatatgattcaatatttttacattttatcgtgggacaatattgtccaataatcatgaatttaaatctaagacttctaaaatattagtaaattttattcccattacgctatatttaaaaaataaataaataaataatcgaaatgaaatgaaatgtaaagggaaattatttatacaactatatatgtccataacagagtaagtattggttacaatattgtaactaaattataatagacactaacatctgaattagctccctctaatcaactctaattaactagtctttaattactaaaacactttattcatcagtggtcgaaagtggcccgtatgtttggcttgtacaatggctcgcatgtcggaaagaagatacaaaggaagagagagaaagggcctggggtttttagggtaggcaagtctcatggtggtttgttttgtttgtcatggaatgggttcctagagttttggggcgcgttgggaagcctatatatggtggtactggtttcgatattcgacaattggaaggggctagattgggtaataagccacacaaggaggaagagagaaagcgggtgggaaggagaaaatacctaaagaaatttaaatctagggtttcaaattattttttaaatacttaagtacgatataaaaatgatgataattataaatgacattaatgtatattaattaatgtgtaccagttatcttgcttcaaaacatgtatgcagttaaaaaaaataacattgtgcatacaggggaattgtgatatcataattatttttcaataatgatcacctccagcattaattaatggacgtgacacacatccatcaatactagaggcgaataaatactaaaaaaatgtatcacatcccttcatacattccacaaccaacaatatattagacatgataaaatatatttggtgtccaattttgtttgatatgaaatatctcaacattctttcatgacttacactaattatgtaggtcataaaaaagagtcgacataaaaaaagaaaaaaataattttagtgcttgttgttgatcttctattatattttccagaatttgaataagcttcaatcctaacttatgatgttgcggagaaaaatatgcttgacctagacatgacaaacatattgaaataccttttgaacaactttcatatatttgatcaagggtcagagttatctaaaaattgactcaatttattgactgagaatgataaatttagtctataagatactgcaacttaccaattattctaatagagagtagggtatgcaaggctatattttcatcttggcccagggtctaaaaattgtaaaatataaggtctttgagacactataatatgcccttattagcttgcaaccaatttagtccaagaaaatttaaattttccaaattctttagcttgaataagttatttagcttattaattcaaattgttgctggccaaagtaacatcatctacacacaattgtaatataaatttagcttgtcccaaaatgcctcatgaatatataaatggttagttgtagaataattaaattaaagccttgttctaatatataatgcattaggaaaaaaaatgtattaggaacatgcttatatatagaagggcatgtgatctggatcatttattccactcaacttttattaattaatcctttgtatataaattttttgtgtatatatttcatattttggcccataaaattaatatttttatttatacaattttatgtattttttttttttattttttctccataaattttatgatttttgtttttatccttataaaaaattatatttttatccccataaattttaattttttttttcaaaaaatatatatttgtttatatcattgttgcgatattttgcacacgcaagtgtacgtatcgtttcaagtagtaaactcaccaggagtgaggtcgatc

SEQ ID NO: 117089 - DNA, 2442 bp, Cannabis sativa
  modified_base (1843)..(1851): a, c, t, g, unknown or other
aactttagattgggttagaaaatatataggataaaccgcctaagacgatcgatgtacaaccctagatgaacattttatctagatatattttggacataagtttattcataattacccaacttgagaatccttcttttaccaattgtaccaagaaacacaaaattataatattcaaatgcctcaataaactaattgccaataatattattgaaattgaaattgattaggaactttggtagatcataagtcaagtcaagccgcattaatgaatattttttataaaaatggaaaaagtgggttgttacaaactttgtaagacatgaattcaaagatcacttttggctacattctttttattattatttaaaaatgcatgtcaagaaagattagataggttgctttggtttcttcttccttttcttgttttttgagattcaaagcaagaaagagcaaggaatggtgatgatatgattgggggaccccaaatagcgccgcgcgtgccatttctaggagtatctttctctctttccctttggctcaaaattaaaaaagaaaagtaatagtggcattattctaaagcttgctagctagtggagtggagtggtgtacttatttgaagccgaaaacctttcctacataattaccacatatagtggattaaaaattgagagatattgtactattaggctatgtttacaatcacatccctatcttatcctcaatttatttaggctcttttggccaaatatctatttaatagttcaatttacacttgatcttaattttaaaatttttggcatcctattggttgtgttgggaagttggacaccatatatttttatattagtatgatattgttccttatcgacccaagctcttatgaatttgtttttgaatatattctcaaaaaatttcatactaatggagatattatctaagaaaatatacacaaagtactatattagataaagttgttagactttcatgttcatatatatacatttttagtgaaaataataagaaaactacataaaagtaacagaaaataacattcaaacaacataaaaataacaaaaacccaacaaaaaacaaaacaagagtataacataaaaataagaaaatttgcggcataaatgctttatatttttaattttatatacttaaatactattttttttcgactttccatccattttctttactataattctgttaaatactggttgtatttactaaagtacatgcgtcatatttttattggtcaatttcatattatttttataaggctaattaggatttttgctctctgaactttgacatgtaccaaatcaagccctaaacttcatatctgcattctcaagtcacaaactaagctttaatccaaacttcatatctgcatttttccattacaaaagaactccacttcaccatcccgaaaagaaacctcagtgttcttgagatctgggtttagttctcgttcagccaataaaacttgcagaccaaacgagatctaaatcgtgtcgctgacgaaacttttcaaaaatgcatataaagaatgagatggacagacagagagggtgtgaaatcgggggagggaggagggagtacctgaggtgttgtgccgtgaagatgcgctaggtttgggctgatcgtcgtcgggagtagggatgcacatggggcggtgaattggcgaggagtgctcccccgtctacatctccgttaaggattttaatcctcatcctcacttattttccatctgagatggggtggggaatcccctaaataaaaaaaaataaagtttataataaaaatataaatatataaaaatattaaactacataannnnnnnnntattacacattaattattattcaagaaactaccaattggatattatctatccttatatacccacaatcttttgtatttctaaccaatgtgagactttggttgcacacttaacagttgggtctatcctcaagtcaaggtcgggagagggttgctgtctattatcgaccgacgatgctcctatttacagtacacctcataaaaaaagttgttttagtcctatgtgttttggtatccaggataatgttttagtttaaattttatttatgattgtttacgttttagtttttttgaaccacttgtaaatttttaaaattcagaataatttatattatcgaaaaaaaaaattaaaacaattacttaccataaataattttaaagaactacatcatgaaccaaagactaaaaactcttctttttaaaagtatataataaataaccctaataaaaattaatattataaaataaataaaaactaaagatattaatttcaatcctgtcccaatagatttgtgtagttgaaagaaaactcgaagcaagtattgtataaaaattggataaaatattatgtgtatacttttttttttttttttt

SEQ ID NO: 117090 - DNA, 1498 bp, Cannabis sativa
ggctaaaaactgagtcactttcttcggattaggcaccttggggataagaattaagttagttgcgttgattcccttatgccattttaatgttggctggtttgccattttaatgttgtactacatgacaagaaagtgaatttgaatattggggaatgtgtcacttttgtggggtacatgtgcacatggtatactgctttgtctctattataaaggggtgaatgacctttgccttttcttaagaataaaatcatagttttgataaacaaatgtatttgaatagagatgagagatcaactacttattattttttattggagttgttttacttcatattattcatgtatgcatctaagttggaaaatgagtcccccaatctgttaatcaatgattcacttgacatgctagctccttgcgtgtctacatttttattcaatagttctttcaaattagttccaatatttattatgtttgttattacaagttcatattattttttgagttttgcttagttatcaaattattttaaatatgtttattagggactaaatctaacaattacacttttaatgaagaactcgttcaagatattcaataaatcaatgatgatgcaccttttacttaacttgacatacaacctaatgaaccacctaccacatttgagtttattagagaagctactccatttgaagctgatttacacaaagaagttgaaccagaggctaagcgtgaagagtttgttggagaagaatacaatgaaatagaccaatgtgaaatacaagaggaagagtatgctggttaggcagaagttgaaagagagaatattaggaaacctaaaaccaacaactggtgggatggtattacaaactttaatgttgaggaagatgtagatgatgatggacatgaaagagaatttgatttagaaagtgtgggtagtgatgaagacaatcctatcaagacaaaattggagtacaatccaaataccaaaatagttgatttcaagtttaaattagggatggaatttgggactatccaattacttagaaatgccttgagatagcattttatacacattggaaacgagtataaattaacagttaatgatttgaaataattcagggccaagtgtagagcacctggatttcctttcctactctatgcacatgtgaaagaaagtatttttctagtttatataacaatgtaatattatagtaatattaattgtagaatatgatttatttaaaatatttaaaggtacttagtttggtgtggacaacttaatttgtttttttttggttctgctagcttttaaaaaaacaaaaatatgttttgattacaaggaaatttaatttgattattattgaaccatctcctccatttaataatgattatatctccttaataaaaagatggctaattaggattttttccttcgaactttaacatgtaccaaatcatgccccctgaacttttttggcattaaaaatttcccctgaactat

SEQ ID NO: 117091 - DNA, 1367 bp, Cannabis sativa
ctcaagcaaaaacttagaatgaaataatcaataaagaaactcaaaaccgaaactagaaaaatataaagtggaaaaattaaaagatgaatactagaatattaaggaggttcgaatttcctttacaaatgtagagagcctaatccccctttgaactccttccaaggaattcttcttcactaaacaatggcaaaagaattggtacaatgtgggcaattacaactacaagcaatataagttgatcactctccttcttcaaaccagtagagacctttaggaaatcaccttgaagatcaccatcttcccttcaatttcgcttctcattctctcactaggatattttagactctctctccctcgattacaagtattacatatgaaattgcttcgttcttacaatgcttagccttcagttttgtcaagcttgtcataattgagttttgccatgtcttcaagcctaggggagttaagtgaggactatgtgtgaacatttaaacaattattgtatagattattatggaggcttcgtagtttgattttgagggattaatttgatggccctctcttaattttttattatatgcatgattgagggtcttgtctgctgaataggtaggtggatgggtctctcactgtaaatttcgaccctgcaattgagtgccattatatgaaatatgaaatattcatttcagtgctttacaatgcaaagcacaacttgtttgcatacaccaaatattattttttttgtgtccgacacacattacaagaaaagaaaaaacatgttttattaggcagtagtactatgtttgtcaaggaacgttatgatgagttgattagccaagtgtggtagctgttcgtgcacaaaatgacatccgtcttccaagaatataatatccagatcaggcacaaggctcttcaaggtcccactccttatgtagtcttccatccctggaaatttcatgcaatagtccttttcacccataatcagtaatgctggagcattcactttcggatcacttataccaatatccactgaaaaacgcctgcacaaaataaacagaaaaatgtcacaaacaaataatcatacatatataatgtgtactagtccttttgaagaattttcttgcctgtatggaatctgcaaagcataacgaaagcccgatttttcatacagggaggcatagactgagaggtcttcttcagtgaaccaagatggtagaggagtagatggatcaaacaagtccattatttcctggttttcattagctattggaatctcacttcttgagaagagtgtgtagatgtttcttatcacagatttcacatcgaagcgcccaaaatctgcttctgctcgacccggtacctaatta

SEQ ID NO: 117092 - DNA, 2832 bp, Cannabis sativa
ttattgtttaacaatcatgttgtcgttttggcataaagagttgtcgtttgtgaggtttgtgaaaaagtgatatttatttacaattttttatttaaaatattaatctatattttagtttttaaaataatatgatttatttaaaacatattataattatatttgatatcatatatcaattataatataaaaatattattgataatgagataaaatatttgaatgaataatatatatattaaattacataatgtgtaaataatatagaggaaaaaaataaagaaaaaaactaaaacaagtgatgttttgatgtgattattctatataaataatagatatataaaatatcatccctaaattagcaaattaaattgaaaatttgcttttattccaacattttccataaaataattttgtagcaatattgccctttcttcgtaatcttgaaaatcatcaacaacttcaatttttgtcaaattatgtcgccaacatttcacaagatattgaacacaacattccttcaactcccacacatcttcttccattttatcaatgcgatccaactgtattaaacaattaattcaattaaaactcaaagaatttatagtgtgaatttttttttaaaaaaaagtaacgagctaacttttactattttttccacattttttatttttcccataaaaataattttttaattgtataaaatccataaaatatgtaattttttacttaaattaaattaataaaatgtaatataaaagaaaattaatttatatacctttaatagaaattgaggtggttgaagctgttcatgtacttttgtgttcttcgaggcaatacataatgatattgatatagtctcaagagagggagcaagccaaagcaagctctcaattaatttcataatgttatatcccaatatactttccctcaatatctttattttcagatgttttaggtcacacaatggaggaaataaatcatctttagcttcctcaggaaatatcaaatgctgcatatttatgaacaagaatatatatgttaaaaatcataattaaatttataaataaagaaagaaaaatattgatatagtgtagagacatatatacctttgtgttgaaacatttgagagtcaatgatttgcaatgaccaaaataagttaagaaattccttattttttgataaaaatttatatcaaaactattttggatagttatttgagcttcaagcttattattagttgaagtaaccaaaaccccagatgacaaagttggtccatcataatcaaaccaatgtagatttggggcttcaatcttaatagtagacaatttgtaacaactaaccaattccacactcttcaaatattgattattacaaatggtataatcaatctcaactttctccacaacattgcatttaaacaagtgaaatttctccaaaattcgaaaacccgttaatggattaaaatgatcttcaatccatttattggttatgtttgcaccctctaatcttacatcttttaagttttcacactcataaagattcaaattcaatatctgattattgtgacgacgattattcaaacaaccataatgaaaatatttaaggctaggagaaacaactttgatatcctccattgctttgcaattaatcaattccatgttctgtaaatttttgttactcataccaattttgatactgtggagactctcacaacaactaattctcaaactctcaagagagattaatttcgaaacttgctcactaaaccattcatcactaacttgtgtgtttgctaggattagagttttgagagattgcttacaagattgaagatcaattttattaccatcgaaacgacctgtaatcccttgtagctcaaaagaaaacgactcgagtacttcattatctttagtcatctcaatagtatcaaaatctttagaatccataaactttatagatttcaatttaggacacgagatgagtattgttgttggcctaatagtagtattgcacctctcaaaaatcaaatcttctaataatgggcactttataataatcgaattctctacattaaggagagcaataccacacaaattcatagttttgatccattttgatgagaaaacttcaactggtaaaagtggtggcagtagaggtttatttgtttcttgcgaatcttgatcttgatctctcactacaatattggaagtttgatgagtacgagttgtgcattcaatggttaagtgcttgaccttgtttgctataccatactctaatgaataagcaaaaacattgttgatgatattatcattgggtttgggtaatttagtgagaggaaatcgacacgtgaaggtatccaaatcacatgaattttgtgggatgcgttttaaggaagcaataatagtttcgaaaaacttaatgagtctttgggaacaagtagtcgaggaattgtatgtgctggtggagaaaagttcgtaatcgaaattaaggattggaaaagtgcaccaaatatggaagaagtgtttggagaggaggcttgtgcggattacgtctttggtggttaggaatgaaaatatgtgatgaacgatgtgctgaggcaaatatgagaagtgatcatcaactccattgataatgtcttctcttctcattcttttttgttgaaaattgagtgttcttgctatttttcggtgctgccgtgagaaagaaaggatgaaagcatttgaaaaagtttgaattattttgaaagagaataagtggcagccgtaggtattagttgtgctttagggttagagaagataccttttatatatatatatagggtaaataccattt

SEQ ID NO: 117093 - DNA, 1102 bp, Cannabis sativa
aaaattatttgattagttttctactttgtttaataatattatattagtagtttctaaaatatatatatatatatatagctttcttgtgaaaccttatgaaatacaacaaagcatgaggaggataagtttgtggttctccatttatgttttttttttatataatataaatttaaataaacaagttataatttatacacaaaatctaaagttttttttaagtttacaagtcaaacaaacctacaaaatgaatcatgaaatttattaatgttatgattattatttgacgttgattaatgcaatgaaacttgtttgctgatctatgaactctttggatatttttttaaataatcgacttaatttaaatattttttttttcttaagaacaactaaatttagatcttacgttattaatatccttatatatttaaggataatgtcatatttatcaataaagaaaacgttgacataatttttttttttaaatctgagttgacataattatcattattattttgttttatctatttttgcaagaaaacgttgacattatttaaacaagtataacaataaaaatcatgacaaaattgtagtggtgtcaattttgcaaaattaaaaatagtcaaaataatttacaaaaaatgaactgttgttctacaatcagctatgtcatataggtaaactctatatctatgtcgcgttgacttttactaatttaaatcataatataatttttttttttttttgaaagaacaaaaaaaagaagaagaaaatttgagttggcacttgtgatttgtgaagagactgaagaagggtgattaaaaaggtacatgaatcatctttatccagttggaaaggtaatattgagtacaataattacataaataagtggggttaatgtggcaatcaacacaccctaagtcttaccctagtttcttctccacttaaacttatatcatattaattttttgtaatttctaaatatagataaagagtttactttctttttttttttttttttttttttttaaaagggaaaaaagttttttttttttttttggttttggattttttttttttttttttttttttttaattttttttt

SEQ ID NO: 117094 - DNA, 1278 bp, Cannabis sativa
cacctcagtggttgtggtgtccgtcagccatttcttctcgatttgagagaaatagaagtaccatgacctgttttgcttgggacttaatttcaggtcgaagagccagttggtatcatgtggggatggctcaccccatccctttaaggcgtggagtacgaacagagaggataaatatttaagacacttgggagtgagggcagcatcgcgccctgcttagtgtgagctcttgaccaagcatagtaatcttttcctaggtcagtagccagctggccgggggagggaaggaagccttcgccattctcgaggagactacgattgagcagatttgtcatatttttcatggttaccacgaatggtggggaaatccatcgatctcctggtgaagtcctcctcctcaaaggtatggccttagtgtattccttgatgacgtagtcctcaccggccttcaaaacattgcttgcctcagaaatcggctctcctgtgtcactatagtcaccaaattgtagcacgcgagctactccctcttcctaatctacttcagcatcagaaggagtagcaagacggacctctccctagtcctccacttcttggactttaatggcccctgcagcatcgtcctcttcgttagtgggatgggtctatcttgccctaggcaaggttgtgaggcaggaaatatgtgggtcagtcaatgaggattttcttacagtctgtttggtccgcgccatcattttgcgcctgggtagaatcttgtcagaagtgtgcctagcaacaatcacagcaaaattagcaacagggttgcttacagcagcaaggtttggacgaccctcgggcagggtgtcgaccacgtccggatgtactttgtatgtccaatcagtcaaaaggtagtgccttcacccttttctaagttcccagatgaaacgaccatatccgtcgccctaactctggtcgggatggaagtgatgttgcacctcgggttccggggaaggtgtgggttcactatttatttccatgtcttcaaagctagagtttgaaaggttatcactggaggaatatgggataacacggagacgaggatgatcatcactagggttcatctacaaaaggtaggagacaagaaagtgagagtaggtcggagaaacgaatgaaaaaaggttgaatgtaccgacaaggttcgattgggaatcaaaagcaaaaatttcacccaaaaatagaattttcaacccaaaagttcaaaactttgaattagaatttgattttcactaaacccctaatggatga

SEQ ID NO: 117095 - DNA, 1924 bp, Cannabis sativa
gtgtccagtccaacatggcacttaacacctaaaatagacgaaaatattaaattactaacagaacacgagtattgggggttttaccacctaaatttgagtttttggggttaaatgaaaccaaaataaaaattttgggggttgtgccgctatttaccctaaaataatttattataattttatttaataaataattaaaatagtaaaacaaaaatacttgaagaattcaaaatatttatgccaaataataatttaatcactaatttgatacaaatattaattttctaaaatattaatataatttctaataatttcagaagaatatataactttattattatattttttcttataatcaatttaaataagtattgtttaattaatattattttaaattttgaaagcttatatatgataattcaaaattatatatttgtactaattttaatgaataaatttttgataaaaaaatttataaataaatttgtaataattctttcatttaaattcttattaattttaaaatgtattaacaaaataaaaattttaaaagaatgataaaaaaatctcacctatatgggatttttatcccaccctgccagatgggataaataatcttagacagatgggattagctgaattagttatccagacattcagcatgtccaaacactggactggacaaattggcttatctaatccagtccagtcttgtgtaccaaacaggcttgaaagggattgagaaggaggagaacaggttttgtcagcaattggacccatctagtatggaagtcgtgagaaagaagaaaaagaacagaggggagtcagaatagaatgggtgaaagagatgggatttaggtttaggttaggatttctttttattattattattattattattttttgtttgttttaattttaatttctaatatgttttattttttatttatttttactattattttaaaaataattttttattttaaaaacttaaaatcatttttttttatatttttaactaattatttatgtagatcagtaaaattgtatcatgtgtacgtctatgttaacaacacactgtgtacacgtgtacagttcaacatggcagataacaacaagaaatacatagaaatagtaaactactaacataatagagatttagaaggttttaccgtcaacaaatcaattttggggttagttgcaactataatgaaactttaagaaatttggccgaaatttattcatttatatatatatatatctacatgtgggcaattaccatctatacgaattttttattttctattttttttatacgagatattaacattgtacgatgaacatgacacattaacatgactaaagttctcgaattttacacatgttaaacgcataagaaagcttacatgtgtatgtactctagaagaaatcagaggccttgagatgggcaagggacctctcgtcgtagaggagaccctaagatgaatgaaggtcctcccttgcttcgcatgcattggaccccgagggtcccccttgccttgtgtgcaccgtgaccctgcgagggccctccttactcacatgcatcaaaccccgagggtcctcctcgctcgtgtgcaccacgacctaccgagggccttccttgccttacatgcaccatgacctagcaagagtcctcttcgctcgtagaccatgtcacggcgaggacctccctcatatgcaaggtcccatcccagcaagagaccactcgtgtgcatgacttcgagggttcgtgtcttccctctttctactctcttattcttaccgaacctattttacgtatgtagtgttgggttgtgccctaaataaaacccatttaaatataattagatgtactaattaataaaagatcaaaaattattttatgatgcatggttcacatgattgattt

SEQ ID NO: 117096 - DNA, 3950 bp, Cannabis sativa
  modified_base (3885)..(3888): a, c, t, g, unknown or other
acttttgtccaattttagtaaggaaagtctaacatggatgaaagttcaggaggcatgatttggcacatgtcaaagtacgaggagcatgatttgatagatgttaaagtctggggagcatgattttgtacataaacaatcactaaattagtaaaattgaatgaaattagacaaaagtcattagattcgatcatctcaatagttcaggaggaatttttaacgttcagaaaagtttagggggcatgattcggtacatgtcaaaggttagggggaaaaaatcctaattaacatgagtgccaccgcacttaactctacgtataaattactgtcttacctagtatcccaagtatgtggagattccaaacctccaggtgttcctgagcaagcgctggtgatcctagtcacaattctcgagatttcacatataggattaatctcaaaattcaattccatatagtcacataatttgaattccaattatagataagcacatagagctcgaaacaagatttccaacgatataaagaacgtctcaaatagagtcccaagttaaaaattatggcgaaaacaaaaactcaaaaaattcctgagaaaacagggcctcactgcggcgagcatggccacggccacgacaagcaactataggttgctcttgccgcaaaaggcctagccgtggctacgacgaggggccctgtaacccaaaaatttccattttcaaaaccattgaaaatcaataccaaccttgccaaaactcacccaaaactaaacataatctcatatttcaatacatgccaaacatattcatcaacaatcatgattagaaatttaaaacaaagttccacatcaaaattaacaacagctaactcatgatataccacaattgctatgggtacacataactcacaagcttaaaaaaaatctaagctcaaaactaccaaggaaacccaaaattttcatggccatacccagaaatcaaaccttctttttttagccctaaaaacaatcaaaacaacccacatgcataccttacaatcctacccacataatcatgcataaaacaacacaaattattcaattctcatatacatgcatttgaaaactaaaagaacatcaagacaagtttcatagttgctaaaattagaatttaatttatacaagagaaattggagagctttaccacaatctccacaagttcaagcaaaaattcacccaaaattcactccaaactcaaagctttctttcaattctgaagaattcaacaaaatgaagaggttaaggggagagagggggttcgaacaagagaggttcacaccagaaatgttttttctcactttccaaaaaatgattttcttgatgaataatgtacactaaatggtcaaaggaccgaaatatccccataagcaattatatccacatatataagtaatgacacatttgtcaaacaacacataatacataattttcaggttttcatatttatcaaataatgctataaacaaatctcgaaatgtatttttgggccccgaacccggtttggcccaaaatacccaattatgactataccgcaccagcttgtcgaaaaatacctgcagaaaaatagaataaataaactatataataatacagtccacaagcacgatatatcataaaaattacaattttacccttctcgggtcaaaattacaaaaaaagcccatagtaataaggtcttaaaatgcaatttatcagcatagtttcacttattaaattatataataatataattccaaattaatacataattaaactagttagggttgctaatctaatttcataaaccttagggtattacaagaacccagcgcccaagttaacaatcaacctgatatgctggttttaataatcattcaaataccaaatctaattcaaccattgaatccagaatggtccaaaatggggtaggagacctcgcacttaaattcgagaactttggaagtattaaaatgacaaattgggagcccgaaaatgaagtacataatgcccaggttgacaaatggcctggtgtgttgggttttgcttatgcgattttgattccaattcgattgtccgtctagtttttcataataactaaatccatgaagttagagaagttaaattcacaactttctatttcttattttcaacatgagaaactcactcggaaatgaagagttccaagtctctcatttccgcaaaacaacaacatcttcgagaactggtgaccagctctaccataacacagaaacaaactaagtgctgtcaaaatatcacttatgtatcataaagtacatccctcaaacgtttttccacttacctagcatccagattgacgtcatatgtcaacttgggtgtactgtggtgttagatgtcaacctgggcattgggttgtgaacaacctttagtaaaacggtcataactcactcaattgatctgattgacgcgattcaaacctaattcaatgatctatcaagtcatgtctcaaataaattgagataaaaaaggagtgtaaatacagtactgttattaaaaaatatagaacaaagacccttacataaagaaaaataagacacaagaacaaaaaacaaatgaactaatcaccaaagggacctcgttaacgacccttgtctcattgcatacaccccaaacctctttaaacaaagctcgagagatccccaaaactaaaccgcgacccataaaatccaagccaaggaaccactaaaccaataaccaccaccattgactaaactgcaagaggccaactaaaaccacttagacaaaccagtcttgagttggaccatcatagaagaaaaacccttcaacgaatgatccatcccaaaaatgacatccaataaaatttcggcgatagttgacgaaaacccactgcccaagaatcaacacaaaccagccaaagaaaaatcagaaccaaacaagaacatcgcaagaaacgaagaagaaaaccttaacaatagccaacattgaacctaatctcaaagtgtgaacacaccatccccccaacctagccacaaaccaagcccaaaaagaggtcgacaaaccctggttggagagggaaagagaataaattaggtggcgatagaagcaatacctagagaaaaaagtaccataggtcaaatcgtaacaacatgatacccttatgattaattaacaatgcaaacttcctaattccacaatatcctattaatttcgttttctccaaatgtacctagctctcccaaatttactcttttggctcatttttatccaattaagcacacttacaatagaataaatttgagttctgatgtgctaatgaaggtttgcccaataaaaattttcgtcgaaacgtcattaagcctttactagtagtaatttctgctggtaaattgaccgacaaaaattggccaatgaatacatttttttgacacctttaaactattatatgccttgtttggctaaaattttacttttatttatagctagaaatatatataagttttgactcatttttacccattggataactgttgtatgatgatttttttttaatgaaaaatactttataaagtgtttgaataccattaaaaaagattttttgtgagtgaattaaaaataattatgtaaattattttaattttaaaaataacttctcaaaaatccttgtgaaaaaaactacgtacaaatcataactttttccaaaaagatttttaaattaaaaataaaaataaaaataaaaaagacttatttatttttttaatccaaagaacattaggatgcccttttagatgctaaaaaaacatagcagatcatatatatatggaatactagatgggtattacccattaatgagtaataaacaaatttaactataaatannnnttttaaaaatattaaaccattagattttggtccgatatcgaatagtaaaagagaaatttgaa

SEQ ID NO: 117097 - DNA, 2901 bp, Cannabis sativa
tcaaaataaaataagaggaaacttttgaacttgatgtatgttcctttctaaactataccttatttgttttgtgtgtgtaggtatgtttttaagtttggagtattgctatattaggcactctctcatgatgttttttaagtttggtgtgtattaggcattataatgtctaacacctatatgtgtaagtttttaattaaatttggagtattgctattaggcatcatcacgatgtcggcacctctaagcgcttttggtgccctatatatatagcatttctcttaagtttggtgttttatatattattattagggataatattaaaaaaacaccaaaataacaaaaaaaattttataaaaatacgatctctacgaagttttttaatatttttacggttttttaaattttatttacgtaaaatatagtttttttagtgtacttttatgttctatttttattattttactgttaattttttgtttgtatattattttttatgttattttcttgttagtggtttttttttttttgtatttttatagaatatagtaaatatataaaaaaatattaaacataaaaacataatttttttttactgatgttttatgtaattattattattattattattactattattttagccatggtaattaattaacaaatcactacaaaaaatacaggtttctaccaaccaatatagaaggagttttaatggttacatcaaatatgtaaccaaatggtcacatttattttgaatcattagatcatttctcgtagtgttactagttactaaataagtttaaccataaatatcaaaatatgtatatatcaaaaaatatatatctttttatactatatcgaaaagatatttatgtacaaaatactatcaaactcaacctatataatgtaaaaataagagatttttttaatctaataaaaaattttaagtataaaaattaaaattttcttaatactattcattcattgataatactcttaatgagtacatatatacttgtttataacttttttataaatatttgtaaatattcataataattaagttaaaaaaaaaaaaaaattaaccacactacaatttattactattattattattaatcaaaaagagaaaatttgtggtaggatatatatgctaaaactttatgccattcttattataatgattgtgaaatgttttaatatatttttttcttcgtaacaagtaggtgtgtttattgtagtaatagtggacctcacataatttttaaatacaaattcaaaatattttacaaatactaaaaacaaaattcacaaagactctcgaggattaacaaaggatcttcattaagcaattgatcgaaatctaaggccaaggaagtctctcaaggatgaactgaagactttcgaggttgaatctcagaggaatatcgtttcaatgctcttctaaaaccactctcgaactagatcactttcgaagaattcctactatttcttgaatcatctacaaatctacaaacaagagaaaacaatgtcagtggtaaaaaataattctgtttataaataggatcactataagaaaattgagttttgttagtgaaattttgcttcggaaaaagtaacaatcgtggtaaacttttgccggtaaatttataggatcaatagttgatgacaataaacggtcgaaaaaggtattttagccggtgagtaaagatatttcgttggcaaaagttacttgtgccggcaagttaagtcgttggcgtaaaactagccaccggcattgccgcgacgactgagctgattctgcaatgtttttccggtgagctaagtagtcgagaatacactcctaacacaattttccattttgccagaaagttttgtcggcgcaagtaacttcgctaacaaaacatttttgcgctagtaggttgctggaaagttttgttggagcatgatacttcgccgaaaaatatatttttgtattttttaaaactttttaatagtttttgtcaacgcatgtaatggcacgaataaaaattttattttattttatttttaaatatttctttaatattataatatataaatataatttaagtttaaatttaaattaaaactacaatttcacaaattataatacaacaatataatctcaaccccacattataattatattaaattcaagtaaacattataaaactaattaaaaagtcgctttatagaaaaataataatatttacattgaaaatagtaaaataaaagtcacactataaatcaacagcatcatcatcatcatcattctggctgggaggggagacttgtgatgactaggggaggaatctggccatctccatctctcttaggcggatttttgggttgatgatgcctattaagggcatacggcctccggcttggcaacccccccagccttgggtttagttggtcgttgactcgtctttcagcttcatcattgccatgaccgtcgaggtagttaggacggtagtcactattgacctcggggtcttcccttctccccatgggcctgtcgttcagggtcggtcctaaagtatatggggcctaaggtaaaattaaattttggggcccctatatatatagtttaactattatcaaaatgatagttctagtgctttagtataatggtaaaattttcataactacaccttaaatatattttttaaaaataaaaaagtagaggttggtgttatacccaaaatttggcgagcacatcagaagaagacacatgtctagctgggaagaatgaggacacacacacaatcgtaagtacacttgacgtggaataactcgttaagaacataattagcagagtatgtttataactcggctgactagacagtcttatgcgagataaaatgtactaactgttga

SEQ ID NO: 117098 - DNA, 2514 bp, Cannabis sativa
acatatttatacattaaaagaaaaacagagcattttacttttcatttacttgacattctttcaattaattgcttaaatactatatatggatatgaatggagtaagtaagtgaagttacatattatttaaatttgtgaagggtaggtaaaagacaacgaaaacgtttggtaactaataacaaagagagtgttgattaaggtatgggggtgaagattataatatgataaagtaaagggcataatagcaaaaaaagctttattatattcctactcagaagccactgggagaaagtgaatagagagttttgcagaaccgagtagacgtattaaattttcacaacctcccaagccaacccccaaatattctttactttcttccaatgctatctctcttggtctcaactcaaaccctagaaaaatttcacctttagatgcaaatggggctctttcacaagttttagaaacaacccagttcaccaaagatctcagatttatctccagccccatttctagccatggcttcattatccatttcttggcattttaccactttctcactcctcgttctcttctttaaagcttcagcttttgactcaaattctttcttttctttcccacagtttggtaaagatccgaaattttactccaaaatctctctgtatggtgatgcaaaggtcattcatggagatgatgttgctgttcaactcactgatagagtgagttcaagtgctggccgagtcatttacaagaaacccatcaagcttgttgaagaaggtaagcctcagaaattggtgtccttttcgactaacttctcttttgcactttcccctggaactgggaatggtttggcctttgttatgctcccaactagttttagtgtgaaaactttctataatagctcatttgggcttccaataggatttgttgaaaagggtaaatctaagattgttgttgtcaagtttagtaccttgaaggatgctaagaatgatgatttggtgaaaattcatgctggaattgatgtgggtagttttgtgtcaaccaaagtaagaaatacttcaaccgttgatttgaccctacataatgggaacaagtcttatgcttggattgactatgaagctggttctaaaagattagaagttagattgagtcaacatggtgatgctaaaccatctgaccctctattctggtacccaattgacttatcaagaatgtggagaaatgaggaagctttggtgggtttcagctctgataataagaactcatctcaatcgtgtaatgtctattcttggagatttgaacaaagacatgttcctcaatggatgcattctgagccattggatcccaaggccatagctgagaattctagacctatgaaagttgagaagagaaaagattgcacagccaaagtacttgcatccatgactttgggggctgcttttggagcattagcaaccttcacagtattgtatttatggaccatgtttggtaagaaacgtcctgtggtgccagaagagttggctatgaagtcacagcctgtggatttcgagtacaagaaagtcaaagtatttgtagataacaccatcaaagatggtaggcagtagagatgaatgtgtttgataatgatgaagaacaagaagaagaagatctattgtatgcttttgtgttgtaaatcagtctcttttttttctctcttttctttttggggtacttctggttttgttgtgttattattaacttgtgatatggcaattaactttgtcaaaatggtagcattagattttgttacatattatcccttatatggaagaagcacttggattccacttaggaaaatgaaattattgtagtacttaatcctctttttctctctctctgtgtgctggtttgaaaatacttgtgttgtgttgaatgtttattaactggggctacaaaccaaccaaattcatccttaattaaactcaatatttatgtaaggtcagaaatcatattgcaggatatggtaaatgaaatgggaggacatcacatgttactgacattcaaccttacaaatcttattcttaaggtgagtatgaattgtacttggattggagcccaagccagaaaaacaatacttggttcttggctttaccttttgcgtactcaaagtggcaagcatcatattatccaggggaaaaaatgggcatttaattaattaattaataatcatagagtactgaatagggcattgctgttccaacttccaactgcattttaatgtcattgctcaaaacaaaaatgaaagattgattggagcattatataattcttaatattcgtttaacctagtattctttaacattgcagtaagcaaggagagcacaaaatcaattccattagattatacataaaattataataatatacattttaactaggaattattacatagaaaatataaattgatattttatttacaaaaatacctccataaggtaaagacaacatttatacattttatgtaattttaattactaaa

SEQ ID NO: 117099 - DNA, 1183 bp, Cannabis sativa
aatatatattattcacataatattatatattaccacattttaatctacatattattatattaaaaataatataacattttttatatgattatttgtaacatattgttaaaagttacataaatataactaatgttataatatatatattttagtaattgtaaaaaataatatggaaaagtgaagcacgaattcaatcccgaatataaaaacgggttagcccatttaagaattatgggccggcagaagtaaaacacgatatgaatctgagcataacatgaaaatatcgggcttcctctttaaaaatattggcacaatcaactcatatttttttgtggcacgatacgaaactatttttttaaaaaacacagatatataaatcgggccaacatgacacgcacaaacttacaacattatgtgtgaatgatgatctagaatgaattataagttctttaatgattataaaatttataactcatcatctatattatcatcattcttaaattagtaaattgatttataattatatttgaatgtgattaaattgtctctataaaaatatagttgttggatatttagagggtacataaatgatataaagtagtatgagaagttttaaaccatttggagttattttgtaaaatactgaacaatagaatagagtaatcagttactatttaccaattttaagtgtttttctactccaagcaaaatatcgcataggaagaggcgacatatgccacctgctaaatttttagcaagcatttttgaatattttgtgaacgttgtgcttgattctaataagtcttataaaattccaaattgccaatttatgtccataaacgtctaacttaatattggtaacatccaagaggtttttggtcattcagattcaattgagagcaaaatctttataaatagaagtcatattatattgttcacttgtgacttgtacgactaagttgaaacacactgattgcatagcactagttgtggttagaactttgtaatgatatgctcatttttaaatattaagggcaactctaatgggcctctataaacttaaaaatagtgagatttcaacactaagggcatctccaatggagaaacttaaatttggtgttaaatcaacactaaaaaactactatttcaacactatcttctttttttttttcaattccaacca

SEQ ID NO: 117100 - DNA, 1184 bp, Cannabis sativa
tttttttttttttattttattaaagaagggtaaaaagaaaaatttatgtaatcaaaaaaattaaattgtacacataaattagtaggcatttttttaaaagagaatgttttattaagaattgatattgaaatttctcttttagagattgagctatttttaactcaattgatgtgagtactcaacaataaactttagcattttcttaatgtcaagcattaaacatgctcaatttatttgatataataatgattgcattcactgactgttagtaggaaactaacatgatttgagagaagacttttaggcaaaacaaagaaaaaattattacttaatcaatcatttttcacagttggcttccctaaattattaatatgttaaaatacataagttttaaaggagtttattatccttcaatatttaacgtaaaattttattttatttaatatatattataaataaacattttaatatttttctttggactatttaaatattatacaattacatatttattaattaaaaaaatctacaaagagtattgaataaaatatcaattaaaagactactgaaagagcgaaaaaaattataaaatatgtttaattctccactattcattaaattatactttctcaattttcctcataacatttacatcacaatcacatcactttttttttattgtatttatcaaaattatactttctcaattttataaacttaaacttttacattatacattaattttttttctacatataatttaaatattataatttttttttttataaatatcactacaaaaaattttattttaagtcacaacaaaacttgtgactaaaagcaaaaaaaattgtgaccaattataaattattattcttatattgtgactaaaaaacctgtggctaaagagtttggggtccgagtcttgaattaagtttttttaaaaataaattgaaatagggtcagatcagatccgataaaaaaaattaagtggggcgaagcgaatctaatccaagatccaataagtatccgaaggtttcagatcataggtgatccgtcaaatcggagctccaacccccgctttaactaaatggatctttttgacatgcctaggctaaatgtattagtcacaaaaattataatttattatgattaaatgtatttttagtcacaatacttgttgt

SEQ ID NO: 117101 - DNA, 1633 bp, Cannabis sativa
  modified_base (496)..(497): a, c, t, g, unknown or other
  modified_base (1605)..(1607): a, c, t, g, unknown or other
ccctctcattggagaagttgtggcttgtttgctagccatggagattgctacagcgaggcatcataattttgtgatggtggagagtgattcaaagacggttatcaagaatctgacaggtgctggcactaattggggaattgataactatgtgcgccaatgtaaataactctctaattttatgttatgttgtaatttttcatttatttctagatcttgtaatttcatggctcataatgttgccacatgggcttttgccaatgacttatctggtatggtttatatttctttgataccggcttctgtcctttgtaatgaccatgaggtctaactttatctatttatatgtgattcgcttgttcaaaaaataaggtttcattaatgacaatattttaaatttatgttatttttaccagtatatttaattatgtatagcatcaaattaaaaattatttatattattttttagggaaattatttcatatattatttttttaanntttttttttaaatttaaggtttgggtttctaaattggtttctccggtggtttttatatgggttgatatatgaattttagttgcgatttaggtttttccgttggttgcaataggggtttctatgtagaattatgtaaaaatgtaaaaaaaaaaacgtttgaagtgtaaaaatgaaaaggctcctattttttatcattgtaataataataataaagttaacgataaaattattacatttttaataaaatcaataattaaacattaaaatttgtatcacgttttgtaattattaattaaattataattctaaaaattaatgcaaatgtatttcaaatttattttttctactaaatatagcataatttccatatttttcacttatgcataaattgtatctaaatattactgtttagtgaaaaaataatttttgttgttactaaaaatgatatatttagtcacaaaaaatttatgttgtgactaaaaaattacatttagtatattttttttagtgatttaaaataaaatataatttgatttttaagaaaagtatttatttttcaaatttaattaatatgtatcaaaaataaataaaataaggaaatttgattttttcttcctctactacttaaattgttttcttccttttaccaattaacaagcaacacccattattgctataagaaataaatgaagcatcaataattacaagtgtattaaaattaatattctcaattataataatatatatagaatagtttttattttattttaatatttttttaaaaaaaagatattcgaaatacaaaagaaatagttctaaattttaatattgaatataaatctaattcaatcaagttctggttcttgatgccccatataatgtattttatttttaattcaaataaattatggtgttttgtataatgtgattcaagaacctcattattataatactgtactatgacttgatattgaaaatgctaggccactcaaagtgccaccaagtcaagaacaacaatacaattggaacacaaaacattctcacccttccaaaattgccaatgataacatttctaaggcaggtcaaatgtatttatatatatatatannnatatatatatttatatatatagagag

SEQ ID NO: 117102 - DNA, 960 bp, Cannabis sativa
tgtaaagggttttatttagggcacaaaacccaacaacactatctccatcttggttagatgcatgcacaaacttctctatcccgcattcactctggcattgcagcctcgtgccaccattgagccaaacgaagcttctttgcataggtacgaacctctttcatctccctctctttcttacttgtcgttcatgaagcgatttgattcgatcgccgttgtctcaaatctggccccctctctctcccgttctctccgtctcagtcatgcaaatttgttttttttttcaggatggtgtttcgagctacaataacaaaaaaaattgtagtttttgtatattgttgttatgcccatgtttcaatccataaatatgaacaagaaacatggatattattctcaaatattaaaagaggatcatgattacaacgactatcttgtctcgggagaagcaaccaacttcgtgctatgctacaatatcactaacacataagacgatgataaagtacacagtattgtgagataacaactttttggggtcatctcggagctaaccgggatcactagaagcatacacaaactaaaaataatgtcgctggaaatggtagataatcagttctttatgagcttacaacttattaacccacatattcatgagtatgttgaaagactaagagaagtacgaaaaatgtgacttatctcaggattcctaaaagctattcttaggagttgacataaaaggacacaacgaggacaaacatcctcactagtgtcgcagaataagaccagtcattcccaagcatctttgaagaatgcaagctctttggatatattatctcggcaacggaaactatatcttgataagaattgttatcctattttctgcaccttgatgtggcaatagaattgaatgacacgtgtgttggattttgtgccctaaataaaactcatttcaagatcggaagagcg

SEQ ID NO: 117103 - DNA, 2688 bp, Cannabis sativa
  modified_base (2580)..(2591): a, c, t, g, unknown or other
  modified_base (2638)..(2657): a, c, t, g, unknown or other
ccgggtcataggcactaaccctgcctctaccccaacggacatcaatttaaaactcagcaaagataaaggaactcctttaccagacccgactgtctatcgtagtctaattggcaagcttatatatcttaccattactagacccgacatttcttatgccgtaaaccaccttagccaattcttggcttgtcctcggcttcctcatttacatgccacaaattgaattttgcaatatctcaaaaagacaccctgtcagggattgtttttttctcctctgatgcagcccccaagcttactgcttatgcagaaactagtctatccccaacaaacgttcaagtttccttctttgctgatgctgactggggcagctgccaagatacttgtcgttcaatctcagggtattgcattttccttggcaaatctcttatttcatggaaacaaaaaaaaaaaacaacaggtagtttcccgctcttctactgaagctgagtatcgcgctatggcgaatgcaacctctgaactcacatggctttttgctttactaaaagactttggcgtctcccacaacacaccagccaacatgtattgcgataacactgctgcaatccactttagtgaaaattcagtttaccatgaatggacgaaacatgtggaaatagattgccacttcataagggaaaaagttcaacaaggatctctcaaacttctacatgtaccttcccaatagaacttagcagatatattcccctagccattactaccaaatcagttttctatcttagtctccaagatgggtgtacttaacatttacactccatcttgaggggggctattcggcttagatttattagtttggtatttctgttattctgttagttacaataccgttagaggttagttaagttggttgatattgtgagctgggtcctatctcttgtactgcctatataaggtttctcttgtatcaaatcttcaattcaatcaatacaattttctttttatagagtttttgctctgctattttctcctctgttttcttcttttctcataactactcatcagagattttaattttagctttaatgaaatgagaacaactgagagtgagagaaagagggttattatttgataggagcaaaggccactagagaagcaccgatctgcagaggcgggagggttttcgaggcgcaaaatccagagatagaacaaccagcatcggcaccggagcaatagaaacgagagattcttcgaggagagagggaggaagaactgggttggggtttctgaggacggcttacacctttttctaggaaaaaataaaggcaaaatctacacctatttcttaccatataattaaggattcatatctcacatgcattcacaatatcataaccatccattcacatacatatcacgtatatataaatgcataaaactcacacaacatttaatatatacaataatacatatttgttagttttgtggtactaaattaggtacgcaacggaatgataatgtataattatcattgtaccacatcctcatgatcatcatatgtatatacattaaatttaaaataaaatagacgaaaataaaatttacctcttgaagcccatcagggtatccttgtttcttttcgtaagttgtattctccgatgatgatgaagaactcacaccacagtcttccaaatcttccaccacacacaaggactagtgtggcctagtaagatataaattgtatatgatgtttttatttttttctcaagacatgagcaagaactcttttttggagtgatgataaaaaaaataatctgattaatcttttagggcttcctaaaaataaacgtatatatttttaggttaatacgatatgtataaattaaaaccaataaatattttattttaataaatattttaattcacatcaattattaaatcatatttaattattggaataaatatttataactaaatctgttatagatatttaggtttgaattaaatatctaataaccaaagggaatttctcgaccacttgagataatatctcaactacttagagagaatctctcaactactttgagagaatatcttaaccaaattaaatgtctataaccacctttcaaattaaattcaaataaatatttgaattaattaattaaactaaaataaaatgtagtggagacatcctacaatagagggtgcctatcacagtgtaggtaacgccacccttgtcttaacaagacaatgatagtgtcttttgtctgggcaaattttttcttttccttaatttatctaattaataaatttgtaaataaattatttattacgaaataaataataactattttgacaaattacaatagattttttcaaacatcaatatacaacttctatcccttcccttgacagtgtttcaaggtggtaatccgggaacttggacctataattctaagctccaacaatctagattatttattgaatctcatcaaccaaataatcctgtttatcaattccatgaatactccactataaatatagaactcttagtaattatattattatattgttgggttttgtgccctnnnnnnnnnnnntttcaatataatcagatttactaactaataaagatcagaaataacannnnnnnnnnnnnnnnnnnnatgatttattttatgattatatttaatgtat

SEQ ID NO: 117104 - DNA, 930 bp, Cannabis sativa
gataacaaactcattttatcttgagctttaatccagtgatcaagagtagtccatgatgaggagacaacctgagaaggagaagaagcttttttgtcccaaactaaagtattttttgccttccaaagtgaccaacacagcatcccaacatgacaagaaatgtcatcatcgaaaccaatgaacacaagatgaagaaagtgcccaacagttccaacaaagttaccgtaaggaaccaaatcagctttttgccaacaacttaacgcaaaaggacagctgagtaaaatatgcgtagcagattcagcagtatgatggcaaacagggcacatgggagaaacacttacaccttttgaactgagttgaagacaggttgggagcacatcagaaactgcacgccacatgaaattcttcactttgggtggtatcttgagatgccagagtttccgccaaaaaccgaaattgttatctccaggtctgttgctcttctgagtttgaagcaatttgtaagccgatttgacagaaaaatagccggttttttcaccaatccaagcccagtgatcatcaatagcagagaagctaagaggaatgctcaatattaaagttgaatccctaacattaaacatgtctcgaacaagagagtcatcccagcttctatcatgaacatggaaaagagaatcgaccgtatgatgattgaggcccagagtagtggaggtcacaaaagggttatcattatcagaaagccaaggatgagcaagaatacttgtagtcgtacctggaccaataattcttctaacacctgagcgaaccaaatgttgagcactccaaatgctgcgccaaacaaagttaggattactcccaagttcagttgaaaggaagtctgtgttggaattaattttaccaggatcttagatatactcacaagtatgttgatttaac

SEQ ID NO: 117105 - DNA, 1032 bp, Cannabis sativa
atacgacttaatacggcgttccaaacgagccctaaaatacatatatatatatatatatattactctactacatcatccatttttaacgatgcctaaagcacccacatagccgcaagttatatgggccgataaaaaaggagtttagttaaatttaaactaacaggaaacgttattcttatggcagtgaatttgattctctaaagactaaaatcattggtacctgtgaacttgtgatcaacttcacactttgctgctgccatttcttggttgagttcttgatgtttcgatcttcaatcgaacaattcttgatcactctaattcgaaccgtgctttgatactatttgttgtgattattcaatcacacaatggaggattaaaaacatagaacatcaaacaagaactatcaaccaaaagtaataaaacagaattgtagaacaactaagatttcaaccaagaaaaacaaagaggggtaaggaacaaattgcaaaaaaaatggttcagccttttattgcacctcttgatccaattaacttgagagttaagttacaagaacaatggtagcatctcagagcaatgagcactttcccttacaaaattcaatattctatactaccaaaactctaagctaaaggaatgaatagctgaagaataataggggttagttattacaattgatcgattagctttatataggactaaccacctaactaactatttgttgtaacaaatgaagtggtaccatgtatacaagacttattgattagaccacaaactaacaattcaaaaataaaattaaattcacattatcttaaattaacgtagtgcaagctgcatttactagctagtattcatttttcttatttttaaattcacaatatatataaattataaaatattatatatatatatatatatataaatatattatctattagattaggttagcaattggatccaaaatattagaggtttgggtcattaaactacaaaaaactactatttttagtgacaacataatttttttgtgactaa

SEQ ID NO: 117106 - DNA, 1920 bp, Cannabis sativa
tgatacatgtcaaagtttagaggagaaaaatcctaattaaccattaaatatatataaatatgttaatcgcaaaagaagtaggagttagcacaataagggctcgtggtacgccgtattgtattgtattgaattgtgttgtgttgtattatattgtattactattatttaatacaatgcaatgtttggtactaacttatattaataaattgtgtaaagttataatatatttttagactcgaccccaataccaactatagggtcgggtctaggtccgggtcctgggtccgagtcctaggtccgagttcagatcggggttcgggtcccgggtccgggttcgggtcccgggtccgattcttgggtccaagtctgggtcctaggtggtgggtcccgggtccaggttcgggtcggcgccctgggttccaatcccagtctgggtctgggtctgagtcttgagtttggtctgggttcgggtcggagattggtgttgaccccgaatcttttgtaaatattataatacaagctaatacagaccatttgttatgtattaaataatacaatatacattgtattaaaaaatttagtcgtaataattaatacaatacattattttatctaaatataatattatttattatttaatacaataaaactatacgtatcaccaaaggaggcctaattgtacatcccattacacactctcattgcaattggtcactacaataaataaatcaccaagcccaaataagtcgatccaaaaaaaaaaaaaaaaatctacaaaatacatccacgaccataataatgaaattattaataattagtactattattcctttccacattaaaaaaaaaagtataaaattgatgaaacgtccctcataagttaataacttcataattcataaaactcaatactgatcactagaaatggatgagaccaccaccgcaatcatggcagcactagcgacactcccagctcctcaactctcaaatctcactcgctctatcttctctgaaacccttctccagcgccgtcgtctcgccgccatactctcatcaccaactcttttctctttaaccctccaccgccttcatcacctctctctccaagacaagactctcctcatcgctcgctatctcctctcttctctccgccacctcaccctcaaaaccactaataacaatactttttctctcagaacaagagactacgacgccgttttgctactcctccacttatgcgaagtacgccagcacaacccggaagcgctcgaaacgttgccgttccaccactggcgactaaccctccgcggtctctacaccgagactctcttgtcgtttggctctgtaggcattggagtccacaacgggtcgttgttggttccttacatagaaatggttgcaaggtgtttgaggttcgtcgttatcggtagcggtggtgacgtggcagcctccgtgtccgcggttgtggcgctgccttctgtgacggtggtcggtggtggcgttgagtgtgtgatatgtaaggaggagatgagagaaaggagagaagtgtgtgagctgccgtgtcgacacgtgtatcattggaagtgtatccttccttggtttaagatgaggaacacgtgtccttgctgtaggtttcagcttcctaccgatgatctatttggggagatccaacggctgtggagcctcctcctcaagatgagcgggactggtttcaaggaatgatttggttcggcttgactttattacacgtggcaaaatcagaacgggcgtagatagttcgatgagatcaatggtcttaaattgaatgacttgatattgacacgtatggcttaggtgtaggcaactgcaactattggaagattttttttttaattattgtttatacatatataatttttaaaaaataaaaataataaataa

SEQ ID NO: 117107 - DNA, 2526 bp, Cannabis sativa
tgattacatttataccactttgacaaagctgcctgacttctaattcgtagttcttagagcagaggcagttgaaatgggcaatgcattttgcgctatgtcacctactgagacccaaggacttaggggaaatcttttcactgaggatgctaaaaatgcagaagaagtcgctgatggtgctgctagcaaggtcgcggatgatcccaacactccagccccttagtttttcctaggtttctattatattgccaaacttttaccttttgttagcggcacttgggtacttgcattctatacttcaaacaacttatttaatttttgtttatcgagcatcacatcctttccaggatatttccttttgcatacttatttagcggtacatggatactcgcattatttaagctgcaatttttattactacttacaaaagtttccatgaatctactcacaacttggtgtgataacttagcatataaatacttgcgaataaaaattgttgaagaggtttttgaaactttgaatattttattaaataatcattagtacaatattaacggttataccccctacacttagtacatttaatgaaataaattgactaagtaaaaatacattcgagtactattgatgataatagtttaaacttattccaagttcttttgacggctgtactgtcgagctcggataatcggtaagtcacattattgattttctcggcaattaggtacggtccttctcagttatcgccaaatacaccgtgtgctgagttatgtgtgttaggcataaccttgcacaacactagatctcctactcccaggttctgctctttaactttcgagttgaagtagcgagctgttcattgttgataggctgcatttttcaaatgagcttgatcgcatttttcctctagaaaattgagttgtaacaactgaccttctgtattgttgtcaacgttgaagacatctcttcttaaagatcctgctccaacttcgactggtaccatggcttcgtacccataagaaagtgagaaaggggtttaaccgatcgttgagcgaggagttgtattatacgaccataaaacttgtggaagttcttctggccatgtacctttcttttcctcgagctttccttttatggtatgcttgataatgttgttgactgcctctgtttgtccattacattaaggatatgcgaccgctgaaaaagctttttgaatccccaagtcataacaaaattgacacatctccttacaatcgaattgcttaccattgttagaaattagtttgtatggaatgccaaacctgcagatgatagcactatagacaaactcacgtaattttgaggttgttattattgcaagaggcttggcttcggcccatttcgttaagtagtccacatcaactacaacatactttactcctacctttcctttcggcagttcactaattaaatctatgccctaaactgaaaatgggcaagggctagtgatagaattcaattggctaggtggcctatttatgtagatcattatttgctgacacttgtcgcatctcctggcaaagccgttgcatctgcccacaatgtcgaccagtaatactcttgcctcataatttttaaagcaagggaattgcctccgacgtggttgttgtaaatcccaccatgtacttctcggagtttatagttgcattcatccccatcaataaattttagcaacaactaactaaaacttctgttatatagcttgttctcataaatgacatcctaggcggctcgatatcgtagtttttagtgccaaccttatcgttaaggagtactcctgattttaagttgttaacaattgggggcatccaagtgaccttcttgatcacatcgacctccatcatttcatttcgatgaatcgtaggatgggttaagacatcaacatgaattatatcgagtaattctacttctctcgttgaggccaatcgggccaaggcatctgcatgagaattgtaagcacgaggtattctactaacaattatctttttaaatttatgtaacaactcacaagtgtaggaaaggtatttgaccaaacacccccctttggcaagatattctctgttaacttggcaaattacgatttgtaagtcgctgaacgcttcgaggtatttgactttcatcttgagagcgagctttaaccctgcaattaaagcttcatatttggcttcgttatttgatgcaagaaattcgaacctcagggcagcgtgcaccttgaatttgttggggctgatgagaattattccaccatttgatcctttactattggatgccccatcaacatacaaagtccaacctttgttcggtggtacatcggtgtcgactggctcttctgtaattatttccacctcgtcatttgggaactcaagaatgaaatcagtaagggcatatcccttgattgtcgatcttggtctggacctaacgtcgaactgactaagttccactgaccacttgagtaaccttcctgacgcttctagttttgctaacacttgt

SEQ ID NO: 117108 - DNA, 1225 bp, Cannabis sativa
gagacccaaacatggacacggactcagacccagaccgggaccaggacccgagacccaaacatggacacggactcagacccagacccgaacctacacccagacttgggcccagacctaaacccagacaaacccagaccagggccttgacccagactacccagactcggacccagacccggacccgaacccaaactcaaacataaaccaagtctaggactcggactcacacccaaacctaaactcggaccgaaacccaagaaccgaacccgttccaagactcaaaccaagactcaaactcagacctagagccaagcctagacttaggacccaaaaccaaagccgaaaccagatctagaactagaaccagacccaaacccaaacctagactcagaccaagacttaaacctacacccttacccgaacctagatccagactcggagttggatctgaacaaggactcagacctagagcgagacccagacctggaccgggacccagatccagactgatacctagatccgaacaaggacccagacttggatcgggaaccagacctgaacccagacctagacccgaacctaaatccaaactaagacctagacacaaacccagaccctaacccggacccagacttaaactcgaatttggaccaagacccaaacttagactgaacctaaacccagacgcgaacccaaacctacactcgaacccagacccaaacaagaatcggggacccgaactctgaccttggaattgagactcgacctcggacatagtcccaggacctggaccggactaggacccaagccgaaactgaaccaagacccaagatccagattcggatgtgaatttggagctcgaaccggggacttggggcttggacccaacccatagtaggtgcctagatcttgaaccgagaccagaactaaactcaaaccatgaccttgatcagacccggacctagagacgtccgggtcttaagaaccggtccaaattctaggtctcgtgtcttggtcagggtttaggtgtgggtcctcaatccaggtctgagtcctgggtttgggtctagctccaagtctaagttcgggtcctagttagggtttgggtcttaagtccaggtttgaatttgtattcgggtctcggtcccgctctgggtttgggtttagatcatagtctaggtctgggtccgagtttgagtcccaaatttagacaccgactatgggt

SEQ ID NO: 117109 - DNA, 2223 bp, Cannabis sativa
tatttcaaattctcactatattaggagctccaaataaataatatttattagtggcgcaattatttattatatagttattaagtggaaattagagttattaccctaagtatactatgtatatacatgcgataatttattatgtgaatgcatgtgaagagttatgcgagtaaggcataacaaggttagactcggtaactaaaactgagattgaaatatcttaaaaaatataattatgtttaattggacatatttcattaaatgtgtagttatatgaatattagagtaagattataatcctactaaatccaattatgagataattagtaacttttgaaaaaagaattaaatcaacataatttattaattaccaaaattttattagaacatatgggtattatatataccattttttaaataaaatatttttgagctcgacgattgtaaaaactcgattgatctgtcaaagatatcatgacaatgatagaatgagttttggttgtgctaaaatatttttagtgaacttctgagttggcaagatatcttggggtaattttttatgaccaaattacccttggttggaaattatttaagggctacactaggggcacaatagtctttctattagttatttgaggattttgtttttagttgatcctagcagattctaggctgaaacaagaataaaattaagagatttgttatattaattaactaagataagtttgattttatttactttaaaaaataaagactttgtcatcatcttcttctctctttatctctctcttcgcagcccttagaacccagcacaactatggcaaaaccaccctcaatttcaatcttttccttgctataaataaactctaggagctgttcaacttgaagtaagcccctttttccttgttcttggtaatttctaggttctaaaattgagttattttgggaattttatatgatttcaagtctataggttttggtaagtttagagtttgctcttaggttcaaattaaggttgtttatgctttaatttcaaattttattggctggtatacttttgtttgggtgagttgagctcaagaactcaagaactcacacaacaatggtgagtttgcattcttgaagtatttttgtggtttgaatagttgaatataatatttgtatgttgataaactattttggaaggtttcattcggtttggaggagttccggaggagtttgacgtgaaaaactcaaagtagggctattctgcattaaaaaatggcttactatttttacagggcaaaacccagaaaaatggtggtccatttttagaaaatgatggaccgtcttggggtgtttctagcagttaggttttgtgttttatcgataggatttgtctgatttacatttagatcttagaacaagattgattaagttatttaccaaatttttgttgtcgtgacatagggcccaagatcgtcgagcatcactccacttaggttggcccgcacatctgactttggacttgaggtaaaaaagtgaactgtaccacatagcatgttaaaattatgatatgataattatcgttcatacgaaacaaggcaatgatagtgacattagtaactcgttggtcataagggttaaggatactttataaagtatttcaattggcttatcttatttgacaaataattgattactagcatttgattatattgtgaatatttattgaagttatatgtttaaatctatgttcattgttgcttagaattttatgttatatatgatatttgtgtttttcttgcttttcttgctgagtctttgtgactcacaggtgcttagtggtgcaggtaagggaaatgagaaagtagatcagccatgagtcagaagtgtcctagtgaatgtacatatcagcctctttgtcttttgtgctcagttgacaagatccatcttttgtatattttgaatatgtaacaatattttttaatgaccagtataatggccttttagttaaaagtttgtaaccaagggaatccctgaatccagtaatattttaaaaaagagtttaacttatactttaaataattttctaaagttttaattaaatcaattttttttcttaaaccgttaatttattattatacactaatttataaaagtacacacacgtgacactgggcgttatagagatatgttgggctttgtgccctaaataaaattctatttcaatgtaatcttttctat

SEQ ID NO: 117110 - DNA, 1179 bp, Cannabis sativa
  modified_base (43)..(54): a, c, t, g, unknown or other
aaggaaagaccattccaatacaagatttgaaaaaatttaatannnnnnnnnnnnaatttttttatgcattttaaattatattcaattccattcttattccaatactcatttctatttctatatttagtgttagcatatattaattcattaatggtgtgatatgtttttgatagattgagacagaaaatgaaacaaaattttggagattttaatccaatttttttggattaattattacaatttaattattaaagtttttaattagaacaattatattattattttctttttaaagtaaataagtgctaaaaaatgcttaaaattttgttctttatctttcaccatttgaatttgtcagtaataaatttggctgctaaacttagaagtataaaattagtataaactttaacttaattttaacatttagataacttttatctaatattttttttttgaataaaaagtactttttaaattatgtatatcatttaaaaaaagattttttgtaagtaaattaagaattatataaattattttaattttacaaataaattttttctcaaaggactttaaaattaaaaaaatgacaatttttttttaattctaaaagatttatagaaactaaatcaagtcattatcacttgcctcctactttcttcatcatcaatctcctattcattctacgtgccactgcctcttctcatctgctacccacaattgcagatcggggacaacttagctaaatttattcaattacttcatgctttagagcaacaagaaattttctttcactatattgttattgttgatcaatcacttccaatcagccaccacactccacatcgctctaaaatatgtgaatggactgagaggagatatttacttgaactagtgcgatattttctcctggtgaactggtgcaatattttctccctcctggtgcgattttttttctctctcaagtacgtcgaagaacctgctgcgatattggaacgtttctgtttgtttccgttagttttttgtttcacttattaattccccttttattagtttaattccatttagtgtttttatggggttagaattataaggagtactttctttatttaattttatatattgtgatcgtgtttatgtgttggaactaattaagtttccattagtcttgtcttttgacat

SEQ ID NO: 117111 - DNA, 2904 bp, Cannabis sativa
aaaaaaaaaaaaaaaaattgggcgttagaaaaatgggggccttgtgcaatggtccaagctgcccaatgcttgggccggccctgcacgaaggttttccaagggcggtttcctcttgtaacagctgaagttatggggattcgtgaggctctaagttggatcaaggtgcgataatggacgaatgtgacacttgaaatttcagtttcactacaagaattaactccattagcggcggaatcattagctagcgggggaccttaccatgcaaaaaaatatttaagttaatttgtgtcattaccatgcaaacgaggatttgtttatgaagccatgtttttgacaccatgaagaattataagcttgtgatacaggtgttatacaatttggacatgcaatatataataccattcgtcttttttcacaaatgtcaacaattgtagctttaacaataaatctcctgttgaaaatataattaagttaaagaaatgtatttagagcttaaaattgtaatgagtcgaaagaaatttaaaaaatcaactgtgaatggccttacctgaagaagctcaaccaatgtcgtcccctatttatttcttttcttcattttgagaattttcggttgtgatgataaattggacaaatttgattgtttttgcatcttcttaaaatctataaaagatataatatataagtgaagatttgatttgatataaaggttacaaagacaataatattattttttttttttagagtaaatagcaatttaagtacctaatgttttaaatttgtaactggtataaatttaatgtttactttttagcgggtgaagaatccaatatctctaaaagtgttatcctgtccatttttgtttgaataatctctatcactcacttaaactcgacacttatagggcccagactaatagaccttttaatattttaaaaaaagaaaaaattaagttatgaattaagagcattccaattagtttttctactctcccttaaaatacatcactaaattctacttttttatttttttttattttttttattttaccttaatttttttacattacaccatacataaattactctattttttttttctctatatcatcaaaataatatattttaaaagggatattcggttcaagtttgggtcccaagttccaaattgggtccagatccaagtcccgatctaggtccaagtttaggttccagtgtcggtctagggctagatcccgattcgggtccttatcctggtctcagaccactctattgtcttgggatttaattagttaccaaagctttcatttagcggttctaccaagtagattttattgcatacgaccaaaattaaagaaaaaaaaattgatccacaagttaaacctaaagaagcctcgtttttttataaaaatgagagacaaaatgagtaatggagattggagagtttgaaatagttaatataatgatctttggatgaattaatttttctttcattatgtttatttattattttatttcttttaaaattggctgatcataatgattaatgaatacaatcctagctaattatacaaaaaatatatttgttaaaaaagatatatgtatataaattatatattttatgagtaaaattaataatatatgaaactctttgaacatactgcaataaaaaaaaatagctgcatattattggatcacgaattaaataattattatttatatattctatttttaattataaatctacaaattgcaatggaaaaattacattagtttttctttaattaaataaataaaagttttttaaaagaaaaatatatatataaaaaagtctttattaaaaaaatgaagtagttgattacatttttatatctatctttatattctcaatttccatatgcaaaatgttaggcaataaaattttgaatctaaaatgtaagtttgatttcattgtaactagacaaaacatggatgatacattttgcaagtcttttcttcttcttttaaagtaaatagaaatttcaaaccaacaaaataaaataaaatttaaagatcaaacaattaaaaaaaaattaccagcaaaaatgctaccagagcaattgactaagatatcattcttagcaaaccttatcctagtaatagagtccctttaatgattcgaaataattaatttatgtaaaatcagcttattagactaaactgtcattacattttttttgcaaaatagcatattatatattaacatattgctagtaagagtaggtttcagcaagcaatttataataaaaggaagtaaaaacaaagcttttgtatttgcatgcagcttatacattcaataactgctttctatttcatatgtttggattataggtatctaattatcaaaacaaaatgcccaaagaaagtttaaatgtcaaaagcaacatgccaaacaatgattaaaaaaagaacaacgtacgtacgtagatgcagtgttttgaaaaacatggtttcttggaatcaacattatgctattcaccttctaattgtacactccatgcggtaatagccaatgaatctcttgcaatccgtgcatacccacctcttccccattctggtccccaagaactcctcacgatccagtagggcttttcttcattataaacgtggttttctaatcgcccatttcgcatcttttgtatctgatggattattatttccttcccgtacccaaccaaaagtagcccatgccctcgacattgtatttcttcataattcggagtgtaaatgttccagtctccaaccatagacccaatagatttgtcaaattttgccgcaataatcattggtcgattcctcagagttgtaatgatattttcttgattcacatttgagtactggtggatagtgtacaacttctgaaactgaa

SEQ ID NO: 117112 - DNA, 1309 bp, Cannabis sativa
gcaaatccaacataagcctaacacctcaacacgtatatagatccaataacacattttagccatatatatttacacataaatatacatacatatgtactgtttttaggggggcctatagatgtatataccttaaggcttccgctacaagcacaaggcgtctccaaatccttgatgctatcctcctcctggcatatacgacattccgctgattgaatcagaggttcctcctcacccaaatcttcatcttgctccaacattttctcctccgtcacggaactagatggcgcagctgcgttcgagccaggtccgtcaacagcagcagcaccaccagccgacccagaaacaatctcagacgagtccagcgccaccggttgcaaagctccaggcctaatcagacggtcaacgaacagcaccaggtggtcgctcattgctttatgaaaccccgaaaatccctaaatcaccgcattgaacattcagaaacccaaaattgaccaaacaaaaacaaaaccctaaaatagaagacgagaaaggaaacaaaattccccaatttaagcccttgaaaatctggatcacgctggacagagcagcggatcagagatttcccgagaaaatcagagaagaaaatgaaaattaaatataaggcaacgtaaaacctaaccttgaaatcggctacgaaagcgcgtaaattactgagcgagcaaatcggagaacgaaagagagaaagtttgtcttcttttttgtttgttgttttggctgtatatttagatttttcctttgattttaagacagaaaagtgggttttgtgctatttatagcggtcgctgtttgaattcatctaattctaacttctaacttaacaaagactccaggcaaaggggtttggtggcttattcccaacggcattgagggtaatttcgtcaattcatttatatttatataatgccgcataaactgactgaattattttttttaaaaaaattcaattataaacggtcacctatatcctattataggtgacagttttaaactgtcggaaagtccacactaacgacggttttcaaccgccgcctatttgaccgttttgcgacagttatataggcgacggttataaaaactgacggaaatactttaaacgtttgtttaaaaacgtcgggaaaaactatttttgtagtagcactactacaaaggtcagaattcgcgactgttctaaaaatacttttttagggggaccttcgctaaaaaaattaagtaactatttaaaaccatcgaaaaaaattagtattcccgacagtttataacagtaattaca

SEQ ID NO: 117113 - DNA, 2115 bp, Cannabis sativa
cccccggggcctgcatcggctggttagccaatgattgtatatcctccattgagaggactctgcctccacaccaatctttgggcagcggggcctagaagtatgaccgtggggcctacttagccattggcagaggattgctcatgctacccgtagttacattggtagtactctgcccatcatcgatggggagctccaagagcttgaggatgaggagctggagtgtctgacgtccagcggtctctaggacatgactttgataagttgcatatttgattttactcaagttgttgcactaataagggttgatcaaccaactatggaacactgcaaggttggccagccaaggttgtattactgagaagctagctggcaagaagtgcaccactcaggggctagtcggccaggtcttcttctgccactagctcgattttttcttttgatttcaggccatattaaagttcaaccttacccatggcagggccaagagctccttgggcgcttaccgagagaagcttaaggctaaggagactaagctttaggcagagagggatgcccatacctagacagactgatctgcaaaagtctcaggacttgatcaatggtctgaagcacttgcttagtatcaggaaccaagaaaataccatccttgctgctaaggcctccaggttggaggtggagcttgggaagaaggaccaagcgttgcaacttgctcttgatggccaacaagccatcaaggacaagtatgttggcttgtcctctgaggtcttgtatgacgtttatctgtgtaaccccaaggttgacctctcctacatgggatcttctttccttgagagcaaaatgcagatagatcgggttggctagactgtcttccaacctatggaggaggtggtcggccaagctactgattacatggtcggccagcctgcagaggctatggctggccagctccttggcgttccagacgttgcagcttctggctcgactctacctgcacctgcacatgagtagacacattttattagtatcttacatttatgacttattttatattagtagacatattcagtttcatgttcgtatacgacttgttggccttttacttttgaacattatttattttcggccttagggctttcatgttcttgcttttggcctagaggcactctgttttttaagactactattatttagccttaaagccttttattatggatatgtgattgaccaggcagtctttaatcctggctatcttcttacgctttgacatgtaagtatctgaatatacttttttatgccaagtgaagtatgcttgcattgacatagcggcaggttttatgcttatactaagctttaaatttctctgcataagttctctatgctagttcgatgccttgtatgttgtgggtgccccccaagtgagcacgcaaacttacagtctcttggtcacttgcaattcagcaagtttcatagaccttgcctgggacttttcttggagggttaccgaatgtacgcatgtgaactgaaaaaagaataactttaagaagttgtcttattagcaagtggtttaggcacaatatatttgaactgaaacaccatttttattcatcaattggtctttattgttgtttaacttacattaattgattctacaagcttacaaaatagaaagtttgcttctagaagtcaagtggctacccctacctgacatgccaggcagagggcacttcagcgatggagaggccagactgaagagggatgggtacttagctctttttaaactaactttttttaatgagttagtaaaacttctactgaagagtagcgttcttacaagctggtcactggtaggagaatcagctccatgttctcgttgtacctaccaagcttgtaggctcccttacttgttatctctgtaacttggtagggggcttcctagttaggtccaaacacctacttcgggatctttggtgttcaagaacactcttcggagcactaagtctcctatgaatatttcctttccttgacttatttattgaagtgtcttgccaccttttattggtaggcatgcagatttaggttggctttgttggaaattattttaccagggtcttagat

SEQ ID NO: 117114 - DNA, 798 bp, Cannabis sativa
tgttctgtattaataacacagaaaagatgaagaaagggatccctcttacagaagaagacaggatcccatggctcgaaacacttcgagatgtcttaaggaaaagtttagaagataagaaaagcctgattctcgggtgttcagcactgcaaaggcggtacagggaaattcttcgatcagccgatccaaactatgcaccacaaagctatggcacaagcaatattgtgaagtttgttttgttggatgcttcggctgaggtgctcgaggctcggttggagaagagagctgcagaaggaaagcattttatggcgtctacccttttgagatcgcagttggagttgcttcaaattgatgattccgaaaatatattgaaggtagatgccactcttgctcctcaaattattgttgatactattcaaacattgatgattaggggatgatgaacacattaagcttagaaaaatagctgtaaaagatttatattagaactgtgtttgatgttaattatgaatagtgaattgaacaaaaatcttcattttattttattcaaattcaaatttgttttttgatatgtcaagagacagaacaatatgctttctcttacgtttatatatacttttttagtccaagtcttgagtcaaacttatttattttatcattttgacaaggagaactaatatgggacaagcatatatacatttatgaatattttcactttgaccatttaaggagcaataacccaccaagaaaatgtatatcaatatatgtgcttaattacatatatacatttacaactctctc

SEQ ID NO: 117115 - DNA, 2805 bp, Cannabis sativa
  modified_base (2706)..(2711): a, c, t, g, unknown or other
ttccgcatttaattaatcacttaattaaataattaaactggaaacattaaaatacggaatttcaaaagctattattttcaaacaaaaatagattttctatcgctttataattataacttctaagcattaaatgtgaaacaatttaatgtaaatacataaaatcaaaaaaatataattttcaataaaatgtagaaccaagcattaataatttttaactataaaaaatacgtgacattaaagatgaaaaaattattttaataagcgaaaatccataagcatatgtcgtaatgagaatcaaaataaaataattacttaataaaataaactagttttcatcgagaacttagaaatccataaaaaaaacaactaagtgttgttaaacttagagcgttttcattaaatttttctatttgaaactgtcttgaattgtaaaaatttaagtgtctctttataagaaggtaaaaggacaaatgtataattaaaacttattgcaaattgtatcgggtaaaaatacaattactcaatagttaaattcggacttgccacatgatacatttggattggttgtatgaaaacacgtggcgaatggagagaaagacacgtggaatgtgactgaaacatgtttgggctgaaggggcacggacagagagaagccccactctcgaggctgggcggtggacgaaaagagtggcccacgtgggctggtgtgcgtcacgcgcgcgtgagaggaatggggacaaccccttgttgttgcctgcgcagacgaaaaggacaatgccacgtggtgctcttgtctcctggaaaaagaatttgggccctttttgggctgttagactcaaaatggtcttcaaaagccacttcttcaatgctttggaccatcttttatcatcttttcaattctctttttactcttttctcgtatgttatttttttaatcaaacacaaataaaattaaatccaaacaatatatttttaatataaaatatatcacaattattttaataaaaatatttattaaaaaattaatttgtaattctttttataaaaataatatattttcttaactttttttttcttatcattcaaaaaatactaattattatttataaacaaagataaaattaagtcaaaataaaatattttcaacaaacaactatataaaattaattttatgacaatattatttaaatttaattaattttatatttttacactattaaatatataatattttgacatttaacactttataataggcacattaagagagtttcactatattatgtttttgtttcaaaaaaaattaatgtgttgctatatcaaatttattttctttttaaccaaaaaatccacttcgtatgtgtaacctcctgcaattgcttctcccctctccgatcccccactttgcaaccatgaactccatcatttatgagtttactattggcatctcccttctcaatatccacgatatataccatctactttcttctttctgtaagcactttcaacctatttccatggagcgtgttcttaaaaatatgtcatcacagatcacccctactgataaagaaaaggttgtccatcaaattggagaatctagcaactctacaattcccacaatctctaaatggagcgtctttgctttcgttctcacccacaaaaaaatcaaccctggcgcattcatactccaaatggcagagatttggtccaagcgttttcccgtcaccatcactgatcgcaaaggccactttcttgttcaatttggatgcgctggagacatgcaaaggatcatctatcatcaaccttggcactttaacaaccaacctattatttttgctgctattactaatttaaaaattcctattgaatctaactttactgatatccctctttgggttcaggttcatggcttacctttccttagtaaagcagatccttggcggaaaaaattgggtctgatatgggtgaattgttggaggtagatgatgctctcttcttgagggatgggaccgtttatgagaatttgggtcgacctcaatgccactcaggccctcctccgtggcacttttctcaaatttactaacacccctgacagtttgtgggtgaattttaaatatgagaaattgcctgacttttgccacaaatgtgggagattgggacatacctatttgagttgccttcttttcttagaaaccgaggatgaaggtggtgatatctctcttccttatggggcctgggtaaaaggtgatcctttaccaagacctggagccggtcgatctctaagagaaagcagagctaataatgtggtgtggcctttgcttactcgttttgtctgaaacaccatcaaccaatttttccaaccttcacctataacctccccctgcttttcctaaccaacacaaacacattctcaacactcccatagccgcacttgaattgcctactaattctaccatccactccacacctacacaaccttttcccacaaccatcaacccccttacatctcagtaccttcatcctctaatcctgcaattaatacagcctctaacataccagatcactctactctcttaacagaccaacctgccctcaccaactcttttaaaagacagaccattcacatttgagactccctacgtctatccttaaacgctgccatttgtagcttaacgatggcaaccatattgttgggttttatgcccnnnnnnaaactctatttcaatgtaatccattttattcaacatcaataaagaaacagaagtatttttcattcatttgcgtatgttttggttcatcttatca

SEQ ID NO: 117116 - DNA, 1582 bp, Cannabis sativa
taatactgaaaatattaatcagaatcaattaaactatataaatactatttattcaaatcttctatttaagagaatttcttctctcttaagaaacacagctcctaagaatacacaacagccataaaaagcatttacacacaagaaaattaatatataattttcattaaatatataaaataaattaataatattttgaaaactaaattgaccaaaaaattctttacatttagacatagttatctaagaatttcatcaatatggggtaggttttgtggttcgaaatgcacaaggtatgcttttagaaggtggtaccaaactttttaatggttctgttacacctgaatttgttgaagcattggaggtcaggaaaactttgagttggatccagaagaatcagccacaccatgatatccttgaaaccgattgtttatttgtcatacatgccttgcatagttcagttgttataatttctatgtttggtcaaatggttaatgtttgtacggctttattgaaaattaagaaatatttcggtcttttctattaaacgatcagctaataaggtgactcataattttgctagagcttccttattttatcctgattgtatttttaaattcgagtttgttccaattgatttgttactcagtttggtagttgagtttggtggttaataaaatgataattttctattaaaaaaagaatttcatcaatgatatctataggacgtgcgctattttttggtggggtggttctgatgttagaagatacattggtgcacttaggttcatctttgtaaacataaaaatgagggaggaatggggtttcataaccttcatctttttaatcaagctttgcttgccaagctagcagggcgcatttataattttcaaacaatgaactaaaagagaagatatacagacaatataaatatcttttgcaaattaatagtggtgaacatatatgcaagcttaagaagtatacctatagattaaaataaacatcttacaaatgatatttttattacgttatcttttctttaagtttgaaaagagcattatggaaataattatataccagaaattcagtaagagtaatatttattttatatataaataatatattacttgcaagtaatgataaaatattcagttatccctatgtaatttttggttgtacaactaaaattattcaataaaactctaatttgaatattttctcacatttacgtgcaccttaattttatttgagaaaattatcgtaagaggatcataataaacataaggtttaaggcttattcgcttaagtacattgccatacaaagtacatggttatataataaacatatcataatacatagaagataatactcgacatataacgaggacctattgctacgattcatatggttattatgtaatgaggaacgttgggtttaagagataaatttaaataattatatacgtgtatataatgcaatgaatattttataggctaattagcaattttctccccaaactttgatatataccaaatcatgccccctgaacttttttagctgttaaaaattcccctgaactattga

SEQ ID NO: 117117 - DNA, 1683 bp, Cannabis sativa
tcctggtaaaataaattccaaaaggaagtatggtaggggtcgtcagaacttgttagtcatgacagaggtcgagagttaatgaccaagatggttcaaattgggatagacatagaatgcttcagttgctacttgtgtgtgccaagaaggtcgcacatggagacaaagggggtaaatgtcgcgatcattagaggacagtcgtacttggaggtatttgcatgtgatctttatttgatccagacaagaagcaccgagacacttaagtgggaaaggttggctcgtagatatagagggcgcaagtcacgctaaggcattaacataaatgttgagttgtggaatgaaagcatcaagaaggctagcaaggccaacaagaagattgagcacaagtgttaagatggaactagagcttgaacggaggccagaggattgtaccagtgagacttagtaatcatgtgaccctacaaaggtcaagaagggtgctagagtttgtgtgaaggccaaaaggctgcatcattggagcttgatactttaggggagcccaaaggggcgtgatgctagtgcaaattagatggttggttgtgtggataaagcgcgcatataggaattgaaagaggtgctacataaagtagttgactcaagagacacatcttgtaggatacacttctaattacgcgatgtgcatgaagagttggggcatacaggcattcgcgtgtttgggccaatttccatcaagtggatggtgcaccatggagttggcctgtgaatttttcaaagacacttgtccagagagacttggcttcaatggaagagtgttctgtaggtgtcataaaataaaatattatttaaatacttattattaatttttgacaacaaaatgcctagttaacaataaaacctttataactctttcttctttatttttaccaacttggtggaagattctcaaattgacaaaacaataatatgaatattaattgattaaataatcaattattgtaatctactattacatattatcctagatactgcgggaatcataggtccatgaaatccaagatcccaataagatatattcgaaatttaacaaataaatttccaaacttattaattcctcatgatttcactatagacgcaaaattgtactcataatttcgcggaacgctatatataccaaatatatacattacaatattatcattgtttctatcatattgatctctctatagacaatgcaataccctaactaattaggcatgtcatgtcttacgattacactgtgctaattttgataattgggatctgttaaactaagtggatttaaataaaacaactgataaactaaaataaaattgtaataacttaaactataaaacaaaataatatgagtgttttatctgcaaatatcatttctttaatcactgaattagtagttcagttcacactgcaaaataaaagtatttcattaaaattatagatcacaatccaaatatataagagatgaaaacaaaattctaagcataatatagaacaatttaaaaacatttcaacttggctcatcatggtgggtctcgcatcttaatcgaaattaccatctcactcatgactagggatgcacacgaggcggggaattagcggggagtgctccccccgtccccatccccgttaagaattttaatccccatcccc

SEQ ID NO: 117118 - DNA, 2868 bp, Cannabis sativa
tagttttccttctaactgttttctgttttgttcaattggcttgtatataaagctgttgtaactccttacagatattatgaagctactcttttcagctcagtctctctctctctcttttctctcttcttctttctctgtcttttgttcatggcaaggtataacacgagatcttatagtattaatcttgtttctaatagttttttcaatatataattaattttgatgaatttagaatataaataatttgaaataattctattaaaaaagaattattgataaaatttaaattgatagtatattaattatgaaaaaatttaaatataagataaaaaaatttcagtaacaattttaattttttagtgtaaaattacaatgctaattaatatgattaaaggtttttgacactatttacttttaacaacaaaatatacttggaggcaattgatgatgttgatgtagacatttgacatcaataaaaatttaatgttactatatgtactttactgatcatatttataacattataatgaggtttactttttcttttaatgtacataaaagttaaaatgtactaaagaacatgaactatataaaattagtgcaatcaatgatgctatagtagtgtacatatgtatatatttatggtcccagacatatatttattccaacctaacacaaactgttcacaataaacatcaaaagaaatcccacaaattatatggagtacttgagaagataatctttttacagtatcatctttctctttaatatacctaaacttctgttcgtatgtatatctgtcgctgttgttgcttgccccatttcataatagaaaagaacaaatttgattgaatcctcatgtagtctctcagatgaatcattctgtatatataacacaaaattattattcatactataattaatatgcatgtatataaaaacttaatagcaatacacctgattataataacagtaatgtgataaaatgtaaaataaaaatttgtagtagggttgattcgattttaccatttcatttagcaaatgatcgatttcgcaactgaattttccccagacctgaaatttagaaaaaagatcattaattaagattaataatggcaaacaatggtacatttttgttggacagtactacatttgtatatagtataactatatataagaaataaaatggaagttattaattattacttacccttatacaaaagttatgttttgaacgtgcacgtaatgaccaaggaagaattggtgacactgtaggtaatcgtccaagttcatccgcaggtttaaacattatctgtacattatttaagtaaatctcaaacaatgcccattcttccaaaatttctttcaccaaagacttgtcatttttcttaccctccaacgaaggaatcacctgaaaaggaaaacagattatatattgcttaagaaaactctctgaacaaaaataaagcaaaatgaccgatcacgaatatattattttggttttcttgtggtttttaagaaataagtaagactagtaattgtaattgattacctttcctaaaatcctttctttcaagacacaatcatatttgttacaaagggatctcgacaaataattccatactttgggaccaatattttccgagaacagtttgttgacggttctgcatgtatagataataaagatcagtatgagaatatacatgacaggaatgaaaatagatataattattattcttacatggatgcaatcatttggtccacttgagtccattcttcgtcattattttcgtcaagcttcttccttattttctcaattgacgtatctattaattccattgcctcagttaacataatcttcacgttcttccaattgatataatcatcgtcactcaccgccctcctcttagtcctcatcatttctattttcttggctttcaaatgtatatataaatatatacacaagaaattaatattgaagatgacgatacatatataatcactttatattatatatatatttatatgtaaatctaatagcagtgttgaattaaaatatgattaataattttttggtggattcttgaacaaacgagtgattatataatggtggtaaccatgcattatttgcttaattattcctattagaaatcatcgatttcaagaatttatatgtgtatatatatatattaaaaattatctctttcttgagattattaaataagaaaataaagaaagaaagaaatgaaaagaacaatatatggttatggtacgtataatgagagatcaaaattaaatcagaaattatactgaaatttaataaacacaatacaaaattatcttcaaagtataaaagatctgattcagaaaaatatatgatctatcatatttgcaacaattcattaagtatatatacgtaccagaggtagctactacggtttgaatcgcgtacgtgaagaaagttttgttacaatgtgtgatgattgaggcaagggctagtgactgctgccgtaccaatgagctatatatatctagctatctatgtattatctctctatatatctagctagtgatgattgaggttggctctgtaccttttgagtgtggatcctatcccctcttcaaagactgtgttgatggttttaaggagtttaggtctgtttgtgtagtggctataccgagatctgacaatcttgtggcgcgcggatgcccttgcccgttgggctatagactagaaaaacaatgtagttgtggtcactatgtttgcctagtttgttttcaataaagtttctcttctaatcaaaaaaaatattaaaaaagaaaaaaggtttgagatgcaaaatggtcttaaatttggtaactaagtta

SEQ ID NO: 117119 - DNA, 1284 bp, Cannabis sativa
aaaaaaaaaaaaaaaacttaacaagaattctttaatacacaattaataaatattagcaagatataaaatattcccaagtaggaatttgagtgtattaaatattagctattgtatgaactgcatccattttaattgtctgaataagttataaattatatgtaattttaagaaaaaattacataaactaaaaattacaaaaataagtcaatacagaaaaaaaaaatatttttactattttaacttttttatttataaaaatactttttcagtaaaaatactaaaccacttcttagttatttgatagttaatttacagatgtattatagttgtcatgagattatttttctagttatttctggttgttttatagttaatttatagttgtcttggggttgacttctcattttttttagttattttttttattttttgttgagcaaagtttatttttgtaattttaaaactttactagctaattttcgtaattaaaaattttaggctataaaattgtacatgaacaattgacatattaataaaattgaataaaattagataaaagttcttaaatctaacaaattcaaattttgggggggaatttttaacaacctaaaaaattcagagagcatgatttggcacatgtcaaagtttaggggcgaaaatcctaattagcctttctttattggtaaggctcctaagtgaccaatgaggttattaggagatgctagtattaatattagtggaattatatatagtcaaatgttttaattcacattattaataatttcattagcatatcattaattaaattaattttaaatagtaagcttgaatttttgaaattaaacttacaaatgattgatttttttgttggttacaagagtcctaattgattaaattgagctttgttttacgaataaaataatatttttgtgtcatatctaaaaaaatatataaacaaacaagtaaaaataaggcctcaaaagaaatgaaattagtatttttaaaaataaaatagaggcccaatggatccaagaatatttgtctatgcaacacgtcagcataacgggcttgtgcatcagtatagtgggacgtgtacgacagttgcctctacaactctttgttccccacttgcatgtacaatgggcttaacacatgtacaactttaataagcaaatatctaaaatatttaggtggcgttcggtaacacttttttaatcagttttctgtttttaaaagtaaaaaagcgaaaatatttttcaaaaacatgttctaagatcggaagag

SEQ ID NO: 117120 - DNA, 2359 bp, Cannabis sativa
  modified_base (76)..(83): a, c, t, g, unknown or other
tgtgtttatttcataatcgttatagaagttcatatttagggtgttaatcaacatatatacttgtgagtagatctannnnnnnngtaaaataatttccaacagtttagaacttcacctaatttagatgaccatgacaaccaccaaaatgttgaatattcatcgctagaatcaaaaacaaatttcatcacacatagccatagagcactcaaatgcaatctactaaaatacaatcaaaaacccaagaaatgcagtgcgaaagttgttgctatgcttttgcggaagatcatgtggtgactggttcctagctctggtgaagatgatgatggagaaggcagaggtgatgtctttaaaataggggtgtaggagaaatactgatccctactctatgtgacactctgaccacgtcatctagttgagggccaatagatgcacttgttggtcccttgatggctggtcacactggacatcacctattagtccactctccctaatcctgtcaagtgtctcagcactgataatggatggacgagagacccattggtcctgctgctccccctcatcaagagcttgaggctcgacagccatccttagaacatggtccactccgacccttgaaggttgatcaagtctattaaagggccactcaccctcatcatacaagcccaaagggaagttgaggaaaataaaacatgtcctgtacagttgcctcctaacagttacaacctcctcaaccttggactcactatccgagttgtgcgcatcctggtcggccattggcacctctgcttggccaacctctggctctttgctgtttagaggctgtgtagcctcctcaatcaccccaaccctacctttagtaactagcttggcaatgtgagggtcaaaaggtggtgccctacggcagatctgtttgatccttgccataatggaccactactagtctcaagatcactcaagaagtttctaagggaatgaactagataatagatcacaaagggaagaccaactaaatctttatcaatgcggttgtcatctcccatgactatcactcgagttcacctgcacagaagagacaaggggaggtgagacacatgacaaagcaactaggtacagacaaatttttggccaatcttactcaagggtacttgccaaacaatttcatcatacaaggctaagtattagcaaagtaccgtcttaagtataataatttggataaatgttgagtcttaagttgagcattcaacaataatagactaccagtaagttttgtacagagtttctaaaggaaccacttatgagactaattttgtacatgcatgcaacgccttaacgagattcttgccgaggtcaaaagaggatagaaacttggccgcttgcttggaacctaggcctaggctggctagggtttccgagcaatgcgaggactagccagggtccaatgacccagccaagattcggctagggtcccaggcctaggcatgaactggctagccctctagggtgaacccctatggcaggccaactccaatgaaaagaccttatggctgaccaggtcttaaacaagacccatttggcaaggcaaggttgatgatgaatcaaagtgtgagtttttcaaaaactcaaacgtggtcttcctgttcttcatgactcaaagagtcaagaaccacaatgaaggtcaaaatcgaatcttttcgtcaagaaatcacacattgtgtattttaaaactaatataattattgaaatgagatctcaatcatttatcgcgttaagctaagctagaaaaaaattatcgtttcacttttggaagttatataagctatagattccatatctatgattagcgctcatgttcccaagatgtaactattgggtcgatccaattggtcagctttaatgaacaagttaaacaacacaaataatatatttaagccaaaacctaaccatctcagtattaagatctattgacctaagatcaactaagtaatattgacatagatagatatattggtaagtttttgatatcttatccaaaatcaatatcggtcaagtccaatgtatactccatgcatctgatactagtatactttgtcaataccctagaaaggacataatacttatccaaggtgtaagtaaattttatcattgattatcatgtcagtataaaacaagtgtattgacaaatcatgtgacttaaactttaaaacatataatcatgcttatatttcactgtgttgacaacactataataactatatgttttgactttaatagaatttatacattatacatatattcatgaaagaaatcatgtgaaccatgcaacatagaatgatttttaatcttttattaattagtaaat

SEQ ID NO: 117121 - DNA, 1387 bp, Cannabis sativa
tgtacactaatacaactctcttactgatattttatctaatagtaggcaatcataaaacatgcacgctaaacatctaaacacatatgatgctattataataatcttaccttgaatctgatgatgggaaataaactttttctaacaatttcttttattttgatagccttttcgttttttttaattcttatcttctatctattttttagtatcaatgtatgtccctaacataaagtgatgaaatgtagaagtttgcaatgccgactcttaatattgctgattcgagagtgggcatcgagcggtgagtcaaacctggtttcacaaagattaaagtcaatgttttcggggctattttttctgaagaagatgaattcgggatcggctaggtgaccagtgatgtgttggttcttcaattgcaacggttcagaggtgtaaggtgggggtttaccaatcggctatggtggatgctcttggtttgaaggaggttttgagttgacaaaggatagttgaggtaaaatcttattgtttcagtttagtccaagatgttcttagatcaatccatatggtatcaccttatggtaatgttgttaagaactgtaaagttttaattgctcaacttaataatgtatttgaattttataaatgatatgcgaacaaactaatttatgcacttcgagactctgatcataatgttgattgtgcttatagtgggataactgttctgttaattttgcattcttgatttcagatttgatttattgaagttgtattttcatttaaggaaaagaagaagaagaaggttatgctaccttaacctagtacatccacatctcatattttccacattaccacaggttggaaatataatacaaacttgacttctgttaaatgttaatattaatagtacatggtaaccctaaaacttaattatattgctacatactctgttctatagtagcaaggtgctcggaccactagtataatacaaattcagtagaatttctatctaattatactttattcaaaaataacttctaatttattatatataaaaacaattaagatttaatttaagtcacttataaataaaaattacctcaaaattataattagttatatatttttaggctttttccagttttaaccaaaaaaataacaatattacaaaaatatttccagctggccaaataaacaaatatacaactcaaataaaaaaatttacacaaataccacttacacacacctttaacccaggatccatgcttcctgggtaactatcacgcaaccatcatgcaactacacaggaacccaacgcaaccgaaacgaaaattcaaccagaaagagaaccaccattaattctggcgaattcacctgagaagacgaccagaat

SEQ ID NO: 117122 - DNA, 2399 bp, Cannabis sativa
ttcctcaacgtcatcctcaatctcaaaaccacattcttcctcatcatccaattctatatgcccatattgaaactccatgtcatccatggctatactcgtcgaagccatataagccagaaaaaatgcacccagtaatctcagccgcaagaacccaaataaacaaacccaacccacagtccactatacaaaatacaatccaaaaatcccagtcgcaacaaaacaacccaaacaatccaagcaatccaaacaatcacagtccacttcacaaaacaatccaaacaatccaaaacgtcaatgaaatattacctccaaacggacacacgcccagagatcaacgtccgttcaacccgcaggaacccgtcaccgagggagtatacgcagtcgacgtaatccaatcaatcccagaacacaaccatgagcccgctggaaatcgaggaggaatgacgagggaacctacaaacacgacacgcagaacaccagtcgcaccacgcagaaaccgacgaacccagtcgcaagaacaccagtcgcaggcacctaagaaacccagaacaccagtcgcaacacgcagaaaccgacgaacccagtcgcaagagcaccagtcgcaggaaatcagtcactgccgtagaagaacccagaacccgtgagaaaattcttcaaaaaaacaaccctgagatgctgaaaatctatgatcgtacgagaaaagaaactatacgttcgaatgcaagctccaccagtgaaaacacagtgaacggaacgtgaaaaaatctagccgcaagaagccgtccacgctgaaacttcggagccgtcaaaacgatgaaacctacgaacctggagagaaaaaaatcgcacacatgccagctggtaagactatcttcttctaaaataaagtatataacatacaaacttaattgtactaaatatgaaattaaaaaaaatccttaaaaatatagaataaatcatcataaatatttaaaaatattattaaaaaattcatataaattttacttcgatacaatcaacatcagttttttgatgaaaaaaacaatttttttaataaaaaaaacagttaatagtaattttattaagacaataaattaaaaaaccaattacttacatgtaattaaaattagtttcttatctaataaagttaaattatacttatattagttttagatttctcaaaattaatttaagtatcaacagttataaaattttaattacatacttataaaaagaaatcacatatatatgtaatagattatttgaattgagatttttttttttttcaatttaatttgtggggtgcatgttataaataaaaatatccaaacgaaagttataatgatatcccacctaaaaatcttcatacattaatgagtgtaaactaatggagagaattcaaggtcagcaaatttcatcaatccctctttttctttttgacttaggtctccattcacttaattttgatttttgagttaaagcaccatactagtccccacaacacacactaagaaaacactgacatcaaataatttataatagaccattcttatcattttattaattttgaatcaaactaaagacacgcatatcaaatgatataaatttttttatttcaatttttttgaaaaaatttactatttatgtgtatatttataaaatattatttatttttctaaacataatttattaattgtttagggttttaattttattttttatatgtaaaaatataaaaacattaatattatatatttaaaatgaattatatattaaaatttgaaaaaaaaaagttaaattttagtgatattttttaaataaactataaaagtttgaggtaaaataaaaaaaaggcttataaaggatttttgccatctgaaatttgacatgtaacaaatcatgccccctgaactacttttaaggtcgttaaaaatacctctgaactattgagattgttggatttaaggactttgtctaatttcattcaatttactattttcagtgattgtttatgtactatatcatgctccccggactttgatatctactcaatcatgcccctcgaactttgacatgtactaatcatgtccactgaacttttattcatgttagattttttttattaaaattgaaaaacagtttttaaatccaacaatctcaatagtttatgaggcatttttaacgaccttaaaagttcaggagcatgatttggtacatgtcaaagtttagggggcaaaaatcctaattagcttaaaaaatatatataatatatattttaaaagataaaataaaaatgttaatgatttggtacatgttaaaattgagggggcaaaaatcctaattatatatattttttaggttaattagaatttttgctcctgaactttgacatataccaa

SEQ ID NO: 117123 - DNA, 1589 bp, Cannabis sativa
  modified_base (37)..(40): a, c, t, g, unknown or other
aagtgcagatatccgcactttgcggattggattggannnnatcgtgcggattggattggattggttattttatgaacacccctaatataaaagatttatcaccagctaacaggattttggacatggatatcaatagagataggaagaaaaagactacttatggaaagtacttaaaacctttggagtgtctgattccaaagttgtgcttacaccccttgctcaacaattcatgctaagagttacacagatgccaaatgatgaaaatgattaggttgagatgtcaaaggttccctatgcttgtgttgtagggtcaattatgtatgcaatagtttgcattagacattagttatgtattgagcattgtaagcagattcatggtgaatccaggaaaagagcagtgagaagctttgaagtggatacttaggtatcttaaaggaaccaatgaaaagggtttgatgtttggaagatgcaagagagaagatgatcaaggtatagtcattggctatgttgaatctaactatgcaaaaagcattaacactaaaaaatccttgacatgatatgtttttgacatgtttggtattgctgttagttggaaagaaaacccaccaaaggttgttgccttgcctacaatagagtctgagtatacaacctcaattggagctatgaaggaagttttgtgaatgagttgtttgactaaaaaattgaagattggacaaaaggtgatcactgttttatgtgacaatccaagtccaattcagctaactaaaaatcaagtacaccataagagaactaagcatattaacatcaagcatcatttcgtaattgaaattatggagaagggagttgtcaacattgagacagtttctactaaacataactcctcagacatgataactaaagtagttccaagcaacaaattcaaacagtgtaatggagttggttggataagcccttgtggctgaatgaactacagtactatcaagtttgcttacctcatagcaatttgaactaagatggagatttgtggtaaatggtcacaagttactatttactatgcatagttaattgtgagttggacttctaaatgaggctcaggactaagttattttagttaagatttgacacttctagtaacttataaatcctattcatttgttagcttagtctattctacaatgtaaaacaaaaaagctagagagagggttctattcattagggagaaaagttcgttttgaagatgataatggatgttgttcaatcaagatgtagaacattgcacatggatcgaacttgttaagttccgtgttattctcttactttcttgcacttattttttttctactataacaaatttttgttgtaattatcttgttgaagttgtgtttggttgtgtataaactttgttgtagttattcttgattgaatcaagacaaactacaatagttggatcaattggtttacgagattcccattttcattcctaatctagtagacactattaaggcggcgtttggtggcgtttggttagacatactgaaataaaatgaaaacaatttttattccattcatttgtttgattacattttaaa

SEQ ID NO: 117124 - DNA, 4274 bp, Cannabis sativa
agtatgaaacttataaaaaaattcagtaaaaaagtaaaaaataccacctgatcgtatttttgtaaaaaaatggcaaaattagtatacaatgtaaatttccctttaaaaattaagtctgtgagcgtaaatttctctaataaataagcataaaagcccagcccagcccagttcgtagcccagtccaacccagcccataagacttgattcgagggagagactgagagaagcaaaagcatcaaccaaacaaacaaacaaacagacaaagatcaacaatggcggaccaaaaccccaacaagaagagagtcatcgtcgaatccttaggatggcttacggaatcctcaattatgcccagaaaacaccgcgccatcgccggtgttggagcttcctctatcctcgacctcaaggcccagctctaccactcccaagaggaagctaagaaagccagggaccactccgcttcagatccccatttccaacgccccaaaaagaagataccttctcatcatcctctctccgccgccaagaactctggcgttgaagcccgtgctttcaagtacgttactctattttcattttttcgattcaatttttgttggttagcaatatatgcaaactattgagatttgtcattctgcaattagctatttggtactcgttttcatgatcttgcttgtacagatttgaacttgcttgaacaattatgggtagaaaattcgccaaactaaccacatcgaatcgaatttacactctgattttgtatgccgtatatgctatttttttataatgcaatgttaaattttgattcatatcacagtttatatgcaaataaacatagtacttattagagtatgatatatgattcaattacagtgtatcaagcggtccgtacattctgatatgagaatgacatgatttgtagtgactaaccctaaaatatgtttgatatgaagaaccagctggtacacaactaaagaaataacagcaagaaacaaatataggaatatagatgaaaatggatctggaattgatattactaataatattggagaattacagtgataaatctagacaattcgagaggcctaggtcctctccatgatgtaatatactcacctatttatactattctattcccactcaaatactatccttttaataagttaattacccttttgtttaatcattgacttaactacaatgatttgtagtgactagaacttcagattttgtgggcgcaaaccatatgcttgatcggtttgaaaattaataagttaaactaagccaagatgttgagtagctgcagagatagaggagagaaaaaacgcttacaataagtaaactgccttcactgtaggaaatttgtctctttccttgttttgttattagtaagtaatagatgataagatgataaatggttcaaacaagcataactgctttctaatcatatattttagtttcttttaggaatcttctatctttttttggacattaagattaagttgtcttgcttctagatgattaatttttgttatttgaccaataattagagacaagcttgagctaaaagcagttaaggatggatcagctagctatgctgcattagaaaaaaaggctgaattgtatgagaagctaatgaggggggaattgtctgatgaagaagagaaagagaagtattctgtgaatttttttgccaagaggcttgacgatgatgagtcacagaagattcaacagcctcaatcttctgatacactagcattggaaaataaagatgctgacaatgatgattctttgctgtttaacatgaaacctgtgggacttggccgagcagcctcaacaatggacaataatgaacacaagcgttttgtaaggtactcgtttaaagctatttctatgcactagtttatttggttgtatgcatttctttaaaaaaatttatggattcttcatatatgaatcaatgacctataatggttcatattgtaaaacactcagaaaacacaagaaacaaattacataatgcagtaccagtttctaacaaagtccgaatataaaacatttttgaattagtttacattgaacaagcacagccacccaaatcctgatcttccccgataacttttacccagattcttcttcgttatcaattattctcttatttcactctagccacgattcccaccaccttccaaagctgctgctttctttgatcaccttgtataaacatatatagaatgtctatgcattccccattccatgctgaaattatcgctttgaactttaaaccttaacagaacgaacaatgaaggaatatattttctgtgtttgatttacacaacatgatggattattgttggttttgttcgttgcataccattaaacatcattgtattactattattttgaaaagtggtcggttaatttattattcagaagataccctttgagaatatctcaattttgtaggtgttaggatagacctgactacactctgtctattattttatatcaagcataaaagtgtatggttaataaacttgatgagcaatttcgtatttgattggaaactcgatatgtgaaaataatgtttgatgtgggggggttcctccagggaagtacatcaagaagcaaatcaagcaagagagaaggcatctgagctgaaatcacgaagagaacaacaggtgaatgctcgtcgggaaaaactaaaacaggcctatcttcgaaaacagttagacaggaaactgaaagctgcatcaatccaatccagttctgacaaaacatgatatataagatgaggaattcaggatgtactaccagcaatcttaacagtttttagtattacactgtaactaatttcttgtacagatatattatggtttaggaattaaccagagttatgtattgaatttagattatagtttttgcttattttgtctatgaaatttaatgtagggaaaaagctaaatggggtagtatggaaagaaacccattacttggaatggaggtaggaattcaacaatttttttttaaaaaaataagaaattaaattaaattgatcaagtagatttgttagactaatattgtaattattattatttaaaaaaacaactaaaattaagaatgtgtgtattgaaaattaaaatattactattatttttcaaaagtaaaaataaataaaatgaaaatgaaagggaatcgactctgctggggatcgaacccagaatctctggttccgtagaccagcgccttatccattgggccacagagtcaatttgataggtaaatgtaagacgtgattttatcacaaaatagttttgttaagtaaatatattatatatttcaaagaatattatatgattattccattatacattcattcttcttctaaaaataaaattaaattatccatctattagggttgatcataaaataatcaatccaattcgcaattgaattggattaaaaaataaaaaaatatgtacttgtgtggatttgatattgattgacatgtaaaagtaattaattcaagaggaaattacatggtatacccactttactttatttgttttcatttttacctctattttcatattccttaagatatacccacttttaaagatgatatcctcattaaaccccttaagttaatgcaaattatatggtacgcttaagtagagagtgagggtatattgggcaacccactcaaaaaagtgggtgtattttaaaaaaaatataatatgaaagtatttttgattaatggaaacaaaaaagaggtattttttgacttatcccttaattcaattgaatccgcacatatattctattcttattataagaaaaatatagttgaatgaaattgaatatttttatacatacaatttttttcttcctttaattattagtttttgttttatttatttaattaattgttggaggtatataacaacactaatttattttattttattgttatttatgtgagaatatttttttaataaatattaaaaagtaacaattccaaaataactaattcaatccacatttttgttgattggatttaaaatattaaatctacacttagtacgaatttgatgaattttaaataaaatagtatggattaaattggacgaatgcctctaacatgtattactaaatgcacatttaaataattggtaacatattttgaagaagaaaaaaaatataataatcaacagttattaatttttatctttgcatagcaatacatcaaatgactctgtggcccaatggataaggcg

SEQ ID NO: 117125 - DNA, 1395 bp, Cannabis sativa
aaagtttaggggacatgatttagtacatgttaaagttcgggaggaaaaattgctaattagcctattaataatcttattttttttttacacacgagaaatataagtttcttttagaatttgatacaaaatttttaaaaaactaattaggctttgtatttagatattctttaaaattaaatataatttaataaattttttaatattatataattaaaaatattagaaaaattatcaattgagatttgaaaaaataaataaataaataaattgtataaatattttaatattcagagatgatactttattattcaaaaaatgcatgaaaatttagatgtctggatctaaaataataaatacacccttaaacttaatacagaaatcaaactttttttgtgagaagtatgaaaacttgacataatgtatatcattcatgagttttaaagaaattaagaaaatgaagataatttaggcttggaaggattgaccaagcaaatgtcgagtaaactgtcaacaggtgtatatttgtaatcaggatataacttagaggcttccaagtcactttctgtgagttcgaaactcatctggtctccttttatgaatatgttatgaataatagacacaggtatgttctctggaaatggtagacctatcaccaaaacaatatatatgtcagataacatcatatatatatatataatttatttaattgctttataatacagaacatatataagcaaaaagagggaaaagtagacaaatttttattaataatatataatttattattattactaatgttgtgtacgacaaaaagttctaaatcttactttcagagaggttgatcaattcctcctcgggaacaaaggttctttggagtgtgcgacctgtttttctctcccaagaagatatcaaatccagttgagtagtaatattatgttggggcctacatataataacccgattcactgctcgttcatcacaagccgccttcacagtataagcagctacatcttcttcgtaattcaacacaactacatcacactcacagaatttatataattaataacttatttttttatgaccgttttatataattaataattactggggagatttttttattatttttttttttttgcgaatttttactttttcaatctaatatataaacttccataatatagtaaaagttgaggacaatgttgggtagagttaaaaaaaagtgacagtaggctgatgtcacttatatgagcgggtgagcaagattaaaactattttttttgggaggaaattaaactctataccctttttatattgtcctcttttatttttattctttttttaaaaaaaaaaaaatctattatttttacttctttttttaaacattgtaccaat

SEQ ID NO: 117126 - DNA, 1641 bp, Cannabis sativa
accctcagagggactactggctttgcatgaaaatctacgtacaaagccagcttggttctgttttttaggaaatggggcaaatggagtaatggttataaccagcgggtgagtgagagcgagggagagagaagccatggctggctattaatgctaaattggttttggtacgagaaatcaatgagggatgaacaacggttttatagcaaaagcttcattagggttattgcttttttaatttaagtaggtgaagtttatttcacgtggtttaaacaaaatcaataaataataaggataatagagttatagggttattgtatatgatgtttgaaaaatatgaattttctaaattaattacattaaaattgattgtacagtaattaattatatattttatcatcatagagtactgtatattatgaaaataattgaaggtcgtgaatatataaatgtaatgtacatgcgcataacggttaaagtggatgcaaattatatttttaggtccggttgatttaataaaatataaaaaaaaatgttaaaccattcacaatacaacaaatcggtataatgttaggataataatgttcaaaattaaaatatatgttggcggcaagaatgcatgaacgaaactctgtgtataagtattagaaaatgaaacctaagaaaaacttagaaaaattttctgagcaatataatggtaaaaatgagagcattgtattctcagcttataagttaagttaaacacatttaatttaattatagtgaacttacatggttcttgatcgctcggagatttgacttgatcataaacttatttattctgttgtttcaaatatgttcgtgacaggtctaattcatgtctcagcacaaagtttgagccatttgcagtaagatgaacctgaaaaccaaaactctattgtgaatgtattcttaggggctaggcgcccgggttgactttcatgttgctgttttgtatattttcagcgccagtccttagatttggattcttcttgtcttcgtggtacaaaatgctaaaatatggcgagttggaaataacttagcgcgatctaaacacccattctattgttctcagagtcaacctaggcggagggttagggatccctcccaagtcgactgctatgactcatgactactcaactctcaaatattttctttattaccatgtgttaaagattgatgtccagatcaccaggattagtttatgagtaaacaaatacaatacataacgatgtaccaaacgagccctaaaaagcatgttcaaatgaaactaccgtgtgtttagatgacaaaaaactcataatttgccattcacaaaagatatgattcttgattcatctaaattgcattaattttaaaattctttattcatctaaaatataaatctaacatgctatatacaaaatagggtaagtttatggtgcaccccttaatggaatgttttggtagaccttttatatgtacgcacgattgttttttttaatacgcgaggtaagtaactgtttaaaccttatttttcgtattgcactatttaaaagtttttgaaaatttacaagtggtcttaaataactacaacgcactgcaagaaatgtcacttttacgagcacagttcgctactgcgctggt

SEQ ID NO: 117127 - DNA, 2475 bp, Cannabis sativa
  modified_base (182)..(184): a, c, t, g, unknown or other
  modified_base (2440)..(2442): a, c, t, g, unknown or other
atgggggggtccgacggggccgattgggggtccgatgcttgcaagctggggggtccgatggggtccgacgggtccggtggggggtcggatgcatatgcgggttgggaaaaaatcgggttgagttatgagaggggtattttcgggttttagataaaagtgtcatatattttttagtttgaaannnattggtttaagaataaaatattaatgtttttaaagtatagttttttaaatttcccttagcatcacgcttaacatgagaaactaaaactctaggaaaagaggataataaaagagagatatcatcaataagatcataaaaaagagaaatgttgcccctagaagatcctttggtgatggtcgtggctacctgaagcgaatccgtcccaagatagtcaatatgcaaaccagtattcattgcccattgcaaactatgtataatagccattgcttccatttctttaactgaaaaactaccctgaaaggcttcgaaaaagctcccaaaacatcaccaaaataatcagaatgacctcccctaccccaataattcggcctgcttcatcaaaggcagcatcaacattcattttaaaagaaccagccggtggaggagtccaatgaacagggacagaacgagtatggtgtgcagggtgactattacttgtgcttgcttcaagttgagatggacagtcggcctcttgagaagcaggcttcaatgtggaattaataaactgttggacataggcttcagcaaaagagcagataatagcagccggttttggtttggttccatgaatttccttattagttcagtccaaatgcaccacataagacaaagaattctttccatttcagcatttacatggttggcagcaatgggagagaaaatctcaaagccatttaatctatgtaaatgttgattattattgagaaacttggaaagagaccaaacttgtttagctctggtgcaaagaaagagagcatggccagaagattcccttggacaattacataaggagcaagctgtagaaggagaaattttcctatgcataaggttcacagcagtaggcagagcatcattaataactctccatgagaaaatcttgaccttcttaggcagattaagagcccatagtctattccaccaacttcggatggtattagaagtagaggaatcattcatcttttccaagttttcagccagatggtaacccgacttaacagtgtaggaaccattttcagagtgatgccaaattaacttatcttctctttgatagggactaagggatagagagaggattctgtcaatatcaatctgcccaaagtgctgctgaaggaggctgaaatcccattgtctatctgaggagatataatgttccacagtgaactcaaggtctccacagtaggtgtatggaaggaaagtcgtatttcctggaagccacggatctgagacacatttaacaagatttccaaacccaattttccatctgaggcccttaactaagagatccctaccatcacaaatgctttgccaagtaagagatggcaaagtaccttttgatgcagtcaggaactccccatttttaaagtatcgagctttcaaaactctcgccagaagagaatgtggatcttccaaaattcgccatgcttgtttagcgaggagcgcttggttgatatgaagaaaagaacaaaacccgatacctccctccgcctttggttgacataaaaggctccattttttccaatgaattttggatttgttggcgctcgagccccaccagaaatttgccatcttagattcaagttgacggcaaaacttcttaggaaagctaaaacagctcatggcatatgtgggtattgattgcacaacagctttgagtaagacctccctaccaccaatggagaaaagttttgcgtgccaagagttcataagcttccaaacacgatctttaatgttgctgaatagcttggatttatcacgaccagcataggaaggcaaaccaagatacttttcatgtaaatcgcagatgggcatacccaaaacagaattgaatctagtcttcaaagcatcacaagtattaagagagaaagacatgactgtcttctcagtgtttagtagctgacccgaagctcgatggtacacctctaaaatacgcatgatagcttgacacgaggattcattagcttcacaaaacaacaaactatcatcagcaaataataggtgggaaaccgatggtgcacccctagatatggacagacccttaaggttaccaagtctctcttccatttgtaacaaagtcgaaagtccttcagagcatattaagaaaagatagggggaaagagggtccccctgtctcaatcctctctgagggacaactgattctttgatagctccattgatattgaatgagatgttggatatgttttaccaagatctagattnnntaccatgtatgtttcattaacatcttaatatga

SEQ ID NO: 117128 - DNA, 1964 bp, Cannabis sativa
  modified_base (88)..(100): a, c, t, g, unknown or other
atgtagaaaaaaattatatataagaatagaatatacatttgatttattaagttttgaaatttaattgtattatatgtattagattttnnnnnnnnnnnnntctttacattaaaatattatttgcgtgtataattttttaattttttataaatatgtgtagattgaattggatcggctacatttatatgtcaatcaacattcaatccgttaaattttccaatctaataattcaattcgcacaagtgcagatatccgcactttgcagattggattgaattaaattgtacgaattgaattggattaactattttataaacactcctaagcacatacattgtacacgtgctagaatcacctagtatttaactaagagaaattagtatgatctttttatataatttcatatatatatcttttttttttaagactatatgtatctttttaattaattttatcacttaatacattttcttatgattcctaatgacaaatttatattccaacaatctaataatacttcaaccaaataataaataattttatgtaattatttattaaaaaaattatatttatgtatatatctaaatttgtcatcttatgacaataatgttaggacaaatttttagaaaataacaattaaaagtagtgaagtacatacattatatactctaattagtatgtatatatggggaatatttttcaattaatattactcatatatggttattaaaaaatttagctataaatattaattttaaaaatattaaatcattaaaattttgatttaatgataaataaaagagaaatttgaacttctatgcttaatttaactacttaattaaaataatataaaaaaaaatatctctttttacatcatattaaaaatatgttcatataaatatatttgagtcaaactcattttttttctttttctttttttttttttttggttaaaaacttttttttaattttttttatctaatatgtagtaaaaatgagagatttttttaattagataaaaaaattgagcctaaaaacttaaaaaattttaattttactcattcacgaataatactcattaagagtgcacctatacatatattattacaaaatactaagttaaacttttagtacctcgccgggaagtatggctgttgcataactagaggtgttctgagaggaactatgagtcttcaagcggtttatctggtatgggtcaatggacacatacaaatttctcaaaacgacatcgtttgagccaggctgtgctgatacaacaatgcttgaacacttaatctcaaagtctgactcttttggatcaccatttatctgagtctttattgtaacatatctgttcattacttccatttttttggtagaagagtttgaaagagttttttttttttttgtttaaatgtgagtttggaagagtttgaaaggtttgatgctaatatccatttatatatatataaataattacatagactccgtttaaagagtagaacaaatatatatatatatataaaaacaaatgaatgtaactaaatatattacaccaatgaccaaattttatatttactatatttatattatatataaaaaaaattacatgtggccggcagcctccttcaaaacgttgctcaaataaatggtcacattaacaatcaaatatcttgattcaatgtcaagatcagcatcttttgtcattaaaaaaagatgaagaagaagtatatgaaggtcagcatcatcaatggaatcatttcattgttctcactctcctttgctgcaggcttctcttttgtcatgtttaaaaatggagaaattgtagtaaatgattctcatctcaaaattattagaaaaatgacttttttatactatttattatttatattattttttattatttatataaactgttattttttatcaaataacagtttgtttaggttactaaagtggttgca

SEQ ID NO: 117129 - DNA, 938 bp, Cannabis sativa
aggctctcatgtattcagtgcaagaggaatatgagtgtcctagacggccacagtaatagcagtgatcgggtatatccttatatttcaattcaagccaagttggggaggcaattccggggaaaaggatgggaatgccccgggggagcagtttggtgacatcaaacatgatcctaaccgaaaggtaggatccccaagtttctaacagcgagggttggtgaatctcaaggagagtgccagtaatttgacccaacaatttagcaagagagactggccttcgagagaaagggatattatagacctagacccaaaatgggattttcctcatagattctggggatagagtagaatcaaggtcgggtatttccaataaaacaaggcacttataaaaaatctaaggttgattcaagatggctttacgcctatccccatcacagtggaaggcagcaagataaaggtttgagtttggggctctttccttaacactaactggaaaccgtccctttcagtacttctccaggaaattcttcagggcattatggttaaagttctttgtagtatacagggtggccatgaggtggaactgaggtggggctggtggaagtccctcatttgggtctgcatgatcagcaagggagtgtatagtattttcagtgtcagtaagatgaagggctgcagaaaaagagcgtgctaagtcttccatatttggcaaaattggaataaacaaagaaggtaaagatttcgtgagcacaaaaatggcaagcagaaggaaccctaaatcttttcttaaataggaaaatggtgttacaacaattaagatgagtgcagagacaaattccatatctcgaagtacactcgagtatctcaggaataacaaaaggtgaaaaattaatatcgaatcaagcgggggattatccaaatccagcccctgactaggtagg

SEQ ID NO: 117130 - DNA, 3725 bp, Cannabis sativa
gggatcaagctcaccttaccttgggatggcattcactaaatgagcatctaacaagataagctgcattttcatgataggttgataaagaaggccttagaagaagaactgcatagatgataatgaagaaagcaaggaacaacaagttgattcttagcacaagagctttcgaaggagctgcctttatgatcctttgcgggaaactaaccgatccttcgaccattttagccgatacccagatcaaaattctcaattttgtgtctgaattctaatgagtttaaaggtatacaatgttgtacactatgtgtttgtgtagatgaacattatatatatgagactatttggttctttctttgtattgtgtttaattagtttaataaaagtggttaattaataataatgatgattagaatattttctaggctggttttgggtttggcactattatagtagttagaaagattaagagagtaaaaataatatttgagtaaaatataattgaagtcacaccatttgtagagctccatttggtgtttttttttttttttttttaattattttttttaaatgaaattataatatggtgagaagagactttgcttcaactactactaattagttaaggagtcaatttctcatacctgcaataaaggactctctcaacaatttttgctcatttttttttttatattgttacatttttatataaataataatataatacaagagaagacaatatttaaggtccaaaaatgattatttgggcatgtttttagcacaatataagaaaagacagtaaggtgaactatcacaaactcaaacaatggtatcttttatatcaaaatgtgttgatattagttagactaaactatatgattattattattattttaacaatacattctagattttgattgggttggtgtgaaatattgaatatgggcaataataataataataataatgtcttattagtttcgtaaatatgtacaaacattagaagaaaaatagattgattgattggggttttattttattttggtgaaaagggaatctcatagaaggaaagaagaacaaaattgtattaaaaatacacatcaaaagaaatggcaatccaaccaagaagacaaaaatcattgtctcaagacacaaagaaaaaagtcttcttgtgttaaagtgttctcaaaatgcttctcaaatatcaaactagtaatacatatttaaatagagatagttgttagtttatatagtgtgctttaggttctcttttatgtaaaaatataaatcacaaatacaatattatttataaaattatttaatttatacattttgcaaggaaggccggtcctaaaattcgatgaatcatagaaaaaaatatatattttgaattcttatttagaaaaaaaatataatatttcccaaattaataaaacaaaatgtatatttttaaaatgaataatttaattttaggctatttaggtggatcctaagtataggcctagtccatctatgctcagaatcggtcgtgactgcaagtttttaaattatatacattttgacaaattgatgtacaaaccttttttatttattattattttttttttgacaaattagttaaagaattttatcttgttttatcaaatttattcttgaattttaatttttttagcaaaatttagtctcactaataagtaaaggttttatttaatttttttttcttttttaaattttgcattctttaatttatttgaatgtaatgccccatgaatgtaacaagtagtcttcattggataacttttgtgtagcaagataatatttattacacttactttttaccactcaacttttttaatgggtggagaacatcaaatgatgcacaaatgaacaaaatgggagtgtcatacttcttttttcttctaatttattatccacatgcataatatcatgaccttttaatacattttggatggaatatagcttaagtctgaagtgagccaaaaaagaaaaaacataaagttgaggatctaaaaataaaataaaatgagggacctaggtgatacacccacatgaagttgggacccatgagctatttaccttttctaaaatagcatctataaggcactaagacaccaatcctgtgattagttaacaatattttatagtagtcattaaataaaattatctgaaatctaataattaattctaccaatagtaatattacacctcaggaatctatttcttccttgaagctcttctttttgatgttcctcctccgcttctttgaggtcgcttcattttttttagcaaaagaaaagaaaagacgtatgagtgccacatttaaaaaaaacacattaattttttgttataaccaataactatagccatgtcagtctagaactataagttggttaaattaaagctttctcattaagttttctggcgttttcgataattacaacagagaactaaagatttttctgaaattttctcgctattttagatattggtctaacagaggtcaaagatttaagtcttccatcttgtgatacgatgtcttgtttcatacactttcaattgatttttaaagcttcatttttctcaaactctctcttttctctcaggcattttcgatattctacgacagagaagtaaagatttttttaaaatttcctcgccatttctgatattggtctgacagagatcaaagatttggatcttccatcttgtggtacgatgtcttgtttcatacattttcaattgatttttaaagcttcatttttctaaaactttttctctttttcctcaggccttttcgatattctacgacagagaagtaaaagatttttctgaaatttcctcgccatttctgatattggtctgacagaggtcaaagatttagctcttccatcttgtggtacgatctcttgtttcatacactttcaattgatttttaaagcttcatttttctcaaactttctctctttttcctcaaagtattttcgatattctacgacagagaagtaaagatttttctaaaatttcctcgccatttctgacattagtctaacaaaggtcaaagatttgggtctttcatcttgtggtacgatgtcttgtttcatacactttcaattgatttttaaagtttcatttttttcaaactttctctttttcttcaaacatttttgataatctaccacagagaagtaaaaattttccaagaaaggtaaaatttaattcaaattggtagtaaaaaaatattttataataatcatatctcaaatgattatcatctctttgatcaggtatattagtaacaatggtttatgattattataattagtaacaatggtttatgattattataatatttgaagggtattttagttatagtgattagagatatcaagacaacaacatttatggttgatgtgggacattgtattaagttgtattgtattgtattatattaaattggattatatatcatattttcagatagagcattttcatatagagcattactattggacaccaatggtgcccaacactatccataggtgtcaccctatatttcttaaaatttattttcttaaattatatgagacccgctttttaattacaccaatagcagtatgacactaagaaaattgttagccaccaatggtgccctttagcaattctcttttatataatactatgttaaactttaatttatactaaaatattat

SEQ ID NO: 117131 - DNA, 1307 bp, Cannabis sativa
  modified_base (27)..(43): a, c, t, g, unknown or other
attgaggtttatatatctgagaagacnnnnnnnnnnnnnnnnnaacctgctattgcatagaaattggtaataggaagataatcatattcagccataatcaatagatgcaattaaaatcgataagtcttagcttttattcattgttaattcctttattaatttacatgcttcttactttcgctgtttttcttgtttttttgattttaaattctcttaaaaatttatttagccaaatagaagtaagaatttaattttaacatacttaactacaatcctcgtgggatcaatctcactcttggtgagcattacttgtcaaaacgatacgtatacttacgtgttgtaaattaccacaacacatacaaagtttctagggttcctgaggaggacaggaatattgtcgcactgacatcaaaagaaaacatgcgccaatacaacctccatttgttggattcttccaaaaaaagctgctcgacccaaatcttctaaacccaacaaattagcccaaggaaaggagaaactaggatgcccccagaggtctactcgtttgcttaaggatgggatactgcaacaaaacttttaattattccatgctgtgtgcaaaatttaatgaccagttggctgtcaaattgagtgccattatcggatactattttttgggtaggtcgtattggcaaatgatattatttactacaaaattaagaacttttttagaggttattgtggctagcagctcgacttctgtccatttagtaaaataatctactgcaacaaccgtatattgactccttctttccctttaggaaattgaccgatcaaagcagtccctcaaatattaaagggtcatgggctttgcatttgagttaacccattgggcggtgctcgaataattttcgcgaaccgtcaatccttgtcacacttcttcacataagcgtgagagtcttcaatcgtagttggacaaaagtatctttctctgagtatcttctttgataggctctgctcccaacatggtttccacaaaaaccttcgtggatctttgtcctaagccattcatcttcatcttttttagcagagtcgagagaattctcgcctatatattacctcgtccagaattaggtactgtgcaactttttagaccaagttatgagaattcgattctgttgtccgatacaacaccagttttgagtattccacgatgggtgtcatccatgcagtggcggaactagacaaagacccaaggaggggccaaacaggaaggtcaagcaaattgtatttttacctatttctttttagaaaataataataaaatt

SEQ ID NO: 117132 - DNA, 1267 bp, Cannabis sativa
actgaaagttaaacttaagtatttatgccgcaaattactctttatttttttttttaataaatcaaacaaatttattaatggtaatgagttaaaataatagtctgccatctaatcggaatatttttttttttggagatacgactagattaaaattaaaaaaacaagtcaaataattagtcgtctaatttctcgtttgataaaaaactaataagaaaatcatattaaaaagattgaagcatcacagttaattttaagaatacttatattcagttttatctatcgtttaaaagacacaatagtagaaactgtagcagcatgttcatgcaacctcgtagcttgaacactcaattattgtacaaggtctgcactatctaaaaacttcttcagtcgcagagaacttgttattctcatccactaacaatgatttgatggcgagccatcaaaaaataaagaaccaacaacaaataaaataaaattatgtcacacaaataagactaaaacactcaaaattatgtcactgaaacaaaactaattaaaatacttaaaatctttcacagagacaaaactaattgcaatatctataattgaatagtaatagcaaaacacaaacccgatcaagtcatacctatgctcaaagaaggccaaagggccttgctaaaaaaaaaaaattaacctcctataattataaatttaagaacgaaaaacactgtcactgtatcactggtgtccaatggtaactaattgaaattttagcaagtgaatatatttttgggattttattaatgatggtttgtagagatagaattgatgatatgccatttctaccattctagaataaataacctttgcgtgacagaagaaataaaaaaaaaaacaagaatgagaattatgtgactactatactgtgctgttttgtgtataacagtttcttatttttttaatagaaaaagagtcaatatagtaactgttgtaagctatgagtttttttttaagtagtaacagtctttatttatgatttatgttatcttttatccaaatttgactttttgctgaagaaaaaaagggtatgaaatgaagttagctttaagccaaagcatgaatagaaatttgcaccaaattataaaagagacataaacttaaatatacaatgtagatagaaatttgcggcaaaatccccttatgttttggtttttatacacttaacccccttatctttatttttggtggcaaaactcccttatggtttaatttttatacacttaacccc

SEQ ID NO: 117133 - DNA, 1353 bp, Cannabis sativa
  modified_base (428)..(441): a, c, t, g, unknown or other
aatgtaaggttttcttaaactcaattgataacttttgcaaaatacaggatccaaaatagtattttccatataaagttttataaactttatttttacatgaaatgaattcgtactatatatttatattatatattattaattaataatatttatttatttatataataataataagaatactgtttagatctaatctgaattaagatttgagtgatatttaatctcatccactcaaacttgtttatattttcattttaattaaataaatatttgacttaagcttatataaaaaaaaaaaaaaaaaaaaagagatgctggtagaattaggttaatcacttcattcacctctttagctatcaaaaaattagaggaccaagtctcatctctttctttatgtattttgaattttactctctctctctctctcnnnnnnnnnnnnnntctctctctctctctctctcgctgatttcaaccataaatatcattcttagttagttgagagattgcatacacttgtcatgtgtaatactcagggcactgagtaagactttgatgaacatcattcatatattcatggaaaaaagattcgaattcagtatttggtgatcactctgctacagaaaaaattcgagagctagaataccgaacagaagaagtcattattctgcaatgtcactgctataagtatactcaaacttaatgtgtttattttctcttttagaaagcatattctaggtggttcaataattaggttaattattgaaatacgtgttagtaaataagattcataaaatatgttccaacatatataacttactctcatatctcgcccagagtttaagataaccatattccttgtttaagattttgtatccccacacctccattaataacacaactaacacttagtaaatttttctaagtattaaaaagggaaccattagggtggaattaagaggatgagacaagcacacgaccaaggacatgttagagtacgaccacgtcacttgttcgacctaagacgatgtagtggcagtacaatgaggtacgaccaatacaagtaataaaggcatcacacctgcatagtctgacaccacgacaaagggtaccctgcaaccactactctgttacatgcaactagtaggcatgtaaatagtatcaataaatatctcattctcagacttagaaggaagttgtaaaatcattgtaagagagacatcattaagcaatataactcatactttctctccatggatgctccaatttttttttttttgggattatttcacaaaaatataaaaacaacaaaaaaattataaaaatatggtttcccggaattttaaacatttttac

SEQ ID NO: 117134 - DNA, 2153 bp, Cannabis sativa
cggcgactactatagccgtagcacttgtacttttattagcaccactagtgctacaagatgttgtcgtactaaggtctgcggttgtgccagcggagatggccagagatgggtaggcggcggagcttgaagtacatgaagcttcttcttctttcttttctagtaattggaatgggaaattgggtcggtgatgttgttgctgttgctggtgttggtgttggtgttggtgttggtgttgatgttgttggtgatggtgatgatggtggtgaaaatcatctccaccttccatgatcgcatgtagagaattctatagtagtagtaagcagtactacttgtagctagtattagaacaaatagccaataataataacaatagtaatggtaatactgctacttagcttggagggatatgatcgagagggatttgagtatagtgaagtagtgatgaagggttttgtttaaatgatctttacttattgctgttgttgttggccctttggtgggtctttttctctctctctctctctctttcttttttttcttttttgtgtctgagcttttattgagactgatggtttagaagcagcagctagctatgggaagagagagagaagaagggcaacgagaagcttagctagctagctttaagcaacaaagataatgagtgggaattatatgggtgacctttaaaaagggaaaagaaattaggaaaagaaatttttgctttgcttttgttgttgatgttgttgtgtggagcttttcctttctttatttcctgtatatattatttatttataattcaatatattttctggagttggggaagggaaaaaatctagattttaattttaattttaattttgtatgaagggttaattgagagagaagagaggagaggtgaagagtgaaggattcctttttattgtggttggacagcccctttggttcagactccacgtgaggtgctctttttatcattcaatccataaagacaatggtggccggtgtgggacccgatcccaagtcaaaaaaataaaaataaaatggagagacttggaaaaggaaagattatcaagtgggccccttctcattcaagtaatcatttcagtttgccctttggctctttgccttttgtatctgaacctttgctacgagatagagagagagaagactttgtaattcctcaaaataccatttagcctatctgctcttcatccctctcatattacaactcctagttaatccaaattagctactataataaaaggatcatgactcttgagcaaaaaaatgatatattttgaaaatgaatttggtggcctattcaattcaatatatgtattcatttatataataaaaataaaaacaggaacagggccaattatggatccaattgacaccttttctccatcatgaaaaatatgggttcgtgcgttataaagtaattagtagagagatacattaatatgctttgttggtttgtttaagttggtttaataagatataaaaagaatgagctggctacgagtgtgtatacacattttacagaagcaacgacgtttttttttttttaattggtaattaagttagctttagtagtttatagttttgtctttaatgaaaaattaggtgtttttacacactttaagtttgttgctttgaattttctctgacattgtagaactgttgcagactgaaactaataactaaattataaatgtaaaatgtacagagacaaatatagaaatattgaaatattgaaatgcatgaaatattattttacatgaaagaaatgtatgaaatatttgtaccaacacaaataatttgaaagttaatttttgagggaaagcttagtactattcttaatataattgaaaatatatggagattgttacccttcttgtcaaatattaatggtcagaggggttaaaattgaacgtgcaattatgacatcagacggtaacagtaataggtacttattattattattattattttaagttgttaggttagatcaaacttattggaaaattctacaatgcaccctcttaaaatagatatattgatgcacccttatctattttagcacccgaaataattttttagtcaatttttttctcgtggtcttgtatgttatagttatctaagacatcctg

SEQ ID NO: 117135 - DNA, 2072 bp, Cannabis sativa
ttttgtcatttaacaaaacacatggtccaatcagtaacttttgcaaaacacagggtacaaaatggtatttacccatataaatatttgtatataaaataaatgataattaatgctaattgcctttattaatccataaactaatcatgcgatcattataattattccccgttaaatggatttcgttctccaaaactaacctgaataactctagatattgggccctcatactagactctagctcccaggtggcttcctccaccttactgttcttctagagtaccttgaccaaagctatgatcttatttcgaagaactttctccttcctatcgaggatttgaactggttgttcctcgtaggataaatcgaactatagttctagggctttgtatctcaagatatgagtcgggtatgacacatatttcctcagcattgaaatatggaatacattatgaacagctggcaacgctggtggtaaggctagccgatacgctacttgcctgactttctcgagtatctcgaatggccctatgaacctagggctcaactttttcttctttccaaagcgacttatacctttcattggtgaaacacgtaggaaaacaagggctcctatatgaaattcaatgtctctgcgcttatgatctgagtaacttttttgtctgctttacgaagcaagcatcctagccttgatcttgcctattgcctcattggtccgctgaactaattcagggtctaaatacttcctttccccagttttgtcgcaatgaattgaggaacaacacctcctaccatacaacatttcttagggagtcattcctattgtactttagtagctgttgttgtaggagaattttattagaggtaaatatttactccataaaccttcaaagtccatgacacaagctcgcaataagtcttctcatatctgtattgtcctctctgactgcccatcagtctgagggtgaaaagatgtactgaatttcagcttcgtacccatagctttctgaagactcatccaaaatttcgatgtaaactttagatccctatcccaaaaaattgattttggagcttcatgtaaacgaactatttctttaacatacaattttgcatactgatccactgtataagttgtttttatgggcaaaaaatgtgccgacttcgtgaaatggtccactatgacccataatgaatcatacattactgtggttctgagtaaaccaaccacaaagtccattgtaatgtcctctcacttccattcaggaagcgctaaaggttgcaataaccctgcaggtttctgatgttctgccttgatttgctcgaaacacacactcgagctttataaagtaacattccactgctcgagacggagaaatccttagtccgaccagctaacattccctctctagtcttcattgactcaacgtcttccaattatgcctctctaattctttttaaccaatatgactggagcattaggttattcaattttccaaccacgaactctataccagtcctaaccatatctgaagccaactgaagtgagatctttatggtactggaaacctacccggaaccttttttactcaaagcatctgccactatattaactttttcaggatgatataacattttaaagtcataatccttgactagttctaaccactgtctgtgtctcatattcaaatccttctaagtaaagaaatatttgaagctcttgtagtttgatttaggtagatacttgatgtggtgttgtgttcatgaattctattaataagatgatgtttgtttttggattatttatttagctatagtttatttttcattttacttaccaggatatttgaatcttatattttataatatatatttctattgagtgatttgtattttagtatatctttcccattattttattttgacataggctgaagcaagatttcccttcagtctaagatagctactttagctattactactactagataggggtgtgcagaaaggcatccaatccaatcccaaccgaccgatccaattccaaccgatctaatagaatcggatatccaatcataatt

SEQ ID NO: 117136 - DNA, 1850 bp, Cannabis sativa
cacaaggtatatttagatggcacaaacctacagtgctgatactcttgcctgaggctatctaattcagccatcagtgcaggaatctgctgtacatctgagtgtgctatttgaagatcttgggacaattgctgtgctttggaaataagttcctgccttgctgcaaccaagctctgtgcttctgctcgagctttctgcagttctgatttaagaggctctgcagccttcaattcagcttccatcttggaaatcttctccatcatgtttctcatccgttgctctctctcggccttcacagcacctatttgaccgtgcaacatttgcaactcatgttgtgcaccggccagttcttgtctcaaggttccatgtgtggaagcaagcctctgattctctgtcacaagtctctgcatctcaatatgttgtgcagcgagcttgtgttccataacttctggcggaggcatcatatcaaaatgtggaaatccacctggtggaggatgcataccacggccaaattgctcaggatgccccatcccagggcctggaagtgggcgccgatgatgtgaaggcggcattcgacccttgcttcccattcaaagggtctaaaaaccagcccaacggctggtaagaaacaagcataacacatggagtcagtaacaatttggctgataaagcaataaactgaaagtaacccaagtactatctactcatttacacgtaaagcatgaatattgttgaaactgacaaaattctaggaaaaaaaaaaacatagcaattcattcacagtgcaagaaccaacacgacacaataggtttacatatgaatcacaacataaaacaaaaggagaacataagaatattgcataaacacctctaacccaattgagaaaggaaaaaaaaaaaaacacattgagttgaattatacaaagatcaaccattttatgctactcgtgctaaatatctaattacacgggacttttgtgaagaattggtccttatttggctaaatgatcaaaccctagtgttttgcattgacgagtgttgatgccacagccaagatgtttcatccatggttcggataaaggttgagttataagttttagggtttcagaaaataaaataattaaaaaagatgaaaaagaataggaaagagaaggttgtggtggtgggttacctgagcctgagattgaagctgagctgaggagagcagagcaatgaggttttgaggatgttgggaacgaaggtgagtacagaaagaagaaaggaaccaatatccgcctacggaacggaccctctaagaagaagtggcttctatttttattttttttcaatttggcaaaaattaataattagcatttttgtttttttgaatttttcgaactattttattttatttgtcaattaagaaaaacagcttattaaaaaaaattctaaaataataattattttctaaattaattaatttttataccgaatagaactaattttaattttttaatgattcatctattcagacataatgtctattagttctatcaatatatattaatagtagtagggatgtacataatataaatcttcgtaaatcgtccaaattaaatcgaaaaactcgacaaaaaatttaaatcgaaaaaattcgacaaaactataaaccgtccaatttgttaattgtgcgggttaaaaataggtctaatctgtccaattaaactgaaataatccgcccaacccaattagtagttttctaatttttttggggaaacttacaaaaatactagaatttgggttaatttttacaaaaatactgtcacaagaaatttttttcaaaaatactgtgtttttataaaacaccagtaaaac

SEQ ID NO: 117137 - DNA, 1192 bp, Cannabis sativa
tcctgtaaaactcgatttcgcatttactcttgcccttgaacctcagccatttcctgttccatccgtctattctcatacagagcatactccgaaaaacaatctttaattcttgatcccagccggacccaaggcccatacattggcaccgttctatcaaagtcatcctttatcattctacgttcacgacgacatcgcatctcctcatgacctataatcccacatttataacaaacttgcggtaggttttcgtatttgaagtagcaccagaggttcaccccctccggcatcggtaggaagagacccatgagaaggggttgacgaagttgaacattaacactgaaccgaatatactcccacgtgagaaatccgttcttccacatccggtcaatgctagcccccgttccaatccggtcagcaaccgccatagcatatttcatcgtccaaaaccgagggggtatctcataaacccgaacccacagctgagagacagtaaaatccacactcctccactgtccgttctccggcatcagcttagccatcatgaaaccgtcgcacaccttccatggggcgttcttaaccaccagctccgcctcatgtctcttagcgaaccgtataatgaaggtgttagcagccaccccttcaatcttccagcctttagccaaacgccacttacgagccagcaccgccctcagcagacccagaaaaatcagtctcctggttaacaaccgcaccacaactgatcgttccaccacatccttacccaactcagcattttcctccagagagatggataactcattgagcctactaacgaccgtctcctccacaacctgcttgcccttatcagccattgcaccaagagaaagaacaagaacaaaggacgcacaaacaacctcacagctcgcaacaactaacacaacttagaccaccgaatgatccagagtatacaaagatacagggttacgcaagaaaaaacactagaccacagaaggatcgaaaacttaagcacctagtgtgtacggatttcgtagtgtacggagagaaaaattgccacctatcatccttttataaaaagaaactttatacaattaagattttaatataaagaaaatagttatttaaatgtctaatacatatagtacaattatatttcaaaaattaatagatcaaatgtatattctattttatatat

SEQ ID NO: 117138 - DNA, 2191 bp, Cannabis sativa
gttccttaaatccttcatagcataattaaaagtcattgaatttcttacatacaaggttgctgctaagtctgcttcacaattagtttgacacaaaagcatttaataccaccgacagtgggggaggaccggaggaatataaagatgagttaactctaagagaagcatgtacaaattgaatatatcaacttttacttgtcagttcagtaaaatatatcccctcccacccatcttttctcttatacaactaaccccagaaatttaaaacaatcaatttatcctttaagtaattgaatgagacaattcaactttttgttctttcccactagactctataacagatgatgtttacctggtaaatagtttaaaatgtcattaatgcagcataaaggtttattgacagatattaaattcaattgacaagcttaaaatactaaaagagacagtcaactaaagaagggtaaagtgaagttaagaactaccattttgctcttgcgaaaaaattcaatgccattggttgaggatcaaggcaaggcccttgagtagcaatcttgtaaagcccatataacatcatcttcacatcattatcaagagctgaaactctatccacattactagaggaaccaacataccccattgctgcaccgaacagcctctccaactcagttctttctattcccacccaatcatcatcttcatcaaacaagcccccctttgcatcatcaccacctccataattgtccacttcatcaaattcagccacctcaatttcatcacatttagccagaccctctttctcattggtgcccgtacactcctcaatctcttcaattatatccctctcagaacttccatcaaacaactcacccgctctctcattaatcccaccattacctccataactttcttcctcaacaacactctcatattctccttcagtctcgaaaaggtttcgtaattctacagacccaaaatcacgatcagcaaattcctgagcagcggcaaccaacccaccttcggatttctcaaccacacaaactttttcaacaaacccaactcgctcctcctcactattcaaaccacgaatatccgattgaacagagaacttacactcaaaaaaacccagtttgctatcaccatgattggaatcaccactatgagaagaaattagcttaccgataatgtaacagaacagagcagtaagaacaacagtggaaactaactcaagaaaaagctccatgatccttgcacagagaagaaaaagaagacgagttttagcttaaaaaaaatgagagattttgttgacgaaaaccaaaaataaaaaataaaaaaaaaatgattaaagagaaagaaagagaaggatattgaagaacagagcaaagtatattccaacttttgcatagtttcttcgtacgtgtcggtccaatttttggtgtcaagcttttacaaaatgaggtgtgtgcgtcactctgttatttcaaaattgaaaacgactcttctaccactaaatactaattgctaaccgatcaaatagaatcccaaaagagatttttctttttcttaaacaagaaaaaaaatattaataataataataataaatgaggggggaattggttttaagaactgtttaataagatgcttaagaactctaatgagggctactttgagtgaattaatggtaccgaatatatttatttacaattttgttcattcacgcaaaggttttcacctttttatttttcagttcttgtcacaactttttggttcattactgtcaatataattcaacacaaaaatttttatcatagggttaaacaaaaacaatattatcaatattatttgacaatagtctcgtgtatatgcaaagaacatacccctatgaaaattggaactgaaattaaattaaagttaataaaaacttacattattaaacaacccattgtttctgattatctgtggtagtagcagagtgttgtcaatgtcaagaatttgaagagagatatagaaggggtttgactagaaaagaaaagacttgctttctgattatatttactaaaattcatcaacacacgtagcacctatttatttataggtttcaccgaaatcttatttaaataataaatatgagttttttcccagttttttttttttttttttttatatatatatatttttaccaaataacaacccacat

SEQ ID NO: 117139 - DNA, 1678 bp, Cannabis sativa
aatgagttttatttagggtacaaaacccaacaagtataaaggtaggaagagaaatcagaagtttggtggagtagagagtacagagctatgaaccgaactataaaagcaaagtaaatggaaatccttaaatagacaaaattagggtaatacctggagtagaaggggctcattgaagacctagaagatgccaaatcgatccaacctagacatagcccataacctgaaaacgtagaccctctgtggaagaaaatccaactagaagagaaaacgacgacaattaaatggctgaaaagatggggagaagtattttggccaaagagagaaacctgaagcaataaattacaattagtaaaggaggtattatcagccaaaattaattgccctgctgtaatcttctctttgcctctcaaatcggcctgcagaggtaatttattacctctgaaaagagagaataagtacatagataataaatgcaaagatttggttggggcatggtagaagatgagaaatttggttttagaaagtgtgaaagtagagatgaagatgctggcaatggaaccagagaatgaaggggatgcacctctaggaaacttccagagcatactcggagaataccaatttaagtgacttataggagctgggagactccaatattgttttccaattaatccattgcatcgaagtaatttatggtttagagacttgtttatttttctttgaacaacttcttgcctctattaatgtcgtgttatgataatattttatattttttgttaacatataaagcaccaactttgttcctttgtaaactgttgtttatgaattatagttcaaaaaaaaattattaatttttaagatttattttattctaatatttaattaaacaaaatatacaaaaaaaaaaaataacaaataatgtatcaaatttaaaataagaaatgaaacaacaaccattgaataaaaaataaatgacaacaacaatttttttaaaaaaatagtgtaaatttaattttttataaatgtaacataactattcatatgaacaccaatatttatttattgatgataaaaataatatgttattttttggagtaaaatttgaagtggtttgatttgaagtagaaaaatgtgataaaataaagttaaatttgatttaaaaagaagtaagtagtgattggagatggtgtaagcaagtgtccagtggtttatctccaccaagttgtgtactgccatgtgttaaagttgttctctttctccatcatctcaaatgacgcgcattttcagagctcaacatctgtccgcccactcttccaactgccaccagatgtgacgtataggaccgctctcgtcagcttttttgtggcattttcttcactatcttaaaacattaatctcaaaatatcaacacttcaatattttggcaatatccatattcactcttacaatatacagtttcttaagaattttttaaacaattatatttacagaaatttaatccttttgttacgtctcgtctcattattttatttaaatgttgatatatctttatcaattagtaattttactatctaaattttaacaactatcaaatcgtactccctcaaaatataaataagaaagattcaatatttttctttttgtaaatcttaaaaaattaaggaactttttcatttttaca

SEQ ID NO: 117140 - DNA, 1314 bp, Cannabis sativa
  modified_base (27)..(33): a, c, t, g, unknown or other
gttaaaccaagaaatgccgttagatannnnnnnttaatatataaagataaagataaaaattaaaacatataaagtaaattgggtatacaatataattttatcaaaaagaatagtacaatttataaataatattttaaaatattttattatacgattatagatcttataaaatactaaaaaatttgaactactttattaaattattattgattctaatataatttttttaaaagaaatataggaaaaaagaatatgaaatatttgaaaaaaaaaataataaataactgtaacaattttttttttttttttgcatgggagtgaccaatgacaaggtgttagtcacttgaaaagttgggttcataccaaaaaacataaaagacattaaagaaaaaaatatactagacctttttttttttgagccatgtgaagtaaccgagcttacacactagaccttggttgaagaacaaagaagtaaataaccctttcaacagatgatgtaaactcattttctattttaaaacatctctattttctttaaatgattctttatatgtagaaaagcattattctttctttaaacataaattaataacatttaaattttattttattaatatgaattatacatattaaaaaatatattgttaaagtgatatcaagaaaatataaacaaaaaataaagaagcgaatggatagtgggctgtaaaaggttataaaatagaaaaagtaaaattttgattatgtattataaagggtagagtaaaaaagcggttgaaagtgctctaaccaattgctttattgatttccctttattctcttatagattaaaaaaaaaagcttactacttagcgcttattttgaactgatatttctaatttataaaatattctttaatctttacatggtatcagagcatacaacttggctcatgccaaaataatgtcaacaggaaatagccgaattcaattattatcgacaacaataagaacacatgcatttgttgcctttgctactaacaatgttaatatgcaacattatcatataaaagttttacaccattttaatttttttttttttttgtaattaacagtataaagattaattatattataaatatactgcatgatttttataaatctgtaaacattgattagacaaataaaaattgtatttttgtgacaatatccataataattcgttcttttgtaaacaaaattatatgtaacattccttagttattctttgggaaattatagtaaatgaccccaaatcataggagtatgttagtttatgtcatcttttcaaaaaaatata

SEQ ID NO: 117141 - DNA, 4410 bp, Cannabis sativa
tatttaattttttttcacactaactttttttttagtgggggctatagcccccacaatcttattagtgtgtccgtccctgattatgtccattttgttaaattttgtttcttttacagttaaaagttaacatttttaccccctaaattttgaccaatacaaaattttgctttttttattaaaaaaatataattttaaaaattacaatattctattaattatgaaaaaattaataaaaattattaaaaaaattaaaaatagtaatttaattaaaacaaatattaaatttacttaaaaaaacataaattattcctaaaaaatattttcaaactttattttatttataaatatgtatcttaaaaaatcaaactaaaattattaaaaatccaataactaatttaaacaaattaatattttttttaagaaaaaatcaaacttatttatatttataaactcgtatcttaaaaaataaaaaaaaaataattaaaaattcaataaaaatataaaattatttttgaaaaaagttagaaattaaactagaaaaaggttatgcttacttaaaaaatttagatatttagaaagaaaaaaaatagactcatgtttattcctgtaaaatttagtttttacaaaaattaaaaattttaatatttttttttatatctaaatgatttttttcattaaaaaaataaatattttttaaattgcttagttagttttaaaattttgattttgtttttaattttcttaatcattaaaaataattttttcttaagatctaaattaattttttaaaatttactaaaaattattgaatctttttcatttttattttgaaggggtacgatttgatagttgtcaaagtttaaggggcaaagttactaattaacgaaaatacatcagcatttaaacaaaacaataggatggaatccaacagaaggaccaaatttttataaatataaaagttcaagggcttaacaaagcagtatattttaggaggcaaaatcagtattgtcgaaagctcaaacagtaaaattgctaattattcaaaaaacaaaaattgaagaatatgtgttaaaaatatgcttcatcgagcgagttaaaatagctcaaaattttacaatatgaaagtgttccgctatatatagtgaagtattattcattctttaaataatattttaataatttttctctcttctctttctatttttttcatttaatatatattttttttgtttatataagtaaaatatattataaatataatatttaaatgatataaagaaaaaaaaataaaaaaaatgatgtatgatataatgtaaaagtgtaagttaaaatagagaagtaatttacggccaaactccttgaattttgaagtttggcatgatcaaccccctagactaaaataatttgggttgaactccctaaatttcaattttcttttgctatgtactattttcatctactttggtctgttaagtgtcaaagtagactgtcacttcccttttttcttcttcttcttttcctcctcttctgcgagtccaccccccacccaaatctttgtacaatatatatcataataataccttaatccatacctaaacataatataattgaaaaaataaaataaaaactattttatttctacatctttttttaaccaataccacctgaactaaaattaccgccgcccactacaaccacaaccacaccactgcaccaccataaacaatcaatgccacttccaccaccaccatcaccattgcatttttaagatccaaaaaatcaacacccaaaaaccaaaataaaaaaaaaaaacaaaaaaataatcacaaattgggtctaagaaaacaaatgaaaacccataaataattattaattattcacacctctctttctctctctcccattcagtcgcctaccccttagaacaaagaaaaaaataatcagatatctcaccttatctccctctctaatattcagatctcaggtgttggaatgacattcgacagagacggagattggacaagacaggatgggacgaggtgacgttcgacgggatggacgggatgataatggggcgggactcgaggaggtggtttgctggtgacaatgtggtctcagtaggtggtggttccattgctagtggtaagcttctaagcttttattttctatttatttcttttctcctcagatctgaacttctcagcgggtcaacttatcgtgttcgattggggttctaggttttaagctcttaaggctggcaccagatctatcctataaggaataaccagttcagattctcgttaggaaggacaaagttctatggaacaagactatctccttagtcaagttactcttgaagaatagcaaggtggaagaggccacctgggagttagagactaaaatgaggactcaatatccagagttattcaagttagatttcgaggacaaaatctttttaacgggaggatagttgtaatgactattatacgtagacatgagattagtgggacacttagcactaattaatctaactatgtgattaattatgtattttatgctttatagatcctatttttatgaaaatatctgttatgattattatttctcaattctgaaaattttattgaattataggtgtaacatgcatgctatatgtgaattttcatatttttacatttttatgccctctaacattggaaatgggccgaatggcaagtttagtcacatggatacaaatttgtatcaagtattttatgggacaatattattggatatcttagaatatcagggtttaacgaaataacaaaattggaccgttttacccctagggttacgagataacttagcggggaagtaagggcatttcaatcttttcacccaaaaagattagtcactctttttggaagggataggtggatgtggctcatccttttgaggatgaccatcttctttggaagcaaacaaaaaggaaaagcaaagtaaaaaggaaccaaaaataaaaagtaaagtcaaaagcaaaagcaaaaaggaaagtcaaaaaaataccaaatcaccttttgcttttccctctacttcgtggcttctgaactagggctaaaacccagtgttttccaccatttcaagcctcttcttagctagaattcatcaaggagttcaacccctagctcttccaaactctaaggtaaaacctaacctgaaattttttagttttctagggtttttgttagttttcagtggctatttttggtagaacatgttgaataagtttataagggttatgaaatgtttattaaggttatttaggtctgtttagaagtggtttggattgttttgggtggttgtagcaaaagttgtatcaaacttaacttggttgtgataacttgaattctattgctaactgggttatggtttcttcatgaaatatgttcattatgttgtgtttaggtgttctacaaaatttggtaatgtttggatcaggattggattagttatgggatttccaaactcagacaaggaggtttcgggccattcgatttaggaagttttaggacagccatttagtttgatttctattgataattttattgagatttcttcttgaaaatttttcattatgattattttagttactttgaaaaattttgtaaggtttgtcttagaattgcatgagttatgcaagtttcaaaatcagatagtgttgttttggaccatccgatttaggcagaatttgggggtccatcttaagacttttcctgggaccccaattgagtattttctcaataattagggtatttccataatatcaatggggaaacttttagctgtgaatttaagtccctgaaagtgttagggcaacacatattggtttttttagaaaggtgacttagggccttcgattaccaacaactatttccactaaggttgaccggcatacctgaaattaaaattgcggtaagactagtataacacacatacatatgtacatgttcatatttatgtttgcctgacatatcgacgatagttggtgtatacatgattgtatcttgatatcgtgaatgtatgtgtttggcaattcagaagtatgaaccaatgccaccaacactagtatgccaggtaactgagtgcatgtggtattatggttggatatactttcgaagcatgaactagtgctatcgttctaacgagaaggccgacgttgtgcaccgtgagagagagtgtgtgagagggggttggagaaggttgggtcgaggtgtaggcgactggtagctagggtttttttagttaagaagaagaagaaaagaaaaaaggaaaagggaaaaaaaataaaagaaaataaaagaaaagaaaataatttttttatttttataattttaaattattttttaaaatattttaataattaatattacg

SEQ ID NO: 117142 - DNA, 1560 bp, Cannabis sativa
ggtgtaaggacccaatggaggcttgaagcggggacgttacaggtgagaatacctcattgtaatctattccttctttctgagcataaccttttgctaccagtctagctttgtatcagatgttgtctttacttggaactctttccttcttagaacagacccatttgcagccaataaccttctttcctttatgaggtcaaaccaacacccatgtcggattctggtgtagagacttcatctctccatccattgccaacttccatttcttaccaccaacactctgcacaacttctttgtaaatgcatggggcgtcatcatcaattatttaaagtgcaaatgctaccatatctatgtatctggtaggccttttaatctcccttctcagtcgagtagctgtaatagattctgattgttgattgactagtgatgaagttgagggaacctccacctcaattgagatctcttctcgatcatcactttcatcttcaccatgattgtcaataatattttttagatttttcggtatctcaagctccaccttagaagagtatttgggctttcattctctttcactaaggtagtctatcttagcataatagacttgtcaaatgtgacatcttagcttaaaacgatcttcttcgattcactattccaaagtcaaaaacctttgactccttcattaaagcctaagaaaataactttctttgatttaggatccagtttggattcatttacaaggaaatatgtaggacatcccacttttctcgcttagtttaatgaattgacgtcctttcaaaaaaaaaaatcataatcacaaacaagtttccagaccatacctttttaggtatcttcccatatagtgcagtcataaatagtctgttgatgatgtgggttgcatatgacaaagcctcgacccaaaatgctttgctcaatttagattgatataacatatatcaaacttctcaaccaatctacggttcatttgttctgccatgctattttattgtggcgtatagggtactaaaaaatgtcttattatcccttcttcttgacacacttctaagaaaggatctgatttgtattcaccaccactatcagatctgagcctcttgatctttttgcctgtttgagtctcgatcgttttcttccatttaaggaagacatttagaacttcatctttgtgtcacatggtgtatacccaaacatatctagaggaattattaataaaagtcacaaactatctttttacctctatgtgaagcattcttgaaaggtccccaaatgtctgtgtggatataatctagagttcccttagtaagatgaacaacaatgccgaacttgacccttgtttgcttcccaacacacaatgcttgcagaagtcaaactttctggtcttggcacctttcagtagacattgcttcactaagccttgcaaagcattctctctgtcatgcccctaagcacacgtgccaaaggcgagaagaattagatgtcttttcttcataactgcttgttaggttatttttagtattaattttagattaagtttagtatatttttaat

SEQ ID NO: 117143 - DNA, 1588 bp, Cannabis sativa
aaaatacaaggtccatcttgtcatttaacaaaacacagggtccaatcagtaacttttgcaaaacacagggtccaaaatggtatttgcccatttaataataataataataataatcatttaatgtaaatggacatcttaattaaaatttaataataaaatattaaaaattacataatgttaaatataaaaatataatatttattatgatgtaaattttaacatcatactatattgtaatccaaattataattactttttattatatgagatatttatctcacaatttgttaataaaatggcctatattttacttatgcatcacttatttagcactaataaaataactagtatcccatgtaaaattttccaaaatatatttatttgagttagtactcaatccactgttctgttctacgaattaggtcaccagcatgtgcaatagtactagggtagtaaatacaaaatacaatatagtactacaagataataaattggatccaatagtagttggtgtgtagaaacctcaggccaggctggcgaagtaatgataataagtgagaaagtcgtacgttaaattcgtcaacaaactcaagggtggcattcccatttgtatgcacaatacacctatataaattaacttcagctatatacataatttctcgacaatatataatgaacacctgtttgttttaaagagatttcagaacaatcagctgtctaagcatcaaaggtacgcatttttttaagttattaatttcattttcatttgaaacatatatataaatatatatatatatataatgaatttgaattatttttcgaatatggagaagagattgatcaatttccgatatatattctttcatccctcttttgatatggaaagattgaaatttcggagcttaaaaaagttatgagaggttgttcagttgttgttattactagtactgttcctgtatatctatatgttttttcttaataaactaaagtttatatcttcacatgaagatcttaaacattttgttattcttttatagaatttattgatgtataatactaacttaatgttaatctagcataatttaagagttcacaccaaaaaaataaataaatggataaatagatgaattataaaactatatttagctaatgttgaatgtttattaatattaggcacaattaaaaattactcatataggtgtatattactcaaaaattcttaggtattgtagtagtacttttatatttgaattctatctttctactttttacaactgcatctattgctctaacactttgatttcacgtcaaagattcattcctatatttccacaaagatttctaacacaaccacgtagaactgcatgctttctaaacttagaaaccctaaattttgatatccatctcaacacacgaaccaagcttctggcttctgttctccaattcagccaggatctaatttctttcagacatgaagcacttaaatgacaataaaaaaaaaaagggatattggcggctaaagcacccgaattttacggtttgtaacacttaaccacaaaaaccgaatttggcggctaaactacctaaa

SEQ ID NO: 117144 - DNA, 1642 bp, Cannabis sativa
  modified_base (554)..(561): a, c, t, g, unknown or other
  modified_base (1572)..(1607): a, c, t, g, unknown or other
aatggaaaaaatctaactagtgttgggcccacttcatggccggccactaggtccttattttgcttcacttttatcatttttttttatttcaaataattaaatgttaaccctaagtgaattagtataaaaagaaaagaaaggtctcattatccaactaatgaaaatattaactcttgacctagttttcttcttgtgagacaactagtgagtttgattcttcttcttcttttccttctaattttcgaattctatagccttcttcacaaaacaaattaagcctttagtgattgagtgcatgtccacccatagcaagttagtcctcaatcatagtgtgtaagactgtaaagaatctaaataactgaaggagtttttggctaagatcttggtgatactctgcaacagaaagaatacaagcgttagagatatgagtggaaggagcgatttaattctgctgcaaccaatgtagggtttctcatagcttttatgtgtttattttcatcgttttagagattcatatttaggatgttagaaaaaaacatacttgttagtaaatnnnnnnnntggtaaaagatattccaacaatattgacttgcagaagtgtccaaatcttatttcgggggaaaaataagaccgatcctcgaagtagaactgttgtttgaaggactgaacaccgagccccatgcttgctggtacccggtgatgcctaggggctaacttgctacttaaatgacattttatactgattcaaagtctcatatctttttttttttggagaaaaaccattagaatgcttgagaaagaatggcaatcaaatttacagaaccactagcggggtggctatgtcaatctaggcggctagtgacttggaagatgtgaacttgggcgcccaacttttcaagggcctaaattgatttcttttattctcgaaagcacttgtattgtgcttgtggttgaaaataagggaaatgctcatagaacttctgtaaaaggaagtctcaaagtgctcatggttgagacatgtcaacatgagcgcccactttggcctcggggcatgcactgggcagccaggtgggggtcaaaatcttcaaaattcattttgttgattctcaatcttcttttcagtcaaaagttcttgatatatttcagtttcatcgaatttgcacatgcaaaactttgtgaaacaaaatcagtgccctggttaaaatgtcaacctagggtccttcgtgatgttgttgatgaaatatcatgtccttgtgttatgtcttgatggatttgaggatttgtgatctaaaaatttcttgagaaacctaaatcctagccatggtgcaccaagattgactatatgtcatctttggcgccttttagggcttttagctgcccatgtgcaatttcatgtagactcatatctaaagtctaaaacatggctctggcatgtctcccatgtatcttagtaaaatggttgagcagattgcccataagaagttgataagaaccaaagctgatgtgagacgacttacacaatgtcaacttaagcacctagtactaatgttgtgttggaaatattttaccagnnnnnnnnnnnnnnnnnnnnnnnnnnnnnnnnnnnncctaatatgaattctaaagcaatgaaataaacaca

SEQ ID NO: 117145 - DNA, 1656 bp, Cannabis sativa
  modified_base (135)..(135): a, c, t, g, unknown or other
  modified_base (397)..(407): a, c, t, g, unknown or other
tatttattttttttaaaaaaaaaatgcatttataaataaaaatgaagttagatctcatggtcattacaaaagatattaacagggtatagtatatatctctaccatgcccgtaacattgttggcaaacgcccattngccacattatgagccgcgtagttacagtttctagctatactagaaaaattacaattagtcataaaagtagagaggagcttgcattgacgcacatagttctcatcaatcccccaaatagagtcatccccttttaggttcttaataataacctctggatcactctccactaacacaaaaaggtgatgcaagaagtaaccttatataaataaataatctgatcgtgatcatgtttatgtttatgaaattattattattattattnnnnnnnnnnntattattattattattatgagtgacttgaatgcaacaggaaaaaaataaagacagtaataaagtgatcctgagaaagtaataaagactcaaaaaaaaaaaactgtttttctctgaaatgaagaaagaggttcatcacttaactcttttaggacaaagttactgatattgctcttatctatttttgtagacaaagacaaattaactctgttttcttcatcaaaaccaccaaactaataagtaccaaatttttagtcttgatcaaactagactattcatttattatttatctttatttattgtgtatcaattgatttgatttttggtcttaattaataattattcaattttaaattaagtggtatagatatgtacgtatagaaccaaatgtttggttagaagagaagaactatacacaataaataattattgtgttttctgttctaataagtcctaacttgttattttaaattaactctttttattttttttatactaaaactttgtgtgggtaattttaaattaattgattaaatatgactcaaataaaatatagcttttcttattattttatttaaaatttgaaagaaatgaaaatgacaggtatgatgacattaatggtctacggcctaattgaagatggagaaaggctatttgaatttcttatctaattaattagggttttgtatgacattaatgctcattttacaacccatttttattatttcaagtaagtttttattgttctttacctagttttcttttttgtctaataatcttactctgcatgaagatagaaaagagcaaatttctaatttagggtaagtcattgttatctttcttcttaaccctaattgcataccattttcatataatgactcttcaatgcattaattggcttagttttgtctcttactattgttttactactgatctgtattgaattgactcactatattatatatatatatatatacacacgcatcatatagatttccacaatctcttctctaacatatatgaatatttttctttgcttcttcttcatcgtaaccatatatatctcactatacaaactcttaaacactcttctaatgaaaaccacaacaacaacaatggagcataaagtggcactataccaaaaactctaattagtggcatttttaaaatgtcactattactaatatttagtgacattttatattttagtggcatctttataaaatgtaagctatgctaatgtgactaaaa

SEQ ID NO: 117146 - DNA, 2979 bp, Cannabis sativa
  modified_base (2452)..(2462): a, c, t, g, unknown or other
tgtaaagggttttatttagggcacaaaatccaacatagtttttctttttgatgttaggattgagttgttttatgttagttttggttgttgttgttgagaaagaccaaggtttgagtttttaaactcaaacttaggtctttaattttagattttgtttcaggagttcataattgttgttattgctttaaacatgtttagcgatgttgaattaggtgttctggatagtttggtacgatttggggaagttttgagcatgtggtgtagtttttggggttttctacaagaaccagtttactggttttgtagaaccggttaaccgtttccctaggcaggaccctaggaacggatcgccattttgggatttcagtttactgattttagcagttttagaaccctatttttcgtattttatcgatatttaaggtattgccacgctatctatcgatagggaaacttctagttttaaatttaagttctcgaaaagtgatttagtgtatcacttatcagtttacatatgttgtgacttaggggtctataaattgtcgagcagtagtttccactcaagttgactgtaacacttgaattcggaatcaaggtaagattagtgtgatagtatcatatgtgtttacatatttagtgtacatattttatgattgcctattagatagcatatcagtaagagcggtattagtgtacatagagttgcactgaatatcgacaagcatatgtttggcaaagtgcgtattgatgttatcacattggtacgactacgatatcgagtatagcttgatattatggtgaattgtactgccatacaaatattctagatagtacgtgtgggacgcgggatagggttatgattgggtgtatgggttcctagttataattcggtttatgttaatgttatgattatgcttttcttactaagtatgtcgactcacagttattgtttatatgtataggtaagagcaaggctaatgctgaacaacagtgagcacgagcgggtgaagattgcactcgggttggttagacctggagtgttcgatcttctagacaacaggctttattttgatagttgttaggcaataactttgtatttaaatattttgtaatacagttgtaattttaaagacgggatcccggattatgtaaagttctttttatttaagtttaaaggttaattaataaagttttaaattatccacgtttttcaataaatcctttaattagcaaaggagtgcatatcattaagatatcacgataacacgcctaatttattagggtgttacatgtcaaaatatcacttaggcataaaaaattcatctctagctcattttccaactgacccagtgtctaggttaatgtcaacttgagttacaaaactatttcaatgctctatcaagtcatgtctcacactctaatcgtaattctgaagttatcgactcaaaattttacccccaagggagttatgaatttaagctacagtttacccgaagcgggtcccacaaacacgagtcaagctccaaaaattgatgaccgattttggagtcagtttcattgttagatcatcgtcaatagtaaaaaaatagcctaaatgtatttttccacatttttttgaaatattttattattattttaattggacctcattccttgtaaaaagggagctccacaagcattttttttaagttcagagcatctctccctagtttctctctagaaattagagtatccagacttagccatttttttggaatccatctcgtgagaaataaaacttgaggtagacatagctctgttactatcgtgatacaggaagtaaacaactataaattattgtgtctctcttatttatacttaatttataatacattctcgccaatctagcgagtgagtgtgaccagataactgtatctagatttctacgtcaatatttcaccatttaaaatatatgttttatgtttattgtattttaaataattttcatttatttttttaataatttattgaattttttaaataataaatcaaaattaaattatttgtactaattagagattgccacattgcatcaacatgacacttaacaatatggtatctatggctgccaaatagttgtaacggaagccactttcaccgctaaaacatagagttatatatttaagtgaaataaactaaaaaactcgagtatttcattgctaattattcaattagtattgacgctataaaaactaaggtggcgtttggttggaggtaatgaaataaaatagaatggaaaggaaacaatttttattctattcctttgtttggttgtattttaaagtattgaaatggcattccaatagaatgccctttccaccattttagtggaatgactattccattttaaaatgaaaggaaagaccatttcaatgtaacatgagaaaatatttaatgatttttttatcaattnnnnnnnnnnntttaaattttattccatttcattcctattcctattcctatattttcattccacccaaccaaaccccacctaaatggcaattaagtacatttcccctagtatatatgacacgtttgagagctaacaaataagggaaaacgaaagaagctccatgtgcttgtggaatatgtgatacaacattttgatttgcatgcacatgtagatgtgatgcatattgatttgcagtagcacaattagcaaattaaaactagttaagcgaatgtaatcttacaaattttgaaaatattggaagcctaattgcatgtgctaactatgcatactaataaaatatggttcatgattttcataatagtactatatatgatcatgattttgctccctttctggtttaaaaataatacatattgtttgttaggattttatgctttaattaaatttattttaatataattttatttactaattaataaaagattaaaaattattttatgttacatggttcacattattactttcat

SEQ ID NO: 117147 - DNA, 981 bp, Cannabis sativa
ttattattattattatttgtaagaatgattttattactaaatcagctcaacaaaaaatcagttcaacaaacagatctaaaaaggactccaataccactttcaatcaacttgactaattcttatgggtataacattcatatagttctcttatatacatctccaattccattaatagtagaaacaattatttaaacttttccttcccaataagtctaactctctaaattaatgtgatagatggtgcctgtcatatcatttgcaaagatatgccttctaaatgtgttatttttaattcaatgtacttattgatccacaacttttactaaaggtataacaaagaaaaaatttgaacaagtcaaacaagtagtctaagagcatatactaaattgagcaagtctatctctaactagtttagaatctctccaacaccgataacttaaattttgataaaagatatttttggtaaaacttacctcaatcagtaatgcgccacacactactacaaaaagagtattttgcgtcagtcaacacagctaatcaaaattgttgaccgatgtaaaaatcaacctctagagtgaattcatttatagtaaaagtcattacaaaaggaaagcacaacaaatctttatagttggcacacaataccctagggaatattctaacaactagattttctaatgattacacaatctttaaagtctttttttagtaatttagatgccaaaatattttttatttatggtaaaattgctttgtgtttccaaaccgattttatcaccttgattttttgtttttattgatcttttctatagaagatctagggttaagcatttgaatatttttcttgaaattttcaagttccatttttaatagaataatttcctcaccttttaaacaaaaatcagtctcatattctttaatttttaattcaagagattcagtttgatgagacaattgtttatttatttttgataatgatct

SEQ ID NO: 117148 - DNA, 2305 bp, Cannabis sativa
  modified_base (251)..(267): a, c, t, g, unknown or other
taaatttaaggacttttatctaattttagtaaaaaaattgtaacatggatgaaagttcatggggcgtaatttagtaagtatcaaagtttgaggggcgtgatttgatagatatcaaagtctagggagcatggtttagtacataaacaatcactgaacagttaaattgaatgaaattagacaaaagtccttaaacttaacaatctcaatagttcgaggggaatttctaacggcaaaaaaagttcagggggcannnnnnnnnnnnnnnnnaagttcgggaggaaaaattactaattagcctaacttttatacctctctttttttattttttttatttactaaaataacacttgtacacacataaaccttatgataatgtcattatactacaatgacaattcaactatttttccttatctattatatacacgtcctccattttattttcaatttttattttaatttttcatttcagtattattttgaattatttctccacgatcaaaactaatttttctctccaaaaaaattgctccccacgatttccaactgccattgaagctccacccaacgatttctctttttgttttttttcttcttccaaattatgtgtaaatggttgtgacctaagaagtccatttgcaaaagttctaaacctgtaacaataggagttaaattattgttgaacaaaagaatagggaaatagaatgtagttgaagatgatgactctaatgaaaattttgttgaactagcaacaaaacccatcgtggtcctttgaagaaaaaattacagagaaaagagttcgattccaaaagttaagatgggaaagaagcatgcagattaaatttctaaggtttagtttgagtttcttttcaattttgccataatttttaaatgttgtctctattttgttttgtgtttttccttgtgattttggttatcaggttttatatatttttatttgttttattgttttcttaatgataggctttatgatttagaatattgttagatttaggtttttttttaagtttattcggcataaattgttgttcattgatgtatttgtttctattcaatttagactttattttgtaatgaatatttatacttttttgttaatattttttcagtattctttgggcaatatttgtttactattttttttttaatttttggtatggtgttgtttttaaacagtttgctaatagttgtattatagtttgtttacattgtgttcacattttgctttcgttttgatatttttttgtttgatttcaggaatgagaatgcacgtaccctatttctgatcactatagatcaaaagtggcctccacttgcaataacattgtcacttagaagcgtaattccactctttcgagaaatatcaaggctttgttctgtgcagcctaatttggtaaacttttagatatttctccgttcaaattgtacccttaagttgttcatggtattctcttaagagaagtgcatcagtccaattcgaaggaattttgagcgaacattactagtcgctgcattcgttttagtattaaaaagtttgtcttgattacaggtttagattgtgtggtattgtattttaatttcatgcttatgtttttgtacatgtttctgaattatgttgatatatatataatatttgattcagcgatgaaataatttttatggaacctgtctgatcagtataccaagaaatatagttgcaaaaattatttgaatctttaaattattgtgttctatataacacccattttacactaccaatcaactgttggacaacttttgaagattcaacaaaatagtcaatgtaattagaatagtttcaaactcacattaatgtgtcaaatatgatgttgataatgctttatgtttttgttaatattttagatatgacatacaaccttaaaatagttgttatgcaactaatgaattgctcattgcaaagaaggaggtgttgttggtcttctcctcggcttccaccaacttggcattggcctcctttagccactgttttagctcctcttccaacttcactaggccatccccgtcatttttactcattgccatctttgcctccaaaacccaaatccattcttgcttggcttcaacatccttcttaacctctcagccattatctccttcatcctcgccattttttcctctacttcgctcaacattttttacaactctatgttaaatgctaaaatactacatattttatagtgtaaaaatataaaataaaattaattctttataatattttcatgaaattaatacaatatatttttat

SEQ ID NO: 117149 - DNA, 778 bp, Cannabis sativa
gtgactacagtacacggcatatatgccgtgcactgtacataaaacatcaaaatgctgcatgatatgcagcctccttagaacatatatacacactataccacttatttgcagcttctttggaggtgctctaacaccttgataaaaatttattttcctttttgttaaaaataaacaagtatttacactactctataaaaaaaattatccatacaaacataaaataaaatgtaatactagcctacctctgaaaaaaaaaaatcttatttgtatggtaagtccttgaattatataataagtattagtaagttggtccataaatttatttttttactaattatccttaaacatataaattttgacaaattgatccttaaattttattttttagctaaatgttctcaaaatttttaatttatttcaaacgctaacccccacctttaaataatagtagttttggtgacttttatttacattttttgatttattttttgtcttaattttaaatatttattttgatattgtcctacttttcaaaaattaacgtatattaaatatttttattttttatttttacatatatatttacgtatatatataaatttttttaataaagtatttatctataaaagatttatatatataaggcaagactatggtaggactaagcataagtttcctaccggtagagaagcttttttgaccattgattttagatcatgtggttattaagatatcaggtatatagaattacgataggactgcttgtatacaattaaaa

SEQ ID NO: 117150 - DNA, 2618 bp, Cannabis sativa
gatgttaggcctttcatttcaacagaccacataataaatggggtttgaaatcacaatccaaacatccaaatattgagtaattagtttcatgaaattccttgcaagtatcagacatgattgataactcgaagcaagcattatggacattgcattcaccatttgaagtctctaatttcttctccccaaagaaaataagattgtgtggatgatattcataattaacggttcgtggtcttctcactccacattctaagcacaatttgaaatcacattgaggacattcaaaatacaaagcatcttccattgaatatccacaagtgttacatttacatttccacctttcatatgaagggagaggaggttgtgattaggttggtgggaggtttggatttgttgtggtaattgatcaatgcaatgtttaggaagaaaatactcacatctattgcaaccataatacactccactaacatctgaagttgagtcctcaaattgacatgcaaaacatctaacattgacatctgtataaatagcgtctgttgtgtcaacaagtagtagcaaatgaggatgactagaatgttggatgcaatattggccttcgttaggacatgttgttatggagtttgacattaaggcacattcaatatccatgtcaaatccacattcttcacaacagaacatgatactcgtttggggggttttccaacaagaatcgcacgggacagatcttgatgtaagaatgaaaggatggcgaggatgaaaagagtgattgatttgttttggtagttcctcacatgacttgtgaacataatatttgcatgaatcacaaacataataaggaggttgttccacagaaaactcacatagttcacaactaatttcgtcattggtgatgatctcaccatccataattaggtgcaaactatgttgttcatggcagaagtgttgatcattatccatctatttaaagcaacaaacaataatattaatacaggaattaatagctcagctatataaatattaatatgtaaacaatataaatataaatatatatagttgaaaattaatgaagttaccgttaataaatgaagagttcactgaaagtataaacactctgttttctttggcttaattccaaacacaacacacactactctaccatttatatatgtctaccctatccttttaaagggaaaaagaaagatataccaaattaaagtgaaaaagaaaaaaaaaaatctgcaataatttaccgtttttttctaatatgaagttgtatctttactctatcgcaaaacagagaatacaaaaagataaaaagcaagaacaacaacaaaattctttacttgcagtagtaacataagtgaaaaacaaaaaagaaaaataacactacgtaccctacaaaaaacaatcctagcttttattaataagttttgaagatgagttttaatgatgatttctatatatggccaacgtagtattctttcatcatcactttacttacaatgagaaagcacatgttggattaatgcttatattttgatgatgaaagtcctgaattttataattttaagctatattaatatatatttttttatattaaacataaaaaaaaattaatacttcaatgttaagttattatttcacttatatttatttattacgtttttaatactaatttagattacatacttttattatttttgtaaactgctagaatataactatttaggttttatttacttacataattactttcacaccaaataaacaacgagaataatttaggcaaactaatccgaccaaatcgcaaaaatcattaattaaatgggttaaaaaaattatttattaagcgagtttagagatattatatattttgcaactcttagtgattcctacaatatattaattaagttggctgaaacataccataacgtttcgacaaaacctaccaatgcacaatatattacattaagtggtcaatgttgatactgttctagtcgaaagagggaaccggtatgggatgaattgtgtatcgaaaaattcagtgtgttgaagggactgtgacacctaaagttgttgaagctcttgacattaagaaagctcttaggtagtttaaacggaattaatggtctaagatggagttagagtctgattgtttgttggaagttcaagaaatctgaagctcaacttttgaaaattatgcttttgatttaattatttatgattgtaacaactattgactaagttgagagatgtttttttattattattttgttaagcgatcaataaacatgttagcttataatatttctagaacatcgtgtattttcttagattgtgatattgaagaaggggttgtaccttttttatttttttgtctgtcatgcaaattttcgagtaataataataaaaaaaaatcaataaaaagaaatactgttataattatattaattatttccctaaaatttttattttgattttaaagtttagttagggtatatctaggccagatttaattttttttttattttttttttgttggctttcgttcttttacctttttcttttttataaccttttatttttataactttgaataaacaagaaaaatgcctatt

SEQ ID NO: 117151 - DNA, 1394 bp, Cannabis sativa
  modified_base (181)..(190): a, c, t, g, unknown or other
  modified_base (987)..(989): a, c, t, g, unknown or other
ataaaatacccatatacccatacatgggtaatacccattaagagcatacacatatatatatatatatatatatatatatagtatgtagcttggacgcccagtcttggccataaccagtctaggcctccacttaatacttactcagtctataaaaaaaaatgggataatttcacaaatacannnnnnnnnnaaaaaaattacaaaaatatgatatcacggaattttaaatatttttacgaattttttgattttatttatagaatatatagttttttttttttttttttaatgttgtatattcatattaatttgtttgttgatttttttgttatttgtatgttattgttttgatgatatttagatgttattttcatgttactttattatgtaattttcttattgtttttgtgtgttgtttttacgaaaaaccgtaaaaatgtaaaaaaatttattaaacgtaaataaaatgtaattttttttttaaaaaaaatggtgacttatataattatccctaaaaaaattgttcctttttaaaagtatacattatctgttaccaattttaaaaataataccatattttttttttttctaaataagtgtctaaatatatataatttttttattgcctattaaattttagggctgagatacactattcatttttattgatattattatcattatattacttttgataatgtttaaatttttaggaaatttatagcataaatatttaaattagtgagtttgtgttgttaataaatactcattgtaaaaattgcgggaaaaatactcattaaaggtcaatttttaagatttggttaatacatattcattccatctcttttcatcaaacacttcaaaaaaatgatctatttttgtctttaaatttaggatgttttgtaaacatatactataacgtcctcgcttcaagtctctattgggtctttacatctacggaataataactcttatacacgagtacgnnnctctggctgcttcctggactgatgactgaccctacagaccaacacgagtatttccaatgtattttgtcctcactcgcacgcttcctgagacaaagtcaactaaaagcatctctcctagttaaaatcttaattagcaacctcttaaattgtttatgcattatagatcaactatatagtaatatacattaaaaatatcttactaaaatataagagcctatgctaattatgaacaacaatttgttaaaattagtggataatttgttagatgtacattaagtttggaaatttaagcatatatatatatactagtatattgttacgtgcgatgcacgcatgctatgttttatattaagtattatattatgagtttggaaggaaataaatgaataaaaaataaataatatt

SEQ ID NO: 117152 - DNA, 845 bp, Cannabis sativa
ataatactcttatttttatgattttatttttgtataattttggccttgttgtattaatgaaccctcttattaaattattatgtgtaggtcatggaattcctcaagtcccttgtgagatggaaagagaaggaagaggcctaaagtgtgattgattgttctgagaatatttatatgtataggcaatttgcttagctttgaattgttcttctttgaatagtaatattaataataagcaagctgctgatcattattatctgccaagtgtcttcatttttttcagctgttagatctaaattaatgatggtggattttaccattgtaattatagttttttttttcttttgaaaaataaaataaaacaaaattctatatcctagttaattgtgctccccctattgtaattatctagctagttatctttttttattttcattctgttgaaggataacaacaattcgattttcgagagctctaaattaggaggttattttttttcctttaaagaaaagtgtgcttaaaattaataaaaagtcgttaaatatcacggtcattacataaaaagtttacagatatggtagaaagcgggttataaccaaacttctggtgggtaaacgcccacttagccacattataagcagcaaaattacaagtcctactaactttaggaaaaaatacaactaataaacaaaggagaagacctattacaaaaagagacagttttcaattgcccaatgggaatccttccatggcttgggtaaggcaggcagatttacacgagaaacgaccattactttctagagtccaaactgttggaagttattttactaggaacttagatctactca

SEQ ID NO: 117153 - DNA, 2257 bp, Cannabis sativa
  modified_base (29)..(36): a, c, t, g, unknown or other
aaaaaaaaatgactttttttttttttttnnnnnnnnatataaatatatattattttagtatttgttattggcacttaaggtgtttaattaataccatactgacgtagtatctaataattagttagtaattctttttttgtcatttgtgttttattttttatgaatagtctttgtatattttttttaattaattttttgtactattattgttatgcgacaccttaaggtgctcaatactatatcaattcatatatacaataattggttagcaattttctaaatcatattacattaaaatttgtgggaattgaaatgcaccaataacaatatattatattttatggtgcttgtcttttacaacttttccagatttttttatttataattttttggacatttttttttcataatgaattatttttattattattattatatgttacctttcatagtgtttatttacaattttttttacaacttctttgagtttttttatttataattatattattatttgacactttaaaatgttcaacattataccacattatgtctttatttaataattagttaacaatttttcatattattataccacactattatttaacataatttttttttttcatttaattataattgataaaagtaaaatatataattataacaatattttgaggaggattacatgtctatagtacatcatccacaagcctagtatatatatatataatataaaataagccttgtttgcaattcttttcataactgaatttcaagtaaaaaattctaatcaacactttgccattattccacatattgaatgaactctcatatatcccataaacatataataagacacaattattaatttattaattaagtaataccattaggggtgatacaaaagaaaaggactagaaattctaattagaatctaacattatacagctaagaattaaaacttctcactaacctaactcgaagtagcacttttaagaaaattaactaaacttcttacaatattaaagcataagttcaaaatactaccaataaagtaaatacaatatgttaatactaagataacaattagcaaagaaaacatcgtttaaaatgttgaagagtaattagtagatgtctttctcattatagatagactctttacgaaaggcgaaatccacatcaaagcatctctccagtctgatcccttctccagtttcgatttagtaataactctaagatgctcccatttaattaaaggagaacgatacttcatctttatttctttcgggaatatgatcgccttcacagcaaaatagagaaatcatataaagttaattaaaaaaatgaacatgttaacgttgcaagtgaaataataacagaatcaaagtcagaaacacaccttttccgagtcaatatgcaagttcaccttattccaagagcaattgagcttcgcaaaaaaattcatcataccaacaaaccaatttgtgtcataattcttagattgattaagaataatgaattttccattcaacaaattggatgacactattgatacactgtgcttcatatttccttcataacaaaatgattccaatttcgaagcttcaacaataacttttggttcatcttcaagagtaatattactaaacctcaacttcaaacttttcaagtgatgattcgagattttaaggttcttcaattgcaacactttcgaatcacataaggtcaaattctcaagttgaggaagatttgaaataagattttctaacgacaaagactctttcataccccaatcacaaaccaatacaagattcctcatcaccttccctaaggagagattcattttttcaaaggaaaaacaatatagttccaaagattcaagattcatggcttcaatttgcactaatatatcactatgggattcaatttgcaagaacttgagacttaaactacgaaaacgaagccccccacgaattaatccacaacacttgcttaacttcaaattctcaagggaaggacaacccaacaataacttatcaaccacatcattatttttaaaccaaacaaaacacaatgacaacaatttcaaggatggaaaatcaaatgagtagttagaatccaactccactttactcaactccaacttagtcaaatatattcctttaagtactagtttttcaggtaaggggtaatagtaaatgggaaatttgattttctatacttacatatacctaatattttatttctaaactaa

SEQ ID NO: 117154 - DNA, 1786 bp, Cannabis sativa
aacactagtttagactccttctaaagttctactacaatcttttgtaatttactttaccaatgtaatttttgaacaccgaactctcttttgtcttttgatgtgtgcgtgtacagaaacttgtaactactctatctaacacttactttttctcgaagtaagactttgacaaaccttctcacaaagacctttctcttgttcgataaaacttttcaacctagctgaacaaagatgaaaatatgaaatataagactaaaagagataagaacattttactgttctctaagtcctatttataacttataaaaaccttagagatagccacaacatgtttttataaatgtacaaaattttcctaaagtaaaccttaatttgtagcgacagaattacactctatagtgaaaaatcaggaaccttttcaaataaattcaagatcacaattcagactttaatacatatcatataaagattatacaatctcttataatcatagcaaaaccgaaaagagcaactagtaaaaagaaaaattatttttttcaaaactaactcattaaaacttttcataaagagaattacttcactttaatgaaatctatcttaaacaaaaattccagtcataaaaacgcaattacaagaaaataatattttattttcataataaattaaaaaaaaaaattaacaactaaattgccacacaaaaaaaaccctcatagttaaattagagaatagagaagatatggtaatttgaattagttgttgtattgtttatcaaactagcatatgttatttatttttaaaggatattagtaatgtttaacaccatttgagagtcttattataaaaaattattaattatttttagtgttgagtttaaatatttcgactcacttttttttacttaagatagaaggttcggtaaaaaagactcattaaaataaatatctagtccaactacaatattgaatctcaatctatacccaattggttgcgagcatgggcttaactctgcttatgtcatcgatatgtcatcattaatttgtgtgatcaatcaattaggacatttgaaactcaatgtcaaataatatctagttacattttggccaatttggattattttctcacttttcgcccacttaattataaaatggtagaattgagtaagaaaaggagttggattcccgcctctttaaatttaaattatagttttttttggactttctctcttttagtaaaaattcttacaagaaaatctcatgcactcgcaataatctaaattgagagtcgtcgacgagaaaaagattagggagcaaaagcaaattaagagaaatttaaattgaggcagaaaatatattcgcttactaaaaatagtaagtgttctctaatcaaattttcgactacaacacctaggtttcataaatagtgttgtgcaagtatttggaaggagggagacatgggtggatggagagagaagaaaggagaggagtggtgggagatggaaaatctatttgttttgcatagaggattgttggaggaagatcgaggagaggtggaatgatttacaatccatttaggcacaccattttgaatccttcctcaaatagaaggatttatactcttctttctaatttattttataattacaaatacactatcataagaaaattataaaaaaataaataaatagataataaaataattttataaatatagtaatgtatccgtctacctctctatttttctttccaaacaacttgaaaggataactaccatactctccctcccttatatt

SEQ ID NO: 117155 - DNA, 1678 bp, Cannabis sativa
acttacactgagcacgctcgccggaagactgttaccgccatggacgtcgtctatgctttgaaaagacaaggacgaactctgtacggattcggaggctgatgaatttaatctttgtgtaatctttacagtgttaatggttaacaatttctagggtttttcaatgtgaatgaagcttttggaaatgttctaagaatctgattacagtcaatatattttgataatgaattattataatttcgtttgttaatgatcttcgaattagattgagcttgttagccttttgggtcaatttaaattcagaaacaaaaagaaaaattattttattaacggataaacttttaaccaggaagtttgttacatataagctcagttaatgaatgctccagttataagacatagttgattcttcttctgaatatgatcattattacatattgtcttcaaagaataaaaagaattagtaaatgcaatttacaaataacaaaaatacgataaaaccctcccctagctatgaatcatataatacttttcctaattcatcaaaacatttcatcacttataaaatttaattcttctgaaggatctgaatgttgtgttgattgaagaagattttcattggttggctgttgttgttgtggtaatgtaatcatgaatacagattgtggtgcatctttggttttgagctgttgcgatgggtagcctgcttggttatgattcaagaaaagtatatcttcctactgttctactgataaattaggaggacttgagcaatttcaccatcattcgttggcggctgttgtgtaatgatgagtacagattgtgatggaggaaggttggttgaagctgttgagatgggtgctctgcctggttttgattcaaggaaagtgtatcgttttcttgatctactgatagataaggaagaccatcgttccttagccgttgttgttgtgatggaggaaggcttccaatatatgcttcatcattgttgttgtgtttgttggtttcaccccacaacaatttttctcctttttcttctactctactgtagatgtattgctatgtgttgatgttcttctttctcaagatctccattatagtacaatttgcacaaaacacaatcatcaaactgcacatcaattaagttattagttagttaggtcataaactaaatactacatactaattaactcattaattattattaaaatattatgtaattacagtcttgtggtttttgttattattttcttgtttcttcaatctatactctgttaggagtcaattagttttgttattatccttattaaatggttttcctatataaaactttagatgggttgtgtagccaattgggttgccttttgttgggaaaaatgataaacttcaagcgtagcaaaataacaaagaaacgaagcaaagcaatttactcagtttggtaaaactaccaaacccacaaagagaaatatatttcacttatcacttcaaaattacatatactctctatctcaatctctctaccaaaccccaatacaccctttgcttcttcctcacaatcaccacataacaaactcacacaattctcttttcacaactcactatttttctctctccacacacacccctctctctctcacacaaaaacacatatttatagagttacaaaacttgggcatcaaga

SEQ ID NO: 117156 - DNA, 1280 bp, Cannabis sativa
  modified_base (34)..(40): a, c, t, g, unknown or other
gagctgcacaatatgtttaaaaatcacgtaatannnnnnngttagttagggtgttacaaattgaatgtgtgtgcgtggaaaatttatgtctatgtaaagttaaggtcaagttcttgcaagtatccaagaggaaagtttctgcatgtatccaggggaagagcattcttgctaatgtctagagggagttgcaaatgttcagaagggctcatcaactgctagtgtccaggggagccttcccctgatgttctctcctctgatcttgatgttgatgttgctttagtacatgctccttctgcatctcttgtcgcctattccagcaatgagtgattatgatcattgagtaagagatattgtatttcattttttgtacacatacactaaataatgttatgttttaggtttagtttttctggttattttaattgtctgttggacttgactttgtcagttggtaaatcgtcctgctattatcttttggaatcttttagtttgttggtatgtttttgtgcttaattcttgtgtgtctcttttattgtatattgtggttaatcgttgattatagtttgccagggggagattgtaagcgccatggttttgtatggaaaaattatgttgctttatattggtttagttgtgttgttgttctggtttttgtcatatgcctttttttaagttgttcatctaagttggtcttagttacatctgtttggtctgatttaatttatctttgccatgtcaactttttagtttgtttctttatttagtttagctagttgacaactggcttgagctattgagttatttaattgagtcagttttactgaagtgtgagatatattcagttgatctagctttttctaactctccatctttgatagaattctcgtatagttcttgctctgctaggatgaaacacttttttgtatttttgttcgattgtgtattgtaaatcgtaattcattgaatcttcaaaggttgaaggagtgtgaatctgcaatgtctggagggagttcaaactgatctactagagggaattcagcttggtagaagcaagtggttattgtcttctcagatttttagatctttgttcttgattgtattcaagtatttgatatctcttgtgtaagatgatcatttcgaattatgttgttgatttgtaaatcaaaactagaaaatatatacaacaagaaatgtcacttttgccagcacatttttatgctggcaaaagttggtattgcgctagtaaaatagaattacttgtcatgtgttggcaaaagggg

SEQ ID NO: 117157 - DNA, 670 bp, Cannabis sativa
ctttttatcccactgccatacatcccggttttcattttagcgaaaaccgggataaaatgccttaaaaaccaggattaaaggcctttgcttgtagtagtgaatgtatgctcttctaccatgattaaaaatatttgagtgtatgtgtgtgtgtgtaaatttacagtaaaagattgtgtatgtatgaaattggaaaaggatgtagttatagtggtgtagtaaaagtggccgagtgtgtattttatgagaaaagaagttgagaaaatgaaaaggagaagaatatgtgggacaaatggaaccaaaaagtatgggaaaatagaagaaacaagaagttgggttttactttattagaaaattaagtatgtaatactactcttctattctctaatttttattaagttgaataaaatcagaattcttttatataatttagttgtaaaatatacattaatttttttttctaaataaaaatatacatgaattaatgatgataatttcattgttactaaaatgaacagtttttaagatttctttggtttagtttaattaatttgtttatccctcatttcttgaaatttatcgtaccttgttatatgcataatttgtgagttctcttatctagtttattgacctatgattttcttattcatgtatactaagtttgctttttttt

SEQ ID NO: 117158 - DNA, 2412 bp, Cannabis sativa
  modified_base (60)..(73): a, c, t, g, unknown or other
aacaatcttaatagttcaagagaaatttttaacggccagaaaagttcagggggcatgatnnnnnnnnnnnnnnagttcggggggaaaaattgctaattagtgcagtttatgcttaatgtctcttatgcactggtaacgaactgtgctggtaaaagcgatatttcttgtagtgctatatggttgtgtagcatctatgatttttatgcttaatgtctcttatgtgtttaaatttatcataagagtagaaattttatatatatgttgagatttatatgtcctagctcgaatataagtttctttagtaaatttgctatcacatgaaaatttgaatttgagaattaaattatattaaaccatataaagtagatgcaatcaaaattaatcaccctaagctttaatcattgttaatttcaccttaattatttgttttctttgttttttagtagaaattaaatatcttttttttattattttatttttattgtcaccaaatagaattaggaatttagttgtttggtaattaactacagttcttgtgggatcgaccctacttttatgagtctcttacttgtaagtgatacgtatacttgcgtgttgaaaattgacgttacatatgaagcttaataaatccttaaaagtatttttagagtttccctaaggtgacgtttggttggaggtaataaaatagaatggaatggacaggaaaaaatttatttccattcatttgtttggttatattttaaagtaatggaatatcattctagtggaatgacttttctactattttggtggaatggttattccattttgaaatggaaagaaagaccattctaatgcaacatggaaaaaaaaaattaatgatttttttatcttttttttaagcattatttcaaatttgattattttctatttctattcttattctcattcctatttttattcttattctgaagttttcattcctcccaaccaaatgcaacctaagtgtctatgtgaaggaggaaataacttttaggacaaaagtccttaactttgttttaacctttgatagatcttcttctcttctttatattcacagagtgttatttattattattgtaaaaatttgtaatctcttcttcttcgtcccatataattttattgtaatactttttaaataatttgcggcttaaatacttaattttaactctcagttacaaataaatacataagtttaatttttgtcggtaataatacctaagttatatttttagaactctatcggtacctgactgttaaatgtcaagtcattatccacgcgtcattttttattggtatatataaatattttttaaaaaaaataaaaattcatgacttggatcaatcaaagattgccacgtgacaatttatttaatatttaacaactaggtacttagagagttctataaatataactgaggtattattatcgctaaaaattaaacttaaatatttctttgcaactgaaaaagttaaacataaatatttatgccacaaattatattatttttttttatgtactttacatatgcccactacaataattaaaaacaaattaaaatatgatcaaatatcattcacaccattgattccatttcagtcaaaagccataacattaattcaatgaatagaaaaactatattttaaacatgccactagctggtggtgttagtagtgtccaacaacaataatataacataatgtaaggaaacacctctatcattgtgtaaatataagtagtatactatattgtgatcatcatatcaagaactaaacagaaatggagactcaagatcaaaagcttttgagtgtaaattatggcggttctctcccaatcaagtgtgttcaagatctcgcttcaaagaatcagaccgaaattccacctcgctatcttcggcctgaaactgagcttgatccagtttcagtcatagaatcattggagcttccaataattgatatgaccaaactaattggtgacaatcaacatcagtggcaccatgatgaattggcaaaacttcatttagcttgtaaagaatggggtttctttcaggtaaactcattaaacaaaagctattgtccaaagttctaagagttctatcattaaaatttgagggtaaataccattttatatcttgtgttttataaaagttacagattagattctctgttttggttaaatgataaaatatatcatatattttttaaaatagtaaaaatagctaggaccctgatctcaattttcgattttttttaatataaccaacttgaagataaatttctaacacgaacaggtatataaaatgtaaccagttttgtcataatatctctagatcggattattattaagttttaggctaattaggaattttttccccaaactttgacatctaccaa

SEQ ID NO: 117159 - DNA, 843 bp, Cannabis sativa
ttcatctccttcatttcttcaatcctcctgttgcaactgctccctttattcataacctccattgttttcaaattatgaataattttaatctctacaatggatcttattaatgataaaatgaaggctaaaatgactctcactgaggaagaggaatcaatttttgagtttgacaatggagaggatgttgattacgaatatgcactggattgtgtactgtatacacaaattcttaccactaagaaggtttggcttactaccttgcaaaggcaaatggcaaagcattggaatggaagatttcctatcaaaatctctaaagatgaagacatgttcacactcacatttggatgctagggtgataagcaacgttcctgctacgagaacctctccatttttaaaatcaccacattttactttacacaccaattgttcgttagaatgtcactccttcaaaccttatatattcacctttctgggttcaaatatattgatttccattcatgagtaaaatggcccaattggttaaggcacttggtaatataataggtgaatttatagaagtctttgaagactctttctctgaaggttagggtcctttcttgtgtatttgggttaaaatcgatgttaccaagcctttacttaggggacaaatgatcacattatcaaaagcaagggataagttttgggttaaattttactataaaagagactgcctgaatattgcacagattgtggtaaacttggccatccttttaacaaatgtgtggttttccttaagaaattttataatggtgagaaaccggaacttgaatataggcctgccatcatcaagggataagctctccc

SEQ ID NO: 117160 - DNA, 3142 bp, Cannabis sativa
gaacatgtttactatgaagttgagtacgcgtaggcaaacaacccgaaagagctttccaagcaaaatgtaaaaccttaggaggagctttaatctgccacagtattttccagatatcatcctccatggatgaggtccaactatcactgaccgtctgtaagtgattattattattattattattgtctctccctaaaataagaaaagaaaaaaaatagtttcgttattgagggtctgacacttgtagtttaattaacatcaataatttctttttatattaaatcaaataaatcttttatgttcactgttatctcttaaaaatctaatgtaattatgtataaatttttgttctagatataaaagtgcaagggagcacattgtaccacctccaaccgaatgagcacattgcaccactatctaccagaggagcccattgtacgtactaagctccctgttccatcagttgccaaggcataaagagctccttagctaccaaatcacctcaaggacctaattggcatggaccattaagaaatccaattggcttcccacgtgtgcccatgacgattcgagtctgccaaatgcgaaagacacgtgctcttaaagctatttcgaaaatatagtcgagaaatgttaattgaagagatattttttttaatgattattttattattattttgtattttaaacttaacccaactatagttatgggaagagacacctatggttaaggattttaaatcctagaagaaaacttatacaagggaatgaaatcacttgtaaagagaccctgaatttaatactcacaaaatcacattcaagagctcccattctctcattctgaaaattcacttgaggtttgaactcttggagaacataactatgaagaactctccttaagcattgaaattaataacactccaaatggactagcctattactgccaaaaaatggtgaaccactataagattctcgtgttcatctttgttgaatttactttataaactgatttactttgattgactattacttgtgttcatcttgcttgtgtatcttcttagatttattgacaaaaaaacacatcaacagtttggtgctttcactgagagcagtgaacacaagtgttaatcaccacttataaacatggtgagtaggagatagacagactatgaggatgaagaccatgatgaccccatgaatgaagaaaataccatggaacaccatgaagagtattaacccgttgaacccactggtgaagggaactctcgacacctaggaaaacaacccatgcctgatgacaaaggtcaattcagagatgctggaggttcatcatcaccatcccatggtatacaacaaactagcaatgtccatgaggtgttcgtggaaaacaaggtattacgccaatacctagatgaaactctcagactcaacagatagtggaaatagagatatggttgccaagatgccacaaggccaaaacggcgagaaacccacgagcgtcccggtatggcaagaaatggacgaccccgtgggagccgttcgatacgttaccctatcgaaggccaagagagatctaggtaacgaataacccaaagtcatgatactaatcgtaatgccataccacaacgaccttctcatgagaacaacatccattgaaggaggattgagcgtcctccatcacaataatgacaatgggaaacgacgccagtcgtgagaacaaaaagaacaatacattccctcctacatagcaacaaactaggagggacgtgcaagagcttggtgcccctcaaaacaacgttccacatttccccacaaagaggcacctgtgaggagaggggcacaacacacaataatggagtcccgtcatctcaactgtcttcgactcctagggatattggtgttgatgaggatgaaagagatcatgtccaaaacccaccttttccaatcaggtttcccccatcactaataagacatccttagcctcctcgacctaacgcaccgccactacatcaaccaaccaagagagggaggtcacgacaaagggaggcactgcccactcgtattccaagttaagacttgactcggcccccttgagacaggcgagaggactcttgagacaaccatgctcgacagggacctcaagctagcagacatggatgggaaaaatggcgcactgcatcccatgataactatgcccatctgggaccgacacccaaggagactggactgcaacatgcacaaccttatccaccacaagacaatagttatttgtaaagatctcaaactagcacaacaaaattgtatgcccaacaagggcctgtacctggaggcctcaacaatagagggcggttagtttcatggatgacagttacgctctaactcaaggagtcagtttgtgagtgttcatgacaatgctcctcctctatattatgaggaacatccttgacacccccacatgacgcaagaaaactggatctctgggaccatctgaaccaaaggcgacaacctaatttgagagaccacttgaacatgggtcacgcacaaagcgaggttccttatcgagcaccatatgatattcctctacaacaaggagtatatgtgccccgatataatgcaaacgctcctccaccagccggtcctaatgttcctgctcctgtgataaatgaaccacgatttatagcacaggaacaacaaatttagcagttgttaaacgcccaagggatagttgaggcatacaaatctgttgaggaacctgagccttttgctccacacatcttggcattttcatacccccaaggattcaagatacctaccatgaaaaatatcatggaagtactaacccgagagtctagattagcgatttcaacatattaatgaggataagctaagtaagtggggatctgaaatgcatgttgttcctgatgaccttgtcaggagcagcaagaacatggtttaacaaattcaagaagcattcaatcacctctttggacaaactagcaggtgattttaaaagaaaatttcatgccgccaagtctagaaaacttgaatgctcttccttggataacacaaaatagtagttgttgggttttgtgccctaaataaaacccatttaaatataattagatttacttattaatatggatca

SEQ ID NO: 117161 - DNA, 3552 bp, Cannabis sativa
tctggtacataccatgaggtacatgatgctaccaacaacacttgtgtaagacatcttttccatctattttattaattcatcattcttaggggcatgtgagctagacaatttgaattgttttgctgttggtgtgtatacaggtttagagtttgagaagccaaacctatctaaaatcttagttatgtagttgctttaattcaactttaatgttcttttggctctgtcgctggtaattttgatccccaaaattcttctagcttgaccaagatccttcatttagaattctctactcatcaccctcttaactttgttgatctcttctgaattctcgctagcaattaacacgtcatccacaaaaatcaaaaggtagacaattgagcttgagcttctgatgcatacaaaactatcatatttgcttcttttgaaaccagagttaatgacaaagtcatcagatctcttgtactagtgccttggtgactgttttaatccatagagaattttcttaagcaaaaagacatgatcttcttttcccttttcctcaaagcctctaggtggtttcattaggatctactcttcgaaattcccatgcaggaatgctattttgacatccagctactcaagttccatgtcttcagttgcaattaaactaagtaacatccttattgatgtgtgtttcaccagaagagaaaagatctcattgtaatcaatcccttctgtctgtgtgagtcctcttgccaccaatctagctttgaaccttggctccttgatcctaaggattcactccttgtttctatagactcatttacagataataacttcccattggcttcatttctaatcaaaatctaagtcttatttttcttcaaagactttacttcatctcccattgcttaattccacttagtttcataatcataacttatggcttcttcataggaaatcagttcatctactcccataactgttatgttgagagcataatgagccacatctacaaaatcaaacctatcaggtggtttgattgctcttctcttcatatctcttaccaactgatagtcatgagcaccatcttccatctccacttcttcttcttcttcttcttcttcttcttcttcaatttctacctcatcttcattcaaagttgtttatgaatcagtggtacctttttggttgttttgatcttgcatctcaacctcaaactttaaatcttctttagtatgagtgccttcatcctctgagctattcttcaatgtgtccttgtagaatttatcttcttcaaaagtcacatccctgctaacaaagtatttttgatgttctcctggctcaatttacaccttctagatatcttagaaaaatacatttctttactctatgttctattttgccctaattaaggtgtgcataagccacacatccaaatattcttaggtggtcataccgtgcattgtgtccaaaccacatttcttttggatttttgaatccaattgctgatgaagggaattattttataaggtagcatgttgtaaccacttcttctacccaaaagtcctttggcattctgaggattcattcacatggctaattttgggatcttgctttgatacaacttgttaagactgttagacaccatatatttccacttttggtatgatattatctgctttggacctaagttctcacagttttgttcttggccaccatcctaagaatacattattcacagaagtctacctcttgtatctaatgctttgcaaatacacctttcttgctgagaaccttgagtcctccatagcttatgtgaccgtcttttgtgccaaactatggtttttgtatactgcatctcttgatactacatttgcttgatcttgtagtgtatttccttgcagaacataaattccatttactataaacccttccataataatattttctcccttaatcactctcagtttcccatcttctactctgactagataaccatcttgatcaaacattgatactcatatcaaatttcttttgatcttaggtacatatctgacttgatccagtttagtaattcttcaatcatccatttttaatctaattgagccaaccccaattatcttgcaagacttgttatctcatagtttgaaagctccacttgtaattttttaataagaacagaattgatcttgatcaaggcaaatgtgaaaagagtacactgaatcaagaacccaactttgttgaatacttgtcttggataccaccattacattggcactgtcataaccactatcctcttcatctaacacaatgtctgcatttccacttttcttcatattgtagtccttcaagactgtaaaatctcttcggagatggttgaaagaattgcaaatgtagcacctctcttgaatttcgatacaggttttccattttctgttgagttctgtcctttcttctccttcttggagtgttttccccttaccagcaaaccatctctagtgctttcctccttcatctctcactttctcttattctctttagatattactactgagtgaacttcctctaatgtgaaagaatccttaccatacatcatggcatccacaaagtgtttaaaattctttgtgggaagataatttagaactatgatggcctggtcctcatcttctactttgatcctaatgttctctaaatataggatcacctagttaaaatcatctaaatgatcttcaacatccttccctgacatcattttgaaagaatacatcttttgtttcagaaataacttgtttgccaaatattttttcatgtacaaactctccaacttggtccatactccagctgtcgcgcttaagacttctctaagaactctattccctagaatcaagattttagcactatgtgctttatcaagaacctcagtcttctcattttagaaaatcctttaggtaagttcttttctcctagaatggctgattgcaacccctattgaacaaaaagagctccatcttcactctccacaaaccaaagtcattctttcttgcaaacttctccatatcatacttggcattccccattcctctctattgctcaatcgaactcttcaatctttcaactttagatcaagactttccttcaaagtttaagattcaccttcaaagaatcaagattaaccttcaaatagtccaactctgataccaatttttgataatttccaataatctcgatcactagggacactcataagaacatactctagaacaaacacacgtacacactacatagaagtgcactcacagaactcgaaaacacacaagtactttaatggtgtttaacacttacgaattcttgaagctcttggaggatttcattaatcttagcaattgtgttacataagggataaaaatagaatgacattagtcaagtctattttttacaacttaagaacgagttttaactaacccctagtgtagcagtcatcattgataactagctagttttaactgaattacctgtcaacagaaataacacctctaatgataatacctttgtgttggaaatattttacca

SEQ ID NO: 117162 - DNA, 2629 bp, Cannabis sativa
cttcatcataatcaactgaatttcagttaacagaaacaatgacaactatctaaggagtaattatgttccaagtaaatgattaagatagattaacccatttcaaaactgcataaatcagaatttatagttatgtccatgcctccagcaaatatgatgccaatgatgatgaaacagaagtcaacaaaagaaattagatttaaccttttctagtaaatccacttcattgttcctagccttcctttcatatcctggtggcgggaacggaaaacagcgcgacattgcacagaatcccacaacaaacaacacgaatgccttccacagaagaaaatgttgatatcactttccagtaacactgttccgaaaagggaaagaaccaacaactatgctcctgtccatgcaccatgtccccgcattcatttcctgcattaatattcctccattaaccactctcgaccacttcaacagatgcaaactaccacacagttaaccccccctaactaaaaactgtcacaacaagcagcagcagaaaccactgtaatttttacttcaccaattaaaaatgcaaccacttgatgaaatcaaatacagcactacaatgaactacttcaacaatgcttcaaacccagataaaaaacaaaaactgaaatgctttttactctggtcaagtcaaggactctattcacctatgttaaatccaaaagggtttcctcagaaacaaaatggtccgttataacctgatcctcgatgctgctttctgggccaatacataatcattagctcctccttataaccaataccaaatacaaaattcatccccttgaagaagaagaagaataacatcaaaaccccccctttttttttctcctccaagccaactcttttgatcactctcctatccaattctcttcaattcttatcaacaacaatgtttgtcctcaatttcacaagctcaaacactgcactgtcgaacccctcaactgaaggagatcgaaacctcacttcccccaatctaaagctgattattcaaccaagcccagttcaatcaaaaccctaattatcacaaaaatccccaaacttcaaagaataccacagttccagttatgatccaacgaaaccctaaaaagaatcaccaacacaaaaaaaaaaaaaaaaaacacaagctgagcttacttgtccacacaaaatacacacatacatatatatacacaacgaaaaatcatatccgtatccatttttaatcttattaatttcattttaatctccaattcgattatcgatcgacacaaatcaaaaaaaccaaattcgatttaggaaaaaccaatacagaaaaaagtcaaggtcctgagattaccttgtccgctacaaagtgggcattgtagaaggacaagagagatctctatatctccatggaaacaacaaccccaaaaaaaaaaaaaaaaacctcagagaagaagaagagagaataacccccaaaaatggcttaataaaattcaaacaaaaataccaaataataataacaataataacaatctctcgagtgaaaaattcgatagtggaatttgattcgagggttttgaaaattttcctggatatgtactggagaatgatgtttctctctctaaaactctctctctctaactctgtaaagagtctcagactcagtttgggttttttctctttagtaaatatatttatatttatatataattttattttttatttttaatttatttaattatttttctcttctttttcttattaggtttttttttatttaattttaaaaaaattaaaaaataaaataaaattggggcttcggaacttacacgcgagaatgggaaaaatgaaattgaggaattattatgggttttgattgttctttatataggggagtgaggagggactaaattgcaaataataaatgtatggattttagggactagattgcaaatatgtgagaatgaagagggactaaattgcaaagtgtagccgccttgtttttctactctcttcttcaccacatgggctttgttttgcaataaatgtttttgtgtgtgtgtgtgtgtattttaaggatttatattattcatttttcatttccctttctacatcaattcactatttatctttttttacttgcaagttttgttttggtaaattgatgttctttttatatatttgtgacataaattaatgcaacttgatgttgtaattttttattagttatcttttaaagcaattggactttgttttaagggtggtaaaacgtgttattgtattattgtatcgtttttgtgttgttttttttgacccgtttttatatttcatgttaaatttattggcttgttttcgactcgcatctaattttctcaatcttaactcaattcgtaaaaaatcatgtcgtgttaatgttgacccactttgacctttttatttaaggtttgacttattttgctatatagaaaaaaaaattataaatttaagaaaaaattataaatttagtatggcttcattaaaaaacttagggataattgcggtaaaagtccccaaaaacttgaggttgatgccgattagtcctcaacctcaaaaattggcggtgaaaatacctaaggtcacaatttttgtttgt

SEQ ID NO: 117163 - DNA, 698 bp, Cannabis sativa
ctcccatcagttttatgggtctattccggtcccttctataccggaagctcttttatgtaatgaccgtgaggtctaaactcagtttgattatataatataaacgctttttctcaaaaaaaaaaagaatgtggcaaaataataacagtttttactactataattagcacatttatttttggatttttcatgagaaaaaataaaacttaaagacataggtctacatagacttgttttttcgatatttactcggtccttaataaaattttagttttatcttccatttttaagaaaaaaaaaaggaaaataatttttgaaggctttcatgcagagcttaaaagctccaaataatcaaagacctatgctttggttatttagaataaccaaagataaaggtgctttataatgtctttcgtggccattaccctagactttttcacttctctccactttctcagttaaaacccttaaaaaccctacagaaaactaccattaccatacccattttcacgattcttcaattatttttcacttttttttttaaatcttcaactctcaaactgataatcacatctagagtaccaaaaataatttattctagggttttaatgataaatttcaaaaatttatgcgacaagttaggtgggtgacagggcgatcactacaacattcaacaacattagcggcggaccactccgctg

SEQ ID NO: 117164 - DNA, 3357 bp, Cannabis sativa
  modified_base (43)..(57): a, c, t, g, unknown or other
  modified_base (3327)..(3331): a, c, t, g, unknown or other
acagtgagaggtctcagatattctttagtatgccttagacaannnnnnnnnnnnnnngtgggagtaatgagtaggtatccactactagaaaaatcacctttctcttcgatttttatgtcagtttctcttcagtttttatatataataattagcgaagtcatttgaggcgatgacatatgttacgaaaataccgaagacataagtgggacctatgtcttcgattattaggtaataagcgaagacataggtggagcctaataccacttttgcaagggggaagaccctacgtcttcggttattacaaaaacatcgaagataaatatgatctatctctttggttattatgtaataaccgaagacatagggtcacttacaacttcggttaatacaaaataaccgaagacgtaaggttgctcattttttattcatttatttatatttattttttaattttgaatatatagtactttttttaaaataattataaattcattctaacatttaatttgaaataaaaaatcaatttaattatataacacaattaaagtacaagatacaatttaattatattgtaataaaattaaggtatactttacaacatgataaatccttactaataaaaatacaaaataagtaatattgcctaacattaaaagtctaaagctagcttgtacaagtgttgtgtcaatttctagcaactccatctccacattgtatgttgccttctatatttatgttctgcttacaaaaatttaacaaaataaattaaattaaatcacatagtcccatcatataacttttgtgcattagtaaaagtttttaccatggcttttgtgagagttgatcttcctgttccagaaaatatagcctccaatacaaatcaataatagaagaatcgagactattgatattgggagaattattgatctgctttctagtgctagctgtagccaaacacaatattattgaggagacattatataaatgaaaagtaaaataacgaaccagattaaaccatttgaatgaagttttgatgaagattcttgttcaaatttacttaactaagaaataaacataataatattttctcaattagtttaatctgaagtgtattaagttcagaagcagccatcttaatacacagatcttgtcccccaacattgtattctatcatatcaactaagttgtcatcaaaccacaacatgcaaccactaacaccacttagagcataagctgaacacgaacagttcctcaaaagaacaaaaaaataaaaaacttttgtctagaacaatagaatgaaaatttagtttcaaagagggcaacataaaattatgatctttttagcatttagtaattcaaacttgggatattattagttttaaatattgtttttgagttgttttccaaaaaaaaaaaaagatttaatttgaaataggataaataatgatatgatcattagggtgtgattggtataggatttgaatttgattttttgctttttaaaacttaaaaagtgtgggacctgcacagaaaacatgattggtttattgtttttgaaaactgatttcaaaaacaaactcaaaattattagaaagattttgaaaatagctttttcatgttttcagttgatccaaaaacatgatttttgacttttttttttctttcttgaaatatcaacggctactctctctctctctttttattccttctttttttttatattctattttttttattattttaaggaaatattttatttcttttatttcttaataaatagtttttttttctacctacatttctattaatatactatttgttattttttttctctaatattattattagactatttattattgtaaacagatattataataaaatataattatttttctaatttataataaaatataattatttgcacctggaaaaatacactctattttattattttcattttttattatatatatttttaatttatagttacttatattatattttttttcttcattttaaatgctacgactaaaacaaaaaaataaaaacatatgttttatttgagtaataaaaaattaaaatgaaaatattaaaattaatacaacttagttacaacaatagagtataagtatttataaataaaaaaaataagaaaaatctagctttaattaagaaaataatgttaatgtattattcttataaatttataactgtaattattgtggaattaaatattaaaattatgtaactaaatttatatataaatataaaatttattatcataggctatttatttaaaattaaaatcatgttcagattagttaaatcaatcatatattctaatacggttatatttttaatttctgtgccaaacacagattcaattttttaaaattcaaaaactgtttacagacactgaaccaatcacattttcagaaacatatttctaatcacaaaattcaaattttcattttagaataccaaattttgaaaacacagttttcaaatcacgaaccaatcagccccttaagcttttttagtaattcaatattcaattttgggatagtaatttacattagcttgagaagaataggctaaatctcatacctgtagaaagggctttcaaggagtcctccagaatgcttgtgcaaaataataaccttagagccctccaccatttcagctgcaggacatgtggctaagccgtaaaataccaccaatttcttcactaagaagaagacaggaaataatgagaagagaattgatcacattgccaataatattatattctaatccaatttttacctcaagctagtgccttcgatgtttgaattgccctgtgtagaaaccaaaacgatgtgtgatcctaactcgtgagtggattggacgagtagttgatcacgtttatgcatgttcctctcactttcttcaacctgaatcaagtagcataacttgagaaacaatacttaaataaaagaatcatatcattggatatacatctacatttcatatcaaatgtactttcatactccaagatctttcactaacttcttagtttcagaaagaaggcaactttcatctataaacgaaagcttacaaactccctaataaacagaacatgagatgtatagaaatttgtcatggttgttaattactaaaaagaaaatgtaagctcataaagttgcttctctaaattgatagaaaagaatcaacagacctgccatgtgaaacgatatccatccatattgatctcaaaatctaaacatagaacaatattttttagtcaaaaatactatgaaaaaattgttaggttttatgccctannnnnaactccatttcaatgtaatctatttt

SEQ ID NO: 117165 - DNA, 1209 bp, Cannabis sativa
tttgccaacctttttgacactgctggcattgattctcctgctattgatcttgtcttggacactatccccagcaccattacaccagaaatgaacatttctctctagaaaccattcactagtgatgagattcaagttgctttacttggtatgcgaagtgacaaaagtccggggcctgacggaatgtctgttatgttttttactcatcattggaacaccattggctcacacatcactgctgctattttggatgtactacacaaccgatctgatcctttatgtatcaacaaaacattaattaccctcatatcgaaagtcaagcatcccacttcagtcactcaattccgacctattagcctttgcaacgttatttacaagctcatctccaaggctattgttcttagactgaagccatttttgcctttggtaatttctgaatttcaaagtgcctttatctcagatcgattaattactgataatgtattaatcgcctttgaattgctacattgtctccgaaataaaacaagaggcagaattagttatgctgcacttaaagtcgatatgagtaaagcttttggcagagtggaatggcattttttggagcgtgttctgttaaagatgggattcggccaaggtcttgttgagcttattatgcgctgtatttcttcaacgagctattcattcctcattaacggtcatgttacaggacaactgcagcctaaacgtggtattagacaaagggatccactttctccatatctttttcttgtctgttctgaagctttctctcgattgttgcaatttcatgagcagcagggtatgcttacgggtttaggtgttactagataggctcctaaagtgtctcacctactctttgcggatgatagtctcctattttgtcgtactaatgctcgctctcttgctgtagtcaaaaacaccttgggtctttatagtagagcttcaggccagctcatcaactatgataaatcagcaatgtccttctctccaaacacatctgatgctaatcaaaatgcgtttaatcttttccttggaatgcctatccattcctgtcatgagcaatatctgggactaccttcttatactggccacaacaagagtgaagccttcaatgagatcacgaattgtatttggaaacttcttactgcttggtaagaaaaactattttccattgggggaaaagaagtgttactt

SEQ ID NO: 117166 - DNA, 2126 bp, Cannabis sativa
  modified_base (369)..(372): a, c, t, g, unknown or other
  modified_base (1799)..(1807): a, c, t, g, unknown or other
agagagagagagagagattagagtgcgactaagaagttttctggtttagaaaataatatcaatcatatcatttacgtcaaatctataaggatgtatttatagtctttattttatcccaataaataaagataaaataaatcatttatttaagttcaaattcaaatagataactgaataacaaaattcaattttatctttattaatttaaaccatttaattacaaatatcttatgttgacttagattatggtcaactaacaacggagctttattaattgtcgattatcaccacgtgtaaataagaattataaatagtaaagataacacaaagatttatagaggttcgacccccttgtttagcgggtaatgnnnnactccccttttagttgtattcactgttgagataataccatgcaaatcataggtaaaaaccttatgatttctagctatggctctcttcagtattacaattgtgagaacaatatgttacagaccaagaactgaaaaaatcttgtgaaagacttaagaagatacttgacttagtgtctaggaagcatgaatggaatgtgaaaattgagagatggggaggccttacacgtgttagaaacttaatggagcatgagagaagacttgttggagaccctttagtgcttgtggaatgacatccttggagagtgaattaatgccctttatttagtgtagggcttacaaaatatcttaattcaaataggtaaaggtatcccttcaaaatagggatattaatatctttttatctattatttaagctacaaaaaatgataacttggctgcataacttggctagccacccctattttttagggcttggctagcctatgatctcctatggttggccaggtattattcctgcagcctcggtatatgtgtgtgtcagccttagtatgtgcttgccaaccttggtatgtgcctgccagccttggtgagtgcatgctagcctttctagcctctttgtaaaactttccttgcaaacgtcaggcttccttggtcgaacatgctcttttggttggatagtcactctttggcaaaccaacttattctcaaggcttggttggcctacaaacttacattggtcattctataggcttgtattggtcagccagacatggccagccaaggtcttgatagcatgcttcactctttttgcttattgcttgacaattttactcgattgctttagaaccctttacagttgacatgccatgtaagatgactttgtcatgttattgtcaaactatattccacgtgtcctcagtcttgaccatgtagacatgtcacgttaggtggacaaaatttaggataatatttacccccaagtccctgttcgtaagttgtagggatagggacctttcaacttttgtcttgactataggagccgttaccgagcagtcttgttttgccaagtattaggctctttgaatgaagtgcttaaacctttgatcttctctctcccatgtatgcctcatcttcttttctttgaatttgccattaatgagttttaagcttttttaagcttttagaaactttttaattctcacgttttaaagtagtgttttcacattatactttgcttgatagctttgggatgcataatgtttgactttttgatgaacaagatcaagtcttggactagtattttgttaaggactctgtccaactcttatatcttatttaagaaccctgtctacgacttagatcctgcatctaaactctgtctatgacttagatgttgagttgtctaccctaaataaaatccatttcaannnnnnnnnatttactaattaataaaaaatcaaaaatcgttttatgttgcatagttcacatgacttatttcatgattatattcaatatatagattctaagtccagaatatatatataaatatatatatttattcatgattatagtatcggcaacatagtagaatataatcatgattatgtattaaaagtttaattcccatgatttgtcagttcattagatttagactagcatgataatcaaagataaagtataattacaacttggataagtgttatgtcctttctagggtattggaaaagtttaccactatcagatgtatggagtata

SEQ ID NO: 117167 - DNA, 3342 bp, Cannabis sativa
tttcttttctcccttcataactcaggttttgtataaattcttggactattttagcaactttgactgggataattactgcattagcttgaatggaccagttcggatatcttcacttccagaactcgttggttagtaacatccttctacattttccttattttacttgctttttttgatacttatatcatttggtccttctgcagctgaaactcctggccatgacctactgcttactgatgaatttctcagaggatgtgttgaaaagttctcagctccttcaaggggatatgagacaagctccagaacatttccgcaaaagcatcttaacattgtcgatccattgaaagaaaataacaaccttgggcgtagtgtgagcaaaggtgttatttgcttcctttcaattagagagagaatctgagatcgcctcttttcttattagacttgagtaggaagtactattttgttcttcccttttcctagagggatattctgatcttggtaatatgcaaatcaaatttgcttaggtatcatgactattatttgcaagatttattgggatttgaggaaattctgttaaactaaatgttctttgaccaaactaaatagccagttaatgataaaattctctttttatgatgcaggaaattttttccgaataaggagtgctttcacatatggtgctcgaaaactggggcgcatcctttcccagcctgaagagaacattggagatgaaattcgaaaatttttctccaacacattggaaaggcatggaaagggccaaaggcctgatgttcaagattctttttccatgtatggacatgatgagtttagtgctgcatcattctcggatatagagcttcaagaaattcagataggttgtgatgccgaatcaagtagcatgactggggatattaggttaaaccacgagagatcactgcctggtggagaccctgatgttcagatatcagggactgaagtcatctctgaaaggtatgtggatgaacaatacgaagcctcttcgaatatgatgccatcaatggatttgtcaaaaccggacaattcctcggatggaactgctgtttcagataatcgtcttcatggggatgcacaagaccttgctacatcaaggtttcagagtcttactatttctgatgattcgccaaaatcttcccacacacatcatgctcctcatctgtactttgctcattcaccaactgcaaatgatgaaataaatggtaattgtcaaatcagacaacaaaaacacagtggttctactgagaatccggctggtgatcaggatgaacaccacttcaccagtaatcataaaattgtctcaccggttgcatcaaaggaacatctttcacgcttgagttcgattgcgttgtcctcagaggacttctatcctagctcttctggttacaggctgtctactgccgttgctggaagtcccgagcctttcaacactttgtcagatttgaatggagattttgaaagtcaccttaacagtttacattatggtaggtggtgctatgactgtgcccttaatgtatccattgctcctatgccacctatgctttcacagtttcacagcaagaaatcatgggatgtaatacggcgatctctgcatcttaagcataatgttttttcccaaatgaataccaacggagttgtccacagaccagctttttaccccataagtccaccactattacctggcggtgtaggatttggggttgaggaaatgcaaaagccacgaggaacaggaacatatttcccgaatatggtatactcattctatcttttagattattgaattttacacttttcttggaaacctgaatcttttgttgcgggtcatatttctgttagtcttggtgctagtggtggagttcaggtggtgcggtgaccttctgatcttattacactgttctggatatgttatgcagaatcattacagagataggccaattacaccaaggggaagaaaccaaatgcctgctaggtctccccggaacaatggtcgtatggagaacggtttggtcgagagaagtagtcgtgacactacacaagcacatttttcgtctcacaaaggaaatgggaagtctgcatctgcagacgacctttctggttcccctcggaggaaggtaaacactaataatgccaatggttcaatgcatccgtctgagcgtttggttgaatttggttccatggggcatccaccacccgaggcacccttaccgagaggaagctggcaaacaaactctgtgttgagtcccattcaaaactcagacactagcctcggttcaccaggatcagataagctaaaaccggtactgagtatggataaagataggtatgggaactttaacattgactgatacttatattaatcattcactcattgtggctcgttctgggccccgattaagcttatattcttttggcacatgtaggattgctgtaaaatcataccatttgaaagatgatgatgatttcccacctttatccgtttgacaccgcaatgggggaagtgagtgattatctgtttttatttggttttaaggcaaatcgagtgatacagtaacaaaaaaaatctctaacaaacagctcgagcttgcgctgtttgcctccctggctcgttaaactcttttcggaagctttatgtggagtttagtattctcttctctacatgtcttagaaaacgaaaaaaaaagaaaaaagaaagataaaacgaagggaattttctgtacatttttactaattatttggttctcacaaaaaaagaagaagaaaaaacacctagcatctttgctttggtttgaggtgttgtttatacataggatgtttgatttttattataatttgccctagtaagattttgctctttaggtagatgatgtttgaaacacaacatattgtttttgatgatgataatgttgttgttgttgatgactgacgtagctttgtatttaaacaaaaatgtttggtccctctttttcagtgttacattacaaaggcatgttcacttatatcatcacttcacaacttattgccccttttctcttctccctcacttattttgttcataaaacacatatatatattagggatgtaaacagggcgaggcgggtgcggggatcgctctccccccatacccacttcttaaattcaccccatacctgtcttaatacccgtttaaattaaagcgggggtggggtgggtttatccgacgggggaaaggatccccatcgggtacccattagatatatatttttgaaaaaaaaatgatgtcttaaagagaattaaaaaaaaataatcaaaaaaacttagtaaaacaataaa

SEQ ID NO: 117168 - DNA, 1243 bp, Cannabis sativa
  modified_base (1185)..(1217): a, c, t, g, unknown or other
cttagccacgggagcataagtttgtgaatagtcaattccatgtcgttgagtgtagcctttggccactagacgatctttaaatcgttcaacagccccacttttattgtatttaactttgtataccgatttgcaaccaatggctttatgtccaggtggtcgcttggtaataacccaagtattgttttttttagggcagttgtttctttatccatagcaagaagccaatgtcgaaattgagctgcttcagcatagctttggggttcaatttcagagtatgctgcaaggacagctgctcgaaattgagggtgtaacttgatatatgaaaggaagggctcaatttgatgtgttgtagatgaagcatgacaaatgtaatctttgagatgcttaggtttgtgcaaagttctaccagtttttgtagtttttaatggtgttggggctgctgttatagcgtcttgttgttgacaacctggtataggagcttcggatttggaagctgtagttctaggttgagaaagagtattagtaactggtcttggtgtgctgccagttttcaatggaatttttggattggcttctggtgtagaagctgcatttttaaactgagaattgtgagtaggtactggtgcggatatgttaccagtatctgaaagattaattgtattgatttctggtgtggaaatcagtatgttagagccactatggagtggttgaggttgtgtgttgttaagaatagcaagttgtgtatgatgagtaggtgatgctggtgtgaaactaggaaaattggatgaatcagtcacaggtttaagggtatgaacttgttgttgtatgggtttgaaagtaggaatgacaatgtcagaaaacaaggtttttacttcagatggagatgttggtgaaaacaaaggaaaaatattttcatggaagataacatcccttgaaatgtaaagttgtttggtttcaatgtcaagaagtatataggatttcatgccgtgagggtaaccaatgaaaatagaggccctactcctaggtgtgaatttgtgtcttttggaaggaagggtggagccataagctaaacacccaaaacttcttaggtgatcatatttgggagctgtatcatgtagaatttgatatgaggttaaacctttgaacaacttggaggctgttcttgttggaaattattttactagnnnnnnnnnnnnnnnnnnnnnnnnnnnnnnnnncaccctaaatatgaacttctaaaatg

SEQ ID NO: 117169 - DNA, 760 bp, Cannabis sativa
aaaaaaaaaacaaactaatcgtgtgtgttgtggaaaaagactttcaatttgttattgtgaaaggtgattctgacataattattaaaggtgtcaagcagttaaatcaaataggagaagttgagaactatgtatctcattgtagcagcgttatgaactcttttgtgggatgtaattttttgaaagtttataaatttggttgtaactggtataattgaagtttcttcaataccatataatgttgtttgtaatgaccttatggcctgcctaatttacttcatctatactatttacgatttttttcaaaggagcgagagagaaactaatcatatgtgcaattaaaatatgaatcgaatagttattggttgtgcttgacctagaaaaattcaaacaggttcaatttggttttgtaattgagttaagatttaggttttattatttttttgtgaaattttaaataattgtaaatatattaaaaacatatctttatcaaatttgtacaaaaatacacattttttctttttttactattttcttaaacaattttttagtttagtaaaatttaagatccatgctaaacctaaaaattataggcaaaatgtggttatttctacaattttgaacgaagtaacccctctcgtttaaatcatctcacttatcattaagggtgcgtttggaaagccacattgtaattgaatttgtgtgtaattggaggtaattatacaatttggcatgtttctctgaccgtgtaattacactgtaa

SEQ ID NO: 117170 - DNA, 3205 bp, Cannabis sativa
agcatgtccgccttcgctcgccgccgccagcgcgggatttgcatcctcagcggcagcggaactgttactaatgtcacactaaggcaaccggcttctcctggagccgtggtgaccttacatggaaggtttgagattctttctctatcgggatcttttctcccaccgcctgctccaccggcagcttctgggttgactatttacttggctgggggacaaggccaggtggtgggtgggagtgttgtgggcccactcatggcttcgggtccggttgttattatggcggcttcgtttggtaatgctgcgtatgagaggcttccacttgaggaagatgaaggacaggtttcgattcccggtggaagcggaggaatggaatcgcctggaatcggaggagctggatcgggaggaggacaacagcagccatctcagtctcagcaactattgcaagatccaaacccttctctattccataataacgtgcctcagaatttgttgaattcatgccaattgacttcggatcagggctactggggaacacctagaccaccttattaactttcttttttttttttctttttttctttctttctttctttcttatcttttcttttcaaaagaaaactttctttcatgatcaatatcatgttattccatcatcagttaatttggctctctttctctctctccctctctcactatatgcatcctgatatcgatctttctctttgtttcaacttttttttcttcttcttcttaattgtcatcatcatcaggtttttcattattcttctttattacaagtttcgattttttcttttttaatgtttaatttattggagatgctaagaattcatcgtcggtcttttgatattgaagaagaatgtacaaattttcttaattttatgattttatgcttttttttttatttttatttttgtggagatatatgatgatcatatgtatatatttgatgtttgtcgaaatagttactcaattttcgggaggtcccaactgacggtagcttaaagcttaagtagctagctatatagatatacaagctaagctatataagttggccaccaaaaaatagtgctgttgtactctaattctgctaacttgtctgataatatatatttatatatatatatatgtattcatccactttttttgcaggaaaagaaaacagaaactggtagtttctgattctgtggaggctccaaactcccaaaaaattatacattatgggtttcattacttattaataattacttttcttaatttatagcttctgccaatctgctaacttaatgtaactatatttattatcattaccaattgtttttctctttttcttcataaacaccagtataattagctgtatttgttttttatttttttactaaatagttgatataaatcttatatgtaattgaaggttaaataaggaatttagagtgtgagctatgtgattagggatttttagtagtagtagtagtaataataataataatattgtggaggaagctaggtaggaagggaggtgcattgggtattgggtcacacgtgcgctgctccataaaaagctccttttcgaggcaacagccagtaacccaaaccaagcgttaaagtctccctcattggcaccagagaagttaattaggagtggagagagtgaatgagccacactctctgatcacaaacaaagctggtaggtacatacacaattacacacacactcacatacacagcttttaaaatatatatatatatacatacataatttaattctctattttccaaaaaaaaaaaaaaaagaagtttgtcttattgattctgtaatatgtataatatgctcatcaccttggaaaccctagatatatatatagtactacttgttttcactgcaaattgttctgatcaatacaaaatcatttttccccatgcacacacccttttaatctttcttcccatgatcttcagttgtatgtcgttttttttttttttttgcttgtttgaattccaatggaagttaattatggctttctttgccccccaatattatctgctgttgatcagagtttgcccatacatattctctttgaacatttaccagacaacaaaaaagttgtttactattataggtatgctagctacgactctacaataatattgttcacaacagatttttttgtttttttaagctatatatgaaattaaggagtatatatatagctatacatataggaccccctatatattaaggattcttctaaccccaaaaaaaaacaatacatgatttttccttttttgaaaaaaaataaatatgttctttctttctttgccttttcatcatataacacttttccatttctgcaacttttttcttccgacttcttttgcacatgcatctctatttatactaatattaatgtgtttttgaagaaacaatgtaatggaaaaggccaagttactttgttgcttgcattcattgatttaaggtttagctatagcctcataattatatgatgaacttagacaaaattggacaactttgtgtggtgattattaactaagtggaccatatatatttagatacacacagaaatatatatatatatatttatatatatatatattatgtatattgtggtttgtgggactcttgtggagcttcgatggttttcataatcctttacagttcaccatgatgatcataagtaccacttattccttcaagtacacattctaatgactatatataattgcataaaatactaagattctgtttgcccttctttttttctttcactttttgctatatatatatatatttatctattattacgttgagattctctattttattggcaaagacttttacgtgaaagttaattaaattagcacttcgatttttttagcattcgaattgatcctcaaacaaaagttcctttactgaccagctcaccattaattaataatgaataaaggcatattttactttgaaatatttatatatatatacaaaataagttgggtactacttagagatggaaatacagatgggtaaccgcggggactcgactctaatagggtgggaattcttcgtctaggtgtttaatggggcggtggtgggagacaatttcaatacccgaagcggggatggaatgggaataatactatccgcactatatccgaccccgatatagat

SEQ ID NO: 117171 - DNA, 3682 bp, Cannabis sativa
aaaaaaaaaaaaaaaacagcccaagatactcaaataataaatgtatcttggaaattgaagatgatatacataaaataaaatttataccagaaagaaaacatacattctacgaagttaaattaaaaataaacaatatgttaataatagagattaagatattaaataacataccgtgaagaagagcagacaagctaccggcggccatgaaatcatatacaagtaatttttcatccttggaaaagtaaaacgctctgagaggtactacattatcgtgtttgatatgtccaagaacatccatttgttgctcaaactctttcttgctcactaccacatctttcaacctctttacgaccaccgtaataccctgctccagcaccgccttgtatgatgttcccacgctccctttccccaaaacctccgccgacgctctaagcaaatcctccaaatcgaagctgtaaatcccaccatcgaagaacaccagccgattcctctcggcctcagttgactcacctgtaatgtcgtcctttgacgaagacgttccggcctccgctatgccaccaacagaacgcgtcgctaccacaggttttggggtcttcggcggctgactttgtcggcgttttcttaaacagaaaaagagaatgagtagtaggagaaaaatacccacagcggcgccaatagctattcctacaatggcaccggtcgatagcctcttcttggacttattatgaactgggtttgccggaggtttgttctcggatggcgattcagccggagctgggaaaaatggattacacgacgacaatggtcctccgcagagttgaaggtttccggcaaatgagtctgccggaaactttgacaggctctgaggaattgagccgttaagtttgttgttagagacgttaaaattgaccaaattgacgttcgaaatgcttggaagggaccccgagaacccattgttttccaaaaaaagtccgctcaagtgggtcagattgttgatggaaaacgggattgagcccgtgaaattgttagtagagagatcaagtcgacccaagcgaccaaggtgtgtcagactcgctgggaaaccaccggaaaaccggttgtcttgcaggtacaaacttcgaagtaaggttaatttagagaaatcagagggaatatccccagtaagtcgattggaacggagactgaggactcttagctgactcaggcggccgagtgtattagggggaatcggaccaacgaggtcagctccaggtagacgaagactataaacaaatgacttgttggcgtcgcacgtgactccgacccagttacaggctgagtcggacgagttccactggattcgactggcgtgaggagttttagagatgaaagcaaggagagcttgcttgtcctgagtcggttccgagttggtgagtcgcccaccactgagtaccatcaataagtaaagtaagcaacaaaacagagagcttaaaaaacccatacccatttcttagtttgagatgtagacaaacaaagaaggaaacaacaatggcggcttgttctttgtcgatatgggtctgttcccctacaatttagcttcttctcaatggttccttctcgaatcggatttggacaaaacaacgagtggttttccggcgaagtagacccataatattatgaggtatatgttaagagggagagagagagtgtgtgtactgtgactgtgaggagtgagaaaggcagagatttagtaaagagagaaggtaaagtatcacgaggacaccaagtgataaaataaaaaagctgagagaaaacagaagcgtccgtgctggcagtagtataatttttattattattcattcatttattttaggtaaattaagaaaataatttattttaggtaaattaagaaaattaaattactttctacattttacgttcccaaagcgacgcaaccttcgaaagataaaaaataagaatcgctccctaattactattttcttatattttggcgcgtggatttaagtataagtcgcgccactatcttggactggcacctttaaaataaattttttttttttttgaaatccttgaaaatacaattaagccatatggattatggaaatggatttttttgaaaaaaaattgtggcaataatttttcctttttatagaattttttgataataaatatttgttgccattactataaaaataaatagactaaataatagtataagcaactaaagatttgagtgtgtgagcagtataaacgtaataatcttttagcgttataaatatataaaatttataaaattatctttttttaatttcgtcagtatatatattttaatattgttttaaacatgtcacgtataaagtaaaaattcatctggacaaaaatatctagcgtttgttatttttaaatctttttataataaattcaatgtagtctgataaaattaaaaaaaaaattacaatttatgccactaaaaaagtcattgtatttatactatttacaaactctaaaatttaagtacttatgctacaatttacccaaataaatgagcaaattttaaaaaaaaaattaagaataaataagtttttttttatgtatgaccttagtaaaaattttgtcttccaaattttgttatatcacaaaattctctcaaaattgttgcaaatatatctttttagttagattttacttatttttaaagcaaatcatttttttttttttgagataaaagcaaatcatttatgtagttaggtgtagcaacacaaaaaatgttatttaacaactttaagctatataaaatcaatgttattgatattaaatacactaatacaagatctaacaaagcataatccgtaaattctcacaatgtatcattagattgatattaatgtatttatgttttggttgaacttttgaatttgccaaattaacattttgttagtgttaaatcatgaataaatcgtttaaaaaattaatagaatgtaacttgaaaaggatatttgcaataatttttaaaattcaaggagaatttggaacaaaaaaataattcaaagaacaaaatgctacaacattcatagtttggatgataaatcttgttttcctttttttcattattattaatatggttaatatatacaacaaatatgaaagaaatacactatccaatattatacgggaaagaaatttgaaattcaatacttacttacacatatttaatatttttttcctaaactaatacttttctgcattgaaattttatgaccacttttccaaaaccccaaaaatacacctctcaaaaactctttttgttttcaatttttctgggcttttaaggggtcgggttcgatcgggccgatgccccgtccaatgggcccgatatcccgtctgatggggtccccgatgcatgggtccgatgggatcccgatgcatgggtccgatgggtatttttgagattttttgaagtcgggtctgatgggcccgacttcaaaacccaaacaaaaaaattctttgtgcgcgacatcggaccttcttcttctctggtggactttgtgtgtcggtacgtgtttatggtgttgtggacggtggtgaggggctgacgttttgggcgttggtgaggggtcggcttttgggcggtggtgtggggaattggaggttgtggttcggttggttgagagagagagagaga

SEQ ID NO: 117172 - DNA, 1947 bp, Cannabis sativa
atttgtactattttaaaaatatatggtctattttgtcatttaacagaacaaaaagtccaattaataacttttacaaaacacaaagtctaaaataatatttacacactaaaatcattggaaatatataccattttagtagtaattgatcatatatacttttttattcttctcattatcaattgattagttttgttgttaagttgtcaagcataatattatgaaatctactaataaataggttaatattttttttttttaaaaaaaataatagtaacggaacagttaacaaaagattattatgaaattatgagcatttttaataaaactataaatataaatatgatttgtgagctaatgcaaattatatgttgtttttttccaatgcttaaactatgtttttgataaataaaacataatccttgctatacataaaattaggacacgttaaaataattttaaattaatctattaatattcaagcacatattaaaaagaatgagtgaattaagaaaagaattttaaattaatctaattaatatttatacatctattaaaaaattaataaaaagagagaattaagaagaagataaaaaaataattttataataattttaaagcatcatatcaccgatttatatctcttatatatataaatatatattaatttttaataaaactataaatataaatatggtttgtgagctaatgaaattatatactgttttttttaatgcttaaacaatgtttttgataaataaaaaataatccttgctatatataaaatgaggagatgttaaaataattttaaattaatttattaatattcggcacgtatcaaaaaaaaaataaataaataaatgaattaaggaaataattttaaattaatttaattaatattatgcttctattaaaaaattaataaaaagagataattaaagaaaagagagaaaaatagctttatagtaatatgagagggtcatatctcacttttatatgtatactaggttgatgttacgtgcaatgcatgtataattagttttctttttaattaggttcaattagatgatgttaagtgcaatgcaggtatgtttatttattttttaattaagtagtgtattttttttttttaatttttaaaatagagtttgagattttgatctttaagaaatatttttagctattgctacattggtgtgttatttgaatatgattaaatatatacgcattttttaaatttttaatttttttaattaggtaacgtatcaattaatgcatatatatatattataatttactatattcttaaatattataatattttaaatttaaatttctttatataaaatatctacataatttttattttaaaatatatataataatattataaaattaataaagaattttcatattaagtaataggacatatattctgttaaagttaatgtaaaaattcaaaaattatcgttaaaccaagaattaattctgttatataaacatattttatataaaatagatatattaattattattaaatttgtatcaaacaattaaataagattataaaaaagagtttatttagcacttgtcatcaataattaattttgaggtaaaaaacaaaagtaaacattaaaatggataaagttggaaagatgtacgtttctaaagtctcttataatttcttaaacttctccatgtgggttatttaatagtttatcccccatatcttcagttggatcatttgaaatgctttgcttccaaacttcatcacccattatgtcatgaaaatcattctactagctaactaatgatccgcctagagttcatttgcatacgaaaacaatacctactactttgaaaaaaaaaaacacaaaggacttgtttggaacgtcgtactagatcgtactgtattgtattgtaatatattgaattggattatatatcata

SEQ ID NO: 117173 - DNA, 2591 bp, Cannabis sativa
  modified_base (2545)..(2548): a, c, t, g, unknown or other
ttgttgtaacatttatttaatctctttgttaatctttgtattgtattacaatagagttgtaatgtcttgattttcttccattgtaataatatctctaacatttctttctcataagatggtattacagaaaaggataagtgtttaagttgtaatttctaaagagagatgctctgaccttgtgggtaattttctaaaaatgaaaaatgaactaagggagctctccttttacagctgaatgagccctttaaaataggaataaaataatgaaaaaacataagttggatattttttactatagatgatgatctaatagagaaaattaacttctaaaattgatcgtcgatttttggagcccgagccacaacgacgggatcagcttcgggtaagttggagcttatttttgtgactccattggggtgaaatttgaggtcgacaacttcacaattgaaatttaagtgtgatacatgacttgagagagaattaatacagcttcaaaatgcaagttaaattgcattaatcggatcaatattgagtgagttatggttgttttactgaatgtagttcatggcccaatatcccgattgacatttagcgtccaagtttatattccagcgcccacgttgatatatgacgtcaacctagatgttgggtaattgaaaaaatgtctaagggggttacttatgacgcctaagtgatattttgacatcacttagttggtttgtgtgttctagcgaagctagtcactagctttcagagatgttgatgttctgtggaaatgagagactcgaaactcttcatttttcaagtggtttccccatgttggaaatgagagaatatgaagttgtgaatttgacttctctaacttcatgaatcttagttattgcgaaaaacgagacgaacggtcgaaacgaaatcataattggataaacagaacccaacacactagacgatttgtcaacctgggggctgggtactcatttcagattttttgggatgtcgttttgttacttccaaagttcttgaacttgaggatgaggactcccaccctatttttgaccattccagattgaatagtcaaatcaaatttacaacatgaatgatcaaaattagtgcatcgggttgattgtcaacctgggcgctaggttttacttccaaggccttgaatttgtggttttctcccaaagtttgcttgaatctttattattttttatgacagaaaaatacttggaacactttttcgagaacttgattggaaacaaccgaggttgacaatatgtcaacttgggcactggttcccctttatggcccttcaaaagttttgtttggttcccgaaaagagttgaatcttaatctttgttgaaaactgagaacatacttgaaagaattctcgaattgcgtcatcagaatctgcccaggttaagaaaatgtcaaccaaggcactgagctagccctaggtgtcaacctgggcgctggaccttgcttctggcaccaagaagtgttgtttctttcctgaaagtatccatttccctatttttgatgaagatgaagaagatgcaaaagttagccgtcgatctgatacttggaagacgcccagattgataaattgtcaacctagtgctgggtggtgccgaggcaacaagtgctctgagtgctcaaaaatgaactttctccgaatttgattatgatgtataatgaacttgctcaaaaaagtctcttgttgaatctttgtgactcacaggtgttttgtggtgtaagtaagaaaaggactgagctaggtcagctatgagttagaggtcttccccaacaaatatacatatcaacttatccagctagtagtgtagagtagtcagtattttgatttatggtgactttgataagtataagtgctttatcgtaaaattgtaatgtatcttttgtaaaattttaaaaatggaattcccaatcctaaataattttgttgtgccaacatccattttatattttaattaattattaagttttcattaaaatataatttttattaaaccattagtttattgttataaattattttataaaaacacgtggtgtctctataagttacaactttaccatcttgcatagttaaattatttttattttttaattagtccatattgtactatataaacatactacattgaaaataaataaataactaaatatattgtagaggtagcctacttattccctttacttttcatgtaataatgttacaattttaatcattgcttttaaaaaaatgccctgaatgattttaaaaaatattaaataagctaatatatatacttcccaaaaacaaagtaaaaaagaagaaattaagattggaattgcgactaacttcacaaactatttgatgataaaatagtggatttggactaaaaaagctaaatggtaaattttttaccaaattggcttacttaatagttttggaccctgcatcatattgagtggtttctcccttgttagaatttaagaataaggtgaagggaaacttacaaaaatactgaaatttgggttaattttnnnnaaaatactgtcacacggaaatttttcaaaaatactgtgttttt

SEQ ID NO: 117174 - DNA, 1198 bp, Cannabis sativa
gaaatgagttttatttagggcgcaaaatccaacatataattcaaatgcctatttcttaaaaataggacgcacatcacataatataattaattaatactatttgtcaactaattaatctatatttcaagtatgtgatcattataattatacttttattaaataaaaattaatatgtaatattagatattctatttaatacatatttttataaatgaaacaaaataaattcataaaataataattttgaaaaaaaaaatagtataaaataaaatattttcattcttttattttaaaaaataaatcattcttatatttaatatttaatttaaattcacatattctattaaagatgattattttaaaataattattattaattttttattcaaatttacacatttcattaaatagtcatttatcatttaaaaatttataaattgtatattatatataagttactatattaaaattatatttcaaagttaaaatacatatgagatgtgtttttttaaataaaaaaaaaaagatgagactatattaatccatctattttgtgtgataaaatagttcctatttaagaagataaaattagtaaagaaatagtattatccaatcccccttatagtcatattttgtccaaacatagaattggataattcaatccaatcccatacatcaaacatgaatattattatattttgtcaaaatttcaagagtagtttttttttttttttttttttgtaaagatttagggatagtgttaaggagcccaaagacccactctttgctcaacttacctcaaagttagcctgataatcactcatggcaattgaattattttgtatctttacttttattcaaggaccatattctttcctaaaaataaataaaatcattataaatgtgtgctctaaaataatcataagatttgtgttctacatcatttttttacttttattcaagggtccacattctttgctaaaaacaaataaaattatcataaatgtgtgttttaaaataatcataaatgtgtgttttgtcacacattatttaaatgactgatttgtgagatttttattatacacttagcaactattaattttaatcccataatagaattttcataatagataaatgtagagtttgatgtaattaaatctataataataataataataataataataaagatcggaag

SEQ ID NO: 117175 - DNA, 3230 bp, Cannabis sativa
aaagtcacgtgcattatataagaaagatctttgtataaacttaaagacatgtatgtaaattattatttgaaaaatatgaatgactgtctgtgtaatataagttcgtaaattatacattttaatagacttttgaagagtttctggttatattataaaaatattgaagaacaaacttttttttgtatatagtgaaatattaaatgcatatagtttgttcataagtattagttgagaagtcctaaagtattcatatgtatcaagaattataaatatatgatcatttgatatggaataagaatggaaaacatacatggtcctgtagtaccatcattattgcaaataaaaatttatattaatgtattatgtgtatatctacttgaatggaataaattttttggtgaacaattttgtatacacacacattagtgattccataagttgaataaatattcatcttccataaacccctagtccataattagaagtttacacatactcaggaagagttgtagtaaatatatgatcatacataatatatgatgatattttaaaagtttaaacaataatcttatgagatataatatcaccaaaataattatgaattatatgtgcatgagggggatacatatttatattgcactctttttcccttagcttagagtttgttctactaggttttcctgacaaagtttttaataagaaaacttacaaataattatgaatattaaatttgtgtatattacattctttttctcttagcttaggttttgactcgcggcattttcctgataaggtttttaatgaggcaactttaaattaaattgagatacttgcaatattcatgagaaagtatagaatgtgtgcgactgagatcattggttaagtacatatgaattacaaataataaagaagtaccagcagatctctatgaaggtagtaattattgtattgctcgactaaaggaatgtacattgaaggagatagaattaaacccacttcactgaattcttatttacacgagatcttcaagagagtggtgaacttcagcttcatactcatggccctctatagactttgttaaaacttaaaggtgaactttggtttcttatctgaaataatagactttagagtctcataaggtcatactatctcccttatataactttccatactagttcttgtactgaattagtaccctgattcatattcaaccatacaaaatcaaacatacttacggttctaagtaatcgaattacaaaatttctagtaatatattcccattctcactcgggaagtttaataagttataataacctcacaaatctttgatgttcagctttaaattgctgacaattcaaatatgtgaacagataatctaccacacccttttgcatactgtaccattagaaagtagaattttaagttttggtacatcttcactgtaccaaatgtagtgcaaaagaagtggtacaagattaatctaggatcttccttctaaactcaacaatatttagtacacacttcaagtttggtaaagtaacatcccattattgacactcaaaaatgattaatctggccacccaagacttctttatgaatttccactaactcttgatctacaaccaaacacttctgattctttctatcaaatctaattgaagtgtcaatttattttgtttacccaacacaaatccaatacatgacttgaccatatcagtcgctaactgaagagacatcatggttatgttataacctgcccgagacctttcctacttagggtatctaccactatattggccttctcaggatggtagagaatttcacaatgataatctttaactaattctaatcatacttccttctcatattctaaccttttgagtaaagaaatatttgaaaatcttgtggtcagtataagttttcacttttatcaaaaaaaaatagtttcatcaactcttcaaaacaaggaccacttcagcaagttctatgtcataaattgagtaacacttctcataccccttcaaataacgagaagcatacacaatggccctaacaacttgcatcctaacacacctcagatcctatctggatgcctcacaataaaccatgaactattcttaatctaatggcaaaactaacaatggggttgtaagcaatcgttgtttcaattcttggaaacttgtttcacatttatctatccatataaactgtttaaccttcttagttaactctattaagggcttagagatcttaggaacccttttacaaagtgataccattactcaacataacttagaaaactcctatttgtaagtgcctctgactttagccaatttctgttggactcaacctttcccaaatcgaccatgttcccatatttactaaaatgtacctttgaaaggacacttagaataactgaaattcaaacttcttggattagcataatgtttatgttcctgtggctactataaaaccatccgtagatactattcctacttcgtttctgattgagagtacacaaggatatcatcgataaatactacatcacatatatcgagaaaatccttgaatattctattcatcagatacataaaagctattagaacattgattagtccaaaagatatatccaagaattcataatgaccatacctagtacggaaggcagtctttggaatgtcctcctctcagattctcaactaatgacaatccaagcaaaggtcaatcttaaagaagactgtctttccctgaagttgatcaaaccactcatcaatcctaggcagagggtacttgttcttgattgtcaacttttttagttctcgatagttaatactcatatgaatcgacccatctgccttcttaacgaacaacactagaacttcccaaggtgacacacaaggttagaaaaatcctaagtcaaacatccactaaaactgtaactttaattctttaagttctgttggagctattttatagggtgccctataatccgactttgctccaagtgccaaatcaattacaatgtctaacctctcactggggtggttcttggatgttcttctggagttcatccaagaattctactaccactttaatgtcctcaggctgaactatctcgagctaggtggtatctaataccattgctaggaattctatgcatacatcccatgataagtctcaagcttttattatcatgataactggtgtaacaccctaactagactaggcgt

SEQ ID NO: 117176 - DNA, 860 bp, Cannabis sativa
  modified_base (63)..(73): a, c, t, g, unknown or other
atgtgtttacttataatcgttttagaagttcatatttagaatgttaatcaacatacttgtgannnnnnnnnnnatcctggtaaaataatttcaataatgtggtgtctgatgtctgttcttttttccaaaatggtgagtttgtggagggttgtagtttggcaattgtagttcttattctaaaagagaagcaccctgtgtttatggttgatttgcacccaatagctctgtgtaacgtcatgtataaaatcatcacaaaggttgtggtgaatcgtatgaagttatttatggattatatagtgtcagatacccagagtactttcattccggctaggcctatcactgacaacatcccagtcttttttgagattcttcattacttaaaaaggaagcataaatggaaagatggttttatggcacttaagcttgacataaacaaagtgtatgaccgcaatgaatggaatttttaagaggctgttttacaaaagttgggcttggttgaaagttgggtttgcctcttgatataatgtgttatgtctgcccaatataagattattcatggtaacaatgagatgtgaccaattattccctctcgaggtataagataaggagatttgttatccccgtacctctttattctgtgtgctgaaggactctcagcattgttgaaaaaaatatgagaggctcagttggttacatggttgtaaggtggcaaacggggcccctcgtgtgtcccacatgctctttgtagatgatagttaccttattgtaaaggtacaatgatgagtctatatttatcttataaatatgattaatttatttattaatattcttaaattgattctttaaattattgattagtg

SEQ ID NO: 117177 - DNA, 1242 bp, Cannabis sativa
ttgatggacatgcccataaaaggtaacaatttaatatgggacaatcatagggagggttctgctcatatcaaatcctctttggacaaagcaatcgtgaataaggaatgacttcaattatttccagaggcaggtattcaatctctccatatctgtaactcagaccacatacctttatatgtgtactttggggtccttgaggcaacttttaaatgtcaattttgatttgaagcttggtggacgaaagactctcatagcgctatggtcattgaccatgcttggaagtcaatcattcttgggcccctacgagggtgttcaagaaagtaggcgctacaaaacttgctctgcataagtggaatagggagaaacttggtaaatttaactataacattaaaaggttagaagcgcagctccaggacatccaatgtatggagacaggatcttgttgttgggttcaggaacagagggtgcggactgaacttaatgaggagcttaaaagaagggctttattttggcaacagagatcccgcgtctcttggattaaagattgcaataaatgttcaaaattctttttcatctctgctacaattagaaactaaagtaatactgttgacagtattttgaataagaatggttgttgggttatgtcttgcagtgaaattggaaaagagttcactagttttcttggtggaattttctggagttttacttttggcttgttggaaagcttggactatcttacccaggaccacatcccctctagagtaagctaaaatggttagatttctagagcctacggaaataaagaaaaatctttttacgatgggaagtatgagggcacatgggcctaaatgtatgtctgttatcttttttgaagaactactagaggtcagttggttacgacttttgtgaagtagtgagtgatttcttttggtcaggaacaatgcacaagggtataaatgcaactaatgtggtgctcattttaaaagttgccaatccaaagaaagcctcccatatcaggtctatctccccgtgtaatgtggtttacaaagttatctcgaaaatcattgctaatagaattagacctattctccctagattgatcttctccactcaagcagtgttcgttcctggtaggaacatgttggaattctatgccctaaataaaatccatttcaatataattttatttgttatcaattaaagattagaagtcatttatgtttacatgtatttttcatgttt

SEQ ID NO: 117178 - DNA, 1689 bp, Cannabis sativa
ttttgctactgatattcttgaattcgccccaataaatacatttgaccccccctaacttctcgcatgccctgttttgaaaattatataaagtctcctttagatgttcttaatgtctattaattcatatgttacaacatctcttccgaaggttatagatgccttcatcctagtggcagaatctatgtggctcgaaatgtcacatttaatgaaattgagttttcatacaaataactattcactaaagaatcacctacctcttgctaacctgctcaaataatcaactctgctgcatttcaagtcccccaatctgcacctctaactccaaatcactcagccaccaacactagttctcactcaaatgaatccttcaacacagtcaactcaccttaactttctgctactcaaaagtctcctccagtccttagttcacattctgtgtcaaactcttagtcacatcacactctccaatctcaaccacacttggattcctcaacttactctgttgcttccaattctagtactcaaagtctttctccaactcataataatgatcctatggttactagatcaaaacttggcatttttaaactaaagttataccttgtcaattcaaccactgaccttgaacctagatatgtcaaagaagccttagccaacccacactagaacaaacctatgaatattaaaattgttgccttgaagaaaaacaaaactaggacacttgtgcctccatcatcaaaaatgactatcatacacaacaaatgggtgtatagaatcaagttcaatgttgatggatctgtggggaggttcaatgctcgattagttaccaaagggtttcagcaaattctaggagttgatttctttaaaacctacagccctgttgtcaaaccatgtacattttgaattatatttactttggttgttacacatggttaggatatacaacgaatagacatcaacaatgcattctttaatggtgagctataggaagaagtctataagcatcagccataagggtttgtagatccataatttcccagttatgtatgaaaactaaataaggctatatatggcttaaaacaagctcttagctagcttggtttgacacacttaaagcatctttgttacagtggggatacagtaatagcaaggctgattctagtctcttcttcacaaagaaaaataacaaattgttgctactcttggtgtatgtagatgacatcctcatcactagtgaaaatatcactcaaatcaacactgtgatctttgatcttcaaacacactttgctttaaaagttcttggaccatgcaagctattttcttagatttgaagtgatcagagaaggcaatactctatctctcacacaacaaaaatacactagagatctcttaaattcaacttagtttcttaatgctaagccttaacctactccaatgtgctccaccactaagatgtctcaacatcttggcacaccaatgcagaatcctactatgtacagaagtgtccttggtgcccttcaatacctcaccatgacacgtccagacatttcttttgttgtcaattagggttgttcattaaatcgctcaaactgcctgcaccgcaaaaaaacgcactttgaaattttttacggtgtggtcgtagtttgaatttttcttaaaccgcgtggtgcggtgtggtttgcagttttg

SEQ ID NO: 117179 - DNA, 1149 bp, Cannabis sativa
gtcacctactacgtacctaacactcaattcccatcaatagaattttccgatcaatctactgaatgaaccaataactatgatgtttttaccaaaatggtagctaaaagggtcaaagcagtaataattaattacctcaatatagtctctgaggaaaaaagagggaattcccctaatgggcttgtgaaaagagagcttaatcaaatcccttgccttttccgtcgtctgaggaaacaaaacgttgatcgaatcatccacagtcctcgactgaaacatcccttcatccatatccttatcctccaaacacaccccggcgcagcatagcaccagccgctccacacggtccttaaactgcgccaccaagctaaaccccacgaacccgccgtaactgagccccaccacgttcatcctcttaacgccgtgcgcatccataacggccgctacgcattgggcctggaacgactctgacctctcgggtcgggtcgtgtacgagtcgccgaagaagaggaggtccgggacgtaaacgttgaattgtggagtcagaagaggaacgaattcgttccattgccactttgcgttggctccgatgccatggatgaggaggagagtgggcttagagttgatgtggtgggttgggacccagcaatgcatgaaagtaccgtcgccgagatcggttgtcaatgactttagaccggccgctgagaacgatcgccgcaagaaccactctctggtggctgtgagactgaagctgcagcacgccatttttggagctctgaaggtgttgttttgttttttttttttatttggaaataaattgcacaagggggaagattatatacagactacagagtgtaaaaagcaggtattatgatgagactgccgatttggtaccaaaatatttaattaaaaattcgaaattactttaatattattttcgttataaaaacaaaagcaacgaatcggttggctacagagattcaaggttagtagattttatggtcgttaaaggtagggttcatataaaaaagtagattaataaataaatgagaaaattacactaaaagtttccacaaaaatttaatttgacgcaaataatttcttaactttcaaaaacagccaccatagtctcaaactctaaattgttgtaggtct

SEQ ID NO: 117180 - DNA, 1330 bp, Cannabis sativa
aaaaatcataattagcctttaatatattgtgtttagatatgaagtaacaaactaattacatataaattcatattatcaaaaatgaaacattttaagtaattacatacacaccaattcttatagagatccctcaattacttccgatttcatgaaaaatgtgtaattatattattagacaaaagggccaaaccgaataattatcttaaaatacaccagtttcaatgatgattttacaaacgcactcttaaaactgagagggtctatcattacattattaccattactaagataaatcatgacgtcaaggatgggatttttgtggttttaatgatctcaatcttggagtttttaaccaaagaatgtaactgaatgtggtcctagttcctaaatgagataaggggcattggtatttaagtgggagagacgtagagaagggtaggtaggtagaagaaaaagaggccaaaacttttcaataattatcaagcatattttataattaattatgggtctcttaagggcagaaaagctcaaatttcccatttctaaaccatttaactgatcaaaatgaaactgatttcaacaactctggaagaaattacattaccctaaacaaaaggttaaacaagttcatacaacaacctaacaaaattctgatgttgattaccttccattgaagaattaagtaatagaatagtcccaaacccaaaatgtgtgggagaaaatctcagcttacataatatcacaatttacaatccaagtcattcatgtgtaaatcaaatagggtaatgttttcaggttaagaaaaaagtacataaaaaaaaaaaaaactaaattaaagaaattgagattctcaaagcatattagtttatacaggtcttatctagcatgcattatccacaagactcttttcaacaatacaattcatttctctaataatgttggtgaataaataacacaatcccaaaactgcatgatacaaaaatattaccatgaacttttgttgtcctctttttctcaaaatagaattgtttacagtagaaataatggaggcatgtgatgtgacagacatattaagtttagctacttaacttgttagcatatacattcctcacttctttccacctccagaaacattaaacttgaaaaatatgatgtctccgtcttgaaccacataagtcttcccctcttgtttgtacttcccagcagcctttgaaaaaaaaaatagtgtcacaacatcaataatttagacttgtaaaactcaaaattagggggagagaaaattaatttctggtacggtggatgaataataacaacactaaattcactcatt

SEQ ID NO: 117181 - DNA, 2694 bp, Cannabis sativa
ctctctcaatcagacttgtcattcaccgcaccatcatttaatcataattatgtaatagattatatatatatatttaaaatattatttttattagatgtttatatagatgatattatatataataatcttttttttacagcttaatgatacaccagaaatttcaaacttaagagcaagcatgaccgaattacttttacaggtttattgatttctctttttcaaagtattgattttaattaattatgtatgatatattttatttgatttttttataaaattttaattgttcatgtatacaggctgagaaagtatctactggatttatttgaaaacaagcaatttttcaagaatactaaaattagttaatatgcttgaaatgtaattcataattattattaagtgaaattttcatttagaacatattatatattttaaatttgtggtgtggatttaattaattagttttataaattataattattttgtttttttaataaatgaatacatcatataaaaggtcgccatgagtagggctccggccataacataatcggcagatccaagacgtacttttacacgtaaagggagttcggatagataaaaggttttcgtaatgtgtaaaaatgaatatattttaagatttttttgaaaaaaactaaagatgacatatatatatatataaaaaaataaataagctgagatcagctggtgccatggcaaaaacaagatcaaagatccaggggagaatcaaatctacaactaaactcacgaagaagaaggggatgaaagtgaaaaaggatgcaactcaaaccaatctgatggagcgaatctctgaaatcaaagctttggaggtcttggacgaggacaatctgtcccttaaatcatccctagctgcgattcagaggcaagaagatgtacggagtgactttgctcagtttctccaagacaatgaccaatgtaacagtgccattgctcagggtaaaaactcgattccccctatttcacgttcgaatactgttgttcgcaacttagataattcctttaagcaatataatactaatgagagtaaggtcaagatcacattggatgacatagaagatgagatttaattttggtcaccatctattgtatgttatgtactaggggtgaacccaccactccatattcttgatggttttgtgcatagaatctggaagggcaaggtggaccgtgtgaagttgctttcttatggaatcttcattattcgttttcattcgattgaagacagagatcagattttgaatgggggatatatatatattcttcaataggaggccggttatcatgaaaccaagggaccctaatgtgaatttcaagaaagaggatgtgaagagtgtgcctatttggatccaattggaggatttgaatttgaaatattggggccaaaggtcattgttcaagatagttgcacagattaggaagccaatcatgttggataatgtcacaaaagaaagagaaagactgaactatgctagttttgatggatcaaagtctggccgatatggtagatttcgagaatgaatttggtatgaatacttcagttgggataaagtatgaatggaagccggtgtcatgctcacactactatggtgttgggcatcttgctgccgaatgtaagaaaagatctactggtgcaaaacaatgggttataaagaaagataataggaagcaagaacaggttgatagtgaaggttttacgaaggtcattagcactaggaaaggggttgcccgagacactacaatatcattagaaccaaaggagacattggtgcaaaattctttccaggcccttgatgaacaggatgtgaatgctgaaataatggaggaatatccagctttggtcaacacaggagggggggaaccctctctttctaatggatagactcctttgttggaatgtgagaggagccaacaatcaacacaaacaacaattaataaagcaattgattaattctcaaaagattgattttgttggactccttgagactagagtcaaggcaccaaaacttggtaccatgtactcgaatgtaattcaaaattggtgcttttcttctaacatagcatggcatgcaggtggtaagattgttattgcttggaaccggtggaggttcactgttgacatcctttaatcaacttatgcatttaaagttgtcaacagttgaaggttttgacagttttttaactgtagtttatgcttccaataacagaatacagagaaggatattgtggaaatacttgatgggcctgaacactgttgagaactggttcttaatgggagattttaatgacattctagctaaggaagaaagggtgggtcatagagtcaaattctacccggatgctaagttcttgaattgtgttaactcatgccagttggaggatgtcaaagcaagtgggaattttttcactcggtctaacaaacaacatggtgatgaaaggatcttttccaagattgaccgagtccttgccaaccaaacttggattgacaaatatgacctggcagaggcagtgtttctaagtgaaggattatttgaccatactcctgtgattttgtctcttcaaccagaactagtaagtggaagaaagccatttaaatactttaagatgtggaaatcacatcctaagtatgagagtggctttaaaaagatttgggat

SEQ ID NO: 117182 - DNA, 4036 bp, Cannabis sativa
  modified_base (3628)..(3631): a, c, t, g, unknown or other
tgcctcaaatatgtttgtggtatgtctagttcatgtatcaatgcaaattttgatccattttcactaagaagatcctagaaactaaaaccgtagttagggatgtcaacttggtcactaggtgaaaccctaggtgcccaagttaacttctggggttcaagttcatgtaattttagctcgtagagcctggatttgattgctccacgtcttcgttgtacagaatactaaaagatagtgagttggaaacaagaaactaaagtttgaacttccatcctagagtttccaaagtcaacatagacacaaggctagggaccccttccaagtcgactgctatgactcaggtctactcaactccgtgacgtcatctttctttccacgtgtcaaacaatgatgtccacattaccgaggaaagtttctgggctaacattttcctcctaagtcaactttacacttgtgtggagttgacttgattacatgaaccaagcttgtttctctcaaaactaccagataggcatgaatttcgacaatcttagacaattatttctgttcttcaagtatccccaatatcattaggactttgaattcccttattcttgtttagggaatttttaaaaattagttagcaaagagaaagaggaaaaatctatcatttttttcacttatctttttatctttttctttaaaaagttaaaattgtcttgtatttcttgtggtatttggattaattggatttgaatcctaatcctattatataataaaattcaaaaattagaggaaaaaagaaaaagataaaatatctttgatcttttgcttatcatttatcttcttctattgaatctctaacgttttaatagaatcttagtagccttaggaatggatgttaccatttaaattcaaaaattatatacctaattctttaggagttttgaatttgatgctcaaggagaagagaaaaggtacacttttatctttttcttatcatttaccttttccttttaaggctttgactttaaaagactctcaattgctctaggattaggaaattgacctcatctataaataagatagctttcaatcaaatttctcacactttccattcaagctctccacacccaagccattataaaagccttggaatttcatctttatcaagtcttcaagttctcttcatccctcaaggtagaaaaagtatatattgttttttaattagtgccatttgttttgaaaacttttcttcttctcctcatttgttgatcttgcttcaaggatactaaaactacaaaaaaaaccttcaattctttttaataaggcctcaaaaattccaaaacactatccttgtggattaaaatatttctcctttgaacttgcttgaattttccttttcaaaattcaataagacttttcttgagttgtaagaaacttgaaattttggagttatcatgcctaggatgaagaaaagtagaagatttcttgatgaacatgatccccatgtggctcagttcattagagctaagtgaactttgcccaagtctaagaacttacacaaggtgcatcgtgggaaggtaatggcaaccgaactcctttaagctgccattaaaagtgatgactcgagagattgagatttcaaactaaaaccccttgtgtttagcattcttactgaacaccaagcataattaatctgggatgattattgtcttcctaaaactgtcgtttgcaagccacaatctggttgtcccaatggttcccagaatacttgctatagtgcttggtcaaggtttcatatgaatgcaggtgcttacttacctttgcaccattggttcatctctattgtggacttctttagagcccgtcccaaccaaataaatctaaatgactatagaatctttgccaccttcttcatcttttaccacctgagaaattggccgatctcaactgctcatgaaataaactttctttgtgacatgaagagaagtccaactaaaaaagaagaaggcttctatcacttttttcatataagcccacatataaaaaatattaccaaaagtaacagcagcctttaccttcaggaataattttataccccagtcctaccatctagacacataactttccaaaaggctggccctttcaaaagacctgctcctctaattaacatgaagaggagagcagatgccatgctgattgagattgacgcatgcgagagagatgggagaactttgctcaactctaaaaaatctctgcaaggttgcactgatcatgtcttgccagtgagtttatgttgatactctcttttctgatgattcttggacaatgccactgtaacaagatgaagatgattctaaagtccaactttcatcttgtctaagacagtgtttgtaatgaccacttaactttaatatgagaattagcaaataattaggatttagcttcataagtagacttttaaatattatttttatgattttggagatatatttgaattctaggtgtgctaattatattatatgtgaaatttcatgattttcatattttatgtccggtaacggtggaacgcgacgtttgaccgataaagtcgctttttcttatggtttgtaatttaagaaatagcagggcaatttagataggcattgagaatgtcgagaatatttgtggttttagatttgaccaaaatgcccttaggcagcgaggtcacttcttggtgaagcaagggcaaaatagtcttttgccttatgttagttttgtcttttagtgaattaatggattaatactaagtttaataatttgatttatcgtgattaatattaagctaatattatatctatttttatttattcaaagttaggaaaaaaaattaagaaattcaagtctctctctcttggtcggtcactagggcaccaagaaatccagcaaaatccttccttgttgttgactaattcttgaagttttgagctgctgaagctcaagtaggttgttaggtaagaccgttctatctttttccttgagtttaaggtagaaaagatagattttgttgcatgatttttgaggttatggttttgtaggttcaattttattttgattatgatttcaaaggttattttgatgttatttaagctgatttaagactgatttgttgcttgttgttgtggatgaacaaagtttgaattaagttcattacatgtttctattgcttgaattagtttttttatggtctatctaggttctctagaaagtttggcacgagttggaactgaattgagttgtttttagtgttttggggggttcttgtactaaaccgatcgaccggttcagtttggtcctaaagaagcggtctactagttcctccccaggtagaccccatagaattgattttttcgttgggaaccggtttaccgattagggcagtttaagttaccctagatttttatgtttttgtaatatttaagatattgccatgttatccatcgataggggaacttttagttttgattttacgtccccgaaatatgacttagtgtatcactcatcagttttacaaatattgtgacttaggggcctataaatcgtcaagtagcagttccactcaggttgaccgacacccctgaatttagaatcgaggtaagattagtataannnnatgaatatgtgattacatgtttataaatgcatgtaagatacattgaaatagtggtattagtatacatagagttataatagataccaatgaatgtatgtttggcataagtaatgattgatgctatcacataagtacaactagaataccgagtataggctgatattatggtcaatagtactatcgtatgaacattctagactcagtatgcatgggacgcgagataaggttatgattggatgtatgggcacctaattgtaattcagtttatgtttatgctatacttatgcttttcttactaagtccgttaactcacagttactgttttcatgtgtaggtaagggcaaagctaagactgaacaacagtgagtacgagcagatgaagattatactgttggaatttatttt

SEQ ID NO: 117183 - DNA, 943 bp, Cannabis sativa
  modified_base (915)..(918): a, c, t, g, unknown or other
ttccaaaaatataacttaaatattgttaccgccaaaaattaaacttagatatttatttgcaactaagagttaaacttaagtatttatgttgcaaattactctttaactaaataaagagaatgaataataattgttaaaacatagaaccaaaatttatatttattctattatataaccgtgctaagtgcaactaaatttactagtcttagaataattgacaaaaacaaattagatagaagtaaacaaaataataaattttaaaattttgttttttttgtttttgaaaaaaaatatgtagtatattcctaaaagatgtttatgtagagctcctatgtctttggcatttaagagagacctaacatattaaaaatatagtcaaatttttgtactagtagtaagtggtgacatagacaattgatgctcgctgggcctagctagtacaatgttacacgaagctgtcgtatactcatcactaggatgtgtcattgtcattaatatatatctaggtaatgaatctatatatcttaaaaactccttttctctagtggtcatagaagaatatacatatgatctttttttttttttttgataagtagaatatacatatgatcgattcttagttttagagtgatgtaatcaatgacaaaagatagtaatttcaattagtttttaaaagtaatttataatttttacatactattggtttggaatcattattttttattttttattataattatttctaatcttcaccttcttaaattgccacatcatcaatttttttcaatattcatcaatggatgttatttattgagtgttatatatatatgagtgactattcaatggttacatttttattgtaactatatggttacaattttctataacctgtaatagcaggttactaataggaannnnttccttttttagatttaattaatta

SEQ ID NO: 117184 - DNA, 1230 bp, Cannabis sativa
aaaaaaatcacataccttgaacatgtctaactctgaagccatctttttgatcaaaatcttgggcactaagaaaaccccaagtcaaactcaagccaaaactattatcagccaaataaggactgtatgcaaaaggaatagctacggttttgatgggtttgcagaagcttgggatggctgccatggcagaaggctcaacagtataaacaaaatgatgtgagccactcaaacaggggacctctgccaaaacaggggagagtctgtccgtacagttgagataagtgtagttttttaaaagatagtaataatcgaatgtggttttggaaaggttaaggttgagaaagactctgtggacacagcttttggggtcaagaagatcgagtcttttggtgtcgtacgagattgatttcaccactaaatcaccataaccatgggattggaagttgattatggtggatttgtttctgcatacgacttcaaagagggtgtcgttttgttgggtttggccttctatgtggaaaggagattgaatttcaggaccccatttggaacaatacttcgaagggttgttgttgtgagcttctataaagattgtagtggaggataagaagaagaagaagaagaagaaggtgaaagaagtagccattttttaagaatgcccagaaaatattttcttggttggtatagactatagagtgtttgtatgtgtagttttttttatatgtaaagatttgaagaaagaaagggtagtttgtgactatatatatagcacacctataaagaccatcacgtaaagagagtgaaagtagaccctgcaagctaagaaacttcttcagtcttggtttatgtaatccgattctaaaaataatattagtaatagtaatagtattaaagtaatgagattctttaatctacttttccacgttttagagacaatgattacaattaagagtttaaatatgagtttttctatttcttttttttccacttgacatgagaagaaatggcttctttgaagacttgactagcaagagcaactagtgaatatgacaactcaattaaaatattattatcagtaacacatttgctaacattgttcaccaactagttttgttcgaaattgtatttttttttttctaaccaaactagttttttttaatacttattcgaagatgagtacaaatgatagaggaataatctcctattataaaagaaaaatgttaaaagatatca

SEQ ID NO: 117185 - DNA, 2920 bp, Cannabis sativa
agaatgaaggtggcagcagcgacgattgtcaattcacctcgccgccactccgcatgcatttgtagctgcaggcctgcagcatagaaatggagatatgtagggttgagcaatcccaaacgaggaaaaagcgaatgactttttagccattttgggaaagtacaaactttaatgtttttttttcgataagacaaatttttttattttatgaagtgtttgacagtagactaattgaccacaataaaaaagtagttaagtaaagattcttgtttttaacagtgggcacgtggattttaggtgttcggatccatgatcgaataatttttcgtcaatgacagctcgtgcccggaagtaggttcactatcatgagggaagggtaagacaacgtgttcctaaaagatttgtctggtttcactttttattcttgcacacaaataagaaatatttgattgccagatcttgacagattatcgcatcaagctaaaagagaaaatttcctaaaacagatattaaggaattaatttacaattaattgtccacaattgtaggacacggttttgactaaatccaactgtatccaatctgcttagttagcatatcttttctttcattgattggacttcacgaagcagcccaagtgtgtaattcattgtaaactccccaacagaagaaaagggaaactaagtataattctaaaaatgatataaatacccaatgaatcctatggaaagggttgaactctcttacaatacatattgaggcattcttgaaaacttacattcattgtattcccaaaggcttttctagctaaagagttacataataacactgagtaatggactaaggctagttcgcctcaaccacgtaaaaactttttgtgtctttcttactttttctctataatttgtttctttcctgagttctgattatttataattagttttccaaaaatttcattaaactttttggtgctttcattgagagctaaaggaagcagtgataccatctaaagataggggtggcaattcgtgttcgcgggtcgtgttcgtgtcgtgtcgagacccataggtacacattcgacccgaacacgacccgtttaataatcgtgtcagaaaaatgaacccgaacacgacccgtttatagacgggttgacaaaacacaacccgtgtaacccgtttataagtatattttgttcaaacatgtcaatcaataacaagtttatgaagtattcaacacgtttgtaacccatttatgacacgttaaagtactaaaataactttaaataggtcattaacgggtcaattttgtgttagccgtgtcaacccgaacacgacccgtttattaaacgggttagacgagtcaacccgaacacgacccaaacctatttaaggaaaacccaaacccgctaagtctcgtgcgggtttcgagtcgtgtcatcgtgtctgacccgttttgccagccctatttagagaatgcattcaagtaatcatggtactcacccgaataaagtatggtcttcattttactagtcctaacaccaaagcagggaacactaatgacccacatgaggcaaccagtcgccagtaagatcacaatgatgaagatcataatcaagacgatcgaataatcgaagatgcaaaatctagagagaatagttctggcaacactgaagacaattctaaggatacaccctaggatatacctgaagacgatcctgagaacaaaactactaatgatgatgttagagagaagaatcaacttaatgagtcagacctcgtggtcattatggctaaacaacttcagttagaagaaagtagattgactcatcaagatcaatccaacgagatacttctaagaaaggtgacaagaatggagggcgtgatgactgccctacccaaagggactcctgatgtacaagctcctccaacaactgatgcatctgaaagagcatatccaaaagatcctggaacctcaagtcttcgcaaagacaaaaggaaagggatagtcgttgaaatcccaaagaagattacttccaccaagcagcataaaaagtctaaaacagtcaaccaacctaaatagaagaagaaaggaaaccatgtttcagggcatggtgaccagactaattctagaggtagagtagaacaagaaaataagactaatgtcgaaacccaaaagccaaagtcctggaaggacaaaaatcaccccagtgattccagcaatcaagataatgatgtcgatgaggtttatccaatatcatatggcaacagtggaagtctctccacgactgatcttcgaagaagattgaacgagaaaaaaaaagtgccaaagtagaaaaagccagagctcatgggaacgatatgagaaatcatatcaacaatcgtgttcatggaagagaatcctcaagtgacaagactcaatgcctggaatgtaaagttaaggagttaataaaaatcacggaaaagatctctatgaagtaaaatagcactgtgtcaaaatctgaagaagaagatatggagccatcgtaaaaagaagcatagaactgccatggtcgaagcgcttcaaaatgacatacatgcaattataccaggaaggacggacccccgagaccacctgtccaagtacaactacattatgcaagttgccaaggccaatgtcgatgcaaaatgtttatgcttttcactaatactaagcaaattcgcagaggactggtggaagagattgtctaaggaatcaatccacaattggagagatctgtaagcaatgtttaaaaagtagtttgtagcagcaaaggcctttgacctggtagtcggttccctgaccagtgtcaagcaaccattaggagaaagcctaaagaaatacatccaacgcatgatggatgtgttggaaattattttaccatgatcttagatctactaacaagtat

SEQ ID NO: 117186 - DNA, 1372 bp, Cannabis sativa
gtcactctgctcacccatacatttcaaaagtattgaactcttgtttcataaaactaataataatattacttcacacttacacgtgacaagttttttttttttaatatatttctcatcatgaggaggccttaatataatctgtaattctttctgttatagtgtgttatggcccataatgaacccatggttatattatagagaaacgttaaatgaattaattagaaaccataagcactaagaaaacaattttgccaaattttattatctaccattcttaatgttaatttatttagcataaaacgatcagcaaattgagtagcacattattgttaaatattttttatatcaatctagttgtagtatttatgatttctctactgctgaactccaacatcttttgtattcaaggtgttcatttatttgaatgaaattactattttatttaaaataaaaaaaaataaaaaaacaatcttattttatttattattttattttatgtatatattgtatttaaaatgtctgaaacataagcgagtcaattattagacaatactctctattctctccataaatcgtactcttttggtttgtttttaatttttgtagtaaatgtgggtagaagcccaatatacttggcataatgctaagaagcactaacacaaaccccaatactaatttaaattgggaaatttttattaaataagcttaaaactttacttcatatttaaaaatgtttcctaatttaaataatttcataccaatttatctttaatttattataacatactcattctacccattttaattaaaaaaaaaaaaaaacatatctctatctctcattctctctctaaagatctaaagataaacccccactaagccttaagttctctaggcgctaaggttgacttctagaaaatcgtttcgacccttttttaatttttaggtttcagatttgaatttttcttaacttttttattcaaaatactgaaggatgataacttagaaaccacttggcggaatccaaatactcattttggagtcccgaagtcaaactgggcgcaagactagagaccctgcccagacttgactgttatgactcgggccgcgtacttaacttcatgaatgttttctttcttacgacgtgtcaaatatttatgtctacatcatgaggattactttttgtttaaatatttgcccccaaatcaataataatatataaagttttaaacaaattaagttagatcaaagatgttagcaagatgtatgagaacaataatgttaaatttttataaattatagaaaaccacttaaaaaaaatattttatatttaaaaaaataatatttaaagtttaaaaattttagaaaaataaat

SEQ ID NO: 117187 - DNA, 1102 bp, Cannabis sativa
attttatgatttaaattagttggtaaagtttttattaaattatattttgtttgaattgctagtttaaaattataaaatagtttataaacgcacacacgtagcatccctaaggattagggcgttacacctctcatctcagatctatgaataatttttgaaagaacctcctggcacaaaacataatataaatggggaaagagggtccccttgatgaatccctctttgaggaataaatttcttaagaggactcccattaagtaacacagaatatgaaacacttataatacattccatgataagcttgcaacttctctcatcaaaaccattcgcttgaagtacccggtgaatacagaaccactctctcatgtgataagctttaaacatatctaattttatcgccataagaccaccttttccttattttttttccttatcttatgcataatttcttgattaaaatagaagactcagcaatccatctacctggtatgaaagtcgcctgcataggcaacaccagcccatccataaacgatctcaacctatttaaaataatctttgctaccaccttatataggaaattgcaaaggttgataggtctaaactgatcaattttttcaagatttaacagctttcgaataaggcatatgaaagtataattcagtcttcagttgatctgacccttttggaacacctcctgaacagttgaacagaaataacttcccactataacctaatctttatggaagaaggacctgacagaccatttgccccaggtgctttgagagggtggaaaccgaagatagtgtctttaatttaattcacaggaggttgacacacaagacaatcatttccctctgaatccagcttttttgaaaataaatcatcagtgtccagagggataactggttgatcagaggaaaataaatcataaaaataattattagttatacccaaaatatgttctctgtcatcccaagttctcacatttttatctttatgtatgttgggaaagatttaaagatttattgctaaaatgtccacaccatggttttgagaaatggagattggtaaaatacttttatgatggattatctccttcaaa

SEQ ID NO: 117188 - DNA, 2267 bp, Cannabis sativa
tacatgtcaaagttcagaggacaaaaatcctaattagccttaaataaaatattattgttcatcagagctagcttcacatgttaagtaagtaaatttatacaactggacaatgggaaggaatggtcttactatttgatatttgaaaggtgataattcctacaagctacaaggtatatattactactgaacttttaaaagacttgaagaaccgagttatgactgagaaatcctcagtatcttagctgattgctaattgttttctcttccgtttgtttgctggatgaggatctgctatttcttatttatttttttttatatatatattatattattcttcagtggcctttgtgtagtggcatagaaaatgttatatgaattctgtaatatctaataagagtattgtatttgatattttagcgatacactttacaggttggtacttgctaacaatagacctatgaaaaagaagtttgcttcctacatattctcaaatttgatttaaccttcttgtctttttatcactgcttacaacttctaaaagatacacaaggaatttagtattaatttttggttccacagatgatcttcccttggatgttcgatgaatttcatgccttaaagaaactaaaagacgctgcttatatcctagctgagaaggatgattggcctcctctatacagcatcaatgccttaaataacaacaaggtatagatatgttgctttgaatatgaagttaatgctcttaaacactatttaaataatttttttggtattaaagtagttattcattattgaacaggttccagttgcagctgctgtttactacgatgatatgtatgttaacttcaaggtggccatgcaaacagcttctcagatagctgggattcgattgtggataaataatgagttcatgcattctggtctgcgagactcaggaagccgggttttttcttatttgatgggattgcttaatggaaagaaacctttgttctgatttagttaaaatctcatagctctcacttattttaattgttctcctttttcacttatgttttttttttctttcaataatgtttatatatgtataatcatggttcatattgttgatgtgttttacctttccaaatcacatatggcattcttttttttttattattttttttattttttattactattatttaaaaaaaataataaaaaaattggtgaggcatgaaatgagacatgaagagccttcaatatgaatattgttcaaacacttttgcaagcaactagcacttgatcacacttttatttttcagccaaaattgggtaatgacgtagttgacaaagtgacagcttttattgtttgaaagggcagttataaatttttcatcacctcattttatcgagtctcctagaaacccagtgaccaacccattcaatattgaatctcgtttattaaaactaaaaaaaatagtatacaagacaacacgacaaaaagtacacacaaacacaaatataagcaggtcaacttgtcactctcacaacactcaatatagtccagtcttcagtacttcaatctactacttccatggcgggaatatttgatgccctcgctgccgattacaattccgatcacgtcgtcggaaaatggtactccattcccgacctctgccttcgtgaccaccgattcgttgttcctctgttctactccgccgattctgctactgctgctgctgcttcttctcctaagatctctatctttgctcgcgaagtggtttcaggtttgacgactttgaactgagtttccatatattcatgaacgattttgaaagatgtattattgtcctacactatacactcctactcttgtagttggaaacgaagagaagccattgccgtacctattatacctacaaggtggacctggatttgagtgtccgcgcccaaccgaagctggtggatggttaaaggaagcgtgtgaagcatttcgtgttatattgatggatcaagttagtactatggttttctagaatcattcattatcatttcttatttgatcaattgtactggtagttgcttattcttttctttttcttggactattagcgtggtacaggtttgtcaactccattgacatactcatctctgctccaatttaagtctgcagaggatttggctgaatacgcaaaacattttcgagcggacaatatagtaaatgatgcggaatttattcgtatttgccttgatgctggaccttggacagttttgggtcaggtatgaat

SEQ ID NO: 117189 - DNA, 3264 bp, Cannabis sativa
  modified_base (26)..(27): a, c, t, g, unknown or other
tacccggtgtttccccttacggatcnngggactactgactgtcacaaatccgcatcagaataggcagtaatgtccaatctgtgagctagtttgaagactaaacctgaatcaattgagccagccaagtacctgagaactcttttgcaggctccccaatgttcagatgtgggagcttgcatatattggctgagtttgttgacacaaaaagagatgtcaggtcttgacattataagatattggagagcacctatgatgcttcgatagtgagtgggattgtccaataaagttcctgtttttgcagataacttggtagtggaacacattggtgtggattgtggtttggagtcaagtagttgagttctagccaataaatctctggtgtacttctgttgtgtcaaataaattgctaaagtggtgtgatgaacttcaaatcctaagaagtaagtgactgagccaagagctttgacagagaaactgtaatgtaattgagaaataagattgtgaacaacattgttatcagcaccagtaatgagaatatcatcaagatatattaaaataagaagcacgttgccattgtgattggaaaagaagagactgttatccaatttgctgctcttgtattcccactgaaccaatgtgtttttcagagagtcaaaccaggctcttggagcctgtttgagaccatagatggctttgtgaagcttgcacacatgatcgggaaaatctttgtccacaaatccttgtggttgagccatgtaaacatttcttgaagttgaccattgaggaatgcattattaatgtcaacttgttgaatgtcccaaccattagagatagttaaagtgaacataattcggattgtgcaaggtttgatgacagggctatatgtctcaaagaagtcaataccaactgtttgttggaagcctttggcaacaagccttgctttgagtctctcaacactaccatttgcattgaacttaattttgtatacccatttgttatgaattacaatcatgtcagctgttcttggaacaagagtccaagttttctttttctttagagcagtcatttcagatcccattgcgacattccacttgggattggcaagagcttccttgaaggaagttggttcatgttcagtgtgtgtatttgcaagaaagcttctagtttgtgaatgcctagtttagatctagttaccataggatgttggtttgtggtgtgagttgggacatggacagtaggtatattctgaggtacagatggaggagtactggtagcagtagggtactggtttggtgattgttgagttgtgattggttgttgttggttgctagtagatggaacagtagctataggtgagatggttgttatgtcaggttgtggtgttggagcaggtataggacttggaattgggaaagagtgttggttactggtttgggcagaggcatctctagtgggaagagttgtaggaaatagctcattgtagggaaattcttgttcattaaaggtcacactcctagccacatatattctacctgaagggtgtagacacctatatcctctaaaattggggttgtatcctatgaagatacatttagaggatcgaaaggcaactttatgagaggcatagggggtaagaagggggaaacatgaacaaccaaataccttaagtaaattgtaatcaggtgagtgatgaaataatttttcataaggtgtttgatagttcaagattggtgttgggagcctatttattagataagctgcagaagcaaatgcttcccaccaaaaagataaaggcattgtggcttcggacagcaatgttaagccaatatcaacaacatgtctatgctttctctcaactcgaccttgttgttgatgagtgtgaggacaagaattcctttgaacaatgccaagatttttaacaagtttgtacaaaaggtcaaactctttcccaagatcacattggacagcttgtattttagtttgaaattgcctttcaacaaaagaattaaattgatagaataaggtattagcttgtgattttgatttcattggaaaaagccaagtgaatttagtaaatcatcaaggaaacttatgtaatatttgaaaccatcagcagaagtatagaaagagggaccccaaacatcagtaagaattaaatcaaaaggctggacagttttattagaagtgcttttaaagctgaattggtgcaatttaccagtttgacatgcattacagaaatcaagtgtcttgtactttacataaggaacaattttgtgtaaaactttattgagtataggatgagatggatgtccaagtcttgagtgccaaatattggcaacttgagacttgtcaaaaatcgagttggaagtagtggtgtgattgagagcttatggttgtggaggatctaaggcttgaacttcaagcttgtacaatccgtcactgagatggccctgcagaagaattttcttggttgtcttgtcctttatgagactagaaaattcatcaaattcaagaatgacatgattatgttttgtgaattgggaaatgttaagtaggtttttggttacactaggtacatgaagaatatcttgtgatacaagagggtgattaggaaactttgtacacactgaactagaaccaattcgatggatagggatagaagtgccattacctacaaccactttaccctttcctttgtaatttgtagcagtagtaaggtggtcagcatcatttgtcatgtggtgtgttgcacctgaatccagataccatgctgttgagttgtcaatgttgttgttcaattcagagataagagcctgggggttatcagtgttgaaggggtttgaggaggaactattggtgttggcacctgtgtaggtaatgtcaaaataatggtaacacttgacagcaatgcgtccagcacgtccacagagttgacaaacaggtttggtgccacggccacctctgttgctggtgttggatcggcctcctcgattggcacctctgaatccacgagtgggatagtaacctctggtgctggccacatgtgcttgaacattatgcaaagagacagaggaacctcagttgtatgttgctggatttgcatttcttgactttgaagcatgaattgcacttcttgaagagacagaagttcgattcttgaagataaattgacaactacagcttcgtactctgatgctaatccaccaagattgtatagcaccagatcatcatcaaaaatcggttgtcctgctgctgcaagctgat

SEQ ID NO: 117190 - DNA, 1721 bp, Cannabis sativa
  modified_base (1650)..(1663): a, c, t, g, unknown or other
agggcataaaacccaacaatagattcatcaggtggctaatgtagataatgatttgtattgggtttaattttttgcactgaaaatttaaacaaatcttgtttgctgtgtaaaccgagttattatatatagaaattaatactgcaaatggacattcaccatttgttatcaccgaagctttggaggggattgaattgctcggacgacttgaagactatggcaggtttgttttacttaatttattttctttttaattttctatcagtccctattcttggcattcagtttagaaatcatttttctaatttcaagcttgagttcctgttgaagcttgattacaatgataatatagcttaatattctatcaaagtccacgttctttgcatttggactattttaattgtttcttgcaaaatattacacaaaaataagctattcattcttgaaaagttttacagactaaattaatcatcaccattttaattgattatgtctagtcttaaatatattatcaaaatatgttgcaaaagtgtgacaatataaatttgtattaagtatatatgtgaatggttgcatctcaactatgaataattgtctttttgtaagatgacgtttttatgtgaatagatgcatctctattgtgattgattatttattttgtggactgttaaagttaacactttgttttggaaaaatacaaaagttttgttaaaacacaacaaaaaactgttaaatagacatttatataatagataagatataaatattcagtgctaaggaaatgctgaattttttttttatagctattagattttgaataacagattaattttggttaaaaaaatattttttagtaatgaatcaactagtgtttttattactctaaaatctaaattacaaaatgatagtatatgctcgactaaaagatctcaaatgtactctatacaatatttacaaatttacaaacatagttcatggtctttttgttacattttttgaataaacaaattactctttccacatcttcaaattttgaattcgaaagcttttcatttttagtctttcaaacatgatagactaaaccaaccaaagcagcatatgaaacttgcattaaattactgcttttagttctttcaatccatcttataattctggtaatagatgaagtacaagacttgtaatgcaaccaatcttttactttctataagcactaataagaaaaatatgttgaaaagaacaaatgctcacatgtttcaggctgttctttacacaacaaacatccatgatcatcaatgatctttgaaaaatctatgtttggttctcaacctgcttttaactattagctacataataaagttgtttttgggtatgttaaatcgctcccaaacttcttggctctagtgtactcctgcttaaaaaaattattgttatgttcatgatttattcaagaattcattttctcagctagctctttatatttcctactagaaatcattttcccacatatgggaaccccctagtatgtgtattggccattacatcatatattgtaatcctattacattatataactaatgtaatggtgattactattggatgttattttttaccagaatctatattttactaacatgtatgttgattataattctnnnnnnnnnnnnnntaaatataaatttcctaaaataatgaaataaaatcataaaagattaagaaattcttac

SEQ ID NO: 117191 - DNA, 1154 bp, Cannabis sativa
atgcctaatcttagggtactcatctcagaacaaagggtatctgtttgagcatccagatggtcgactcataatctcaaggcatgttacattcaatgaaacacattttttagcatctactttcactgcagaatcatctcaggtacatgtatctcatcgtttcccttcttctacttttcacatttctaattgtggaacaaatactaatactgctactctacttgtgtctactccacacaatgctatggctactgagaattccctaccacatcatatacaactaatagcaccaactgttaccactcaaaccaggaaccctccaccaaacatagtagccatattacccacaaatgaccaacatgttatcactctacaaattaacatccattcaccatctctatctaaaattcacacaaatgatcaaccctcttcctctaaacagatgaggaacatacttacatgcacatagctcacctacatttcccacaaatgaccattcttcacctgatacagtagttcaatcttccttattactatcacttggtcagcatccaacacccactgaacctggacgagatatagttaccacagttcctaatagaactcatggaatgggacaagaagttaaaatggtattgtcaaaccaaaagcttatcttgctacaaaattttctcttcctgaagctcttacaccatttgaatcaaggtccacttcagcagtcattcaaaatcctaaatggttcaagtttatgcaacatgagtttgtggccttgaagaaagcagtcacatggacacttgtgccttacatccctagaatagcagtaattggcaacaaatgggtacataaggtgaaactcaatgctaatggaaatttggatagactcaaatatcgtcttgttgcaaaaggttacttgcaaacgaatagacataaattttgatgtgaaatgagaatattcacatagattatatgacttttagattattgcttaatgcgaatcatatgttgttctatctcagagatgcagtagttgacatgcaatttaggactttatgatctgaaaagaatttaggttaattcataatctgtcatcacataggaggaacaaaaatggttaattagtattaacaattggataatcaaagcaattgaaatcatat

SEQ ID NO: 117192 - DNA, 1233 bp, Cannabis sativa
tgctattttgatccccttcctttagccaaagttgtttagctcgttgcttccaaaaggtttcacgttggtcaaggatccgaaacaattcctccttagcttctttatgtctttgcatggatgccgagtctcttttgttggccaattactttaactcctttttacatcggttgatacgacctttaaaattaccagtcacctctcttccccacacactcagcttctcagcacaaagagataacttccttgaaaattcagcgtcaccaacactgttccagcaatcccgaactatctccaagcataacggttctttaagccaagcgttctcaaatttaaacttacgatgtgaagggaagacattacatggctccggttctagaaaaattggacaatgatcggaagaagaaatttccaagttagaaagagaagcaccttgaaaaagactactccatgaaggattaaccaaagcccgatccaatctcacttcaacccagttgtttgaccctctccctttctcccaagtgaatggatgaccccaaagttccaaatccacaagattgcaatcgttaagagcctgctgaaaaccgttaatgagactttgcggatacaaccttccacctctcttgtcttcttgcctaacaatgatccccaatgacacaccatggctgagtacgatcatttgctaaggtccgaagcaattgccaagtttgatggcgaagaccccgaactggttccccataaaaaccagtcaatttccaagctcctttttccgaagactccacaaggaaatcgatatgattattagagtaaccaagaattcttccatcatcctgttgcttccacaataaggccaaaccacctgaactaccttgggcctccacacaaaacaccccttcaaattttagcattcggcccacaccttctattttcactttgttacatttagtctcacacaagaaaataacattgggattcttttgagaaacaatctcttttaggaattgaatagcccgttggttcccaagcccacggcaattctaacttaacacattcataattcctggcgggcctgtgcgccagaacctgccccaaacaagttttttgtgttatttttcattacaacagtgtccataataggggtgtacatcaaaccgctcaaaccgctcaaaccgcccgcaccgcaccacaccgcaaaaaaaatgcggtttgaaattcttcgcggtgcggttgcggttt

SEQ ID NO: 117193 - DNA, 576 bp, Cannabis sativa
catctacaacaatggttgcaacccaactcgaaaggtagtgattaaggcgcctgctcaagatggcagggatgaagccgccaacaatagtgagaaccagctcccccaacaaatgctcaagtgggcgtcgtaggtgatggggaagcgtcagaggtgggtgactatcaacacctagaagaccaagaccacgacaagtaaattactgatgatcccatcgacaaagatgagtggattatcatgaagatgaccctgaggatgaccacaacaaaaactacaaccaagagtatgaagaggagtactgtgagaaggatccttaagttatacgactctagtaagagcttgcaaacaaccaaaggaggtgagcagagcaagaagaagtatcatgtaatgaccgcatatatagaattagtagacaattagtagtgatttaattatcttatttgatttattagaaaattaagacctatttctaggaataggctttagatttttattcctcaattctgaagattttattaaattctcagagatgatctaaatagaaggagagggttagacgaacaatatgttcaaccagcc

SEQ ID NO: 117194 - DNA, 621 bp, Cannabis sativa
tttttttttttttttgcaaaataccgtatggggttagttgggtaggtttcggagtttttagcctttggtttgggaagagagataagaaacgagtgtacggacgagagaagataccaattcatattctctcatttatgatccttcctcaacttggatatattatatttggacatcttttgattaaattattaagaaaaaatataagaatagttttctttcctttcttttttggttggagtatattccaccaccaaaccaatgattccatgtaataatgtattgaaaatatatttttctatataacctaggagaaatagattaaagaactagacaagttgttatttttttacacatgtttatcaaaggtggctgctttttcattagtgcctatttgtttttggttaatattatagtaggaatggcaatttgggtggggcgactttggccggaatgattcaggtttttatcgggctccaagcctagtccggtacatattatttcaggttgggcctaactcgaccaggtttcagatatgtaaaaaaaaaaaaaaaaaaaaaacctaaattcctaaaaaaaaaaaaaaaaaaaaaacctttctcaatttctttagttcgaaacttc

SEQ ID NO: 117195 - DNA, 1568 bp, Cannabis sativa
tatgtttaattatctttatcgacaatggttaaaaatatatgcttcccgcataataaaacgattcccttagaaagtagattgaggtgatataatttttgagcttatataataactttatgttttagatagctaaatctatcccaaatgaaagcataccacactttctataaatgagatgttttaagatttttacagagattagtaatattaaaattcatacctttaaattcctccaagtccatttttttccattgattgcctccttaatctcaatatttttttaccaataccaaatagagctttgtggagaactataactccaacaatcttagcctttaagatataccgagtggttccacttacacaaaggctaactttatccagagaaatatctcaaacatatcttcctggagccctaaagttctattcttcagtattttgaaatgctaaaccaccaacaactttaggattataaatctgttgccaagcaaccaaacccgacccttgagcatcataggaactttttcacgaaaaggctctacaaattttatttatttgctctaaaatatactttggcaacaccattaattgtgtctaaaaagaatggacaataataaaaactaaattaattatcacacacctcccaacataagatatatttctagaattccaaagtcaaattctagaacccatattttcaaaatattatcacacacaatttttgaattttttttttagagaaaataaggatacacaaatacctgaaaggcagtgagctcttagtataccacgaacaatccaaaatgtgttgctcatcctctttttaaatacctgaacaaaagatagaagtcttgcttatgttagcatgaaaacctgatgtttcagataattttttgaaggttctcaagagaagcatcactgactgcaaatccccacttgagaagagtaaaagatcatcaatgaaacacaggtggttcaactttaaagttttacatcttggatgatgtttacaacattcatctgagacaccttagcaagcaatcttgaggtatactccatcaccaacataaacaaaatgagggacatcagatccccatgttgaagcccactcttagaagaaaaatatccatacaaatttccattaattaatcattaagaaaatttttggagttgtgacacactccataactaagttgacaaatttcatagaaaaactaagagcaattgacatttcttttataaaccctcccattccaccatatcatatgctttcttcaagtctatattgatcatataagaagaactattatgttgcctcccatactgtttaaccaagtcttgacagattaaattattatggccaatgtatctcccatgcacaaaaccactctgattagcaacaatcaaacttggtagcacttgtcttagtatattacataatacattagtgataattttatagatcacattgcagcaaacaatgagtctaatatcactcacactagatggacatttcatctttagaatcagagttaaactagtaaagtttcactactacaaaatgcact

SEQ ID NO: 117196 - DNA, 1811 bp, Cannabis sativa
aaattttacttaaataaaagcctattaattttttttattttttttttattttgggccccggaaagtgtgggccctaggcacgggcctagcccgcctatgactagggccggccctgattttaccccattgggcctagttaacacatttcaaccttaacgggttcgggtttacccataaacaacactcaagcctataaatagaacattaccccttcatggaaagggtttgaaaattatttcacaactcaagggctaaagattaaagttcttgaactttggcaaaaacattcttttgtaagaatactctctagcttttcaagcttaataaaattgacttgtggagtaagactcattaacaccctaaccacgtaaaaattcgtgttgcattatctttaatttattcttcttgaagcttaatttatttttttattgatttttaaaatctcggtaaacatacataattaatgtttcttattgaataaaaaataaaaatcaaatataaaattgtattaaaatgaaactgattttttttatctgaacattgtaatggttgatttgagttattaataaatttgacatatttccattaaaaaaaatatttttcttttaaacagtaaataaggtaaattttaaattatactttgagtacaactcgtaatttctgtattcatattgtgtttcgcgtcaacataattttgacacgatacgattaaataacatatcataaaatgtaaatacaagtacgaaatatttataaacaggtaaacggtgaacttgtgataatatgaaggtgtcatataatattatatatatatatagaataaataggattttaatttctctgaactatgatatttgtaggatttttccttttaaattatatatttttttaaaaaaatcctctctactataaaaataattgtaaatttatacatttggttgcattgcttttatttttcttgagataatttattaatgtgttgacaaattagttacgcatataattatagtaatatattatatattcaaagcaatgagtaaagattattcaaaaaaaaaaaaaaaaaagcaatgagtaaagatattagtaaaaatcgccacatatgtgaagtatagaatttatttatgattcaagtttggatgaactgaaatttgtacataatttcttttaacattttggaaaatgtttagaaaatgtcttcataataatatcactgcactatgtaagattttaaaaaaataatttattattactttttcttacaatatttgaatttctaagtttatatatttttcaattacgatagaattattttttttttttaaaaaaaaagacacatatttttaaaattcagagcaaaaggaaactcaaaataatagtaaagagtttcgaatcttaagcaatgataataggtgtagagtgtgaccttccaattaagcaatgcttagttttttgttgtaaggttagtatggttaattatctttttgtacgaccaatacgactagttttactttagtaagatcagcctagccagttttattttagtaggactagtatggttagccttattttggtaggactagtatcagtttgcagcaaacaagtccaataaagatttcataagtaagttctaacttttccatcataaaattatgttagaatatatatttttctgatatgaaaattatcatatatttatttaatatatgatatcaacttcattgaattaatagcattctgaatacaaaagagcctgtaaatcagcccaaacagtttgttcgaaaatactacaaccagaggagaatcgagaa

SEQ ID NO: 117197 - DNA, 1829 bp, Cannabis sativa
ttttttttttgttattttaaaaaattgtctttcttagctatggaaaaattaaatctaaacattattagaaagaaacttttgggcccagaatgtcaaaactcgtgagaatggaacaaaagaacaagaataaaatgaaaagagggaatgaccaagttggcaataaattgttcttgtactgataaacattaactctgattcttttaaagctatttccatttgaaattataacaaaacaaaaccaataaagctatgtatgtcaattatgctaaaaagactatagctgaacaagtctataagctaaataaaaagccaagatggccatgaaaaaatattgaacaaagaatctaatgacattaattatttataaaagcgtaaaagtaagaacagtacctccttaaatcttataatattaggatgcttcaaagacctgtgattcattatctccctctgtacatgctcatcaatcttcaaaccaataatataaagataaaaatttaattccagcccatcaaaaataaattgaagacagaaactcagatgagaaaatgaacaaccaaaccaaaccaatataagaatacttaaaaagtaaaattagaactatatattagtaatgaagctggttgtgaaatttcttgactcgaaaggaaatgatacgaacaaataaatttcttaactagctaacaagtatatataccttttggcctctctcaataaatttgacagcatagagctcaccactccatttatctctaatcagtttggccacaccaaagttaccagacccaatatctttcagtacctcatatcgctccattgtcaccaaaaaatactgagattctgccttaacaagattgaatccaactagtatttgtatatattctatacaacaacagtatgtttatatatgtataaatataatctctcttttgtgtctacttgcttgcgtgaggcatctctatggatttttgaaagtctctgaatctgcaatgcaaaaagctgtaaagcttattgggctaagagtattattagtaggagaatgagaagtaagcacaaactctctctctagccacagtggactgtccaaaaaagaaaaaagaaaagaaagtctttccttctgagaacagagaaggacaacaagaagagaacagccacgtggcggtttcttaatggctaaaatttgaagcagtggactgagacaacgttgtggggctatggtggcgcattacactatgaatatgtaccccacgttgcacagaagagagaagactcgtcgagccaacttgtgtattattacgacgtcgttttgagattgatgtaatgacacgtggctaattattattagacggtagagttacctttgctgtgggattatgtatgggtagtacagaggttgggggattttgagaaagttagataaattcttgcggtttacgaggaaagaaggatagggtgacagaggatagaacgggaaagatgacgtggacggtcgggagaggtggacagtgagatatggtgagcaatttgagagtagacccactttttcattgggaacgaaactgccttattttttttttctctcatgaatatttggaacaagtaatcaaaaaaaataaaataaaaaacttatccctcttatacaaattattgatcaattaatttgaatatctaatgaatcacacatttaagtttcgtttggtacgtcatattataccactgtattgtattatttaatattatattaaattgtattttatgccatatttttatataaaactatatgtaatattaatttttatagacagctaaaatttataatattttaatataaa

SEQ ID NO: 117198 - DNA, 3625 bp, Cannabis sativa
  modified_base (3595)..(3598): a, c, t, g, unknown or other
gtaaaataatttccaacaggtacctgtcgaacaccttgcagaacctagcatcaagagcaaagaaatagtggtgaccaatgaacaaagcacggattaaatggaccccatcattaagtacataacaacaggagaactacctcaagaaaggaccatgtccaaaaggttacagtaccaagcgcatcggtatttaatgatcggcgatgttctttattgaagggggcagaacatgccatacttaaggtgtgtgtcggatcctgaagcaagacggattatgcaagaggtccatgagggattctgtggagaccacaccggaggccaaagcctctcaaagatgatattaagcaagagtatttttggcccacaacaaagaaagattgtatagactacgtccttaagtgtgattcatgccagtggtttgcaaatatcccaagggtcccctccaatggaattactatgatgactagcccctagccctttgaagtatagggaatagatctcattggctccctgcctatggtgaagggtggggtaaaatatgccatagtggtggtggattattacacaaagcggatggaggccgaacccatgaagatcataactgccaagaaagcttttgactttgtcataaaaaacattttatgctgatacgggctgcctcacaaaatagtctcaaacaatggaaaatcattcgactgtgataaagtcacaaatttctgtgaccaacactgagtcatcaaaagtttctctacaatcgcaaggccacaaataaatggacaaacaaaagctatcaataaaatatcaaaggtcaccctaaagaaaaagctattggcctgcaaaataattggcctgaggaactgccatgcgtgttatggggctaccagaccactacaagaacagcaacaaagacactctcgattctcaatggtgtacggatgtgaagcaatggtctcggttgtaactataatttcatcccacagaagagccacctatgatccggcaacaaatcaagtcctgctataggaagtgctagatatagtagatgagctctgggaagattctcaaatacgcatggcaccatactaaaagaaagaggcaaaatactttatttctaaggtcaaaaacaagaaatttttaattggtgatctagtcctaaggagggtcttcctggcctcccacaagccaggagtgggggtacttgggccaaattgggaaggcccatacgagattgacgatgaaataggctctgggacttatgaactcaaaagaatggacagatccatagtacctagagcgtggaatgctgaccatctccgcaagtactatcaatagttaggagttcagtaattacattcttctttattcttcaagattaacatgtgacagactaaatatgtgcgttattccatatgaatttaagctaagtgacccaaaaagttctttttcatgtcacttagaagggtactaaggcataaaatacgcgtagaaataggtcatatataaagagtaaaggcaagaaataaaaagtgtcttaagtagggaggaagtatgcataatgtaaagaaaacagaaaggcttccagatttttattcttctccaaaaactgggctataacagcctcaggattggggaggaagtgaaggcgaggtttgagcttgttagccttccagcacataaacgctccatctttgaagcgcttttcacagtgcttgcaagtaactagagccagtaaagcatccctctcggccttggaagcttccttgtgggttttgtcccagaaatcacgaagctccttgagttcaacagtcaagttggttgttgtctccaagttagtctgatgcaactcctccaaagatttaagcttcacaaggatctcctggttctcctctcttgagtcctagaggtctttcctggccgaggcgataatgtcgtccttcgctttaagaaccgcttgatgatttcggtctataagggccttctcttctcgggcttcattacgaagggcttccatctggtcctctgactccctaagcttccttaggacccgatccatgccgccaagctcagacacggtgaacccttgatcaattaaagtcttagaaagtcgattggcctccgcgataatctagcaatcagaaaggataaggttagaactatgaaaataaaagcataaaagagacgtagaagattgtcacttactgcagtcaaggaaacgctcatgtcttgaatcttgtaagaggggttgtaagaagggcatgtcgcatatctctttgtgggaagttgtgtcaaatcaacagcaaagtgactcaccatttctgaggcaaatggagccaggttgggccccacgaagcatttaaaccattccgtcaaaggatccaaatttaagtcccagatgtccccagcatatttgcctagaaaaggcccatcttgggcatccctaagccacttcttcagggcctttgattcagcatctcacctggataattcccccacaacataattatgcttggccatgcggagttgaaccctttcatcgtcagtttgagcaggagttagaatgatgcttggaggcccagatactcatcaacttttgaaggaatccccgaatcggtactagggtcgggggtgtcaaccgtcttcagcttctttgaaggatctacctcagtggtgacacccttacacttcctatcaaggggaggaactacttcttcttcctcgtcgtcaataagcaccacctcctggtttccgagagctttcacgacaagtccccccagaattacacgtaccgtgtggtgctcaggcatgtatgactcggggctgtatgtcagggcaagggcatctaaaagatttttaatgggtttcgctgtgtgccatgggctcaactttttaggcagcagaacacccgtgcggcaccttgacttttctaagccaacatcaaccttctaaccatccaagtaataatgggctcatttttcgtgtgaccgtgtgcctcgtgcacacttccgtctcttgaacaactcccgctgagtcatgctcgcaagcatccatgattacacccattcatcgaggcactctagccaagatactcgcactatccatagtcccactatgataaggaaaatcgcaacaccaacgctcaccctgtcactcgtgaccaaggtagcatgtgtggcaagatgccaaaactcagtcaacgtgccaacacttctatcatgccccattcaatactgtctaaaaaatctccctcattgcccaaggactcccatacatccatggaccaatcctcaaggcgccatgcctccacccatgttgacaggccctcgagacaagctgccaaacgagttgcatacattagacctctgtcccttcccaacatggtccatccgtcccatgcgcgtatgcaaactaggccgagaatgactaaccgtgtcatctcatgttccgactcgtggccaaggcgcaccataatgtctcttagtggtttaggccaagtcccgtgcaagcggcataccggctagccaatggaaacgtacctgttaacctcttgcagcttcttagatgcagcaccgggtcagcccaataatgtccatgagtactnnnnctcatgcagacatatgagtcccctcgt

SEQ ID NO: 117199 - DNA, 868 bp, Cannabis sativa
aaattatacgaaaaggaaagattcgaatttgagaagagaaataaaaacagtaactgaaaatacctgaagggaaggaagctcagtagagagtggagagagagaactattcggccatgaaaattataaagaagaagacaagtttaaggtttaaggctataaaagaattttcgtgaatagtcgaaaatcgataggttaaggctctttttatacgaaataaaataaaagaaaaatctagagaaatatttatattcttaatttaattaggatttcttgcttgatttattttaaaaaattagaataatttatgtaatcttttaatttattacaatttttttaggcagatttttatgtaccaaatcctgattagccatttcaaaaaaaaaaatcatgattagccatttttttaataatatttaaaaagaataatttatattcttatttatattctcgggtctcaatatataaatataacattaaaattcaaaacattttgtttgaaatgaacaacaataacttcgtatagcactaagcacaaattaaaataaataaaacaaaaaataataatttttttaaaaaaaatgtatatataaaaaaatagttaagataaataagcatgtattatacatgtatatatttaatttactatattttaaaatatatattaattttttaaattactatttttttatattaaaatatttatatacatttttaaaatatttattctatatgactatataatagaatttttgagaaaagaattttgaaaaaatatctattaatacatcatatatacatttgtttatattgtttatttttttattaaaaattatttttaaattatgatatttagaattagttaaatttt

SEQ ID NO: 117200 - DNA, 2046 bp, Cannabis sativa
agagagagagagagagaaacattttgaaaatgtatagatttgaaaaattttaaatctaaaacgcattatattggtgcaagggaaaatgcattatttgaaaattttcagatttgaactaattgttgacgattaaaaattgtggcctataacactataggcaatggtttaaaactatggcctatagtataggccatgatttttaactgtcgataattatcttttcaaaaaaattgtaatttttacgcttaaaaatcattgagaataacactataggtgacgattttaaaccatgacctatactataagccacaatttaaaactgtcacctatagtataagccacggtttcaaccatcagcaattcccctttaaaaatatcataattttgaaggcatgcttaaaaattgtcgtgagtacatctctactccagagattgagaaaagtcacaagattcttcgtggccttccttatggtctgcaagcggctgagtttctgtggcatgataataagttgaaggcctacgcccttcttggcatattagtgtacaaatgacttcaagatccccaaattctcagactggtagcaagttcttgtgctcgcaaatgaggagaattgagactatgtggctcgcatccattacttaagggatgtgaccccttgggaagctgaagatgaagcctctcgaggtaataattttggtgcttgtggatggtacccaatcgttcttaggactgagcgaacaacattagttcaatttagagatagtcaatataacttctatatttggaactatgtagaccacatcacccataggtttgatagttggtaccctgaacatcacgtccagctgagctgtaatagttcttactttgggatcgctaggcaatatggaaataactttgatagggctggtttttcaggttgggacatgtctctactcaatccctttaacctttacacgattactggttctaaggaatttagtaattattatagtgattcttcctcgtctgatggttatgatattactcttaagtgggagattgactcaccatatttttgttgtttatttatacaagtgttgacgtctcatcttttgtctcataaatatggatttttgagatctcttatgcaggtcctctggttctaccaagagaagcaagaagcgtacaactttgttgaaaactacatctgggtcaaacctagaacctttaaagaggataaataagtctgctaacaaaaaatgtgcctcgactcaacttgtaatcgagttagagaagaccctagacagttcctcgacacctactactgcgagctctggtaaataagccttacagtctgttcatcaggttgaattctctgtatctcaacttgagatggtattcttggagccccctttcccctgtctagctttgcaagtgtttagggctcacaattatgctcacagtatgctaccaattgttggcgccactataagtcctttcaacaatataactgggaattgatcagcatgggaaatttccaaagtttaacggagagaagcgttgatctcttacattctgttagtcatccttataaaaatttgcatatcttctcatatataccccctttcttttttatatatatcctcttttgatctcgttctttgcagacatctctcttatccttcgtggctcaacaaaagggtctcccgaatgttaaccagcttagcaccgagcttcacaaatctaacgaacaatgctaagtcttggctaactaatggaacaacttccagtcggagatctctaggttgaagtagaaggctgaagagcaagagaaagctcataaggctgagctcgaggctacataaaaaaaaaccaagaatctccttaaggctaaccagaaggcccaaaaacaattgatgaggctataaaaagactcaaagaagccaaggatgattcaatccccaacaactatatttgaattatagtttttgaatttaaaaaattaagtcatgtaaccactctttacacacttaattagtgatcatgtggaagttacaaaatat

SEQ ID NO: 117201 - DNA, 1382 bp, Cannabis sativa
tccgtttgcttaagttgctactaaaggttttttctttttaatcttttatttttaatatcaaacttttttaaaaacatatcttaatcttaatttatgggaagcagggtctcaatttttattcttattttatataattcagttaaacatattcaatattatgtatatatttaaattatcttattgtccatgccattcttgaattattaatatatatcgatagtttatatttttttgaaattttttccactattattataaattataaatcatttataacaatagagaaaataataagataaagaattcacccatttaatatatattttcattcaactctaaatcatattttgttaaaccatgtatgtttgtttagtatgtctccaaacatgtgagacaataattctagagagagaaaataaaaaatagcaaatattagaagttaaatttgaaataaaagacaaatctaaagatgttgtagataaaacagcaaagatcattaaatcatcaattttaatatgtgtaataggaatttgtagttgactcgtccaaataatattatgataaagagcatttgccttcatctcatccgatttaaaacaactttggactgtttttaataaagcggcgatacccaaagtgtgggtgttcatgttcaccgctgcatccacctttagttttaggccattcagattaggtggcttccatggaactttattctccataagtataaatggattgggttggtttagatttttatttcttttctaaaacaaaccaacattatgaattttaaaatgttcaaaatcgaacttaactaactcaatatttaaactaaactaaaccaatctacttaagaataaattggtttaatttaaaattttctaactgttgtaattttttaaaaaataattatttattttcttactaaatattgttactttcaaagtttataatattcttaaaataataatatcaatattatggctaacattattctcaaatatcattatacaatagtaactaaaatatattaaagactaatatataaatttttttagacaatttggttaggtttaatggcaagaatctaaaattgtatcataaataatcttgattgactaaccatatacatagtattgaagaccatgtatctatattttgaagcttcaataaataattgattattattgatctcatcaatagaataattcggtttattaattcactataaatatgaaattgcattcgttgacaatatagaattatattactgaattcttaccagtagtccattaatataatcaatataaatagttcgccatccaattattagttcataattagagttggtcaaaattacattttatccttctaattatctc

SEQ ID NO: 117202 - DNA, 3785 bp, Cannabis sativa
  modified_base (829)..(829): a, c, t, g, unknown or other
gaaccgccggtacacaacttccaaacaggtagtctctttcgtcaataagttcattatttgtcggtttggagtcccatataagattatcactaataatgcaactcaatttggtgacctattaggagcttactgtgatgagaggggaatacgcagaggatttttggttgtggtgcaccccgagaccaacggtcaagtggaggctaccaataaggtaatacacacgtggcgtccctgtggatcaaggtgttacagtaaagaatgattttttgagttttctgaaaggaatgaaacagtaacctcttgagatataaaaagtttatgagatccctattctaaacattcttgaattaaattttcttttaagtattagtttacaagtctaattatattgttaacgagttctagccgttaacaattcccaagttttagatatagtggaaataaatcacactatatttttcaaaatatattgtttctttaagcacaactttcttttaaaaaagtagaattttttttcacttaaaagaaagtataatttctaagcattagtgtgttacaacctgataaaactacaaaaaaaaaaatcaaagaaatatgtgtaggcgaaatataatacttatgttctaagaattacatgtaaataatttaatgacaaatatttaatcaaagagtattatatttttgcataatgaataactaactagaaacatactttaacaataagaaatatatgatattgaagataacaaatacatattttttataagaaaaatctatagacaatgttgcacaaatggaaaattaacatacaaaaataaatactatctanttacattttacttcatcattgtcttaataatcttgaaaaaaggttagaagctcataaatagattgaaataactactacaagacataaacatatttgacatgttcttcaaaatattaaaatggtaataagaaaatggtgtaagaaaaaaatggtagaaaggaagaagtgaagaggtttttatgagatgaagagttgtgtgaaaaaatgaagagggttattagagagtctcacattgttaatgtgtggaaagataatagaatatataagaggaatgggctactcctcccactgccaattagttttgtgatggaatctcattcaccttatctcaaattctaatatggtatctgagcaaaaaaaataaacaaaaaaaaaccctctaatgactatccgaccccaacaaaaaacaaaccgaccaaagtagagccaaaaaaatgagccaccaaaaatccaaaaaaaaaattgatccaagagccaaagtcaaaaatagccacttgtgattcaggaatagtgagccaaaaaattttttaaaaaaaaaaaaaaaagccaaaaaaaatactaatccaaaaagtagagcaaaaaatgccacttgtaattagggagagtgagctaaaaaaaaggtcgcttatgatcgagttgtctaggatggtgcgcaaataaaataactaccatcttgaggggggtgttaaagagtctcacattggtaatgtgtgaaaagaatagaatatataagaggcatgggctactcctcccactgccaattggttttgagatggaatctcattcaccttatctcaaattctaacaagggtagaaaatggacttacaagactctatttataggcaaaactagtaaacaccccgcgcttcgcagcgaatgtttaaatttttttaaattatctatataaaataaaatataacttttatttaatgataactaagtaataaattgtatcaaattttaatctaatttttcatataattttgtatgaaaaattaggtgtgtacaaacggactggtcaaactcatatttaccaaatctcgttattataatgaaagctagacacgacttgtataacatgatgttaggcttgacccttcgaattgttataaaattaataaatttataaaaaaacttatcatatgatttcaaaaccaatctcatcaccgtatctcccttgtagtcaatattacatttaagggtgttgttattgtcatatctcacatgtatagcatgatgctaggcttgaccccaatatatttactatatatataaaacaaattaaataatgagttaactactcacttttataaataagttaatctgcacaattttcttttataaaaaaaatatgtaaaataaaatctattaaataataatgaaataatagatagaattgtatctaattctcgcacaaaataaaaatctataaaaagggtaattgataaatttagagaatatatgatttaaaagtgctaataataataataataataataacaacgtgtgatagtatatatatagtatgttttttttaaaaaaaattattaaaataatataaaattattaatttgtagatttatgttttaataaaatattcaaaatgagagaattaagctgagaagagaaaaatagcttattaaaataatagtaaaatatcaatttgtagatttatgctctaataaaaattaaaatgagagaattaaggagagaagagaaaaataattttagaaagattttaaaatgacatttcaccgccttatatttatcctttatatatatagatgattaatttgtagatttatgttcaaataaaatattcaaaatgagagaattaaacagagaagagaaaaataacttattaaaataatagtaaaatatcaatttgtagatttatgctctaataaaatattaaaaatgaaagaattaagaagagaagagaaaaataattttggagagattttaaagtgtcatgttaccgcctcatttttttatatatatatatagatgggttgattaaattaataaaaataaataaagtaattaattaatttaatcgtgttggaaaatgataggataattaaagtaagtgcaagagtattgaaaaatgaaatgttcatttgaatgtaagagcagtgaaaatgatatgataataaattgaaaatatttatttaggtaagaaaaaattgaggaaaagaaattgatttttatatgtaataataatatgggaaaaaataaggattttttagctttttaatgtgtgtaattcggctaggaagttacacaaataacagttctcttctctttctgtagggatggagaggtggcgtgtgctggtttgttgatggggcgagaccatagggacacgtggcaggagctgagaggcaaagagttgctcgttgtgacccgcgaggtcagctggaggcgggtggacacacgagctcacactcctttggtcagggttgtggctcacgctcccttctaggtcgtttgatcatcatgtggatggttcggatgaggagcacaatctgactgagagtggacttggcttgctccagttctgaaaagcttttaaaaattatgtttctctcccatttctccaaattttcttcaatattatcctaaactttctctacacacacctaaaattacataaaattaattagtaaattaaaaataaaataacacataacatatttaaataaaaataactataaaattaaaataaaactaatatttatatgtcattttgtgtaacgcttcagatgaaacgatctaccatgctttggtggggtgtgattttgctcgtgcgtgctggcatagaactatggtagacgtgggcagcactttgaatgtcactttatgcaattggctgctggttttgttcagtcgtggtaggcaggaagagatggaggaagtcgcagttgttagctggtcaatttggcgtgcccgtaa

SEQ ID NO: 117203 - DNA, 813 bp, Cannabis sativa
aatgctcaaagccattcaaacccaccacgtcaccaacatcccggccgtaccgcccgtgatcctcgggctcgttaagtacgccgggagattctccgccggcggagtcggggacctttcttcgttgaggagggtgagttcgggagcggcgccgctgggtaaagagttgatagaagggtttcggaagaagttcccgtgggtggagctgaggcctgggtatgggttgacggagagttcaggggcggcgactttgttcgtctcggagaaagaggcgaaggtgaggcctggatcttgtgggggacttatacccggattttgtggaaggatagttgatgttgaaaatgggatgagtttgggtccgtataaggtgggtgagctatggttgaagagtccaacggtgatgaaggaatatttggggaagagggaagcgacggttgagacggttagtggagatgggtggttgaaaactggagatctttgttattttgatgaggatgggtttctttacgtggttgatcggattaaggagcttattaagcataatggctatcaagtacgtacctctttcaatcctcatgcatgcatatataaaaattatgcattgatatggggcgtctagcactagcactagcactaagtagtaattaattaattataattagttagtgattttttattaaagtaaaataagtaatatttgatattaaattgcactaatgaccatattacatatctgaagagtacgagctggcctaaaaatgtatggtctaagataattttagagccctataaaaaaaaaaaatcaaagcgtgtact

SEQ ID NO: 117204 - DNA, 1610 bp, Cannabis sativa
  modified_base (1568)..(1584): a, c, t, g, unknown or other
tggcaactgttttcataataagcaccatatatataattgtatatacatctcacttttacattttctctttagatgtcccatgcaaatagtttcacttttttcccttatcagcaaaggtttattatatttaatcatatactttatatattaaaaaaaaaaaaagctcacacacccttataaattggaagcctaaaatatgagttaatgcaagtgatttttttattttcacataaataaaagcaaaaattcaactagtagtacctgcttataagtagctttttcactgcaacacgagtattatcaaacaaaacaccacaataaacagttccatattctccactaccaatgacatttgctcttgagaacccatttgttgccacatcaatctcattcatactaaacattttcctccatgcatctctgggccgggccaccaacgaatcagcatcactggcaacactgctagtccgagttgaccattgggctgacatagccggcccatatctaaagcccatcatttcgcactcggagaggttacgagtgaggagtctcctatcaagggatgaagtgttgttgtaagcattttggctaacgttgggagatgagatacgatatctagctctgtaacgtttgtgcctactacataggataaagtagagaaatatgaagatggttatcaaaaatactaaggagaaaatgagtagaatcacaatccatagtttgatgtgaaaaaagggggttggtttgaagagattttccactgttaatgatggtactttggaagacataatattgttgggggagagggcttagagaatcagaaataagaaggtatttgattaaaggaaaattggattgaattcatgggatattgcaatgtggttttactttgaattagtcttagtatgactcatttattttattagtttattgcttctgtttaggtcatttagtttatttgtttcctatttctaagccattttgtattcatagaaacattctattgaaaatcagtatcaaaattattaacttttcaattataaaatcgatatctcttccacaaaatacattgatacatatatagacatctctttttttttattatatgtgtagtgtagtcttatgccacttggagattcgtaaagaaagaaactaacaggattctgtttggtttggtgtacatccttatatttctactaagctaatcgagtaaccaaccaatagtattatgccacttcagcaaaactaataaattcctttagtctagactataacaatggaaaattttacccctaaaaatggtacaccaattcacttttatgagttttagtattcctgtacattatagttatttaagttgttaaagagatcttccaaaattttaagaaattaaaaaaatttaacacacttttatatgcgtgcaaaacaaattaaacattattttctacattataaattattttaaatttctcaaaattttgtataatgtcttaaaattacaacatacacaactaaaaaaattagactaaaaatttttggctaattagtaattttttctcccgaacttnnnnnnnnnnnnnnnnntgcccctgaacttttttggtcgttaa

SEQ ID NO: 117205 - DNA, 2521 bp, Cannabis sativa
cggatcggattggatccaaaatatgaaatccccgcttagtgcggattgaatgttgtttgatcaaaatagtgcggattggatcggatgaacacccctggtcaggtcaaagggttaatgaactaaaaacttccatcttttttagcaacaatactactgagtgtatgaagagaggaatcatgagggatattggcctgaatatcccggtagggaacattaattacttggggctcccaatttttaggtcctgccagaatgatgctgattttaatttcattttagataatttttttcgaagcttcatggttggaaattgaaatccctgtccaaggcgggtcgtgctactttgatcaaatctgtgggtcttgcgtttcctgtgtatatatactatgcagaccacgaagctctccaaaaaaccttgcctcaaagattgatgggatggccagagacttctggtggggatacaagcaaggaaaacggggtatctgctttaaagcatgggatcagttgttcttcctaagtctcggggagggcttaggtttcgcaagactgaagagatgaataaagcgttgctggccaagtggggttgggcgctcctgaatgaggaccagtcgttatgttgtcaggttctaagggccaaataccttagagggaaaaagtttttgagtgctcttttaagaactctgactcgtggttctggaagaatgtagttcgtaccaaggatatcctcaaaaaaggggcttggaagcttatttctaatgggaaggagactaagatctgggagtacccctgagttattcatagtagggatttcgtcccgaagcttattacttgcccgccggataacctgaggttagtggcggacttactcttatcgaacgaggactgggacatccctaagctcgtaaagttttttgaccatgagactgttagtaacattatcaaaggtggcaagcctagtggtcatgggggtgatagatgggtctggactaaagaatcgaatggactattttctaccaagtctgcttaccttattcaagcccttgatcgtgcccccctgtgtaatgtcgccccggctctctggaataaactttggaactccaaaatttttgagcggcataaaatactttggtagagtattctttctaatgctctgcccacccgagcctctcttgcgaaaagaatgtgtatcgatgaggtctcttgtctgatgtgtaggatggaagaagagacagtggagcatctttttctctactgtgactttgcttttcatctttgcgttcttccccttggggagtcatgcctgttttggattccggagtccgtatttgggattgggttaatttcttgtagaatttaaagtcaaaaggggtggacattgacaaattattcctttatgcttcgataggttgatacgatttggagagcgcgcaatgacaaggtacataagaatggcctgtgtagcatcacttattatattgacactatctcttattgttacgcagattatggctctagtttacttactcactcggaggttgctgggtctcctgcttgggttccgcctcctgaagactgggtcaagatcaactgtgatgccaaagttggttgcgactccatgtgtgtagtggtcattgctagggatcataaggagactattttatgggtggctatatccttgctagccttttcggatccccttgttggagaagctgcaactgtcttgctagcaattgagaccgctgtagctcaacatcaccgttttgttttagtggagagtgattcagatacgattatcaaggccatgacgggaaattgttccagttggggaattaataactatgtgcatcattggaaaaagctttctacttttatgttaagttgtaatttttcgtttatttccagaacttgtaactacttggctcacaatgtggcaaggtgggtttatgctaactctattttcagtagggtggacgtgatatccatactagtttccatcctttgtaatgaccgtaagatctaactttttatatttataaaacgtcattttcaaaaaaaaaaaaaaaaaaaatttagaattgaaaaaggttttgtatgttagggattaaaattaagtcacaatatgttattagtagtctcatttctttatttattatgatttttaatatttaaatattaagttttggttggggtattttaataatttcttgcttaatattactttttaactgtattcattgtatagtcaagtaatatacctgtgtgtatgacatattaaataataaataagttaaaagacacaattactttaataggatagacattatttttttttgttgattgacagatttttattaattaaaaaatagattatattattataataaattatagggaaattttatgatttactcttttaaaaaggatatacggatacatttttatttgttttagtatctaaaataattttttagtcaaattttttctcatagtcatctaaattatatttatttaagacattctg

SEQ ID NO: 117206 - DNA, 1665 bp, Cannabis sativa
ttaattaaaaaaatataaaaaaatgcatctttttacactatatcaaaaataagtttatataaaaaatatttaagtaaaattcattatttgtttatcatttttttttaattttttattattattttttttttcagccgatggaacaacctcagcccatataatgaaaaaatgagagatttttctaattaaatataaaaattaaacataaaaactcaaattttttaatatttacccattgatgagtaatacccattaagcgtgcacccatatataaagaagatgataatacaaataaaaaaaaaattaaagaatatgaacaaacttaaaattttaaatatgaatattactcatttattttgatgttactctatatgtaataattcgtattcacgtaaataaaaaattttaaatactgtttgttatttgtctggtatatatatatattggtgtagacgcttactaaattatgtgtactagggtgtgacaaagttgttggttgatggagatagaagttgttggttgatggagatagaagtcatttcaagctttaaattacgtctactaattattaatagtctgtgtctaaccacctaccatgttcgttcataaatatataattataataaagtatatgtcacaataacattaaattaattttgtgtcaaaaattatttttacttcaactatactaaaaattatattaaaaaattattctttacaattatattaatttttaataaaataaaatattctttttaataattttttacttaattcagaattaaaattaataataaattatagtatttacatttaaatttacacacaataaattaaaaggtacttttacaatgtatctctctaaataaaaaagttacgcatgccacagatattttaaactttatttccagcgtgttaaatttttttcaacttttcaaaattttggagaatgtcataaataattataatgttcacaaccataaaaaaaattaaactaaaatagtatttcaaaaactaaaataaataagagtacattttaatttacactcaataaattaaataattttataaatacaaataataatacaatgacacgaaatatatatcacacacggtcaattgaaggtgtaaattgaagtgttgttggagacatacataaaatcaaataataaaggttttgcaatcaccttggagctgctataatgacgtaaactgcaatggattagccaacgtcagcatatattcacaaacgtgtgcatgttatttcatgcaattattaacatccaactaattatatataacaacatttatttagttacatggctattaattatcaatgaaataatgtcacacatttatgtatacccacacaatagcgaacccaatgaaggataagatggggcatttgcctatgctcattttttttttttcgtgtatacaaaaaattaaaataaaaattaattatctagaataaaatagatatctgtctctcataaataaacatatatagttatatttgttagacatttatatatatactagaaaaaagttacgtgcaaggcacgtatgcatagttttatgttagtcgctatatatgtaattgtaaatattgtaaaaaaaaaaaaaaaactaaaagtcaccataatagttggttctaatcttctt

SEQ ID NO: 117207 - DNA, 1055 bp, Cannabis sativa
atgacaatataaaaagagtatagagtgtaatttcctccaggcctagcccgcctatgctcagggccagccctgggttcagcgagagtgcgtttatggagtttgaagaatttttcatttgatggtcgtgctacattgatcaactcagtgttgatagcaataccgacttactgatctcaaataatgattcttcgaaagaagattttgcaaaaaattaatactatttggtgggatttttagtggaaatgcagtagtgttatctgagcaatctgtatacttcaaaatcaacatgagggttatattacaagatattattacttagaatgttgcaatgattaaaaatatgtgtgagccatagcttccaaacaaaataatctttggattaaataggttcataatctctatatattggaaatgaagactggtaattaaagatataccgacatttacttactagctagaattaataatattataaagatatttatatgagtacgtgatatatattaattgattataaattaagtactacttccaagactacttatatacatgtataccgtactcttattattctccaaatatgcatcaatacatatgtataataacctatatttatgggaaagtgatgaagactccatttcgcatggtatataaaatatattatatatattatattgacaaaaacatgcatgcttagaaattcatatatctctatacatatttattcagagagtgatcatctgatgaaaaatatgaatatatattatataaaagttaaattgatccttgacataccaataacaatattaaatttatatattcatgtattatataaatatatacaacatatgtctacttgttatatatgtgtgtatatatatatatcctctcaatatggtaaaaagtatagagtatgacctttttagttttctcccatttcatttctcaataacaagccctaaatagtatagcttggcatggggtataccatctatatttatatatatatatgatgatgactaatcactatatacttcttcttcttcttctttctt

SEQ ID NO: 117208 - DNA, 5401 bp, Cannabis sativa
  modified_base (59)..(64): a, c, t, g, unknown or other
  modified_base (5030)..(5039): a, c, t, g, unknown or other
gttttactggtgttttataaaaacacagtatttttgaaaagatttccgtgtgacagtannnnnntaaaagttaacccaaattccaatatttttgtaagtttcccaaattttatcctttaaccttttgacgaaactaccctccaagatatgctccggtactccatggactctggacgtcgatccctcccactggagccggtagtcacgaacggtggtcgtttgggtcccagacagaaattcctccgacaaggacccgaccggagctgctcggaacctatgcaacaataattgtttaagcatttctcaggagatgataggtctcctctggttctcccaccgaaactaggtgagtgcatctccattcaatccaacaatgtcagtttccaacttaagcggctcggtaagaccgaaaatgagaaaataatgctctgctatgtggatccatcctacgggattactgacagagaacagtggtaactccattcaaggtggatggaaattttgacctcgaaattgagcttggaaatatggatttggatggggcagtagctatggtggaaatgtagcttgaggaggtggagttggagggtattggatctctggttccgccgttgatgaggatgaggacctatccctgtgcacagcttgaggttgaaatttattgtttgcggtggctgtctcgaccagagccttacccacgacgaggaatcgagtcatttgggccatcaatagctccggtaattgttgaacctctactcgagtttcaaagttctctttacttagctttcacctctgcaatttccttcaagacttctgattgcagagcttccttgaactcatcgaattgctcaaacgtggcatccttcttaggtcctatgagtgaatcgatggtgctctgataccaagttgatagaactcacctgctcaaattcaacttaataactgtaacaatggagaaagaagaagatgaagatggatgaaaatggcagcagtgcctttgtattgaatacctagaatttcaagagactggttctctcccaaaaatgttaccaaataatcaaattcttcgcacccacaaatgactaacctcttggcttttattgtcacagacgcgtgcaagactaaacccttcacacactagcaaaaccctcaaaacaactcacttgccaaacttatcaaactttttaaagaacctggaccaaagctctacttctgtagagcaatgttgaatgattcaccattttaaacatttaacaccagtttggaggggtatctaattaaggttacacctaacaaagttctataatcaaatgctaaggtagagatttaagctggaagtacaaatccatatttccattctctttcttaaggtttgaacttggaatagtgtttcccataattgacgattcgctttgtcaaactcattctggtttggaatttactttttaatcttttctttcccattagaggaataatcaagaacaaaatctcatatgcttgtccatcccgtccaacaatactttcaactatttttctctttcccatgagcttgtattttacttcactgcatattctcctggattacatctcggcaccaaaattgcaagtagaggaaaaaggaggtcaatgaacaaaataaatagcctaaatatctttaatcatgagcataaagtgtaaagaggaggaataaaagtaaattccatttctttttcttaatgcattcatacttcaatttgaaggttgcgaccatttggtgcttgcatgtttttcattgggaagaatatttcttaggtataacatacattcaacttcatgttatctttatcacttgatatattgcagatgtacagtagtaatcgcatcagaaagtgggttgtgcattgttgataatgtctcaaagaatccagtgaagggagcttaattgctaaatagccaacattggacaatttttatgtggttcttgttgtcatttccaaaaataatatgtaaatatttcaacatccataattcatttgcaaaatattgatattcttttaggagagagagaaaagttaatattgagttttggttgtatttgttgaatccttgtacgcaatcaacacatatattggaaaattttgttgtatgtgtgaatatttaaaaaaagaaaagtgcacttagagtctccttattattgagtcttgtattgaaaaaaaagaacacttcttagagttaataagtttatatcgagtgaatagaaagatctttttggtgtggctccagaggtatccaatggctcacatggccacccacgcacgtgttgtcattcgagctgaactggtggtatggtttttttttttttttttttcttttttcattttttacggtgtcaggagattggctgatgatggtggtctccacttgctgctagttggaggaggacgtgtcatttggcgcgtttgaagcttattttgttatttttttaaaaaacaaataatgcttgaaaattaaaaataatattaaacaaaccattataaatttaagacatataaatgatgttattgttagttgaaagtgacaagacaattatttaaaaaatatattaagacaatgaaactgacaagacaatcacttaaaaaaaaaagttaaaaaaaaattaaagataaaaaagtaaaaagaaaaattaaataaatttctagcaatctaaaataaaatactaatttttttttaggaataaaaaactctttatgtttgaagatttttttttttctttattttattatttttttttataaatttcttgatgtgtcaaaaatattatttatatttttagattatttattcgttatttttaattttaattttacatttaggcgcactattttaatgtctgattaattttcttattaaagtagagttgtaattaatttttttatttatttttattcaattgttcaactaaaaaagaaaattgagtgtatatttagttttcagtggtacatatactattgagttagtgagcaagtgttttataattgattttaagttttttttattttgtaagattattggtgtcttgtttttttatgcctattagttatacagttacttgtttgattttatataattgttcaaacatgtattaaagttgtttgggtgttgtgtatgttttttaaaggttgtcgacaatattttttatgtccacttgatttacatatttaattagtgttgttttgtagttgtatttttgttgcatatttaattgtttttttggcaaaataacagtaaaccaataaaataactacataattcaaacgatatatacaactacattataaaaatgcaacaacacatatacaactatatacatctagttaaaaaattctattcagtattggaaatcaagtatgacagaagtctcatattttacatgcaattgaaatttaatatttttaagaaacattgttgttttagagttgttttaaagttgtaaacacgttatttgatttcgttgcttttttaaacatgttgttttcatgatatttgtatgttgaactttagtagttaagatttgtagatttcttaaattttatatacagttatttttatgtttttatgttgttaaatatttgttaacagttaatattatttttgttgttactattctatttttataggtacatatattaataatatttttgtattgttattattcagttttttgttcgttattatttagttgtttaactaagataaaaattagtatttgtttaaatttttatgggtacatatatttttgagttaatgtacaatgttttgtaattatttttaagtttcttttatttatttattttttttttaagattattgatgtcttgtttttatttttatttgttgcaatgtattcatacatatttaattttcctattaacatgatgttgttataaagttgtttgtttgttgttatttcgttgttcaaacatatatgaaggttatatttctttaaggttgtcgacaatatttgttgatgtccaataatttgcatatttatttagtgttgttgtgtagttgtacttttattgtccaataaaatgcaatttttttatatacataattgttagttttttgtctaattattttatcattgctagctcactatttgttcattgttcgttcttatttaattgttcaactaagagaaaaaataaatatataggtgatttatagttatttttgtaaattttatcaggatttttttgggtattttttcatgttttttgaggctttcgacaagtatgttaatatcttgttgttgttatgttgttatttagttgcttaaaaagattaaaaaatataagctcaattttttatataaataaatttttgagttgttatttaattattttttagtatatttttcaatttttgtgcatttattattatgtatctttttcatttattttttatatattttttagttgaagaattttttaaaattgattttgaatttacgtgtgtagttttgtctacttttatattttttagttttatggccaatttttgaaaagctaaagctatttcttgaaaaaactgcgacaaaaaagtgtttgttaagcagttaaaaaataacttattgaagaatttataaaaaaaagttacagataaataagctggtacaacattattagactataataaattattttttactaaaaatttatatacaaaaaaaaaaataaaaatatttttttcttcaaaaaaatatttaaaataaataatatataaatttctaattttttattttgttttaaaaatattttagatttatatttatatttttattattaacaaattttttataaactaattttttttttacaattgataaaaatataatttaataatattaaaaattatttttatcaaatgtatataaatttatactataaaaaaaattaaaaatatataaaaatcaaaaattttatgtaacatattttacatatatatttgtgattttaatgaaacacattaaaatattattattattattnnnnnnnnnnttattattattattataatagaaacataataacttgcagtactttaaaatttataatttatcaaatactcagcttatcttttttctacaattctattacagttgtttttccctacaacacagctacagttgctttttcccacagcacaactgtgccaaattgacccttattggtacatcattgtaattttgtttatatcaacaattttaagacatttattcctgcaatggctacagccaatgaattttctaattttgtatcttttgatattaataagtattttccttccataaatgtaaaatatatggatcattttttaatgggtattacccatgaatggttactaaacaaatttaactata

SEQ ID NO: 117209 - DNA, 762 bp, Cannabis sativa
aaagttatgtaaataaagtttatttatgagcaaaaaatacataatgtattcaaaatattcataattcaaatgaaatcttctcgttaaagaggaaatatatataagttaaagtgataggaaaataagaaatataattgaagcgaagttggccatccaacaacgcaaaatgaaattagttacataaaacccacaaagggccaaatgattgtctcaaacaaatgaccattgttcataaattatttaaaaactaagtctacattgtaggagacttagagggctcttcttcttcttattatgctgcgatctcaacctctccagagtcgccaccttcctccttattggttggttcaaaatatgcaagcattacatcgactgccttacccaaaaagcctaaatccatgtttggattctctatctaggccttgtaaaatagaacacttgtccatcaaggtaactctctcatgagcatccaccttggcgtcttcatgcttcttattatccccctcaaggttcttttgggctagttggttagtctcgcgaagatgctcattatcggtctttagatccttctcaaatttctctagatttttaacattcttcttctggcgggtaatttctgattaggcatcgctccatcaattcaaatcttagacatgaaatataaagtccttcggaacaagaccgtaactttggtcaaggtgctttggagaaaaagtaaggtggaggaagccaccaggaagttggagtccgacatgagggctc

SEQ ID NO: 117210 - DNA, 2227 bp, Cannabis sativa
gaccaaaccgaccgttgttcacccctactggtcggccatacaagctcatctggctggcctatagactccccttggccaaccaaacatattggtacaactacttaacgactcacttaacttttttcgcttgttgcttgatggtttagccataacttgtaagaaggcttgttctgctattagcaaggttgtattccacatgtactctatcttggcttacgtggacataccacgtcaggtagacaaaatttgagataacacatgccccctaagtccctattcgaacatctggtcagatagggacttctagctctcgtcttatttgtaatagtctttgtcgagcagccttgtctagccaagtgtttgcttttccgcatggcatgcttttagatctttgatcttctctctctataaatgtctcatctcctcttctttgatatctcttttttgtacttgtcattgataagtttcaagctttttaagcttttagaaactttttgattctcatgttagtttataatctttttggtattttgattcacataacagttttagaatgcataatgtgtgatttcttgatggaaaagattcggttttggccttcgttgtgattcttgactctttgagtcataaagaacacgaggcacatatttgagttttgataaaaacacacatttggattcaaaactaaccttggttggccttggaggtcttacttgagacctgaccggtcctaggacttaatcatgggagttggccagctctagggtttcaccctataaagttagtcgattcatgcctaagtttggtgaccttggccagttcttggttgagtcatgggactctagttgaccctttcaaggcttgggaaccctggccggcctaggccttagttctaagcaggtggccaactttctgtcctcttttgacttcggaaagaatcctatcatggccctgtaggcctatacaaccttagtctcatacgtggttcccttagaaaccctgtatgaaacttaatggggagtctattatagtcaaatattcaacttaagactctgtatgaagcttgtcggccatagggccggccagccccttgaggtggctggtttgtcactcgttgtcttgtttgagtatcaggatcccccgttggctagggtgctaggtagatgacttgacctttttgttggtgagttgtactgctacgtggcgctgatattagcacatagatatgccacgtcaaatgagcaaaaattgagataacaataaagtttagagataaaattttatgtatatatatgtttgatgtttaatcaataaaataagaaaaaataggaataatatatatattaaatgcataataatttatatttaaggtttgaagatttttgtttattagaaatttttatcaataaaaaatataaaaaattgagaaaattaagaagaaaaaaatatttttaaagtaattttaaagcgccatgtcaccattttatatctctcctttatatatttttttatatgtgcatatatagcttagaatatatacttttttctcaattaatttatacggtttaaagataaatttatatatatgtttaatgtttaattaataagaataatttatatattatatgcatgataatttatatttacggcttgaagatttttgtttattaaaaaattttatgaataaaaaatgtgaaaatttgagaaaacgataaaataaaggagagaatagaaaaatatatttagagtaattttatagtgctatgtcatcgccttatatgtctcttttatatattgttatacctgaaattcggctacacttcagagagtggcacgtgaaccacatgatataataaaattatatcatttaatgcaaagaaaaagaataactcgttaaataaaggattaatagaaaatattcataactcgctgactacatagtcttaagtgagataaggataaaaggctattaaaacttatatttacgagatacacacctgcctcggaatacacagtcaaagaagataatttatttattcaaaggagtgaatacagtcgaacaaagcaaccttggattacaaatggcgagatagctacctcgcaattctaaagaagcttgacgaggcaaactatatgctaacacttagcgttttttccacattatgatagacaaggataataactcggaattaagcgagatacaattgtccaaatcagcattaaccat

SEQ ID NO: 117211 - DNA, 1664 bp, Cannabis sativa
tgaaatgagtgttatttagggcataaaacccaacagtaacacagtccacagtgttgtatcgcagctctcttcctttcaaagagtcagggaagagggacatgaataaattttatcactacgacaataattacagtcatgacactaatgagtgtaatcaattgcgggatgagatagaatttctcatcaaacaaaaacatgttgctcttcagtagtatgtacgacctaaagctctagctgggggcaattaatctctccggcctgcgccagtcgcaggcaggctagagatgatgattggaggccctcacctagttgaaaatttgaggaaggccttaaaaaggtatgtaagatcacttcgacttgagctaagagccaaactcctagaggttgcaaaacatcctccaaagtctcaacgctatggatgtgagcctatcacattcagagattcaaagtcctatcatgtcatctaccatcataatgatcctttagttgttgaggtggaaatagctaatatgctggtggccagggtgatgatcgatgacaaagcatcctcaaacatcctgttcaagtaggccctaattagaatgggcttgactttagaagacctagagccatgcaagcagcttgtgtatagtttcagtagagctggcattgctccatgcggcaaggtcaaattgccactcactattggaactaccccaaagcagaccaccattatggccacgttcatagtggtggatgtgaagtctccgtacaacatgatgcttggaaggctagccttctatgaccttcgagccatctcatcagtgtaccatttgtccatcaaattcccaacgatggctggtatcagttatttccttggcaatcaagaaaagccccacaagtgctataatgcttccttatcactcgccaagaagacctcctctattggtatggcatcagaagggacaaaaaacaagacctcctctgttgctatggcactagtgggacgagaaagccctctcccacaaaagctaaagagatgacaaagaactccagagtccaaattacagagaagatggagacaacacttaaagccacctaaaggtgcgcccaagacggggacgacattgacccccattttggggaaatcaactcagagtaggtccaactgaggaacttaaagaacttcccctcaacatagcggacccgaccaaggttgtcaagattggaacaaacctagcggatgtcttgagtgagaggctcatggcttgccttaagagaaattaagacattttcgcttgttcacatgaggacatgatcgggatcaactcccaggtcatttgtcatgccctcaacatagacaaagtaaacttcaagaatgtacaaataaaatgcaggctccttgcaaagagtgctccaaagctcttaacaaagaagttgaaagactactggagaaaaacttcattagggaagctttctacccagtttgggtatccaaccctattttggtgcctaaaccaaatggaaagtggagaacttgcatcaacttcacaaaccttaaagcatgacctaacgattgtttcccactaaaacaaattgatcaactggcagacacgacagccggccatgaactccttacatgaggatacctattcctgttgggaatattttaccaagatctagat

SEQ ID NO: 117212 - DNA, 2512 bp, Cannabis sativa
tcatttgaattatgcttattgagtccttatatgcaattgattattcaaatcgttaataacctaactgactatcatatagagaaatttaggcaaatattcatatagagaaattggtaaacttcatcagttttgtgtttaattgtatggaaagcttgtgtgtgggtgtgtttgtttattataagctatttcaagttcagttttttacttgtgagatataacttagaaaaatgtagtgatatttgtgtgaatctatatgaataagtaaaacctttttcaactgaatgtctttgatgctatggttgaattatgttaaggtgaaaaatcatctaaaattattggaaaattgttttccatccctattttaataaacttcctagtcgcgtggcggctcgggaggcagtgaattcaattatgttgctgtaaagtttcagttacttttctttgttgaggcactcaaatgttggttgattgatggtagtcgaaaaatgaagtattgaaacctacattcttgtttatgattaggtattcatgttaccaataatatttaatgaatgtattagtatatgttaatgccaagcaaaattttaatgatgagatcaagggttatcttcttggcacttcctttaagtacctggttacagcccaaaatccaaaatatgaaagaagtacatacaactctttcttactcatccaattccaaaccttgtcattgtctttgaattttaaggtcaaatttaatattgttttacatcttcctaggttgttgctccatggtggtaatattgttaaggatcatgaataaatatggagttttagtgaaacattgcattgtatagtaatgttgtgatacttagtgaatgtgaaagtgaagctattttgaataaatgctaaagtacattagtggcacctaaaaacaatgctcttatcatttcaacactgaattgaacaaattacacccattctcattcatctctaactctattttagaacaatctttaacttgttgcatgtcatattctatattgtattttttgaagtgttattcattcggaaaaaaaaaagaatggagatcttaatggtcaaattaaattagttaatactgacctgaaagcacatggatgaaatgagattgagagtgagcaattttgctgcgggaagaattaaaatgaagggaataggaagttattaaataaagatagcttggaaaattgaggaggtgaatcactataactatgatgtcaagtttattgaccatgttcactgtcgctatggggtgttagaggtgttctgtaaatgggttttctaacgtattacaattacgtctttgaatgtgtgttttaatggtggtcaagttgggaacattactctgacttgtggtctacatcagtgagatcttttttcaccttacctttttatttgggcggttgagattatgcggagactttttgatagagccatgggcaatgggaatataaggagtattaaactctgtcggggcggccccactctctcccacatattctttgctgatgacctaatcttggtgggtaaaacctctctggttgaagcaaaaggctactgggattgcattgaaaagttttgttcttggccagggcaacaagttaataaacttaaatcttttatatttttcaatagaaatacccatatgtatgtaaaacaaggattcgagatgccttgggaattggagggtcggaaggaaatgttaaatatctagggctttttttatttcgctctagacagaaggatgttgattttaactttgttgttgagaaacttacctcaaaattgcaggattggaaggctaaaaccctctctaaagtggggtgtgctactctgattaagtttgtggcattgtccatgcctatgtatgtgatgcaaaccaccaagccctctaatagatttgttccaaggattgatggcttggttcgtgatttttggtggggatttaagaaagggaaccgagaaatctaattgaaagcttgggataagatttgtcttcctaagtccagaggtggtcttggtttatgtaaaactaaggagatgaatcttaccttcctagctaagtgggagtggaatcttttatgtgaaagtaagtctctttgctgtaatattttgagagccaagtacctctaaagaaaggagtttcttaattgtaaatacaagaactcagattcttggttttaaaaaaatgtggtcaaagctagtgacctcctaagagaaggagcttgtaaagtgatctctgatggaagggataccaatatttgggaggatttgagggtcacccatggtaaatccttataccctaaatctaatggtcaccctgagtgtggcctgaggaaggtggcagacctcctgactagctcaggagagtgggctagggctgagcatcgctcggtttggtcggtttttttctatataaaaatctagaattcagttttcggtttggattggtgcaatctgaaaactaaccgaccaatccagaacatatctt

SEQ ID NO: 117213 - DNA, 3184 bp, Cannabis sativa
ttactacttgtcacgatacgtgcacttgcgtgtgcaaaatatcacaatagtatcccccattaagaagctagcctactgcctaatcctagccttcagaaagctaaggcaatactttcaagcttacatagtgaaggtgttgactgaccaaccacttaggtaagttatattgaagccagaaacatcagggccctaactcaagtcggtagttaaaccaggtcagttcgagatcacctatcagcctcaaacaacaatcaaaggacaagcattagtagacttcattattgaatacactggccacgatgaatataatcccatgatatatgaagaccaggtcctcacccttgagactgtagctaggaggacactagaccttcttgaaaaatcgtatgtagatggctcctccaaccagcatggttctggtactgaattcatctcagttactctagagggatttcaaactcacagtgctttggatttgagttcaccgtaaccaacaacgaagtagagtatgaggcactcctagaaagattacagttagcactaccaatcaaagctgagtcactcgagatataccgtgattcatatctagttgttaatcagattcttagtgagtatcaagccaaatgatcaaacatgattgcaaacttaagcaaagataaagatatactagcccagcttaagcactactccatccaacaagtgtcgcgtgaacagatcaccaatgcagactcactacccaagctagctagcacaacatgttttaacattcttagtgtagttcccatcgaatacctcgccaaatggagtattaatgaatagtcagagcctatcttgatgattaacaacactccatcatggatgactccgattgcacaatatttaaaataaggtatttttccaactgactggaacgaagctaaaagattgatgagaaaagtagctcgcttcatcatcatggatggagtaatacacagaataagcttctcaatgccacttctgaggtgtgtcatgaaggaagaagtcgaactcttcatggtcgaggtacatgtgggcttttgtggcaaccatgctagaggcaaagcctctcaaaaaagatcttgagacaagggtacttttggctgataatgacgaaagaatcaatggactacgttagaaagagtgacaaatgctagaggttctccaaaatacccaaagctgccccaaatgaaatcaagagtatgcaaacaccatagccattttttgtctagggaatcgagctcataggttcactgcctaaagggaaaggcagagttcaatatgttatagtggctgtcaactacttcatcaaatgggccaaagcaaatcccttacccaccatcacatcaaagaaggttcttgattttgtggtcaatagcataatttgttgatttggactgtaatattctgagattagaaaataaattagcaaccctaattaaaatggattaactatgattgggtaattatattattatataaaattatttgagagttatcatttataaccccatttttgagttaggggcatttttgtaattttgacttgagacgggtaaaatcataattttgatgtttattgtgctaatggactatattattatataatatgtttatactgtcttactgtaggtaatttttgacaagttagaatggtatagtcacaaatgagtattttgactcgaactaggtttggggtccaaaattatgaataatgtgatatggcattcatctgtgatatatatgatgattttggaattatgtgtgtgattggagttgacttttatgcccttgaatgctatgtatgttaatttttggccctatgggtaagatggtcatttgaccttaacttagtatagatgatatatttgacttatttatgaaattttatgaaataaacctcatttttctggttttatagactcttaacacctctctactctctcttcttctccctttaaaaatttctttgattttgaggaagaattgttgcaaattgaagtggattttgttgttagattcttgagcttagcttggaagagtaattgaggtattgttttcatttttatatagttgtaatttctaaaattcccatcctagggtttgaatttgaatgatttacttcatggtgttcttgaaataattttatggtattaattccatggatgaaagttaaggttttgttgtggtcactttgtggtaatttgaattgatacatgaattctgatatttggtcaatatggaattgtgaattgagagcaggcaatgttaaactttgagcttggatttgagtttgtattttctaagcttttgatatagaaattatgtgagttttgatcttaatcttctgtgtattaagcatggtttatatggatatttttactatgttttgggtttagaaaccacctcttttgcatcaaaagtttgtatgaaaagtattgttaattgtggatgtgttttggtgcattttagaagtgaaaaatcttatttttctgggttctgaaccaagcaccgcaacctagttcatgcgagtcgcagcccctgactttttggcatttttgctccctacaaggggctaagagccgcgacctttggtgcaaggtcgcggccctctcgatacagtagaaccaaaatattttgtaaattgattttgccataactttttatttcgaactccattttggacgttctacatatcgttggaaatctcgtggagagctctatcgtttggtctagtatgtgagtcctaattttataaaaatattttatggaattggggattaactctattgtgtataaacccgggaattgtgactaggaatactaatacttggttaggatcacccgtggattgagattcctcctcatacattggaaacaaggtaagacagtgaattatacacatagagtatagcgcggtggtgcaattatatattgtgggattgttatagtgaaactgagagctagggttattgtaataccctagaattaagaaatggattagcaaaaccctaataagataattatgaataattgaggaattatattattatatagttcaatatatgagaatttatgtgattaattatacgtaaacaccctgttggtgagctaggggcattttagtaattatgacctgagaagggtaaattgatgaaattaatttaat

SEQ ID NO: 117214 - DNA, 5767 bp, Cannabis sativa
aaactaatataaatataccataatctttaagtaatttgcttctaattctgaaaaaatatgaaaaaaaattattaattttttatgtgacaaaagataatagaaataataaataatctaaaagggccattttgctacaaattttaaaatgaggatatttactaacacagtcctatgatttgggaccatttactaaatttccctatataaaatgcatatgtattttacataactaaaatttcggagggtgttaaactttataacttaaaatttattttattttttaaaaataaaaaatatatttttaaaaattaatgaaaggtgtttggctaaatttttatatatatgagttaaaaaaaattagaaaacatcaaaatataattttttatttaaaaaataattttttatttttttgtctaacatatttttttatacattatcttttcgagtctgcctgggccggggtttaaggtctgaggctggtgttgggatttgagcctaagtcggggtttggggtggcgggtctggggcttggccaggatgaggttggggtctgagtctaggtccgattcagagctgaggccaaggttgacttctgaactctgtgccagggtctggttgggcttgggttcttgtcacgacgtggaatattgaagtcttttctgagtaaaaaaaatctaaaaaatagtttttaaaaaatattagccaaacacatcttatattttaaaaactacaaaaattactttttgttctcatttttgaaaatataatttctctattttacctcaaactttacattaccaaaactcctctttctttcatttttaaaatatcttattcatttaaatatataatattagtatatatacatatccccatattataaaaagaactagagtgctaattacaactcttagtagtcaatttctgtgctcgaaaacaaatgctagaataattttttcaaaaaataaaataaaattcatagcttgtattcgttatagttacaatatcatcattgtagatttttgaaaagttttgaattgtttaagtgctgaaaacttgtttgaaatttcttgaacactcatggtacattggaatattaagaagtttgttgtccatattgtaaactattcaataaaaaaagattacaggcttcatattgtaactataatgaacatagccataaaaaaatagaagaaaaatatttcggcatgtatttttgagtgcaaaagttgactaagtggttgatgtggttgaaataggagtttgatgatatcacttttttaaaatgaaatttttctttctggaaaaagagttcaatttttgactttatattgtccatagacaattttaatcaattatcctttctcggattttttttttaaatcggtaggtttgcaatatattatgtatttctagatgaattccagttgatcgtacacatatatgcccctcaagtagttttaaaaaataaaactttgtaattacttgaacaaactttaattttattaataacaaaagtttacatcacagagaaaaatatagcatttacattataagtttactagtaatagggtcgcaaatcttacacattccagtagtattttattagcgagcagttaagtcgagccaatttgtaaaccctggttccaactattgcctcgatagcataaggaccttcctagtttgggttaaacactccagcagatgcatcttgtctatttgcaaacactcgtcttaacaccaaatctccaacattgaagagtcttttcttaactcttttattgaaaatccaaggaaaatttaaggagttcttggtttttttattgtttgtagaattcacatctgttggtcgcaatattaatttctaccggtagaatcgcttctgagccaaatgccaacgagaatggagtgtgccctgttgctgttttctctgtcgttctgtgagcccaaagtacttgtggtagttcatctacccatcctccttttgcaacatccaatttcttcttaatagtatcctttaagattttgttaacagcttctacttaaccatttgcttggggtcttgaaactgacgagaagctcttaataattttattcctttcatagaacttagtgcataatttgccatcaaactaagttccattgtcatatactattttaatgggtattccaaatctacaaattatgttattgacgacaaaattgagaactttcctacaagttatggaatgtagaggttcaacctcttccaatttgtgaagaagtcgactgctactactccgtacgtttctcttccttgccttgtgggtaatgccccaatcaagttgattccccatattgaaaatgggtacggtgaagtcatcattttgagttctgttagtggtacgcgaggtatatgtgaaattctttggcatttatcgcatctcttgacaaattcatgtgtgtcctgatttattgtttgccaatagtatccttggcggatgatcttctttgacaagctttaccaacccccatgatccccacaaaagcgtttgtgaatttctttgattaattcgcttccttctatggggagtacacattgtaggagaggcattgaataaccccttctgtataatttaccttctactattgtatagcgaggcactgaattcaagagtttgcgtgctttggtcttgtctgtaggaagttgtccgttgagtagatagttaattatgggtgtcatccatgtaggcgaggcatctatcatttcaacttcttccttttcaaatatacttggttcatttagaacttcaactgataccaaatttagtttatcaagctcattctgagaggccaattttgctaaggcatcgacatttaagttatgttctgttggaatttgttcaattttacagtaatcaaacctctctaagttcttctgaaccttttccaaatattttgccatctttaaacccttcgcctggtattcgcctagaacttggttcacaatcaattgcaagtcactatagcacaaaagattcttgactttcaaatcctcagccattcttaagccagctaacaaagcctcgtactcaggctcgttgtttgaagtgtcgaactggaatcttaaggcatagtgaaatttaaaattgtctagtgaaatcattatcactttggcacctgagcaattttcatttgatgctcaatccacgtataatttataagtatttgtatctcgctagattagtggattttcatttgaaactatcctttctattaggaaatcggccaaagcctggtccttgatggatgttctcgggtgataggttataacaaatttccccagttcgattgaccattttataaaccttccaaaagcatttggcttcgacaaaacttgctttaatggttgaacgattaatacctttatgggatgtgctaggaagtagggccttagtttgcgagatgcatgtatcagacatagggcaagtatttcaagaggaggatatcttgatttttcccctagtaaccttttaataacatagtaaataggttgctggtgctttccctcttctcacaccaatgctgcactttgcactttctgagacaaccaagtagaggtataaagtctctctagttattggtttagccaaaactgaggtgttgataaataattctttatgcctttaaaggcttccccgcactcacctgtccattcaaactttttgttccctcgcaacacattgaagaatggtaggcatttatcaactgattttgagatgaatctatttagtgctaccattcttcctgttaaggcttggacttccttcggctttgtaggcgatggcatctttattaaggcctttagttttttaggattttcttcaatgcccctcgcattcactatgaaacctagaaactttcccaaggagaccccaaaagaacactttttttggttgagtttcatgttatactttttgagtatttcgaagcactccgcgaggtctattgtatggtcttcacactttactgacttcaccaacatatcatcgacatatacttccatgtttctaccaattttcttcttgaacactccatttactagtcgctaatatgttgccccagtattcttcaaaccaaaaggcatgactttataacaataatgtcccatgttggttaacaaaacttgtatgctcttaataaaaacatgcattttgatctagttatatccacaatacgtgtccatgaatgtcatcagctcatgccctacagttgcatcaaccaactggtcgatccttggtaggggaaaataatcttttggacatgccttgtttaaatatgagaagtcaatacaagttttccaagtaccgtctggctttgggagaagaataggatttgatatccacgaggggtagaatgcctcgagtataaaatcattagttaataacttgtccacttcttctttgagtgccccctatctctcagaatccaagctagggtcgtctttttagtctttttgcttggtaattagggtcgatattcaattgatgacaaattactttagggtcaatccctaccatatctgaatggctccaggaaaattgatcctggttcgccttcaaaaactttattaactactattttagtttttcattgagatttttcccaataaacacacatctagtgggattgtgtgattctaaaacaacttcttccaattcttcaattggctttagctggtttttcttgtcttggattcgaggatccatatcctcttccttcttctcgctttcctctgttatgatcaccattaattgatggttggctcttctattttgaagctctatgcgataacattcgtgagccaatagctggtcacctcgtactacacctactcctagcggtgtttggaatttcaaggataagtgtttgattgaactgactgcccctagtccaatcaatgcagggtgacccatcaatacgttgtaaactgactgtagattcacatctaggaaatcttgcattaatgttgtagagaatggcagctcgcctatagttaatgggagttcaatgacgccttgactggtgacattatctccagtaaatccacataagtgtaccatgcaaggttttaactttgcattttgtagatccattttcttcaacgtatcatccttataaaggatgtttaccgaagaacttttccattatccaccaacactctttttatcctcttattagcgagttgaactataatcactagaggatcgatgtgtggatacctaacgtgctttgcgtcttcctccgataatacaattggaggttcgttagttttgactttctttgatggttctggagcaaacatcgattgctcattcttgatttcattcacatatctcttttgggcattactgctctctccagcaagatgcggtcctccagagataaccagtatatcctctccttccacatgaggaggttgtagcctttggtcagttgggttattgggtagatttggctggttttgttcatttccttcacgtcttacatattgttgaaaataacctcacaagataaggctctctatctcatctttcagctgtcgacattcttccattgtatgccctatgtccttatgaagttgacagaatttcgttgaatctcttttgtgtcccgcatgtctcattggctcaggcttaggaaatgcaaccctacgctcatttgcaagaaagatgttttcccaagtttcattaagctcggtataaacagtgtaaattggcacatactt

SEQ ID NO: 117215 - DNA, 1634 bp, Cannabis sativa
acctgagtataaacaagcatgccttagcaaaaaattggcggccttgttcgcaaatcgtttaacaaagacaagagaaacattccttaaatcatttaagagagaaatgcaatcagcaacaagtaaaccaaacggggaatacatagttactttgtttaaaacggcgttgacaagcacttgacaatcggactcaaccacaacatgtggaaaatcattgtttttcaaccaacttagaacttctttgaggccaattgcttcggccattataggatcaacataatactgttgtatcatagcagtagcataaagaacacagccctcatggtctctagccaaccacccaaacccaaccttatcagccgcaaaaatcgaagcatccacattgactttgattgtattcaagctaggaggttcccagtgcgagttgatgtctgcaccagcaggcagagcattatcaacaatcgaagattttgcacttttccattgatcaaagtaagctaaagcagattgcactacagctgctgcaaccggattcttattgctccaaaccacctcgttcctcgccttctaaacaacccagcaaatcacaaccacatttcccaaaaaagaagatgacaaagtgctgaataaactagcaaaccagtcggcaaaattcacaccatcagctatgacaaagctggtgtttaaatgatgccaacatagccgagcaaaagagcactcaacaagtaaatgctctacagattcatcattctgctgacaaacgggacacactacaggggcattaacatgtttcaccttcaaattaatccgagttggtagattattacgacaagcacgacataaaaatacagagacttttgctggtattttcaaattccacagcttcctccataacccagaattatctccaccagtccatcttccattcaacatttgaagccttttataagcactcttcacagtgtaatggcctgagttttcgaaagcccagtaccgagtatcaaattccatggatgaactaatcacaaccgccctaattaactctctgtcatgttctgaaaaaagattcaaaagaatatcctcatcccattgcctttcattcgggatcataagttgagaaactttggcatcaatcaaagcaggatgtgaagaggagacaaaaggattttctttatccatcaaccacggctggttccaaacatccaccaaagccccactagctatactccagtgaactcccgactgaatcaaagattggctctcaagaatgctccgccaaacaaaactcgggttatttccaatacaagctgataaaaaggaacctagagggtaatatcttgctttaaaacacgcccaaccaatgaagactcattatttaagaggcgccaaccttgcttatccagcatagcaagattgtgatcatgaaggcttctaaaacccatcccacccgaatctttatatggacaaccaatctgtcccaagattcccaactaatacccttcccatttcttgaagaagagtgccaccaactaaaacacagaattaactgatgattctgagattctgagattctgacatccactacgtaacaaatccctagctttcaacgttgagattcttggaacacgagaaccttg

SEQ ID NO: 117216 - DNA, 1601 bp, Cannabis sativa
  modified_base (1575)..(1575): a, c, t, g, unknown or other
actctttagtccaaattaatgagaatgagttggaccatttcaaccactattcaatggtaccacaactccaataaaataaataaataacaattatctatatatgttctctattataattaagttacttatattaagttgattttatatatgagataccaaaatgctcatatatataatatcttctttgcattattatttctgtaattgtttatggtttgctaaaaagacaagactaaaattgttagagaaaagagattaatagttaagtttttcaagtgctgcaactgtcccacatactttattgaaatggcatatgcactaaagagttattttgaagtatattataatatttatatatcccaattttggaattacaccaataattattttttaaaatattttgaatgaaatatatagtatcatttctcaactaactaaaatatccaatctgtggaaatatcaaccaaataagtcatcattattataagcattttagtctttcaaatatctacaaaaacatgattcatgattggtagaatatttcattttttagtataaacatattcataaataaattagcaaaagctccatcaaaatagagcacactaagagcactcacatgagtttttttaactctattttttgatgtatgtcattttttctatattctcttcattttatttatttcacaacaaacttttacattacatcatctatcagtttctcgattcctttctttatgttctatcttttaatatattttattcattttaaatatataatattaatatgtacgtacacatacctcacacatcaaaaataatttaattataaaaaataaactaattaataaaataagtttagaacaataaataattttattccacatgttagtagagcagcattagttattaccctaaaaatttatgtaaaatagatctattgtatgctatatttttgataaattttttttatcaaattaaaatatataagatcaatattaaattacactaatagtaatataattgagtggcaattgtgaactattatttagaatattcaaagcatgtttattaatatattatttaattaaattctattttatgcatctttacatataatttaactataagtgagatgtagttgatcacaacataaaaatgtagttgtggctaaattaaagtatatataacatttaattaggccgcctaagatattatttagtcacaatttttctaatacaatatagtgggaaattggatgcagcaaaaattatattattatatataaattgcaaaaaaattgtatgatcttattattaatgactaactttttgatcaaatgtattctaattttattatcatgactttataaaaataataattacaatttcttggtcataaatatattgtgttctaagttctaacttaaggtgaagttcctttttataattgcatgcttatttcattttctttttttttacacatcttttgccaaaaaaaaaatatataataatattctatcatataaaaacttccaataaacattaaaaaaatatatatatatctattctanataaagtgtgtctatataaccgaatt

SEQ ID NO: 117217 - DNA, 4440 bp, Cannabis sativa
ctaaaatccctacaacccgtgatcctgaatatatcatagggattaattggttctaaatccctgctcacgtctaaatgacttgccctatttgtcatggtcccatactactcggctatcccatagtacgactcagtacaattaatttggacgtggaacctgggataccaactatcaaacctatctgtaatatgatctatgaggaggggattccaggtgtaaaagttatagcggctatctcgaaatgaaactacagtattacgctcggccctaagcactatggatgaccaaccaaattgattacctcaggatgctccttcttcggcttcccgaggggtagtgctctggaggtattgtgcccgagccacgcgatcttgggctttctcctcgtctgggacaggaacctcctgccaagaagagtacttgggatatttataatcacaagtaaactccttgtcatttaggagatccacagacctcaggttgacctcgctcagaagaaagtcacatgacctaagaccgtatgggagagtcaacaagagcctgcgtcgctcggccatctcaggagtaggggcaggtcttttcgagacagctgtcaaaaacaaagcaaaattacaatcagctaaacccgaataaaagacatggactaatttaaccaagtcttgtacaaataatcacttacgtataatgcgaaaagtggttgtgacgatgggggagagaccggtcgtccagaaaaattcatccttgaaggaagttttatttggcaaatccacaatgatcttgcaatcgcctgtgtgagtctcaagatagtaaaccccctgctgcaatcttcctcgctggaacagccttaacagagtagagatactctatttccaagggagtggggcactcccaattcaagattttgtataaaaccctcaaacttgcgaggattctatatgaaatgggattcagttggaatggggcaagcccgaggtggtttaggaagtccttgaaatagtctcgcaaggggattattgcttcagccctgatgtgttcgaggccttaaaacaatattcaagaagtttaacaaaacatttaccttgaggcttgggcagagactcgtactgataacgtattatgaaataatataaaatagataagaagaaaagaggaagaagatgaagagaaaaagagaaactgaatgaaaatttctcaattatctattttaatggggtgaaccctatttatacaaaaacatgactaaaagaataatggaaaactaaatcaatgtaataaaaaaaatacaatcaagcattaatggcaataattaatttagtgatttgaacatctataaataatatttcataacataaatatatttatcacaaatttttctattatagtaaaaggttgaggggagagaataggtaagttggcgccacatattacttctatctttctcaatttgtattttattactttatgttaaaataaagatgtatttaccctttaactttatccaaaaacctttcactaagagatataatgattgtttaatatttcaaaactttctaaccaaaagtacaaaggaaatgaacgcttgttatgggtaattataggcattcaaaagtaacataagtgagaaagtaaatccactaattgttcaattttttttcaaaaaaaaaaaattgttcttaattaaatgctgagatgcatacgttatgggagctatggttcaaagtattcttgtagacattgaatttggaaaagcaatattaattccaaatcataaagcaaaaactctctaggaattgacccttcagtattaccactttgttttcttaactattacgggatgttacccaagtagtaaacctcttaacttgtaattggatcatcacctaatcatctaaaaaaatacataaatattcaataataacacaagaaaaaattgtttcgattaaaataattcaccctcaatggataaaaagttaattgccttgtctattgaagaacatttagaaagaaacaaaaactggaatctaaagagactaagtaacaaaattttaggcagcggcaccagctcccttccccttcttacgctggagcttcttcatgtagaattccagctctttgccctccaatatatatctgccacaaaaatttcggagcattattcatctatacaatgataaatgaagatatagaccatgaaaactaaaaaataaaagattaaaacaaaggccacttacccatcacaacgaccacactgaccaggtcgcgatgaaatgcacgccataagacgaccgccactgaattgctcttcaatatgggcatcaagaactcgttcttgctgacgcttctccagctttctagccacatggttgctcttctttacctcctcggcgggagcagcagttgcagctgtggcagcttcaccatcctagtaaacccaacgaattcaccacattcagtaaataaaaaaaaataaaaaagccaggaataagaacaatgaagtacccttattcaaacatccactaacccctccatcattgattacaggttactacatactctaaaactcagttcattaactacatataactaacacataacagcaataaaagatattatattgggcaaataaccatgagaaattaagcaatggctagctagcttacctctccttctttcttggcagagacaacggtcttcttcttacgtccaatatcaactccatagtgctgaagataccactgtttgaaaggagcagcatcaacctgaataatggcacctttaactaaggtttgagtacggaccaattcattgttagatgcattgtagaccacatcaagaagacgagtcttcctggtcacagcctcactaccccatgagaaatttccagtatcaagcctcaaagctctccacttcacattcccacctcgaaccctaattctcctaactgttttgttgcttgacaacttggtgtttgcaggttgccttccgagctcataccttcatcacacccaaaaaagaaaaaaattaacaaccaaaataaaattaaataagaaataaaacatcactgtttgtgagaggaaaaataagattttattactttctcttcttcctccaagccttcttcttgcctccagtggcacgcctcttgtgcatggaatcacgagaaatacctatgaaatcatacagaattcgagtttagaaaaagcttaattgaaaacaaatatggtgaagatagatagaacaaaattaattaagcagtacccatctggaaaatcaaatcaaataatcaaaaaaaaagaaaaattgagtgaactgtagatagattgagggaggagaagaggtacccatcttggcgcagtgtggattctactatgttccaagggctgcgagtctcagcacagaaaggggctagggtttgaaaaagaggagtaaatgaaggagatgttaggtttttgtgaaaaccctagtgacggaatgactgttttacccttgttaattatgtgaagagacaatggcataatagtcagtttttggatgggcttacggtgtacctgaccatgctatcctctgatgggccataccagcgtgatcttttaaaagggataaaacatgaaatgaaatttagatggtatactaacttttgttatttttttacaaaaatattatcaggcagtattttttactttttaaatgtgttttttatataagtttcatattgtagtatactgttttaagtttttactattgttttactggtattttttagttgttttattattgttttgagttgtttttacttgtgttttactagtattttataaaagtgtgatagtatttttgtaaaaattaatccaaattctaatatttttgtaagtttctctaaaatcatcataaaaaaaaattacacataatatttttaatttttttttttgttatgtcataatttttatttttatactgtatttttatttattttaatactactatatactgacttcttttttaatgagaatcaaattatatttgctatgtctaaacagtatgaaatatatataattactagtatgggcgcacatgcatttattttgatggtgataataaaatgtgagtcaaatatatttttatatttgtgatgaggaaaaaaaaatgtatgttattttattgaaattttgtaagaaagcacataaattgttagttataatttgtatatacatatataaattatgtttagagagaatacataaatttaagatcattagtagaaaatttatttataaacatagaagtcagtgacttcatcagtctgtatttacattgggtgttatatgtcgtgatcagggtgggacagccggggcctcggccccaggccccataattttggaggccccgaaaaaattaaaattgatataattacacatataaaaaatatataatatataaata

SEQ ID NO: 117218 - DNA, 3606 bp, Cannabis sativa
  modified_base (27)..(35): a, c, t, g, unknown or other
  modified_base (80)..(93): a, c, t, g, unknown or other
  modified_base (3578)..(3581): a, c, t, g, unknown or other
tatacattaaacaatcatgaaataaannnnnnnnnccatgcaacataaaatgttatattagtaaatctgattatattgannnnnnnnnnnnnnagggcacaaaacccaacaattgtttgacccccaaactaagttaacaaagagattaaaagttgagcaatgtctatggtttgaagttttggctattagaaccaaaaacttctacaaaacctaagataacaacccttaaaattgtccacaaactaagtaaagcggaattaaaacttagcagcaagaagaaaacaaataaagaaataaagcctatatctattttaatgtcctgtggaccagggataataaaatgtctccatgaatgataaaggcccatgccacaaaacttgttaaaatagtctcttacggtattagaaatagccccgtgaaccatgcatagaaaaaactgttgggattttatgccataaataaaacccatttcaatataatcttatttactatcaatagaagattagaaataatttacgtttacatgtagttttttcatgattactgttttaatatataatttctattaaatcctgagtatatgtaatatcatcacagtgatatcatcacagtggaaagtaattgtaattatatgcttcaaaccatttagtcccatgatttattagtgcactggatttacactgagatgataattaatgaaaaagtttacttatacagtaacatgtggaatgtcctttctagggcattagcaaagtatactagtctcaaatgtattggctatacatcgaactggaccgatattgatagtggaaaaaatatcataaacttactgtaatatctttctaagtcagtgtcatttagttgaacttagatcaaagatcttaatcttgaaatgattacgttttggtagggttgagcattcagcccgctgagctgaccaaacttgcaaacccaacccgcgaatgggtcgatgcatggtctctttgtgtgggccaaattgctcttgggctgaaaattgtataacccgttacatatgggttgatcacgggttggagggtttctaacccaaagaacccaacccaggccgagcaagcacaattagattaaaaaaaatatattttttaatatacattccgttttaacaatcatttcaaaccctaataaccaatactctcctctttcaaaccctagcagggagtagccacactatttttttgaaagaaaaaaaaaccctatcataagataatctcccgcccaacccaggtctcctagtcccacccgcgctgccccatgttcttccctctggcttagattcctcctccatgctcccctagatcgattccctcctccctgctctttcttagaacccaggcgccaggcgacaaatactgccaccttcgagactttccttgttcagtttgaccaccaatccatcagattcatcaagttgtaacacctctgccaatttagttacaaattccaagtccatatttgactacacccctacccactctcacaaacccacaaccacattgtcccccacaaggtcacaccttcatgccccaaaacaaactcaaaaaaaccaaacatagaaacaccacattgtcctccacctcaatcaaatcattctttcccctgccttatgcaccaacacccaccgtccccaatcacacctaaacaaccaccctatagccagtaccgaacccaatcacactataaccaaccaactgccacattgttatggggtattaaggtgtctaacacttctataaaatagcattttataactaattagtggttttcaatcatctttattaaattaaaataaatggaacccgatattaaattataccaatagtacatctcataaatttactaggcaccataaatatcttttagagtaaattacgaaaaaggtacctaagttttatccttagtagcagataaatatccaagttttatttttggcggtaaaaataccttcgatcattagtgtggaacttccattggtacctctccgttttttgtcttataatgtgccaaatagtgtgccatgtcaataaaataaatgccacatcactcccaccacttaaaactaacccctactacatcatacatcctaaaacatataataataccctataattaattaaaccctcataaaatcaaaataaaaacacttgcatttatatcgataataacaattcaaattatataaaaaaaataacttttaattaaattttatgaaaatgtaattcagggaacgacaaataaaacaattaaattaaccaaattttacgattaaattaaaaaccaaatataacaaaggttttgaaatgacaacatttaccatttttgcaagaaaacccaaactttgttgagagagttcagagtaaacttagggttcctctaaggttgaggacaatcaatcttagcttcaaggttgaagacgatcaaccttaggttgaagcttaaagtgggacaatcaaaggttgatgagagggtattgcttttttcagggacgatgggggtgatcccccagactacggtatgtgcttttttttttgtaatttcttttgtcagttttgaatatggaattcttgggttctttcctaattttagtatttccgtgtgatttagggtttagaaaatgatggggattacaaagtgtgtgtattctgttctaaaaaggtgtttttcagagtattattcaattaatagtgatgagattgtttttttctattccatttgacatgaagaaatggtattttttagggttgagttatgatacgagcaaatggttggtgggaataagaataggaatcgttaaagcttatggttcgagttttgtgttgctatttttgcaactttatgcatgtccaactactgaaagtggggtctatagttgactcaaaaaaattacttaattttttgtttggaatgtttgagagatgctaatttgttgcttcccatgtgatctgtctgggttttttgttgaaattgaattttacaggtgaaaatttagactatttggcacttgcaatccaccatgggggcatgttctcacaccctttggtaataagagatatgagggttgacgggttaattactttgatagatttgataaggagaaaatgaagagggcattcaaagaatgttttgactatctctagggtacaaactgcattttggtatgttgtataaggctaaagatagagctctgaaatatggtaccatgattctgggagataaagatgtccaggccatcctacaccaaatgaaaaggaggaagtggacaaagatggatgtttatttggtgatgcctgaaatgacactagaattggaatggaaaaagacccaactactgtgcctcatgttccagagctaccaacaaatcttaaacactgggtgattgaggaatttccattaaatgctgaagtggtggctgatgtagtgggcatatcagtacccataggcaaaggaaaagacataaaagatgttggaatttgttttaccaatatctagatttactacgatgtatgttatttaacatcctaaatatgaatctctaaaacaannnnaataaacacatataaagttttagaa

SEQ ID NO: 117219 - DNA, 3002 bp, Cannabis sativa
  modified_base (2404)..(2411): a, c, t, g, unknown or other
aaagaaaaaaaaaaaaaaaagctatcactaatgtgacaatacaaaatcacatcatgcatttattacacttaaaaaataataaaaattgtttaataaatgctcaagtcaaaacactacacaatagttacaataataataaaaaaaaatattaccgtataaccagtggcggaactagaagacgaaataagaaggggcaagtaaaatgtatgttcacctaatttttttagtgtgtagtattttataaatcaatataagacgttaattagctttatacaacatatataaaataatgagaaataataaaggacactttatagtgccaagtactataaaaagtaacatatcgttattagtgtaaaataatatcgagccctaaatattttgatttaataaataatataaaaaaccgctaaccacttataaagtgtcatattaatatggtattagatattataaggatacatatataaaaacacatataaatatatatcatacaaaactactcttcaaaaataaattatattaattatttttttttgtcactttttaccataaaatagataactaatttaaatgggctattggtttgggcttctttttcaattttaacttcacaatttattattaggcttagtaataagagaattatcatattttcctactaagtaaaatctaattatcctaatttaatttatatattatgtatatttttttttctttttctataaagttaggggagaccatggccactccatagatacaagtagttccgccactacgtgtaacagtaaaaacgaaagaaaatgagaaaaaatagtatggggtgtaaatttctcattttctttgggataattagataaggtactattttttgtattttttttatttttgtgtatttgtgaaataatctcgttttcttttttacagttttttagataaaattttacaaaaagtatggcttcatttttaacgaattatgagtaatttgcggcatagatacctaagtttaatttttgacggtaataatatttaatgcgacggtgactttttcggtgacgaattatgacatttttttgtgactttttcagcgattgtgacttttccagtgacttttccgacgccagtgacttttctgatgccggtgactttcccggcaccagtgacttttccgacgattttttctgcaaaacttattattgtttacaaatatgggctttctattttttttttacaaaaatatggcataaaaaaatccatataaatgtaaaaaaacaagaaaacccataaccccttagcgctatttatttatgccataaaaaagtaaactcttacaattttctcatatatagtgtaatttttactattaaaattatattgttatctagttaatttatgtttttttaattatttattgcccattatgttatataacctattttgaaattataaaattttatcatttatattattaatgtaactatttatttattttctaaaaaataaattgttattttagctatcactaactcaaaaagaaaaaaaaaagagttgaaagtatgaagttataacaaacaaattttatgaaaaaaaaataacatagtaatacaaaaagataattaagttgttaaaattaagtaaaaaaaacttcgtaatacaaaaacaagccgaagagttgatattgttttacttattgcaacgagattggtgtcttattttttttatgttgttttgtagctgtctttttgttgtttcataattgtttttatgttgttgttttggtgttttataattattttttagttgctttagttgttttttttgttttactgaaacataatatttttataattttgaaactttagacagtatttttggaaacttaagacaataaaagtgtaaaaaaaaaaagtatgaaagtaaaaatgtaaaaataacaaaaaaagataggtatatatttttgtaaaaacctctaaattttatgggttttcataaaaagaaaaacacatttctttggatctgatgggcccttaaatttatccaaaccaagagttattgggctgaaacctaagcaagaaaaattgaagcaatttattttttggtaataagtttttctgttttttgaacttgatttttaatgagcacatatatgatatttattttaaaacaaacaaatatatttactgtctttcttttttttggctaaactagagtatatttactgtcattctcctaaatctcctcctttttttatttatttcttcttgcatagaatcattttctaatttgaaagctaaaaacaaggcatgtgtgaagtggaagaaacatgaaacatagtacattaatgcactaacctatcttgtttgaaaaaattaaatatgtttgtgtttctctctctctctctctnnnnnnnnatatatatatatttatataatgaatatagggtaaggcaagtaagtgcatcctaggttcttttcctatccatacaagccttataactcattttggctccaccataatttctttatgggaaaaaaagtaaccttaggcactatcttcacatgctctgccaaaattgataggtcaattcaaatttatatcttttcatctccaacttttttaaaatatatatatatatatatttttatatatctcatagtgggttcaaaagtaatcgaagtttctagcttaatttgatatttatttcattgttagttttcaaatattttaggctgaagttttgataataagtatttttggttgaagttttgatgataaaatatttttggttggttattaggtaattttgacataaagttttgaagcttggctctaagatgtataactaaaacaaatatggaaaaatataaatggttgatacatgaagatgagtaatttgtggctaaatatttaagtttaatttttagttgtaaataaatacttaaatttaatttttggtggtaataatacttaagttataattttagaacttctgtatgtacctg

SEQ ID NO: 117220 - DNA, 3370 bp, Cannabis sativa
agggtttgtttgcaatcaaaattgacttggtgaaagcttatgacaagctcagttggtcgtttattgaccacgttcttagcacctttaaagtcccaaataaattatgctactgggtgcgccagtgtatttaaacaacaacttttaaattgcaccttaattgtggaaaagtgtgcagtttaaatccggaatgtgggctaagacacggggatcctctttctccgtatctttttatctgggtctcagaaatactttctcgcctcctagagtgagccttggagtcgggtagcataaggggtatcaagctgagtagaaacggcccgagactctatcacctcttctttgctgatgatctcatccttgtaggaagggcaaccatggctgaggctaagggcttttggcaatgtttggagaagttctgtgagtggtcaggataacgtgtcaataagcttaagacgtctattttcttcagcaagaacaccagtgatggcatgagaagagggatcatgcatgaacttggtataaatatggctgattccaacatcaattatctaggcctcccgttgtttagatccaggcagaaaaatgctgatttcaatttcattgttgagaaccttgtcttgaagcttcatgggtagaaactgaaatccctatctacggccgggcgggctacgttaatcaaattagtggggatggctttaccgatttacacgatgcaaacaactaggctttctaagaagctggcctcaaaaattgatggtatgtttagagacttctggtggggttgtgaccaggaaaacatgggtatttgcctgaaggcatgggaccgtctttgccttccaaagtctaggggaggcctgggtttccgtaaaactttggaaatgaactaggcactcctagcgaagtggggatgggatctcctaaatgagaagcaatcgctttgctgtaatgtgttgaaagccaaatactttaaaggaaaacctttcctagagggatcttataacggatctgattcttggttctagaagaatgtggtgaaatccagagacttattactgagaggagcgtgcaatcttatcactgacgggaacgatgcaaatgtctggttagaaccttgggtgctgcttagcaaggatttcttcgctaaacctattggttcgacctctgggagtgtgacaaaagtcgctgagcttcttacgaaggatggggattgggatatacctaaactccagactcattttgaatccggaactgttcgcgacataatcaaaggaggtaaaccttggggagtaggaggagacaggtgggtgtggacaaaggagccaaatggccaattctcaaccaaatcagcttacctagttttggctttggaaagagttctgatattgttgttgcgccaggacgttggaacaaactttggagttccaaaatcctagagcagcataaggtcctgtggtggagcatcctttcaaatgccctccctattaggggactcctggcaaaaagaatcaacatagacgaactttcttgccccctgtgtggggcagctgaggagtccatggagaacttgttcctccattgtgattttgtgtaccatttgtggagagcttccccgtggggaatctttccggtccccgactctggaggcagagtctgggattgggtaacatttatttggaacctgaagacgaaaggggtggacacggacaagctatttctttatgcctcgatcattgtggatactatatggagaacccaaaatgataaagttcataactattattcgagtaacattaatactgctattgactctatttctaattgttttacagattatgctgcctgcttgctttccctgacagtagatgtgtttcctccaggttggtcgacccctcctgaagactggatcaaaattaactatgatgttaaggttggtggtgagtacgtgtgcattgctgccttggctagagatcattcagggacggttttgtggggtgtggccaacaatctcaacttcacagatcctttgattggggaggcggtggcgtgccagcttaccatggaaattgctgctaccagggagcatgaatttatcataattgagagtgattcagaagtggttataaatgtaattaaaggtgttcaatccaattggaacattgttaattatgtgtatgcttgtaatcaactctctaagaagtttttatcttgtaatttttcttttatctctagaagttgtaactttgcggctcacaatgtcgctagatgggtttatgctcaaactatcacaggtattgtggaaccctcggctattccgagctctatcctatgcaatgaccgagaggtctaattttataatattaatcaacgtttttatttcaaaaaaaaaaaatcaatctaagaacatactaagctaactcataagccgcaacttaaaattgtgattatcataggaaaaaattctcttaaaatttgataataaaactatttaatatcataaaagataacaaacttaactctccatcgagatgctttatagtcttagaccaataatatttcacttttactctctatggagatgctttatagtcttagaccaataatgtctcacttttgcctcccatggaaatgttttatagtcttagaccatattcaatagatagtaaaatatgtgtaccaaatttaactaaaaaatgaatttggattatatttggtcaaacttttataattatgctgctattttatggtgtaaattacctttaaaaatcaacaaaaatatttaatttttattaaaagtatatttaaaattagggaaatttgcggcataaatatctattttgtttaatttgttgctattaaataccaaactctaaaaatggcggcaaaagtactcaaattctcaaattctattattttcgttagtacttattttaacagttctgttaagtcctccaagaatggcacgtggccatttccaattggtatattattactaaaataattttaaaatgaaaaataaataaaataaaatattttttttctttcttctctctcttctccgtctcttcaattttctccttctcgacttccctctcacccaacatctgaccagcccagggctctctcaggccaccgacagcccaaacggaggccacttccagcttttccgactcccaaatgtcccaaccccgagcctcaccctctcgatcacctcagtcggcgtccatgggattcacctgtcgatcgaccagatcaccacaagggtttttggaaactattcatagtgatcatgataataccaaatcaagattcaaacatttgcatctttccacaaacagtattatcaatcccataactaccaaaccccaaaact

SEQ ID NO: 117221 - DNA, 2093 bp, Cannabis sativa
  modified_base (2044)..(2047): a, c, t, g, unknown or other
tcaaaagcttatcccttttcaatggaagatgtgataaatcaagattgtgatgcccctgacagggcagaccgcggaggtcgaagccttggagaaacggctggccttcaagctggggcgtgaggccgcaccttttgttgcatagctcttagaccaagtggctgggagcgcctctaaattgcccaccgagacctgggcatcttctagttgcacggatgcttttatgctggcccactctgcaaagcggcatgccattgggtaaggcttcgagatgtgtccctttatctttccttctgtttgcgtctatttgccctgtcccctgttctggcatttcaaccttctaacttggcctatttttgataggcatccatgttggctgaaagggctaccaaggaagtgggcacgctggtgacagtgttggaacaggtcagggtggcaaatcgtgacctatgcgccgccaacgaggctctttgggccgagcttacaggtgccaagttttagattgggggcctgcagcaggccaaccagtatttggaggaggaaagtgcctgtcaagcctgcttcatccagagtatgaaggccgttcacgacctttatacagagactgtggggcaattatccgacgcaagtttatcctctccgtcaggtggcgtccaactgtgaacttccggcagaccctttttattttatttgtttttttttttgtatatatctcctttttaatcacacttttctatccgcggagacaattaatatttttccctagccgtggggggattttagtagtgaaataggatctttctttttgttgttcctttcttggagatttgttgggatagactttctaggggctggttgcattactgaagcacctagttccaacgaccagtgttttaacctcttccctttagtcttaattatctcttggtcaattcaggagttgctcttcgatttgaccctttctttccctgtgccatgatgcttttcgattggccacccagaaggttgtttgtttggctagaagatggcccctctccgtgaaacaaggttcttcgtgatttctcacatcctcttcggggtctagttccttcacaaggtcaagtcccgggagtgatttctgcaactaccttagacttagatattttccttactttggtccctgtcagcctttcattccaacctattgtgtaattcggtgggctaagcttacgtgaagtccgtggagacgtgcacgaagggattcgggcgtgtcttttctttttcaaaagttttggctgaacgtgcttcttatctctgggttcacttcttgagtttagcttttaaggaagaactcaagtgtatttctctaagggaggctttggttgagaacatttccttttttgttgcacgtatacttttgggctggatgactttggcaaatggatgtaagatgttgtagccataagcaattggatatatcataccccccaaatgagctgggaatttcggacttaaattctcgatcatttgctcagagtctgacttgtgtctctatttcagaggaggagagttgagtgtagttttgccttgctttaggaggtatattgtccttctgagggagtgcacaaccacttttaggcttccaggaggagaaaacatggggttctgggcaagaataaggttgtatgtcccaacaatatcttcatggcgtaaaccccataagggagattctaggcttctcgtggcataggaggccgttggtttcctggagggaaaactgggcctgcacccccatgcaaacgatcgttcttatgcaggggtttgtaagcaaaagtcatgctagaatcccatagcagcaaactgttggcttttcactaagaaagacgaaaagtgtgcaaggagttcaaacattaaatttgcttgtaaacaccaaagggtacaatatcattgggtttgtgagagtatggtagactttaagcattctttccaattcaggaaggagggttgaagacgtaccgaccccagtgatctttctcgcacgaaagacaacgtgcatgcgagagtcatnnnnaatttttatgtaacaagctttggcttctgagaaggaaggctgaagt

SEQ ID NO: 117222 - DNA, 1997 bp, Cannabis sativa
agggcataaaacccaatagaaaggaccctattaaattcaacaaaaggtgggtaacgacacttaccaactaaagagaatggatggatcagaaattctacatgcttggaatgcagaccacctacgtcgttattatctaagaaatgggggtgtccgggactatatgtctctttgggtgcattgtaaatttttgtaattttctcttcttaatgtacgcctatgggcataataaaatgaaaataaaagaaacttacaaagaaaaatttcatttttgtctcgggcctcaagctaaaaacaagtgatcaggagtttggagacgtcccaaattcccagctcaatcaggggtagtgtacttagctatgtgccctaaaaaatgtacaatgcccacttatcattttaattatgtttgtttaaatttttgttatgagaaggaaaatatcgcctaaagtcctatgtattttcaaccttttttcttataggaaatattgcctgaatactgttgcatttttagcctttttcccaaaactcttgctttaatttacaatcttatgaaaaagtgggagtaaaaagcttttcttggaatctcttacattttcagctacttccttaccacattttagaaagaagtaaatttgttatgcaacaagtcaactttgttattttaaattattaaagagaaaatactacctaaatctcaaagcattttgagcctaattttttctgtaaaaaatatttcctgaacccatcgcacttttagccccttttccttatcaattttaagcaacaaaccttgctgcatgaacaaagttggaattatatttcatgtaagagataaagatatgcctggaacagggaagcttagccttccgtaagaaagccactttattagtatgcgcaaatttaatatcatgctgaaatagttaatttaaaaaagtacgaaacggaattgagctcctcgatcctttggtgttttgggaacaagcttaaaacccttctatgctacctaaaaataaattggctaaagtttatacgcaccatgataaggtactaaaacattcaaaatgttgacgtccagaagtgggacttgctccctgagagtttctaaagctcgactggtgacttagaactggtctgagaaaaggatataaggtctaaagttctggccgttggaaccaaaagccctaagcatcttaaagtgacctatccaatggcccaataaacaggaaaaagacaaaggataacatctcataaaagtaaaagtaggctaaaagtgtcttaagctattacatgaagccttgcagttaaggcataatcaaatttcctctacaaaagaaaagaggatgccaaggacccccatagataaattaaaataacattagaaaggagcaaaaagatgaaggaagacataattaatgctgagcgggatcttgagtgggtccataggtggatcttggctaggtggaacatcagtctttgaataaagctccacaacctctgcaggatggtctcccccaaattccttgtcagacttatcaaagtcaacaccataagtgtcaaagtaagtgtcagcttccatggctgtcaccttacttgtatattcctgctcttcatcctcgagaaacctcaaaattatggggtctttcttccaaaacaggtgaagagaggccacgaggccaatctccaaagacttaatacaaattttctctgcatgagctttcacttcaacttgtaccttctttgtggcctcaacatcattctttgtaagttgagaagaaacaaaattcatcctagccatagcccccatggttactatagccttagcaccaatgcggtccaaaatttagcttcttccctcaactgcttttcagcatcaaagtggagtttccgtatattcctttcggcatgagctctttgcactctgacgtggcatcacacgatggtgacacatggagtcaactttgagtatctgctcggagggtatagtccgaacaggatgcctc

SEQ ID NO: 117223 - DNA, 1673 bp, Cannabis sativa
tcccacttgaccttccccaagcgatgtggaattgcacagcttacccggtatttctccttacggatcacgggactactgactgtcacacccaactcaaccttttatacagcataaacacttgtaaactgacttaaaattcagctctaaattcaattaaacaacccttgaccatctcttaacttccaagtaaaatgaacaccaaaaaccaattcaagactatcatgacttcatcacactaatcacatgcaattcagctcaaaatcaaactcttttcaaagattaaatcaaaaaaaagaaaaaaaaataaaactacctcaaataatccttccaagcccaaacacaaatccacacttattttcctcttcaattccaccaagttctctagaattcaaggttcaagcaacaaaattatgtagagagagaaggggtcaagcttcaagaaaccaaaaaaaaaatttgattcctcatttttttcaaaaataaactaaatatcccattttgctaattttgtgttcaaatgactattttgcctctaaggccataaattatcatatttcacatataagggcagtttaatcatttcacataattgattacataataatataatctctcatttatatttaatcaatttaattagagctactagtccttgtagtgatctcaggatattacaatgatcacatcagtctataagacttgaaccagtatatatatcttgatgttaattttattgttttattgtttttgttttttaatactctgttcattcctgttttaatctatgattattgtgtgtgaattattaatcttgtcattactaattgtttgttgattaattttgagttgatttaattttacactttaattataatcatataattaaatattcaatatttaacgactataattgaattagattgatttatgcaaattttaaatttcaaccttcttcttatgtgatacatgtcatgatttgttttaaaaataaaagaagaataaattaccaaaatataattagtggagagtgatcatgaatcatgattattaataatcaaccaccatagtcattgtgtaatttgtgttatacttctccttataaacagaaagtcccaaattcaaatattataaagaaaatgccattgtcaacatcttttactttagaagtagaaaatggagtgaaaagacttaagtgaaaattctcttaaatatttttgttatctgtatctttgagaagtttgaattatcttgagcttataataatcatacaatatgaaaaataacttacatgatgtcaaactcaaagctcttgttcacacaccaatcacaggctcttaacttcacatttttttttttctattgagaaaattatattaggaaacaccaccaaataacaaatagcgggaagctctaagaaactgttgttaagatttataaaatactcaaaaaataaatatattatagatctaaaaatatttctaaaagtgttttaatatagaaaactctaaatcatatttttatagaacctttgctaaattaaagaagaaaaagatgacaaaaaatgagcggaagcactaagggccagtttggcacagctgtactgtaggaaaaagcagttgtagctgtgctctgagaaaaaacagctgtagcagaactgtggaaaaaaactgagc

SEQ ID NO: 117224 - DNA, 1531 bp, Cannabis sativa
gttgaatactcgcacttgttcttacacattaaattcttcttgttattaacaatacaatataatttggtgttacgaaattcactcgacaacacaaccaccaatattataacaactcaaaatctgcagttgtctacaccagttatacatcctcatgcaggcatgttcacaactccaacagtatacggaccaggtgcttctggacaaccagctgcacaagctagtttctttaacttcgaagtggcacaaattagatacagtgctactcccggatagaaaaactaacaagtgaaagttccaaatcaaacatgagtcattcttgaaacaagagaggatccaaagctttaagtcaaaatgaatcctcgaagaaagagaaaactcaagagtccaaatactctgagtataccagcaaggtcaatactcatgagagtgtgtataaagctacttgtaatatggtccattacaaaaagcctccacccatgtacaagggtggaagacacaaaaaggacccgagcaaaaggtgtgaataccacggtgatattgggcacacagcaaatgaatgtgtttacttgaaggatgaaatcaaaggatgagttcgggatgaccatatatccaattgggtgaggatacctattatctatcccagaaaaggagtagcacatggacagttttttattcctaggtaacccagaatcgtaaaccctccttagggaataggtactctgcaagtgtaacaccctgaaccgtaagggcgccacatgtgtgctcttattaattagtttataataataaactaaatatttaagaaatgtgtggtttaattaaaacttttagtaaaattatttaaatcataacctaacttttcattcaaaatactactggattcagggatccccttaattataaactttttacaaaatactacaaagcagtttattacaaaatgctgtcccattttcaaaatacaacaaaagatggatcctatccactgaaagccaaaacaaggcagctgatatatacatttagatcagacgctttttgaaggtggtctcaaattgttttgtctaaatttcctaaataacttggtcctatataagtcactttgtttgtagtgacttatattcagacttttatatcttcgattagacaattagtttattgactagaaatttttttgcgtcgatgattatcatagtatgattcatatcactctaaaataaaattcattccactcattttctattttattaccatttttatgcttattcttatactttcattctttccaaccaaacgctacctaaatgtataaaaatgaaaataaaatgaaaggttattttgctaattttaatatgttggatgatttcaaacaaaaaagaatatatatgtaggatggttatttacaaatggctaattaagatttttatccctcgaacttttacatgtaccaaatcatactctctgaactactgcgattgttagatttaaagacttttgtttaggggtgagcaaaaaatccaagaaatcgaccaaa

SEQ ID NO: 117225 - DNA, 4347 bp, Cannabis sativa
ttgcaatttaggttgcagcgctggcgctagtttcaataggagtttctatgcctaattccgtaaaaatgcaaaaaaaaaaaaaactgttttgaagtgtaaaaatagaaaagcccctaaaaaaagtcaaagcttgcctagaaaacggtcaacatgtcgagtttttattagtagaactacacgtcgttttgtgaaggccccctcactaggcaaaaacaaaaagtagaaataaagaatttacagctcgactagaaaacggtgaacatgtcgagttttcattagtagaactacacgtcgtttagtaaaaccagcagccttggcatttcgaaacacgacgtgtccgtaactccacctttaaaatggctcgtggcgtcgacatattcatcttgcgcaccattgaaaagccgccacgtaattgctctactacatccaccgaatattccatacgctagataccacccaatttcaaaaattaattacttagaaagaacgatttatcacaaaacaaaacaagaaggtttccttgtcttaattgagaattgagaaaataataataaagaaagtccctttcttccctctcttcggtcttcggatgtggtttcttctataaaatccccaatttgtaactgagaaactcttctttctcacatcttaccctctgaaaactgatattaatctaagtttaatggctaaatattctcacgaaacttctgatattttcgttggactcgtttttagcgatctcatattctcaacacgctttcaattccagagtatcagcaccactacaatcaccaccgccaacagtcagtcttgtagatttttctgacgcaagaaatattctacgagccctcaacaatgggaaagcgtaatcttttttcttttttgtgctttggattttgtttgacctaattgggttggttgattgagttaattattagggtttcttgatattggttcgatttatttgcgattgaaactctgaaaggaattaaatttgttttttcttactagttaattttgttgtttatgttactatatggctgaattgaaaaaagcaggcaattctcagcgcaaaaatgcagcgatgctggatacggacgacgacaatagcagtgtaagttcttcgtcaactattcgttctgatcgtttctcggtgatggagactgaagaaatgcaacttgataaagatactttactcgaccaagctcttgatgctttgtacgagaagaggtaagagtttttatctctatcgatctttttcattcatttattgctaagaatttaattgtaatagagtacaggagatttatattagtttaattaaggagtgccttttctaactcatttattgcttttatgttcataaggagttccacgagagaaaatgcgttgtcatccattattgcagctttcaataacagtctgcagcatcagttcgccgaaaagaagtaggaagttttattttgatatttgattgtgttttttaagttatgcggatatgggcatgttgattttttattttctttatgttctccgcctgttaagagtacatgatagttagtcatttctttgtttgtattttaaattcttgtgttaatggggcgttatccagatttgcgactttattacatcagtgtctgaattcctttaaacgaggatctgccaaggagatatgtttggcgtcacatgtcattggtttgttttgcaatccttatttttgtctacaggcttgttctgttccatattctctagtatgtactcaaatctcccagcttttcttcaacttttttattagggttgctggctttgactgttggttgtggagataatgcacgtgaaatattggaggaatcagtgcttccattgacacaggctctcaagtctgcctctgaaactgccaagatagcggtagtttatcatgactctttatatttctttatctccttcatatgctatggtgtttaatctgatttttctaaaaaacatggtcattgattgtagttactggaatgtttggctgtcatcacttttgttggtggaagtgacccagagcagacagagcggtcaatgcaaattatgtggcaagtggttcatccaaaactgaaggccaatgtatgtttatctccttttattcgggaggtgtttgatcatacttgatccatgtttctcatttatcttttaatgatgtctagagccttggattctggaactgaaatattgatccttttgtgtactcccattaatgttcccttttgcaggtagttgctgccaaaacctctggagctacaataagtgcaatgatatctgcatggtcatttcttcttacaaccatggatggatggaaacttaatcctagagattggcaagagtaaatatattcttcatattcattacttcgtttccagtattttccatttgtatccaaaagaactgcaaattgggccacaaaacttggcatttgactaagattttacacattagcgtagccaataatttctttggctaaaactgcaggtcactaacttatttatccagtctccttgacaaggaagatagggctgttcgaattgctgcgggtgaagcactggctttaatttttgagattggaagtttagacaaattctctattgaggcaaaaagttcaagtgatggatcaagtcaagaagaaagtaaacctcggcaatatatacacatacaaggattgaaggcaaaagtcataaatcaagtaagaagcctttcagcagaggcagggggtaaaggttctgctaagaaagatcttaacaatcagaggaatttgtttcgtgaaatactggaatattttgaggtacacctctctctctctctctctccccctttccttttttcgtgctctttggatgcctgcatgtgcctatgcattctcacaatggtctgactattttgttaggatggttattgccctgaagtttctgttaagattggtggtgattctctgcagacatctacatggtctcaactaatacaggttttgctccttgtccctatttcagtcctctttcattcatctctcggaacctttctttgtgagaataatctgttgagttgatgttttctattttattttaatagctgaactttgtaaagcatttccttggaggaggatttgtgaaacacatgcaggttggttcttccattatctcgtaccttttttcaccttctgctgtcttctattaaagatgcgtaaatatttttgtcactgctaatgttgattgctgaaacaggaaaatgaactcctccatgatgtttttgggtttacacctaaaaaatatgtcacggaccatgaacatcgtttatcaagcagtgaaaaggtcagttcttgctgttacaccacaagatgacatctcctagcttacatattcttctgtttgtttattggtcttacttgtatgcttctgatggttgcatttttcttgtttactacagaggatgtacaagtcaccaaattcagttctcaacaaagcaaggactcaacatcttaacaaacagcgaatgttatctgaggtaattcactatttagaatgcgattgataaattgagttatctcttcccaatttaattcaagtatgtgaagaaattcctaaagcttttgtcccattgcgtctgttccagattagaaagtaggttatgaattagtataacataaaaatggtctatgcttgctcagctatgtattatgtttgattattcggttatgttctactttttggtcctctttcctcatccattcattcttctgtttaattctcgataaaatttcatagttttatgcaggattttctaattttttttttttttttgtgttttatttatttatttttttgtagggaaaaaacattgggcacttctcagttagcgggggtgacggtgaagcatagtgttcgttttccttttttgattggaacatttattataagtttagacccatatttgggtctgatgttgaaacacaatacacgatacaagtttaatttaatcatttatgaactgttaaaatgggcattgactttgttgatgctggatttagattatggaattttaatgctgtaactgaagtaataaaattaagttaagtttgatttctattgaaattgagagtaaaatagtttttgcaagcatctgtgatctggtctattttaaagtggggaaatagtagtcttattttttttttttaccaactgtaacttatttcaaaacaattttaatggcaaaactagaatgtgccaaatttggaacaaaacagaaatgatattttgcgatgtttaacaattattgcatgaaattttttattaaaaaaaaaaaagaagagaa

SEQ ID NO: 117226 - DNA, 1125 bp, Cannabis sativa
aataatttaacacagtacacagtagttttaaaaaaaaaatacagtatttttaaaaaaaaattcatccccacaataaaaaaaaaaaaaaaattcaaaatatgtaatgtaaaaacccttctatttttttttaataatacttataaaattaaaaaatattagaccccatacaccaattctactgtaaaaacattattattattttttctagaaaagctaacaatcaaattgtacaattacaatgagataggggagatgatttttgattgtggggttacttactagttactatttgggtcaaaaacatattatatattcgttcatgtccagtccatctgagttggaaattctaagctttattaaaagtgtcgaatcgactgaaaaagcttttgttttgaaacgaggacatagtacctagattgtaccttctttagtttgtctctttttatctccttctgtcttttttcttcattctttatttgtttttgccaatcatccaaaggtaaagaggtcatcagaatcttgacaaaacgactaacgaaacgacataatctaacaacagtattacaagttaacttctctttctttgtttaatcaacccaacccaatccaaaaagagaaaaaacacaagaggaaggagattatagaattgaaaagcgtttaagactcgatgagttcgatcaaatcaaatggcccaacaaaaaacaaagccttcaaattagtgataatgtttcctactttccgatgtttatactttatactaccattttttaccttttttttagtaagctttcaattttttgagttttaaaagtagtgagaatgattatgaataatctttatttccagtcaaatttttctaacgcatttttctttttacatttaggtcccaaatctcaaatgttttgcatatatattttttttgggaaattttaactattgtagagaattaaactaatttaaaatgaattaacaaataataagcaatgatataatcaaccaaacacaatttaagaataatagagtatgttgagtaaactgctagcaaaataaaagaggaacgatattaccgaatgaagaattctgggttgagtcgcggactaagtcgctctctttaagacgttcgcg

SEQ ID NO: 117227 - DNA, 3839 bp, Cannabis sativa
  modified_base (3797)..(3814): a, c, t, g, unknown or other
acataaaatattatttctgatctttattaataagtaaatctaattatatcgaaatgagttttatttagggcacaaaacccaacactctaagtttttagggtgggaggaaatggggggacattggagttcttggccaaagaagatttagtctcgatcaccactaggtcgggattaacaatgatgccttcttgagcatgaactttggggtcggtcttctacactttacttgtgctttccttgcctgaagacctgcccactttccttttgaagtttgatttcatcctggtcgacatttctaaaaaagggtaaagagagttagagttggtagtcaaattaataaaaacataagtggtctaatagctaaaatactccttccggataaaaattgaaggggcgtcatcattagaagatgactcctcaagctctttgacaatggccttcccttttctttcaacatgttgcgcgtgtcgacaaataggagcctcttgcgcatcattatttcggatgggtacctagatgggagtaggtttgaccctgccaaccttggtcttcttctttttctttcgtgtagtcttctcatctttcaacatgttgcgcgtgtcgacaaacaggagcctcttgcgcatcattatttcggatgggtacctcgatgggagtaggtctgaccctgccaaccttggtcttcttctttttctttcgtgcagtcttctcaggaaaaggacttccaggctttgggtatagcccatacatgatgaagtttttgggtgatgtcaataagacaatatgccaaacaaatatgacaagcccaagatagattgagccctatctctgagaccaagtgtgaaggctgggcggatgtacattttgacccattgaaaggctgggcggatgtacaatgtagtaatcgcaaagaaaaccaccaatcttcttgatagaactctcctttgtgtcaatcatccacaagcactcgaattgtgaaaagtaaaaataccccgagcggtcacagtgagaagcctttaactaaaaaccagttaatgtcatgtgtagattgctcaccccaaccttgttgtgcgtataatatgaacatggcagtaaggtacttaattccctttggtgtgaactgcgccagagaaattttgtagtaattggctatcttcacgaagtagggatgtagtggcaagagagccccatgcttagcatatgggccagaccacgcacacaaaacctcgcctacttcattttcaagttgtgcttcaagggaaggaatacatccacatccccgaggaggccctctttgtctaagttgtggaggcgcctttcagtgagtttggacggtggggatatccacattggactgtcaggtagttggtatttagatagttcagcctcttcaaactcttggtcagcataatcgatgcctaagactaaagggcaaccacaaaaatcataaggcttcttgtcctctgaccaccaaccggccccatgaaaaggcatgaccgcatacctttgcttgttgacctatttgttgacttcttgaacttctagatccccacttagtaaggggtcttctccctcgaagtctgacacaaacaactcatgttgcctggccataagctgggtgaattttggattgcttggtccaatcttacaaaaacttttctttgtatgagctagattccttgagtggaatggataaatttgtgtaggatggtccactacagtaacaacaatctttgccttaacctgagggcgtagtgacagttcagggtccgctttaggtaatgtttttgggatgtttggttggaccatgtaagtccagttagagggcaaatactccctccaacaaaagttgtattctctaatgtacatgctgtacacgtcacccccaattcaaactgaataaaagtggctttggacgtatgaaatagcctgttcaaattcctcgcatgacaacacctccctcctcgaagctagatgacttgcttttgcatgtgatgcacaaagccttggctggtcgtcaaaaattagctggagcatgttgttgtctatctggttattacctcctcaaaagtcgtctagggtcatctacaaaagaaggaaagggaggtagagcaaaatagaaagaaggttttagaaacgacctatatattctgaccaagggaacatatagatcaaatagaaggggtttcatcagaatgacgaagagcccaactcgaagatgatcaagattgtttgaacctctaaaaaagaaaaaaaaaaatacacctttgtgctatgcaaatgtaagttcgactaatccttaaggaaaacacatgatttgcgtatcaatttagccgattggctttgcatagataattgtatcattataaatcatcacaaagcttaaggacatacttaaataatgaagaacatgcatgcaagaaacccaaatttttgtaggaaaaagaatagaaaatttcaagcaagaaaaagaaataaaggtattaagatttggagagatatgcttctatgattaaccatgaagctggtgagagcttggcctttggtggccatgcttggttatgaggtgcttttatgttggccgagtctcaatggttcacttgagtagttggcctaatgctccaagtttcagtaaaacttgtcgcaactactgatcggtgtacacctttatagggtgtatctggaagtatagtcttagctttctagaagccaagagcaagttgtgggtcagcttctccatgagtgggaactgacttttagtgtcgatcagtctcttgctggtgtagtatatagggtgatatacactgtcttcttctcttgtgaggacaacactcacagcatattctatgactgcttggtgcacgcctagatgttctttgtctaaggatttgggcaacacaggtggctgagccaaactatctctttagctcctggaatgtgatttcacattcctttgtccactcaaacttgttgttgcttctgcttcatgttgaagaagggtacacatttgtctgtatacttagacacaaatctacttagtgcagcagtgcatcctgtttggctttgtacttccttgattgttatgggcgacttcatgttcaaaagggcctagatcttgtctaggtttgagcatcttcatgttgtagctgcagaggatttttaaattttctatcaaggtcctccatatacccccagcccttttggacttgtcaagcatgtcgtccattcaaaccttcattttgtggctgatacgatcatttaacatcgtgtagcttgtgtgctcttaatttgatcaatgcatcttctatttcttggctttggacaaggtgatgagtacacatttgtataatcattcttagtcaattattagatggattagtatttatttttgtatagagttgatgtgttttctccaagtgttaggtttgtgctgaaaagacattttgtgatggactgagatctttgaccctatttttgacaatgatttcatcattttcttgaagagcttatgacacccgaaaagatagagctcgttcccagctttctgaaacatgttaaatcatctcatttggagtctggacgcaaaagttatgcatgatttactgagcaaggtcgaagtagaaaattttggtgttgtgcgctatagcacatggggtctgcgctatagcacccggctcaaaaaaatgatttttttacggaaaaaaagataatttcagcacgggttcaggattttttctcttaggcactattgcgcggggtataggcgctatagcgcagtgttgggttttatgccctannnnnnnnnnnnnnnnnnataatcagatttattagttaataaa

SEQ ID NO: 117228 - DNA, 2032 bp, Cannabis sativa
ggagggagtttcttctgtagaatagcgctacactcttcagttagagccactgtctcataatcttccatcttcctcttctttgacaaaatttccttcataaacttcacagacaacgaaaggcctttcctttcctgagcaaatttatattgatcaagcatatttctagctgatgtaacaatatttgaagcaagccaactcttcttttgccaaacaatcaaaaaatattatatttctagatcataattatagtatttttgaaaagtgttatactattggagtgattttagaagtaacagttccaaaaataatgtgaaagagagataaaataaaatattatatttttaaatgatatggagatttttagcatccttaaaggatgctacgattggagatgctcttagcaacctgtttagggaatttgtacatacattccagttcagccaattcctcacttggtcaaggcattctcgagtgaaaacacaatcaaaaaataagtgttagatattttcctcatgtgttcgaaatagtatgcaagtggagttatcaataatatgaaaacgttgtaatctctcctttgtttgtaatctgttttgaacaatcaaacacataataaaacaatacttaggttggctatacctacaccatacttccttgtaccaacgtacattttcttgtggtggcttgagcaatttgtagcccaagcttatttgatatttcatgagctaagaagtggatcgggtccatgtaaattatttcaattaaatacgattaaattttaggcaaaaatcaagttaattcactaattctaaaattgacatatttagcatatgattaaaaaaaaaatacataatatgttaagtaaaatatcaaccaaggaattgtaatatatttactctatttgtccatttgttttctaataggttaatttaagaaaaatttgcactaggaatcgttattttgtttttatttatgaatttggctttgctttaactaatacgattttatactgtttataatttaaattttattgctacgtatactatttttagttgttttgctatatgttcatattttatgggtatattacacggttacattttttttaagctatatcatagccttttttatctatctcactcagtcgcgattatttttgctctttttttttatttgtctctcactgatcagtctactctttctttctctctcatagctatctcaatcatgatctctcagacgattcattaggtgagtttctctttctatttattttgatatcaatcagtagatctttcagctcttatctttcatttttattttatttttatctttattttctcttcagtgtgattttgggtttgagttgattttagggtttggtatttattctataagattttagatgtgttgctatggcgattacaaaaagctcgatttctcgaagagaaaattaggtggtgatgaaggagacaatgtgagaaaaatgtctttaagtgatgataagagtactgatgattctattaatagggatgttgtaaatgagaggagaaataagaagagtaatgattctgtaggtaaggaagttgagaatgagaggagtaaaaaaattaacgagaaaggtgttgagaatgaaaaagaattttgttagttaaatctttggcaaagaaaaggaatcgtgttcttgatatatcgcctaatgattgtaaatccaataagctaaagttgaagagtgtgatataggttgatgaggagatctagagtctgaggatgcaaatcggattgcgattcctttgaaagctaaggtcattaattttttttttaagatgtgttgttttgattttacatgtttataagttattgtttagtttatattttttaatttttattattattttcttgttgtttcagatttttttagattctgttctgatttatgagatttagttgttttggtttcttattgtgtaggtgttttgtttagaatcacgagttttttttttttttgaatgttttatatattttttgtgttata

SEQ ID NO: 117229 - DNA, 1259 bp, Cannabis sativa
cgtcgtcgtcttgatcatgaatagtagtagttctcaaaacggcgtcgttgtaattgttaggacttccgatctggagagcagtcaacatttgacgaaggtcagaggcttcttctttgagacgagagttctcctgtaagactcggtcgtgggactcggacatgttgttgagcttatcgattaggttatggttctcggtgcggagacgaaccacctgggaccacagctcgtccaggtgcttctgcttcctcatcctggaccgcctagccgattcccggttcgatatcatccgccgctgcctccgctcgtcgatgacgatcctcagctgttcgctgttgttattatggtagttcatctcctctgcttcgtcggaggtggtggagttgttgctgagagtagtggcggacgacgtcgtttgaggaggagggtagtttggtaaattggcgttcaagaattgtgagttgagatggaaaattgggtccatgacgttgttagaggtacaattaggagagatgatgttgacgttgttgaagtttggttgtattgggaggctgatagggttttggtgatgatgatcatcaggtgagactgggagatagtagagccctgtgaactctcctggaagcatagttaatataattttttaatatatatatatatatatgagttttgtgtatatttttgtgttggagtgattatatatatatgtatatgtgaaagtggagcgtgaagagtggagtgaagggagaaggggtttttataggaagaggaggaagttgagattgagaagaatggattaattgaggagagagtgagtgtggggccaattaatataaggaacaagtgtataaaacagtagtattcataaggagagaagagaatattattaatgagggcttatattgcttacatgagcagaatgtatatcataacaattattggaaggacacccacgaatatgcgtctcaaaaaggatgtcgggcaagatttatatgtatatatcatgtcacattatatattatatattgtctatatgttgctaaaaagaaatatatagcatccacattagagtggactcctataatttctttacaattaattaatagttaagtattctaaaatatttttcatatgagacactaattaaaacactaatatcaggagtgtcatgactattttcctatcattattatcacaagtgtcgttcaagatggtcactatttttgttgtcgtttccattttttttaaagaatgtgatatat

SEQ ID NO: 117230 - DNA, 2158 bp, Cannabis sativa
  modified_base (1703)..(1703): a, c, t, g, unknown or other
aaccacgtaaaaatctcgtgcattaatcttcctacagcttttttatatattattaagttggttgccgaaaacctcggtcaacaataaggatccccaaatatcacaccacatatgtgcttgtctatgtggatgatatactgatcacagggagctccatcactgctatcacaagcttaatcacagcttaaaatgagtcatttgccttaacaggtctaggtgaaattgattgcttcatcggaattcaagtgcagcaccctgaatctggaatacacttatgtcaaaaaaagtacatcatggatctactgtctagagaaaaaatagaattcgctaactcactaccttcacctatgacaggtgatgaaaaagtctctgcctacaacagtgatcctattgtagatcctaagaactacagaagcttagtaggtgccttatagtatgctgtcattactcgacccaaaattgcctattcaataaacaagatatctcagtttacgcataatccccttgagtctcatctcaaagtggtcaaaaaaattataaggtacctcaaagggacacttgatataggactgcacctcaaaccatgttccaaactggttctaacaggattctgtgatgcagattgggtatctgatcctgatgatcgaagatctacatcaggcttctgtattttcctcggttcaaatctggtttcatgttggagttccaagaaacaaagaactgtgtctcgttctagcacaaaggcatagtacagaagccttataaatgctactgcagaaatgttctggcttcaatctttgctgactgaagttgggttacctactcagcctattcctaccatttggtgtgacaatgagtccatggttctactgtctgctaatctagtactgcactttcaaaccaagcatatagaactggacctttattttgttcaggaaagagtacttcacaataaacttcaagtcaagcatactcttgctgttgatcgaattgcagacatactcacaaaagctttgtctacacctaaattttagttgcttagagacaaactaagtctagttcctttgtcccagcttagtttgaggggggtgttagataagcatggtcccacgtgctttattcacctaagttagttatattctagtattttcttgttgctgatctaactgtttataattagcttccgtcatgattgtaactaacttatcatgttgtattgtatataagagctctttagctctgtttagtaataatatacagaaattatttttccctaaccttttctttctctcatgttttattattattttttatttttagtctatgattataattgctatttgaacttcagtttaactcaatttaaatcaaagcacaaataacttttcttttaagtttatgaattggagttgggagtcttctcatgtttgtatcattcttcttttgatatagtgtttaattaaaattttgactccgatgaaaaaaaggaagaaaaacaaataataatgtaggaatgtgtgatctgagattaaaagatcacaataaaatatgcttcttttttaatccaacttcaaataatatcaaaatccaaagttttattaatagttagcatcaaaagtttcagttatacagacatgacatatatgctacatcttaaatattttacaatatttatgctcagttttaataataataataataanaataataataataatataataacatcaactaatataaaaattttatctctatttcaacggaccaaatgattttttttaaaaggtaaaaataaaaaatataattaataataaaaagataaataaaagaggaattttcataaatatgcgaattgagggtatagtttacttttttatggcataaataaataatactataggattatgggttttttttatttttttacatttatatgggatttttttatgtcatatttttgttaaaacaaatagaaatctcatatttataaaacaacaataagttttatcggaaaaattgtcggcagcggaaaagtcgacagaaaaagtcgtcggcaccgggaaagccgtcgaaaaaattaccgccaccggaaaaatcaccgaaaaagtcgtcggaaaagtcatcgtcgccggaaaagtcaccagaagtaaatgtctta

SEQ ID NO: 117231 - DNA, 4272 bp, Cannabis sativa
  modified_base (664)..(671): a, c, t, g, unknown or other
  modified_base (4222)..(4247): a, c, t, g, unknown or other
ctttgggaagaggggtaagttaagtcttaggttctttgggccatttcagatactcaagaaggtcgggtaggtagcgtatcagctagtcttactaccagcgctattggttgttcataatgtatttcatatttcaatgttgaggaaatatgttcagaccagactcatgtcttgacttatgaagcccttgaactacaaccaaacttatcttacgaagaacagtcagttcctatccttgctaggaaggagaaagttctttggaagaagcccatattctttggtcaaagtgctctggagaaacaacaaggtggaggaagacacctgggagttagagtcccatatgaggactcaatatccagagttattcagattagatttcgaggacaaaatcctttttacggggggataattgtaatgaccacatttttaatttgaattagtaaaggcaattagaattaattattggtaattttatgattacttatgaatttaattatttgtggctcccatttttggaaagggcattagagttataatttatcaaccctggatattttatataaactctaagtgtattatttgaattatatgtgaaatatgttatttttgtaatttttgcacagcgacaacgaaaaacgcgatggctggctagtttgatcacatgggnnnnnnnngaaccttatttcttagtgggatatattttggagaaaataaatacaaaggttgtgcggggttatagtttttgaccattttacccctaggcttataactgtttaacttttgaggttaaagaaaccaacttgataaattctttccacttagctttccggactgcctcattgtaatacttattgttgaaaaaatctcaaaactcttcccaagtcataagagtgacctcttgggtgaggaacactaattccaaccacacgggcgcgtcttcctggaactgaaaggtggaacaagtcacccggtcatttccaacaacccccatgaaattcataattatctttgtcaccgtgagccatgctcagccatcattacatccggacctcctagaaaaactggaggtgctcgcttgtgaaacttctcatacaatggctttatacggttgccagcaacaggttgttctgctggcaccgcaagaattaaagcagcctgaacttgtggtggaggcaatgcaaaaggatcctactgccttactctcggaatttcttcatcttgttggagaatattatcttgcatttttgcaaatctttgctcccaacctagaggagcttgaggtgggttttcatgttgaccaccctgaaacattccacaacctctgccacgttcaaggggatttcggggaatttaatttccctaacagcctctagtctcgaccctattactttgaatccttgtatttttctgtgcgtctattagtaggacatagcctgcgaacccataagtcaggcaagtcagacaacgatcatatagactttataatgctcttatgaattttaaggcaacgcattaaaataaaaaattataaactactatgcttcgtaatatgttttactaatcacatacaatactaaacaagtaaaggcttaccgaaccgtgacccgagcttttctctgatgatgattgtatatttcttggcaatctttggtagacaaatatggcggctctaataccaaaattttaacgccctgatacttaggcgctacagtgattttttcaattacagtaccacctttgttaatcaaaagatctttcttgaaaatcgtgtcaaattaaaactttagaattaattgttaaactttataaacatttacacatttatttacaaaagtaaggatcccgtatttaaacttttacaatattatgaaaatatatttagtcttgtcgcatagcgactacaaaataaagccccagatgtcctgagaccgaatactccaggtcgtgccaccatgacatgtacaaaaacaatcctagcttgaagctcactcctattcagccttcgcatttcctttacctacacatggaaataataactgtgagttgacagactcagtaagaaaagcatataacaaataatataatatcgacttgtatccaggcacccatacacctatttaaaaggcttaacaaatgagtaagaatgttctttactagggtacagccactgtaccacatacactacgtaccaatactgtatgagtgttggtaaggattatctcgtaccccgaggaccataaagtcttgtaccacacacaccctgtactttttcgtacttgtgctagttacaccgtaacatactctttaaacattgtacactataccaatgcactttgtaccacattcgtacaagtgttggtagtgtactaaccataacaagcatgcgtatatatatcacacattcatacattcgcatatatatatcatatgttctatgctattcttacctcgtttccgaattcaagtaagttggccgacctgaacggaaaacttcgcgctagatggatgccctaatcacataacataaatgggtaaatgatgcaccaaaaccctagtccgagaaacccaaacctttaactaaaggttctgctatcgacaactaaaactacaataccctaagcaacacgaaatcaccaaaccaaggctctaaaactaacacgaataaaaaaaaatggattgctcgggaaacctgtcccaaaaccgattaaccagttttacaggacctggcaaatcagttaaccagtttgcactaggtttgcccaagtagtccaaaatgtgtccaaaccttaccaaactttccaaaacacctaatacaacatcccacaacatattccaagcagtaaaacccagaaatttacacaaaatcaaaacatgccattattgacaaaagtttgagttttcaaactcaaatttggtcattcaccacaacacacaacaatggtttatctatttgacatagacctacgtgttacgctcacacgtctatctacattaaggccttagagtggtttatctcgatctaattactgagtctaacctaattatgccatgcacgcataattcttttatctcaacatatatcatataatattgcattcaaaattatttaaatactaggttaataaccctagaccacataaccgctaagtttagggtaataactctaatcttagtttctcgcatagcatacacaaataacatacatgggtgccactatgctaaactctacgtgctagtttactgccttacctagtaatttaagtatgtgaagattccaaatccctcgagtgttcctgagcaagcatcggtaatccttgtcacacgttctcaagatatcacaaataaggtcaatcccatatttaatttcacatgaaaacataattggcatttcatttacatattaacatatatggctcaaaacgagctttccaacgatattaagaatgtccaaaataaagtcccgagtaaaaagttatggtaaaaataagtatacgaaatttcttggagaaaatagggcctcgccgcaacgaggtaaaccgtggccgcattgctgtggccacaacttggctgcccacgccgcagggagccaaatcatggtcgcaatgaggggccgtgaaacccctaaaatgcaatttttaccaacacttcaaaattcaactaaaaattcataccaaacataaccaaaccatgcataatccaatccttcaactagaaccaaaccaaaactacattggtactcatttagcatcacaccaagctcaaaaatcaaaataacaatcaaaataaagcatacattaaacaccaaagttgcacacatatgctcaaacttgaagttcatagcttcaagacaaaactcagaacatcaaagccttacaccaaaaattaaacatcaaatatcaaaatttgcacaacataaaccacccctaatcttaaccaaaaccatctagatgcaatgtacacacttctaatagctcaaaatatacaacaaacaccaaaatcaccttcaatttcatcaacatgcatccacaatttaaaggacatcaagaacaccttaaatcatcacataacttgagaaatcaataaatcaaaaaggctaaggatcattaccacaaatttctcaagcatccccaaggaaaaacatacacaaagctacaccaattcaagctttttcttcacaattaaaatttgaaaatgccaattgaagagagagagggagagagagagnnnnnnnnnnnnnnnnnnnnnnnnnnagagagagagagaggggagagagag

SEQ ID NO: 117232 - DNA, 2214 bp, Cannabis sativa
ccaccacacgagtgcgtcttcttgaaactggaaagtggcacaagtcactcggtcattcctgatgacactcatgaaatttataattcgttcaattactgtgagccactgcttggccttcatgacgtctggacctcccaaaaaaatctggaggcgctacttgtgaaagctttcatataaaggccccatacggttgccaacaatagtttattctgctagcactgctggaaccaaggtagttggcacttgctatggaggcattgcagatggaccctgttatctcatcctctgaatttcttcctcttattgattaattcaggcttgcatttctacaaaccttttctccaaatcttaaggagcttgtggcagattttcatgaccacccccttgaaaccttccacgacctctattgcgtccatagggattttgagaattttgacctccccgacttcctctagtctcaaccatattactacgacttcttgtgttttgttgggtgtccatgttataggacttagcctgtaaacccataagtcaggtaggtcagactacaattaaatatattctaaataccaaatatatggaatttaaggtaacgcattcaatgaataacataaaactatcatactttcctaatcagataacttactaaacaattaaaggcttactaaacagtgagtcaagtctatctttgacgatgattgtacatgtattgacgattttcagtaaataacctagcggctctaatacaaaaattgaagtgtcctaataattaggcaagctactgtgactttttaattatagtgcactcatttgctaactaaagggttatcttaagaatcatgataaattaaaacttttgattaactttcaactttataaacatttacacataaccatacaaaaacattgggatcccactttttaaacttttgtacttaatgaaaataaactttacctctttgtcacacgatgactacaaaaaaaaaaacccacgtcgacacgagatcgtactctttaggccataccttcttgacatgtacaaccatccctcagctctggactcattgttgctcatctttagcctttcctttaccgatacatggaaaaaataactatgagtcgatatactcaataagaaaagcatacaacacataatatattaccgacttgtatttaggtaccgatactcctatacacaaggcttaatagatgattaagaacgttcttaataaaagtacaacctctgtggcacatgcactaagtatttctactatactactgtttgtagggttgaaccgtacaccgagtactgctgagtgttgtaccatatgcactacacatttaacagtactagtgttggtaacacaggatcgtaccctttgaacaacatacattgtaccaatacactcaattctgctaccctactagtgttggtagcatatgaatcacataaatagcatgcatataatacacatatacaatatatatatatatattctatgctaatcttaccttattttcgaatacaagcgtgtcgaccgacctgaatagaaaattatgcgctaaatggaggccctatgccacaataacgtaaaatgggtaaataactttctaagacattttcagggatctaaactcacaactacaagtttcctttcaataaatagcatgggaaagccctaaatattgagaaaacaagagaaaaataactaaacggggaaactacctgaaaaatgacaggctgtttttgtaaaaacgacaagttatatttttgggttctctgccagtaaaaacggtagaccgtttccacagaaacgacctgccattttctggtgcagaaaataaagagtccccaaattgactcaaaataaccccaaactcttaagctctagatcatctaataatacaataatagaccaaaaccaagtaatagaacctcagaaaatgtagaaaatcaaataagcttaaaacaaccttactaaactagaaaaaacacaacaacccaaaccctaatttgcagataaccaactcatgaattttgcatgctcaaaactaaagaaaagatatcaaagcttaaagaaataggctctagggtttaccttagattcaagcttccaattccccttatttccccgcttaaaactacagaaaatagctgagcaaaatggttttgttctcttgattcttctagggccgattatgggggagagagtt

SEQ ID NO: 117233 - DNA, 1079 bp, Cannabis sativa
  modified_base (1048)..(1054): a, c, t, g, unknown or other
atatatatatataaatagatgtgaacttaattaagtccagctacaacagtactgcttcctttgaaaaggtaggtagccatttaattgaaacaaataaaatgatgtatgtagttgtctgtggcctgctattcatcacatactgtctcttttatgattcattgattactttttctttgatgtctgaggctattcgtttggtggtgcatctgcatggaaacaaattctgtacattttaatatgtttacttgaaataatagaagtgttggactacatctgcatgcctcttttattattttcttcaaagttacaacactttgatttgatgactacacaatacattttccccgacttccctaaataaatgtcctttaattgctttagtttgctatttggaatagagttgaacaatcttttttgtttttttatttgcataagatattgtcttgctttcagttttggtttctgaattattttatattattggtattatcattataaatagatctgacatgctctgttaattgagcaacgataataaatggatcattaattattggagctgctcttaagattgattccctcgtacttagcctgatgacatatatagttgatgatttgatgtcatatatttgcattaatagtagttatgactatgattacgtttttggttgttgagttatatatatacagttgtgattaatttattggggtcctataactcatcagttgctgtgctttgcatgtgaaaacctaagtgacaaaaccgagttatgttatgcataatgtgacaaaccccgtttgtagggttgccaagtggttcatgtctttcaacaacacttttttcagttctttgttttctttcaagaacttatgttttgcttcaaaagaaaggaaaaaaaaaaaaaaaatcccttatgttttcccaacattacttttctgcaagacgttttgttttctattgtttgggattccaacttttgcattaaagacaattttattttcggtaaaattatctcttttcagttaaggtaaataccattttggaccnnnnnnnttgcaaaagttacagattggaccct

SEQ ID NO: 117234 - DNA, 1135 bp, Cannabis sativa
agcgacttagaaaattctagagtaattaagtattatttagattaattaagcatattctagtacttagaccttaaactaaagcccaacatttactagaattctctagcacatttagagtcttatagtgcaccaactatgagtagtatatatatggacattgggtccttaaggaagtaagtcttaagtgcatctaaaaagtgtctctcatgtgtctaaactctaaagtgtctcaaaaaagtgtgtgtaaatatctaagtagataaagtgagagtgttaagtgttagtaaaatataaaagtaagagtttggtgtgcattgcgatcaagtttaagtatttaagtctttgcgtaattactttaacgataataaaataataacattttcaattgttgtgttgttcaacagatatgaaagtcaactttgtcaaaaataaatttcaattaccctattaataaatttaacattaatttgcatgtaccaatcttaatctatattatcataaataatcaatttaactaataagtgatattatttgtctaaaaacggaatgctaatctcataacagaatatacatgtatataattttcaatataaaagtgattgttggggagaagcacaactatgtctatttcatggtcaaaacatctattgtcgaattaattctctaacaacaaactatcaacgaatagtatagagtcttaaaatcttaatcgaactcttaaattttctaagtttatagaaaaacaatatagcacagagtcttataatcttaatcgaaagccctatatttttcaagtttattgaaaaacaatgtagcttagagtcaaaaaatcttaatcaacaaaacatatttcttataacaccctaaatgtataatgctgaataaatatgaactaaccctaagtcctgagaaaattagagcatagattaccagatgaggaggttttttaaaaaggttaccttaattaattcccaagtgcttatcaattttgaagttccgaccctttaagcactctccacaccgttaattgagaagaagaagaagaggaccgttgagtggaataagaagaagaagaggaccgttgagtggaataagaagaagaagaagaagaagaataaatgaataaaacaaagag

SEQ ID NO: 117235 - DNA, 2021 bp, Cannabis sativa
  modified_base (1993)..(1995): a, c, t, g, unknown or other
tcccagcagctatccttacaataatctgataacaaagaggttccctcaaccttgcattttcaaaccgaaaccgcttaacagaattgtggcctgcagcaggaacttttaccataagaatcagagcatggtctgaagttgaaatttcaagattatggagctattaataaatcaaactcttagcatttttgtcttattaagattattaaactcctacaaatttcatcattagactttaatcaattacttttgttttcagaaattttgctaatatatatttatgggtatattattttggacctcgtgttttataaaagttataaattgggccctctattttgtttttgttttttttttgaatagaaagatttttatttaaaacaaagcgcaaaggctaaatagcagccacaaggggagctgcttccctaactacagacaaaaaacaaacacgattcactcgagcgagatgagcgagctgatccacaaccgagttatccgagcggggaacataaacaacagaccaaccattaaagcaacttaacaaagacaaacatttagcaaagctaggataggacccccaagcatacggaagagactttgcctgcaaggccttaacaccaatcgccgagtccgagtgaacaacagcaacctccaaatgcatttcagcacaaagctccaaacacagaagaatagcttcaaattccgcctgcaacacactaagaacagagcagaaagcctggatagtaatggcttcctctactgggacatttgattgaacaacacctaggcccgcatcagcaccaagaaccaaagcatccaccataagcataattccagagtgcgttggactaaattcccgaggaacaggttccactacactgtccgaattcaccaaatggctgaactcttgccaacgcatattgatacaattaaaagccatacccgaatcaggcctgctgccccttaatctgatttcattcctgcaatgccaaacaacttcgaaaagacaggccgcaaacaagatcaaagagttatccttgcaaagggaaagtccttggaaaaaatcatcgaaactttggagattcatggtgtcagttctcagcctccactgcccacgaaaccacaagcttctagtaaagctacaggtaccaaacaagtgtaattcagtttccacttcacagttacagaggaaacaatctttatcctcattctacaagaatcttaagttggatttgagaggcaaacaattactgagaatcttccaaatcagtaacttctggcgaggatgaagcttcagatcccaaagaattttccaacactctcttttctggttgaaaccgattgcattgcgacagccagtatgcattcttgacagaaaaggtaccgctgttgcttgctttccaaaagactttgtccccctcatcaataagaggcctaatcctcaggatagcaccagcaaccttaggagcaaaacacttccaaataagatttgtatcccacacccgggaattttgtaagaaaaggtctgaaacataagagaaagcatgaactgctccgtaagtgaagcttcttcgcacttcttaagggttgaatccagggacccagggactagtccaaatatcaaaatttccttcccccaccagaacacctgctccagaaatgcataagtcccttacagtgagaagacttttccacaagtaggaatcagagtttttcttttcaacctcccagaactcaaaagttgagcaatactttgcgattaaggccttcacccaaggcctatccgtttgaacaagtatgttccaagctaacttagccacaagtgccatgtttatgtccttgaatcttctgagacccaagcccccattttgtttaggctaacagatattactccaactctttaaggcaagatatcgatttgaattttgctccgaagtacaccccttccaccagaatctggcaactatgttgtctaatgttgggttttatgccctannnaaaactctatttcaatgtaatccaga

SEQ ID NO: 117236 - DNA, 2171 bp, Cannabis sativa
  modified_base (50)..(50): a, c, t, g, unknown or other
  modified_base (2135)..(2146): a, c, t, g, unknown or other
aaacacatattcaataataaaacacaaaatatatacatatatattatatntcaagttaataaatatttaccttataaacgcaatccgccgataaattgcggcaaaaatccgaccacttatagcacacacacacacaacataatattaataaaatggaaaaatcccagaaaaaatttacaaaaacaaaaatatagcaatgtacattagtaaaatgaatagaaatcatatttataccttaatggacattgagattcaacgttttctccgctaaaatcggtggccaaagttataccaccaccttttattttaataggatcgggtacagtaaaaatgggtgaaaaaacaaaacaaaaaatagtgtataggattagatattgaaaataaaagattttaaaacaaaaatgaagtgaaatggtgaagaaatgagggagataaggggaattttccactagttgacaagggtttctaatgggttttctggtctggttgttcttgctgaacaagttggtgaaatgagaaagacgaagctgtgggttcttttatataaccctatggcgtcggttattaggtattaaccgacgtcataggtgcacacgtgtcgtgtaacaagtgcacctatggcgtcgattaatacttaataactgacgacatagggctaataaaaaatcctgaatattgcccaacccccaaccgacgacatagggtataattaaattctatatctatggtttttatcaaaaaatcgcctctaaatgtcaatttcaaacgagacgagtattttgacatcttttaactttcctttttataaaatgagttgaaaacacaccctctaaaggcttagttaccaaattaactagtgcactctaacaagtgaaaatccaagtttaattacttattattacttgatccatagacaaattaccaataatatcctttcataaaaatattttttttttaccttatatattacttaaaatcattagcaaatcaagaagaagaaaaacataaactggattttggtacgaattaacaaaatatttgagatctgctctacatgaaatcaaaaaggaaaatatatatacataacagtacatatcatatatatgagtatcaatcatgattcttttcatattttttctctataaatacagatcatcaaacaaacctaagctagattttggtaccttttgtaacaaaattagatacgttcatcagaaaaaataaaaaaaattggttaccatatatatatagtactctctctctctctctctctaagtatctatatatatagtgattattattattagatttattaattggttcaaatgaaaatgcagctttatctcccagctctaatattatatataattaataattttggtttagtattattacttgtagtagtagtgaatattgatgttgtgagtagtttgagtcatgaacatcgaattttattaagagattattcttcaaaagtagtaacaatatcgaagatcatcactgttaacaagaagggttctgggaatttcaacactattcaagcagccattgattccattccttctggaaacactcaatggataaagatccaaatttctccagccacatacacgtacctacctactactctactactatataccattacttactattaacatgtttttgactttattaaatatttttttaaaataataattgatactatacatatacacatgtttttgttcaaactcaatgatttaatatttgaatgttatgttttaagatattggtgccaatattggtacttaattcctatatgtatatatagtatactaattagttatatatgtataatctaaattaagtaattagttaattaataatttacagagaaaaggtaaatattcctcgtgagaaaccatatatttatcttgaaggaattaacggtcgtgatgagacagttatcacatttaacgaccatgaaaaaacagatgaaagtgctacattctcctccttcccggacaacattgttgccaaaggcatttcattcgaggtatatatataagactaattatgatttttcctcccgaacttttaaggtagttaaaaatttttatagaactattgagattattagatttaaagacttnnnnnnnnnnnnattcaattttactatttcagtgatt

SEQ ID NO: 117237 - DNA, 1194 bp, Cannabis sativa
taaatatctattccatatgacaaataaatattctacgctgcacagaaacaatatggagagaaggtaagaacatacataccccatatttttgagagagcccccagagagtgtcccctttggcgacctctatgcttctctgtgaggattctgatgtctttgacacattttgttccacaaaggtaactggtttctgcaataatgaccccaacatttgaaggaaagataaatgaatcagcaagcaatgagaatcaacaaccacaggtttactggtctttcttccaaaatctaatgtaaaaaaacacaaaacgatctatgggcaagaccctagtattacaatatcctcaatcagatggataggttccagaaatcgtcatataaattgatcatacaaatgaagagagtgaaaagaagcaaaagaaatgagacatgggccattgccgtaccttcatgacaggcattgtctttttgggaatgagagtgaaaggctggggtggagtctgaatcggctgagttggctcagtgagtggctgctgagtttcaatttttcttctgtttaaagggtttatggatttgattatactcagcgcgatgccggagaagacaacgaagccggcggccttggccagcatgttgtccttggcgtcaccggcccccgaaccagattgtgggtatggcattttcgattgatggggggtctagagtgagggatccaatcgaagattctagggtttcggatcagggaggcaagtgaaggtctgttacaggtctgcttagctgagctgagctgagttgagccgagtgagtgagttgctggtttttgtactgagttaccacgcgcgtttttacgcgcttctggattttattcgaagctgaccgtagagaaggaaagcttccatcgatattggatcgaaatacgatcccgcctttaagaaaaggaagaagaaaagtacgaacgacatgtcgtttgtcaacatcaaaacgtgaaacaataataattaatgctacaacagcaaatatgagatgagaaggcggatttttataatttttattaaagtaaaataaattaaattttatattaaattctaccactaataatattacatatcttataatatcttttaatatttctttaataaattaggacaatacaagtaaaaaaattatttgtaacaaaaatattgtattttcaaaatt

SEQ ID NO: 117238 - DNA, 1619 bp, Cannabis sativa
aaaaaaaaaaaaagaaagttaaaaaaaataatatataagataatttcccaataataaaatactaactaaaataaaaaaaaaataaaaaaataactctctattttaactttctaattaaaaaatagagaatactcttagagagatgctcctagaaatagccatttgctaaaaatattataaattaactataaatattgtatttttttgaattttccattataattatttatatcatttatatgttttgacactaattattttcgtttcctattttcaataataatatgtatattttaatttgattgtttatgcaatttgcaattctaatttcaaatctcaattaatttgaatcaaattatttaaaatttggtcaaataaatctgatgttagtagcttactcaatcttgaagcatttatgattctttggttcgatcatgactttagaattcttaacagcaaatcaaaccaaaccaaaccaaactacttattaaattgttaatctttttgttgtttgatatggagtccaaaagaaaaggtctaactctcctatcatgctcatagcaaattcattatgtatacacttagaaaattcttcataaaagtatatcactagtagtaccaaaaaataatataattaacataaatttgtagtataataatgtatttgccttttcttttaataaaaagtatattatctactttattcatttaaaaaccatttaaaattagaaaagtgtttaatcgatcataccaagctctacgagcttactttaaactatacaaatccttttcttaatttaaaaatatagttagagtgcttgtgattttgaaaatcgaaagttgagagacataaacctcttttaaaatgtatccatttaagaaaccatttttgacatccaattagtacaatataaaattctcgtggcatgagaaagctaacaacactcttatggactataatcttgctaccgaggcaaagatttcctcctcatattcaattatatcatttgtaacattagaccactaatccaatcttgttaggcacaatgaccacatgctcatctaccttatttttaaagacccattttgttccaatgggaacacacaaacattaataatcagaattatgaaaaataccacacatgctcaatgcctatcgaattcgaggatcaacgacaagctaccacaaaattgatattggggatattcatccaatccaatccacgttatttttcttatagtgcatctaatctacactaagtgcgaatttcatatgttgattacaatctaatctgtaaaagtgcagattggattggttatttttaacattaaattatttaatatttattaaaaaaaaatattttttcacataactaatattgttgttttatgtctctaacaacaattaaaataaataaaataacaaataacaaattcgaagaaagaaaaaattgtatgtagaaagaaatatttaatattattttaaattatacatagaaaaaaaactgtatataagaatagaatatacatttgatctattaattttgaaatatatttatattatatgtattaaatttttaaattactatttttttaaaatattaagggtaaataccatt

SEQ ID NO: 117239 - DNA, 2619 bp, Cannabis sativa
  modified_base (30)..(57): a, c, t, g, unknown or other
  modified_base (2550)..(2585): a, c, t, g, unknown or other
atgtttttaaattccattgttttagaaatnnnnnnnnnnnnnnnnnnnnnnnnnnnntggtagtaaatctagatactagtaaaataataaccaacacatgtccctcttgttgataggaggaggcttcttgtatgggacaatagcctgagtggccatgtaaatgtctcaggttttttggttaggaggatgaagcatgtgcagttctcctccttctccttgtggtttcggggtgtaggggaagtattgtacttcccttttttgccactgttcttgcaaaaattgttgttgttgcgcttgcctccattatttttcatgcttgaggggttactcgcattgcttgtactggcctacatgttggtcatatcttaggcctgtataacaccctaagactgcctaccactaactttcactcctgtctgagcttgtcggatggcttcctctaattttatgaagccctttgctcattcaaggaactctttcatattgttggttgagatccttcttatatctttcctgtagtcactcaacgaaaggtgccccccagcatggctgtataacaaccttcttctattaggcctttgtccttggtggtctcaaccataaacctttgaaaataatccatcaaaatgtcaccccggttgttatttcactttgacaaggtcttctagctgtattggtatttgtctcgaggacgagaattgtgtgtagaattctcatgaaaatttatttcaagaattgaatcttcctagagccagcttaaaataccactgctcggctaattctaatagtgtcaccagaaagatctgacaccgcacatcaccagtaaccttttggagatttgtttgcatctcaatgtacttgatgtgtgtaagaggatcttcttttccagtatacatcttccatacaaatatcttgacttaggcaggagtaaggcattaatatatgttgacaaaggagattcctttgacctatctagttcaaggtttaatgattttgagtcgactaggccctttatcatatctcttatttgatccacttgtgcttgcacagaagaatctaatgcagtaggtgcttcaacgagtggcctttcttggctgggttgaagcccttggacagccaaaccttggctggtcataccctaggtgagggtttgtctatggttagccagcccatgactaggtaactagctttggccgactagccctggatcaggtaacttgccatggctggccatccctaatttagtcaattcgctatggtcaaccaactctatgctaagtagtgtctggccgattgttctcccctcattggccaatgcggcatgtgtgttgacagggggttgatcacaccaattgctcgggtttggtggatccacctgtctaaagttattgttctatggtggaacaaagtcactttgattctcactccttgagttgatgttgtctattgcgtttccacttgttcattggcctagtctgtcaaagataggccttagaatgacttgctcctgaatgcttcagagaggagcatcactctattggctggccagaggctggctgaatagtgttattactgaggaaggaatcgtggccatcccccaacaccacctagtgccacgaacttgctattcctgccgtaagatttcttgacagaatttgtccgtctttaggcagggggaagtttgtccttgttcttaaggaactttggttgattgtttgcctgttgtctacttggctgtagactctgcccaatatgtcgatgagccttccttgtagaggatctctaaacaaatcttgtcctctcccagcacttctctcattaaactgccttattaggttactagtttcccagttacggtggtccagctctgcttgatgggcccaagggatggcctcctggtcgcccatctacctcaggaattcgcgtctctactgggcgaatgcattgcaaccaacaatgtgtgattcttcagtttggctgacttggactacgactactttgagcctttccagctcgatattctctcccaactccacatgagactcacaaatagtcggatcgcctattcttggacctatttccccgacataatcttggggaacaaactcagttttggtgcgtgggagctgttcaacattaacaaaaccttctgtttgaggtggcaatggtagatctactcttggcggtaagggatgttcattaggattagccaggttagccagggcaattggatcaaatgtgtcggtctagtttgttaagaatactaggttgataagattggcatgattgacaggattcgctgcatcagtgaaattcgtggaaactctagtggtggctgagacacgcacattataaggatcagccgccatagggtcttgaggaagagttgaggaagtagtagctagagttatccttgttacaatcataatgattggacaggatgacaaataatgctctcaatgaaagtactaaaatgttgacctcaaattttgtaaactgacaaaggagccttgtttatgatagacaatctattggaaatattttaccagnnnnnnnnnnnnnnnnnnnnnnnnnnnnnnnnnnnncctaatatgaattctaaaacaatcaaataaacac

SEQ ID NO: 117240 - DNA, 1098 bp, Cannabis sativa
atttttttcatagaaaaataatttatttgtattatgctacttttttattttttacttttgttttcatatttttttaagagatatctacttttatagatgatatttcaattacacttcttaagttaatgtaaattatgtattagacttaagtggaaggtaagagtatattgagtaatccactcataaaagtaggtatattttaatgaaatataatatgagggtattttttattaatggatacaaaaaagaggtattctttaatttatcatcaccgaaatatggtacttgggcttaggaatgcacatttgggcctgaaacccgaaccacttaattaatctgcatagcccgaacttaaaaacccaaaagctcatagtgtaaaaatgatgggtttgggtatcactcgatagttttcgggttcgggtgtaggtgttgtatttgacaaatgtctagcttgaaacatagttaaatataaatgtcccatgcctaaaaacgaaaaaccctaaagtagcttagagagaatgaaatggaacggaaagtaaatattttttattctattcttttgtttagttttattttaaaatatttgaaatgtcatttttatttagttatgtttttatttctttcaaccaaataccacttaatggggtgtttgttatgcgagtttgagttaaagagagtagagttagagggaatagatttattcatgcatttgaggggattaacattactgacatttcaatttaaaaagtaaaatttgcctggaaacataaactctttgttattcaaatttaatttaaatttaaccttcttattctcatcaagtctaaacctcataccaaatgccccttaaatagctcacctcttgtctcttgatctcataaattctctctcagtctccctcgatttctcctcttgttctctcctctcagttgcttttcctcttgatttctccttagaacccactccttctctctcacttaatagaggcccttaacctcgactcgccacatgcctttatgttaggtaaatttgaaattctatacttacatatacttaatattttttccctaaactaatacttttctacattgaaaatat

SEQ ID NO: 117241 - DNA, 1678 bp, Cannabis sativa
ccttgtaaaataatttccaacatttctcacggtgtgttgcagatgatgggaatccagggggctgttgtggatgaggaattattggagtgatagtgttacgagcaaggcgtgtgaggaatgtccatggtcctaattttgaaaaatcttgcctatatcgatcatagttcgatcttggtaaggtcgatctttccatccaagatccgtatttaagttcacggttaataccttcgtctaatttttcaacaaaatgtgagcacttcaaaaacatggccaatgataccacatgcataatagaaatccggtaagcgctcatatctatattcaatccataattcattacgcaaccatggcagagataccatttgaccttgtagcagtggtttcgaaacatctatgccaacccgaatccttaaaaaaggatcccacccttcattaagggagtcatcatgaacttcaagaaagtctcctatgagattgccaatgatctttgcaagagattcaaatttgctaagaaaaggcaacctataaacttgaacccaaaagggtgtggtagtgtaggaggtcattgaatccgataacagaacagttggagggcatatgatcatatgttggttagggaaatgccatagttctttggataatacactcttcatatcaccctcacaaccaaaagtaaccatataagagtctaaatcatagtccgaaatggtcacttcaaatcttcccagcaaccgtttcagaataaaattctacaatttctttggattaaaaccccttttcgagtatatacgacagatcacacgggatttagaaacaccaataggaggagcagaaatgttgttgatgctaaccacaaccttttctctttcagtaagagcattagaaacatcagttaagaaggactccattgaaatgttatagtggtagaataagatagatgagaggcaagaacccagaaaagcttcgaaggaatcaaaagaaatttgaaaaacagggagcaggaacagttagatgaaagatggtagaaaggaaaactgaaaattatagttaaaaagaaaataactccactaattgccacagagcatacatgaatggcagataatgctccaaccccaaatatatatataaaaaaaaataaaaaataatttttattatttttatatttgatatgaaaagaaaaattacaaagaaaacttaatttaacaaaatttttcatatcaatcttgaaaaatatatatatatttttgagtccataatttatttttcctactttttttttttctttcctaacgaccttaatcaaattaccaagcaggcaataagaattgagcatgtgtgcccttaaaaagctctgtggcagttagtttcctattttctttttaactgttgtaacaacctttgttgtcattttccttattttttcaagtataataacttctttttttgaaatttaactgttccctccttcctgttttcgaattttctgcattaccctgctctgtttccatgcttttgctatagtctccattcatggaaaacctcttgaacgatatgaatcatacactaaccttgactgaatctgaaagggaagttcaaactctccctactggtttgtccattggtaggaatgctccaacaaaccatgttctctataccagggtcatttcagcacgagaca

SEQ ID NO: 117242 - DNA, 3349 bp, Cannabis sativa
aagcaattgtgtatatatatataattaccaagtaagttgaatgggtccacgaccataatattgctttcctgaagcacatggataagttgagctgggagaacaatatggtgcagggcttctctccttattgaagcagtaaccccaggaatattgaccatcaggtgctcctgcccatccacctacatatatatacacacatataattaaacaatctaatttcaaaagaagcaacaaataaatgaaaaaaaaaaaaagacgacataattaaacatacctgtagtttcatgggatgtttggcctaagaaagcagcaatctctcttttacgggttgcatcatcacctgtggtgccgaagccagggaaggagttagaggctgcaatgaaagcgtcgtaggtgtaaaaccctctggctaaacatgcaccatcgttacgatgcttaagtagattatcaaaggtttctcttgaaatgattccaccaatgccactaccgccaccgccaccgccaccgcctcctccaccaccgccgcctccgccgcattggctttggcagcggtcgttacagtagtttgggccactgccgcaccatccaaattggctgcaacacatccctcctgggcacagagcacccccggcttgccatccacattgctctgctgaccctccttgtatggagaacaacagggacacaattgtcaatgcccaaaacttcatcactactatttttagtaactacttaggttgtgttttttggtgattgatttgatgatgttggaggagtaatgctggtacttatttatacatgtcaaatgatgtaagtaggatgatagatctccatagttatatcctttcctaattaataaataaataataataataatttttttaagtagtcattttggacttttatacatgatcacatgggtgttgttgcttatcagttcttgtcgccgtgagatttattgtattcattatttttttggaatttttttttcatgaaatttattgtattcctatgtgtgaagaatacaggtttatttatggcacatgtacaagacgaggcggcttctataaaatatatttatacatatatattttttttgaagataggcggcttctgtatatttatattaaatataaaaatatagaagtgtatggtgcctattttaattttaaatatatacgtgggattctattaaatagcattgcattattaggggtaaccctaatatgagttatataaatttgaggcagggtttttttttaaaaaaataaaataagcatcttcaatattaaaatgaaatatgatcaaagaacttaaaaatagccgataagctagggatagactctataaacacatattttaacacaattttttacattagttgtttgttatacctaaacttcccaaaatataagtgtgtgataaataatattcatcatccagaggtttacaagataaaaatacactctgaaaatatgaagaaactttgactaagtgataaaagatgaaacgaattattatgtggcaggaaacgaaatcaggcgagtactgacactgtatttagtagtcttctactatagtttagcgtttatcttttcaccaaattagagagaaggttactcattctaaaaccctaattcgaaaagaaatccaacactgggttaaaatgtttaacttactacaacaaaatgtactttccacaacaaaatattgacgacaatttctttcaaatgttctaaaaattcatgtaagatgacataatattctcttaaatgtcattaaaataattaataacatttaaataataaatgtcgtataaatttttaaaaatgacatgataaaaatgttgttaagaatatgtcaagataattttcaattgttattaaaacattaaagacaattttttaggacttgtttggtatgtcgtataaggagggatatattgtattgaataataaataacactatgtttggataaaacaatgtattgtattaattattacgactaaaattttatatatcatgtaagttgtattatttaatacataataaatagtctgtattagcttgtattgtaatatttacaaaggatctgaagttaatccaactctctgacttggacccgaacccggacccatatacccaggatttgaacccgaaccagacccgggacccggacccgggcctggaccaaactcgaacccggactcagacccgagacccgaacttgggacctgaacttgggactcaggaccaaaacccaggacccgtacccgggactcgaactcagacccggacttagacccaaacctggacccggacccagacctgggattcagactcggaaccagcacccgtacccaagacctgagacctagacccgggaccaggacccgaattcgtacctaggcctaggacccgaacccagactcggaacctggaatccggacccgaccccagacctgggaccaggactcggacccagaaccgagaccaagactcggaccggacccgggacccaggacccgaacccgaacccaaacccagacccaaacttgggacccggacccgaacccaaacccagacccagacctgggactcggacccgaacccaaacccagacccaaacctgggacccgaacccaaacccgagacctgagaccttggacccaagacccagactcggacccagacctggacccgaactcgagactcaggacccagaacctagactgggacccggaccagaaaatagacctgggctgggaccgaaacccagacctagacccaaactcgagactcggacttagaccctagacccgacccgtagtcggtgtttgggtcgagttttttgaaaatatataatatatataataaccttacacaatctattaatacaaatcaagaccaaacagtattgtattaaataatactaatacagtaaattacaatacgatgtaccaaacgagcccttaaactattattttaactactcaattaacattattaaaacaatgaatacacataaattacttatccatatacataataaattaacagacatgtgtgagttagatcgtaggtttcacacttattattacgtattaaattatttaaagcacaagtttcccaacgaaaatgatgaaaaaaaagtagaaacaaaaacatctacattattgaaatgtttgtttcttcccaaaaaaaataaaatgttaatttgtgtagtctttactccttcgtttagtatgtgttagagattttataacaatggaagaaaatcaagatttattacaactctattgtaaaataatacaaggactaaaataagagattgattaaatatatgcta

SEQ ID NO: 117243 - DNA, 1557 bp, Cannabis sativa
  modified_base (152)..(154): a, c, t, g, unknown or other
  modified_base (940)..(940): a, c, t, g, unknown or other
tttgtccaattttagtaaaaaagtctaacatggatgaaatttcatgggacataatttagtacatgtcaaagttcaaggagcataatttcgtagatttcaaaatctaaggagtatgatttagtacataaacaattactgaaatagtaaaattnnntaaaattagacaaaagcccttaaatttaacaatttcaatagttcaggtggcatttttaccgaccttaaaagttcgggagacataatttggtacatgtcaaaattcagtggaaaaaaatcctaattaacttatataatttatatataaaaataaaaatattgtttctaaatgcataatttttttataaataattttttttacctaatattttataatttctatattgttataaattttcaaagttaatatctaatatattggtcttcgctcaaatggaatccttcacagtaaattcccttgctatgtttctaaaaaataataatgaacaaaagtgatacgattcttcatttgttattattttatgtgtattaattattttcatttttcatacattaaacaataaaaatttaaatattggacatattcgccaaacaccataagaaaattatgtccattgcttttatgctttaaatccttccatctccacttatattatattttattccaaccacaataagttgagaactgataatatgaaaaagtaataaaatcagtcaaaacattcaatatgatattcccattcagcccaattgggcttcttagtccatatttaacttatttatgtggaattttgacaatacaaaatatatatatatatataattatttaataaaagagcgcgagtactcaacctagaatgacgagtatttaaatatgactacatagacaaactggaaaaactggtaaacacaatgaacacgaagaagtatagtggttcagtcagancacggtctgcttagtccactattgcaaagattcttctctttattcatactagatcactcctttatatacaaagcaagtgtcccttttattacacaaaacttaattatcgaaccgttttacattgaatatcaacattaaatttaagaaaacataaatggaataaatgaaaaacagtttcaatctgttctattgaatacatcaatgtacgtgaccttcatagttcgagttgtctgttcatatactcacataagctcgcaggcttagggtgcgttcttgttaacagaagactaatgagtcttgtgttaagatatatgcgttctaatcgagttgcgtatatggataccttgttagcatcgacaactcaggacgtgcaagtccttatcggctcttcgagcacgttaggtcattctgacaaactcgctaagtaaagagacgatctttactaaattgcaggaaaatactttattgacattgcatatatcttggtatatacgagttttgaacatgtccttctcggtcctacgtcatgcgaggggtaataatgtgactagactctgtcaaggtcacatcatctcgctgagcttggttcaggagaggtttattctcgagaggtcctc

SEQ ID NO: 117244 - DNA, 807 bp, Cannabis sativa
  modified_base (709)..(710): a, c, t, g, unknown or other
ttgtttttcaaaaataaattttttaaaaataaaaattttactttcattttgtaattaaaaaattaaaaaacataagtgttgtcaaacggcaatttaaccacatagagagagtaattcttctaaagaaaagatgtataaaattttctcagatttttcttaaaatgtttatttatttctttttcaatttgagccattttcttttctttgtcgaacaaatatattgttataaataggatgaagaaataagtagcattacgtaaaaaaaaatagcattactataagatatttaattttttttaaatataatataatactattagtataatttaagagatagtcacatattttaatttaaatttaatgtacaaatttgatatgtataacatataatttctcatacatataaggacagacacgtgtaaatttggtgcattccatattttctgtttaaacattactatcaagcactaactacttaacacgtggcaacctataaataatgaagagttttatataattttgagagtaaattgcggtataaatatctaatatttcagattttatacacttaaatacctaatatttatttttagaggcaaaaatagctaatgttacaattttcttacaccgatactaccactttcgttaactcataaatatggacacgtgaagggttcagattcagtacatttatttttattttattttnnaacttaatattcttaatatcagaaactaaatgctacttgtttaaaaaaaatgtgttctcattaacaattttcacatgatattgacatttcaattcga

SEQ ID NO: 117245 - DNA, 2144 bp, Cannabis sativa
gtgacgttattcaagtcccctatgatacactaggggagagtcgaagattatttcagagttcgaatgaggttccaagtttgatggcataaacctctattaggctcaccataaaagcctgttagtctccaggggttagaaccaggctcagtaatttggatatcaatgaaattaaaggaaaaatttaacagttgggcatctgcactattcctccaaagcatgacaatacccccactatgacccctggaatccacagagtacaggccctcaaatcctaacttcacacgatgcctttccaacacatcattacgacttagagtttcatagagaaataaaaaattagatttcttttggatcagaagaaccataaggaatcaaaaaacccatgggttcccaagcccacaacaattcaagcataatatactcatggtgaccgatgggcctaagtaccagaacccaccaacaattattttttgagcccaacacaaagctgacatcatgcccaacaaaatcactaccatcttcttccatcacttcagacgtaggcccacgagaattaaatggtcttaattcagaatgaactgaatcaataggcccagtaacaatcccatgtttagtacaacaccgtttagtatcaacaatcaaattttcttctaatttctcctctaatgcatccacgtggatggcttccttagaaatgaaagactttgcacctatattttacagaatttcctcagctcccataactccctttgacttactattattagccagatattcaattgatgcaccacgatttccttcactcaattcctcaatcataggacgatgattgatagccttttgtctgttcacactaccgtttgaccaaccaaaatgcaatgagtcgtcttcatcaccatttctcaaccactggcttccgatgagatggtttcgacggtgaggttgggctctcatccaaatgccataaggctggacgatttgatccaaaggtgtaaggatcccgcatacaaaacaaaatgtgggaagaaattcatatttgaaatggcccagaaaccttcctccccagtagtacgttgtagcctcattctttggttcaatggaacgataacatccaaagttaatcgtagacgcaaatattcacaccatataccttagaaatttttaggatcagactcgacaaacttacctatgtagttaccagtcctctgaagaacttgtttagatttgaattcgtactgaaggttatgtacttgaacccaaatatcaagaatattgatagtcactaactgtggatcatccctttgctttagacgtgcaaagacgagctgaatacggttaaaagtccatgagttgccttctatgacacgttccagatcaagttcatgataaaactagaataagaaacggtttggttccaattgctttacatacatacatttaccaggctgccatagagaagccattatatgtcgcattacatcataatcaatcacctggctgtaagaaattacccaacaatacacaggcgaacatcagcaacttgtacatcagaattctcaatgtcaaatgtagagacaacatcatcttctccttctatttctatattagcacatagttcctccatatccttgatagtatagctactagaatccatattcaacagatacaaaacactaagaacaaaaagaattaaagaaaacctctcaccatgtcaaaagacaagatatatggacctaatattaaattgtaccaataataactaacttatatatgttaattaattaaaatgttaatataatttttaaaacaggtcatacgagacgttagggggtcaaatgtgttcattggagtgtatccaggtatatctgtagcaaaatacccaaaataacctaaaaactaagaatgtaaactttatgtattaaaatatatcaatgatatcattacacatgcaaattctagcagatacttaaccgatgtaagagctgtaagttttaactattattatcttatttattatattagcaaacattctaaaatatatatatactaataaatatttacttcttttactgtttagggataagaagacatacgatgtaaaaattgagttgttaccgttacatcaacagtggatagaataattg

SEQ ID NO: 117246 - DNA, 915 bp, Cannabis sativa
gggcataaaacccaacaatcaaggctacaagaattcttacaaactctctgagattacgagaaaatatctatgtctagtttagactctctctctatcaaccttacactatcatgatttttgctcaagcaattatggtctaaatcactcacttgattacaaaagatttgatagctattcataaatttgcattgttgcttaaattagctccaaaactatcatgacatatttacgccgccttaaatatttcagctcatcactaacaataataatttacgtaagcttgagaacacgcttttagtacagataatccgaaagctttaattagaaaaagctatctggtacgtacaagcactccttccatatgaacatcattgactgataataagctatccaaaagtgcgtatccaaattagtgacaagctattcaaaagacactacatttacggaagacaagcttcacgaaggaaccatccagattggccacatgtttaatgcctttatgacatatacaaatatttgtgatctattaataatgccataaattaactttaaataagtcgttaacggatcaatttcaaattttatagtcaactcaaatgtgatccatttattaaacaggtcaacatgaaaactgacccgaacttgtttaaggtaaatcgaaacccgctaacttttatgcaaatttcaagttatattatcatgtttgacccgctttgccaacttgtagttataagatcaaaaactacgctcttaccaagtttttttttaaatatttaataaatattattatgtattgaaacatttcaatgcactccttaaaaatgatacatcgatgcatttttatctattttggcagtcgaaaaactttttaagtttaatttttttagtcatgtacattataattatttaagacat

SEQ ID NO: 117247 - DNA, 1466 bp, Cannabis sativa
taaaaatgttactttttgtgatgcatgccaaataggcaaaatgcaccaattcagctttaaagctacagataataaaaccaaatctccttttgctcttgttcatacagacgtgtggggtccctctttttactcttctagagatggatataaatattatctaagttgtgttgatgactttactaggtttgtttggatatatccaatgcaatccaagtctgaagttaccactttgttcactcatttcactgcctttgttgaaaggatgtttgaaacaaaaataaaaagcgtccaaacagatcttggtaaagagtatctccctctgtataacctgttttcacaacttggcatcacccttagaaaatcatgtgctcatactcaccaacaacaaggtcgggttgagcgtaaacacagacatgtggtggatatggggcttactcttttagctcaggctaatatgcctctcagtttttggtgggaagcctatgcttctgttgcctatttgatcaatcggctctccacaccaatactcaattacatgtcaccctttgagaaactttaccaccaaacacctgattacaatatgatgaaggtgtttgggtgctcttgtttccctctcttaactccatacaataatcacaaagtggcttttcgatcgagcaagtgcgtgttcattggctacagccacactcaaaaagggtatcgctgcctgcattccagtgggcgtgtctacactgctagaagtgtaacattcaatgaatgtgagtttccctatcataccttatttcctgaatcatcatctactcaacccatccccactataatatatccaactcctgtccctactcacactgtcttaccacccaatcccactccctctccacataacagtagtcatgactcaataccttctcacaattccacaagcccaactatgtcagatcactctcacaatcccagtcatcaatctatacaatccagctctagcacacttccttcgacagattctagtctcccttaccctttacaacctcaaccatctgagtcaactacttctgtctccactactcaaattcccaccccaactgtcaacaaccattctatggttactctatccaaggcaggggtttttaaacccaaaacttttattaccgaagttaataatagaattgaaccaacttcagttaagcaggcccttgctattgctcattggaataatgccatgaacaaagagttccatgccctcaaaagaaaaaagacttgggttcttgttcccccaaccgatgacatgaaaataattactaataaatggcttttcagaattaaatataatgcagatggaagtgtcaacactcacaaagctcgacactacaagaaaagggctttttgccggcgcatttggtgacatgcgccggcaaaagttgtcgacacaaacaaatatatggaatcccaatttttttttgggttta

SEQ ID NO: 117248 - DNA, 2864 bp, Cannabis sativa
aataaaaagtcactcatgaatttctcataacccaagaattctattatttatatagaatagatatatatatatttatatatattgcatctctgtatgggactgggttcactatatgctttgaaataacaatttgagggatcgagttctggaaaactcggccagagatcactttggccaaacactaattcaaaggacacttcgcacacgatccccacgagatccgtaagtacataactgaactaattaaaacaacatatatatatttatatatatattacatactaccatcatttggttcttaactaataataataattttttcccacactactccatcatatattaggtacaggtcttttttcaaaactctcgattgattcctctataaagtatatatttatatatcttacttctttttcgaaatattgaaataatatgactaataaagatgatttgaaagagcttggatattcttttcctccatctctaaactctgttatttgtaaatgacttatctgtttaacaagtttttatcctaaaaaaaatgatttgaaagacttgttcttattttgattgcatgagttcagttatcttaacttttgtttcagtgtactagtacagcggatgaaacttatattatattaattaggcaaaagagtaagaatgagatctgtaccttatcatttttttaatttttttttttttatcattattatatatttttaggatttttggttcttcctctaaaacataactaccgagcctctctttcttatcgatcgacatgaccgtattttttatttttttggtaaaaaaaattgtatatgtgcactgtgagtctctgcacatacatatcattagtattactttataatttattattatcattattattaaaaatgtgttctcctctaattatgcaggtttgttggttaattctttgagtacgggtaagcttttatttcggcgatctgtatttttattcagaccttttgttttgatcttttgttggttttttgtttttaatattagaaaaataaaaataccttctaaaattatattttataaaaatagtttttttttttttgattgagaattaaaattttaattttttttaaaaaattactttcaatttttttttaaataattttttttattaatattttacacacccaccccaacctagacttgaaacccaaactccgacccaaacactaactcgaaccccgattccgtttcggacccgacttaaataaaatcaaataaaaataatgaattttattgaacacactttcattttttatttttaaaaattaaaaaataaaagtaattgtagattacattttttatttttcaacaaaaattttgtttttatttttgtgattaaaaaatttaaaaacaaaagtgttattaaatgctactataattaatttttggatcagagttttgtttaaaaaaattaaaaagtaagcccctaaattaatttgagtaaatactatttcgaactttttaccccctattttgttgaataacaatatagattatgtatttttcaaaattgtataaatagaaccataaattatttttcattaaaataaaacttaataataatacgatctagatgtgttataacaaaattgtttacactttttgtatctgttcttgttaaaaattacctttaaattttttatattaaaaacaatatcgaaaattgagcttaaaattctatttttatcattttaattaaaaatacaagatctattttgtcatttatcaaaataaaaagttcaataaataatttttacaaaacacataattttggtcaaaattatttttaaatattcacttagctaggttttatattaaataataaattatatttgaataagtttggaaatgaaaaaatgaaaatacttttcttaagaaaaatacatataatatctattatctagcccggaaaaaaagaatgaaagctcaaacacatggtgagaaagggaacacgaaaaattggggagggagaagggcgagaaataacaattaagtttttaattatttttttaatataatgagttttagtttttgttttctttattagtttttttattttgtattataaagtaaataaaaatttatatgtttgtaaactaaaagttaaatgattttacgctcaaaaaaaagttaaatgattttggttataataaaagtatttttgaccaaagtcagatttatataagcctgtctttgattttccagaaaaactataaatattaatgatttaattctacaaaatagggttctaaataagcaatgtattggcaaaacacgtctgaaggagtaaacatttttatttttatttaaaattttctgagttgtggttcatagaaagtattttgaacagaaacttatacctctgttttgcggtagaattttactttgttttaattaattagttagaagtttagtgttgcattccatatagtgcgttagtgttagttacggatttcggtaatagaagtgaaaagcctaacacaaattaactttgtaagatatattaagaaatctgattcaatttttttttcatgaaagatcaccatttatttatatttgatactctataaaaataaaaataaaatactaaaggacacttactattataacgtgtaacaatattgtgtaatttaatattatgacccacatttaaattttaataaaaactataaaaaactattaatcaataataagatgtcatctcatagtattgtagatattgtcctatataaaattgttgtccctaccggacagggacacgtggatcagaacgtcttaatgcttgaattatttgctaaagtctttgtgatataagg

SEQ ID NO: 117249 - DNA, 1747 bp, Cannabis sativa
ccgttgtggggttaatacaattgtcttatcaaacaaaaaaagataagtggttatttgtttaaataataatgattataggttatctcattagataacagagtagattattttattaaacaacgagctatatagttaagtgcaatataagatttagaacggttaaccaagtatgaagatagcattggttgcaaggaagcaatagtagcgtatgaaccaggagtgaaaccttagtggtaatgatgagaaaagaatacaagagtcttagattttgatgaatcagctttgtcaataggagactcactataagttagcatggtagttcataccaatggattgtcagtaaaactgagaatgtacttgaggtgtgtatatttctggatgtggttggaaagattgtcaagatttctacaaaaggcaagaaagagacttcaggatcaaggagtgatctttaattaatcgtttttagttgaggaatcgagaaatggatattcccagtttagctatgggtactcagtatgagtaatgttgcctctatcatatacgttgaattagttaactttataatggtggttacgtgtaaataattgtgaaatctaaacatcatgccagttcaagaggaattgatataggttgaaaataggttgagatggacaaagtttaagttgacatcaatataggaactcatcaaggttaagtaaacaatacattcaaggaattgtaaaaaggccaagccaatgaagagaatgattgaaattagatttaattgaggaaaggataaaagtaggaaatacgaataggaatgacaacgacatgtcttcttttcgataacccaccatgagcttacttttgatttaagcatacttaatttggagtaatatcaagatgggaaatctttcaggaagtcatctcagaaagcgtacgagtgaggacaaaatatgccagaagattagaatgtaggatcaacagccgttccaagaattatcaagaggaaagaatgtgttaataagtatagattaataaggcatcgagatgagtatatattagtggatgcaagtaagaaatgctataattggatatgtatcagaagcgaacattcagcttgtcaataagttaaatcagtacatcagcaactagtaagattacattagcttaggagattccagaggaagaatagaaacacataattatagattatgtattgtgggattttatgatttaaaccgagtaataacgattggatataccgaaccaatatgatgtctactaatgcatacaatttatacagtaaaaagggatattgagtttatatgaatgaatagtttaatctcatgaaaatttgaaagaaaaaaatatctctaattgtgatactaagggttaaagaaggttattgataaccatagatattaaagtaaaaatagtacaacttttattctcaaacagatggatagtctataaggattaataagatattagaaaatatgttgcgggcatatatgataaggttagagtatctttgaataatctctccctctaacggagtgtttgtttaaaagtaataattaaatgtaccattagttaggcactttaagaagtgtggtacgagagaaatattagatacatgttcactggaatgaagtaggtaagaaaaaaatacgatggactggaaagatccaaggaacttataagtaggggtgttcattagatcacatccaatgtttttaggccatccagatccgatccaattata

SEQ ID NO: 117250 - DNA, 1750 bp, Cannabis sativa
  modified_base (1033)..(1034): a, c, t, g, unknown or other
  modified_base (1632)..(1652): a, c, t, g, unknown or other
tttaggggaataatatatgggttatttaagcatggaaattcaaatttcccatataaaaatgtaatttttttacaaaaaaaaatagtgtctcatgtaattatcactttaattattactagtataggtagtttatttttacaaattgcttgcttgcaaaagttttatggagttggttcatcattttaacatgtagaatttttacacaatattttaaaacgttatttgaaaatatagcaatttttaatttgcctattttttttatgagattagactatttttattttttttattgtgtttttatgccatatttttgttatattttcttttaaataccatatttgatttttttattaaacaaatctaaaacactagaaattaattttttcatcaaaaaattaatttcttgatgaaaattattttgggtagtgaattgataatcgagtcttggagcttatgagaagtttgtgattggttttagttttggtattgtgttaaatttgttcaatattaattccatacaataaagtagaatacaaaacatgaaatttatctaaggttttagtattcgtaactagtttcatcattaaaaactaattttgattacatggaagtaattgatttcttaattcattgcattaacaaattatttttaactggtttctttatcaagaaactagttttttcatcaagaaattaagaaactggttttgattatatagaagtaaaatgtatatattagtttttaaattttttatgatgttccttctttatctattataatttatctcatgtttttaagtttttttcttcaatgtcatatttaatgcaattaagttactattgaaccttctattttattaaatgacaaaataaatcatgtgtttattacaatagtataaataggaccccaattttaatttttaataattttttaatataaccaactttaagaaaattcctgatacgaaaatatgcagtaaacataactacttttttcatagcatctctagatcagattattattaagttttannttgacaaaaaatcagtttaggatactatttagtgctattttaagaagtacatggtctactttgtcatttatcaaaatagatagtccaataacttttacaaaacacatgattcaaaatagtatttaccctatgttttattactttcttttcttttaatcacaatttcttttttatcaacttattcttagctttcaagcaaaagcattagcattaatggtagccttggatgggtctctcactattggtcttcctctttactttgtggaggctgattgtttagcttttgttttcgcttttctgaagcgctcatccttttgtagtgagccaggttctttgttagatgatattgctagtttgcttttttagttttcctttggtatccttagttcatgtttggcgtacaaccaataagattgcttatgaattaactgtgtgcatacacttaaggtggaaagtaaataagcttggattgaaaattatttatcttttttctttgatgtattaaactccgatggttattaataagagtttaatttttttcaaaaaaatatatatttataaaactagcgcgtcttaacattacaaaaaatcttacttnnnnnnnnnnnnnnnnnnnnnactaaaagtaaaaaaaaattgtgaataattataaatcatcattcctatgttgtgattaaaaggttcatggctacaggtattagttacaaaaattacaa

SEQ ID NO: 117251 - DNA, 1348 bp, Cannabis sativa
ttacaacaatctacacacggacaatgaatacgtttaggatttttagaattctttaaggcagactctaaaaatgcatcgaaccttacttgaaatcgcaagtgtctctctcctcacgcatccatcatttatccataaaaatatcctaaccaaaagaattaatcagtatttagtaactaattataactagttactacttacacaatgtaactaacaaggtatcttacaattaattcatattaatttatttattactaaaattcttgttttagtttggttcatgttattaagttgtataagttgtaattaactaactagggtagtagtgtttagttgattggaatataggtagaattggaatgacttttcctaaagtgaatccattcctttgtttggtttgtcatttataattgaaaagtttatataaatgtgtcatctccctagaatgcactgttgttcagcttttgttttgcatttacctacacatgtaaacaatatttgtgagtcgacagactcagtaagaaaagtataaacataaacatataatcatatcgtaaccaggcgcccatacacctaactccattctcggtactctagcctataatctcggtactctggccgatatactcaataatctagtcaatatatactcggtctctagtcgatattctcggtcctctggctgatgttctcggtactctggcagatagactcggtattctagcagatgttctcggtactctggttgataaactaatatgtatgataaacatgtatgcatgtatatctttatactaatcttaccacgattcttaatttaggtgtgtcggtcaacttaaatggaaactactgctcgacaatttaaggcccttaagctgaaatctcttttactctatgaaattcttatatagctagactcctctgatttcggtatgaaaatgaagaagaaatttggttttagcttgaattttgcttggggccgaaaaagaaagagaaaaaacttggaaaattttaatttttcttttaatcttctaacacaatatatcaatgtttatccaattaccatcataataaacattaggagcaattagtcctcactaatgacaaaaattactaactttggacaaaattacaattttgcagttttctttactatgaagcaacctaaaatgcttagatgtataatggttcaaaaccacaacctcaaaaatcttgagacatttcaaatgtctaactatcttgacccgctaattctaagatacttaatccaccgtatccagataattctaatggccaaatcaccgtattattagaatatttctaattaaggaaataaaataatattattgat

SEQ ID NO: 117252 - DNA, 889 bp, Cannabis sativa
ccgagagaacgacctgagaaatcatctaacgataaggtttgtggatgcgatcttccgaaaagggacaccaaaagactagacgaatagattgttgctcttaccaagttggtccgaaaataaggtggggccctttcaaactcggaagacaaatatctggagtcgtgcgacaaacggatcattgaagccccacaatctgaaaacttcaaaaagccacaaatagagtttgtataatggccgaacggaccctaagacccacctatccaaatacaaccagataatgcaagtgataagagtaagtgatgacgctaagtgcctctataatttattttccaaatattaacacgtgcatcaataaaaacatgccattaggcccgactttgggctaaggcgggctaggcccatgcctaaggcccacccaaacccagggcccaaacttttaatttaatatttttgtattgaaaaaaatagtattaatttttgtaaaattttgtgaaaagaggcccaataatacatactttaatttatatataacatacacaaatattttgagcctattattactcaaagtcggctctacatgctatgcgtatatttgtgtatacattaacaatacatattgggatttaacagcagcgttccaacagaattgtaaatatatagtaaaatagaataaaagttcagtaagttttaccgtcaaaaaattaatttatagaattaagtgatataaaatttaagtagttttgccgctaatattttaaaatgataaaataaaaagaaaaactctaaacatgtcatcaccttagtatttacatttaggctaattagcaatatttccccccgaactttgacatgtactaaatcatgctcactgaacttttttggccgttaa

SEQ ID NO: 117253 - DNA, 2138 bp, Cannabis sativa
aaactaaaagataaaagcgtaaaaatgctccaaccataatttaaattaaaccgaaaaatgtgctaaaattaacctaaattaaatactaaaaatatcctaacacatgccatccaacctcggggctttgtcaggatgcatttggaacaaagcattacggacttcctcgtctgaaattggagcaagcaaagcttcattttgagtggctgtaacagtgctaggaatattgttaataacaccagatgtatcaaaaccagtagagctaaagaggttatcaaaataattaataataacatatgataacccatcatgccaacctttccagttaccaacagaatctcgaagcttagagattgagttgttttttttttcgagaagtagaagaagcatggaagtatttgttgttgttgtcaccttctcttagccataattgctttgatcgttgtctccaaaacacctaatgctgagcatatacttcgaatagctctttttcagcttcttggaactttgcaatagaaacagcatctcttcccttcttccatagccgaacctcttttttacattggtgaattttgctcttaaaattacccgtatagaattgtccccattcagccaaagacttgccacagtaatcaatcttctcagtgacaggtttcaagttacatagctcccaactatctttgacaatttgtgcacacataggttctctcagccatgcgtttcaaacctgaatctcttcttggtaggataagcatcttgaacacaaggaataagaaaaataggacagtgatcagagctagatatttccatattgaaaagctttgcagagttgaaattctcgagccatctttgattaacaacaactctatctaatttgacctccacccagttattagtacctctacccctctcccacgtgtaaggatagccaactaaatcaagatcacaaagattacaagcagcaagagcttcattaaacccctcaataagccaagtaggataggatagggataaggattactaaatcaagatcacaaagattacaagcaacgtttatggtattaattgagtgatttggaggaattttgggccattaattagaaagactcccaagctttcaaaaacttatgcatttgcatgctggaaaaaaaaaagtaactagttactagttaataattttcaactttggccaatttttctctaaagtgtttcaaatcactctcacttaattttgaactatttatacacattataaatgaataaatcaagtctccaacatctatattttcaatagctatcattcattcacattcataaataattagtaacatattacacatatttaagagtgaaaaaaggtgagagttacatattactcgatcaccaaattaaagaatttataacttttattttgtaatcattctacacacattttgtaactctatatatgttacaatttgataaaattaataatctgtcacacttaattatttaatctaaacattatattatataaaataatataacaagaaaatgattaagaagttgtaataagagattgacagtagcattcttcttttatttttttttttaaaattttattaattggtgtgccgttaattattaattcatagccttggtatgatgattatagtatgtaatttttatgagaatggctaaaagatactattggtacttaataccttttttagtgtcataccgttttaagtgtaattaaatagcagtctcatataacttaagaaaataaattttaagaaatatcgctaaccaatcataaggtgacacttataaaaggtgttggataccactagtgcccaataataatactcaatttttatttggtgtacgaacatttcagggatctttcacgtaatgattttagtggatacatacctaaaagcctggggaacttaaagggccaaactcaactcgagtaagcttttgcacttattcttttaattttctacctgatcagtaggggtgttcataaaatattcggttcaattcgatttgcacgatttaatctaatccaattcgtaaagtacggatatttgtacttgtgtggattagattggattggaaaattcaaaatctgtacttgtgcggattggatgttgatt

SEQ ID NO: 117254 - DNA, 1149 bp, Cannabis sativa
tatctacatataaaaaatttaatgtatatatttgagtgagggctttagcccacatatgggctaaagtccctccgtccctgcttacaaggcgctaattacataataattatttaaacaaccacatcatcacattgtttaccaggtgtgagaaaatttgacataaggaccaattcgcagcacaatgaatagtttatggactacttttaacagcctaaaaattttagtgagcacaatattacaaaggtcataatttggagacaaaaattttaaatagccttaaaaattgataaaagtacccactactattattattattattagaacgtactactcaaattagcgttaaactctaataggattatcctaattttctctaatttgagtgattattatgtaatccaatgaaattattgaattcaaaaatttttgtccaattttctttaattttactaaaatattgatataattcatgtactaaaattgtgtgcttcgcatatcgtcttctctaacttttatcgatattaggtattccttaataaaatttatgatagttttttatttctatttttaaatagaggctgaccatatcaaaatgttttcaaccccaacttgcttgttcaaaccttatttatttatttattttgaacaattagaccttatttattttatatagagatacttttttttatagagagatactttaattttttaaaaaatataaatagtggactgtggaagaagttatataaatttttatatagagagagacactttaatttttaaaaaatacaaatagtggaaaaagttatatatttatataattgtcttatgggtaaaaacaaatatatacacatcatttgtaccaattcaaccaattcataatttattcagaataaaaaaataaagaaaactcatacaaatcgttattagtatacaattaagaataattgtatatttgtatacatgttaatgttatacaaaaaatatatgtcaaaataagggcataaatataaaattttacataaaataaactaaattataaatgcatgtattgtgacagtcagtagtcccgtgatccgtaaggagaaataccgggtaagctgtacaatcccacatcgcctgggaaaggtcaagtgggatgattctaag

SEQ ID NO: 117255 - DNA, 1121 bp, Cannabis sativa
aataacagtataaacaattatttaaatatccataaataatttcccataattaatcataattaattggtgatttctaaattaaactaagcggtatttacagtaaaaatataaataaaaaattaaatgtaaaagtgtaaaagatttacaaaaagtaatagtttatgtaaatattctattttttccatcaattaaatttataacagaaactcttttctttaattaaaaatgaaaccaatttatatatatgtatgtatatataaaagatgaatgaatttaaatgatattttttattaacaaattatatcattaattgtaatctgattctttctaatactattttcacttatatattaattttaatagacatatagttttttagtatatagagttgttaacataattatagttatatcatgcatagtagtattgacattatgtatataaataaacacctaattcaacattaaaatatgcatgaaaaattagtttttttttttttttttgtcatgatatataaaatttagttaagtaaaaattaatttttatattaattactttttgagataaatgtattagtattatttaacacattatttgtttctttttcaaaagaggggatgagagtaacaaactgttcgaataattattatgtataattttaactttgaatgtaacaattgagaaagaattagaagtaaaaaaaaatgttcattcaaaaacaaaaagtatgaaagatatattatttaattattgtagtactaaaactacattaatggggataataagtaaataaaatttgtttagttttaaaatttcactatactatatgactaaggaaaaaaaaaaataatgcacgataattaaagaagagatttttttttgtaaaaactttggtcaacaagtcaataatttaaaaataataatataatattaattttagatagtcttaatattattaaacaaaaaagattcattaagaatttcatgagatgatcataccaattttcttaaaaggacttattggttcttacaatgatactagatagatgttacgtgccaagtcacgtatattaattttattttagttttttttaatatcataattttaaaattaataatat

SEQ ID NO: 117256 - DNA, 1563 bp, Cannabis sativa
cttggataattctaccaccaataaaggcactttgatttgttgaaattacggtactcaagctttgtttcattcggtttgcaagacactttgaaaccaccttataaatcacattgcataggctgatcggacgaaattctgacatttttgttggcttagggactttcgaaataagacatatcagagtttcatttaaaggcttgcaatcggcattattatttaaaatgtcaaggcaggcagaaataacctccgtacccacaatatcccagcttttatggaagaaaagacccgggagaccatcttttccgggggctttcaaaggatgaatttggaacattgctgatttaacttcatcacaagaaaacggctccaacaacctgctattttctttggcactcaatcttttaggaacacacctatttaggattgtttgaatatcaattccttcattagctttggaaaaaagctgtttaaagtaattgatagcaatactctcaatatcttcctcctttgttctccattgctggttgttatcgaaaaggccctctatggtgtttttctttcgtctattagaagctttatagtgaaaaaatttggtgtttctatccccatgttttaaccaaagggcgcggcttctttgcttccaatagatttctagtttttcctccacacaattaagatctttttcaagccgatttttagtaatccaatcttccatctttgttgaatccgcaatccttttaatcttctctttaagctcttttgatctagccaccatctcttgtttttgttttttattccatctgttcagattatggccacatttgtgcaacagccgagagagtgctggaaccggttgtagcaagtcttgctgaccccaaacatcttcaatgattttgtggcactcctcattctccgcccaagcttgttcaaagtgaaatctactaccccatcttttttttttgaatttgtttccatttgtccctatttgagcttggagaagtaaaggtctatggtccgagttccaccaattaaggagagacaccttattcttcttggagttccttttccactcagcattacaaagaactcggtccaatttttcaaatataaggttggaagccctaccattacaccatgtatagtcacctccttccgcacgaagttcacttaaaagacaatttgaaatggctagatggaaatttctcattaagtagtccggtttgaggccccctccctttttttctttttggttgatgatttcattaaagtcacctccgccaatccacgcacaagagaacattgatttaagcctatccaacaatttccaactatccattctacctcccggatcagggctgccatagaagccggtaaagcgccaaagaaagccaagattattttcaactagagcatcgatatgagaactagtataagatttgatatgaaccgtatagtctttagtccatagaagagccaaaccaccactttttcctttagcatccaccgaaaaacatccttcaaagccaagtgttgaacgataaaaaaaaaaaagaagaggaataa

SEQ ID NO: 117257 - DNA, 1175 bp, Cannabis sativa
atttcaaaccacattttttttttgcggtgcggtgtggtgcgggcggtttgagcggtttgagtggtttgatgaacacccctactgcctaggctgattagtcccactcaagctgcttttgtcccgagaaggagtatccaagacaacaatgttattgtgcaggaaattatccactccttttatagaaaacgtggaaaggaaggattctttgcaattaagatcgatctgttgaaagactatgataaactgagctggacatttgtgaaccatgtcttgacctgctatggtgctccatctaagttctgtaattggatctctagtgcatttccacaactactctaaacgtttatgttaatggtgggaaggttgggaggattgtgccgaaatgtggttttcgttaggaggatcctctatccccgtacttgttcatttaggccgcaaaaattctgtccaagttgttggaggacgctttgggaaggggtgatataaagggcattagacttagtagagggcgcccgatactgtctcatattttatttgcagatgacctaatcctagtggttagggcctcgatatctgaggctagaggctactggaattgtcttgagaaattttgctcttagtctggccaacaagtcaataagcttaaatcgtccattttctttagtaaaagtacttccgacggaactagaagatttatcaaggaagagctgggaattggttgcccggatggtaacattaaatacttgggccttccccttttcagatccagacaaaaggatgttgattttaattacattctagacaacctctcaaaaaaactgtagaggtggaaggcaaaaaaattgtccaaagcgggtcgggccacccttataaaatttgtgggcctctcgatgtcgatgtatactatgcaaactactaagctctcaaatcgtttggcttcgaagattgatggtatggtgcgagatttctggtggggattcgataaaggtaatgacggggtgcatttgaaggcttggagtaaactctgcctgcccaagtcctagggggcttggatttagaaacacaagagagatgaatctggcttttctagccaaatgggggtggaatttactgacaggcaaccaatctctctgctgccgaatcctggaaactaagtatttgaaaaaccgtgtttt

SEQ ID NO: 117258 - DNA, 757 bp, Cannabis sativa
  modified_base (459)..(465): a, c, t, g, unknown or other
gaggtttacaatggtgataaattaaaatggacatcccttttccatctcatcaaatcaaacaaaatttaactgaatagattgtttggacattggacatgacccgttgcccatatataaaagtacacatcgtgataaacacatccacaaagtaaaaattgtatagaaatttcaatcaagtaatttatttctatatttattgaaggggaatggaaggggtgtttgggtcaaattgctattggcattgagagcacagcaggtacgtaggggaccagatcagatgcaaacaacacaaataataatacatcaccagtccacacacataccctacccttgtggtgcagaatgtgtgccaggctgagggctctacatctacagttgcctgaatgctttcatctcatgcctccagactcttcacttcaccaacctgcgaactgacttcacctctctctctctctctcnnnnnnnctctctctctctctctctcctgctcttgtggggaccctaccctacctagtaagtcatttcttcatctcattgctctccaccttttgagatcaagcaatattgacgcccatttacaaaatcactgcatatttttgctatttaagatcctcagaaacaacggtaaaataaaattatttttactttaaaatagtttttattttgtatttttacggaattttacacaaaaattcctacaaacttaaattgcaaaaaattcgtatagcaacccacataaaaaccatcggagaaacta

SEQ ID NO: 117259 - DNA, 1669 bp, Cannabis sativa
aaaacattgttatcctcagttaacttagacacactaacaagatttttagttattttaggagcattaaggaaattatttaaatgtaaggagacattagaggaagggagagatgagttaccaacataacttattgagagtatttttcaatttccaactgcaagagtatctgaactgagtaaggaatttaagattcaagatattttattccctgagcatgttgctcttgtatatgcataccaatcattatcatccacaaattttggtagagcaaagcttaagtgagcttggagatcttcttgcttatcaatttcatcaaggtaggccctatattcactaatattgggtgtaacaaaccctttatcaaatctgtaatgacatattgcaactatatgttctgctttatggcacacttggcacaatagccgtgtaatggatgggtctccacgaccagaatagcacccctaatatctattgttgggagcatatccacgaccttgagccccatagggacgataaccattaccataattgtaacgggagttgtggatgttgagatttgatgatattttagaggaagaatctccaagattatagtgcctttcaagcccgctctaatgggttagtaataaagactgaatcgattctaaaaaaagattatccataagactcgttacatgaacaaccacatgattgtattcaagtctcaatccatttaacatgtgcgtgatcataccactctcttcaagagggtgaccaacaatggataaagaatcagcaagaagtttaattttatacagtaatcgttaatggataaattacctttctaaattgttgagagttgcgacttgatttgacataatctggccttcaattcattggaaaaacattattctagggcacaccaaacattgaaggaggagttgtatttggctaatgatccaagaattgtttctaacatcgaagatcgaagccagctgagtaatagttggtcttttcttttccatgttgtatattctagattagttatgccattgagaagcattcaagcgtgagcaattttggggaggaggatgtcatcgaggccgtgaccgatgacagtagggatgacttgcaatttccccgcaagaaattttgttcgatcaagtcaaactgtgagagatgaattcaaataattctaaaaaggactactattatactggcagagcaaccaaagtttaagtagtaggttcaaggtggcggggatccatgatcaacgttgtcaagagctttttgataccatgaaaagtgtcaacttatatgtgtaaatctaacaggactcaataaaatgatagaatcacaagactagcaaaacttgagcaagccttgattaagaactaatatttatagagtaagataccagagttagttacagaaatcgaaaacagagaaacagaaacagaaaaaataacaaccaaaagacaagtggcaaagttgactaatgaaacaattttcagctcacaacaaactattttgaactaactttttacaatggttatcagtcagtaacgtagctcatatatgtatatgtgtatccctttcacttaatctctccctctatctctatcagcttacttttttttatacactcttactctcaaggtgactctttattaggcctgcacatgggttg

SEQ ID NO: 117260 - DNA, 1399 bp, Cannabis sativa
gcaaaagttttgacattaaatgaaatgattcgtttcactttaggttttttcttaaaacctttgttgacaaataatttcgttgacaaaagtggacccctgatttaaagccgagaacccatcttcgtctcccatttctcctcttctttctctctctatcaccaccaccgccgttgccgccaatcccaccaccaccatctatttctctcctcctcaaccatctctctctttaactttattttttcttaaaaaaaaaaattccaccgaatctctctcgctggagctgccgcagccatcgtgcccacaaccatttttaggtaattttaatattatataattatatttgtaatttttttattaattatatgggtaatggatgtatgtgtatctatatatatatatgtatatatatattatatatatgtatgtatggatgtatatatgtgtatttatttaatatgtgtatgtgcatttgtatgtgtatgtatacatatgtgtatgtgtgtatatatatttatttgtacttatgtatatgtatgtgtgtatataatatatatatatatgtatttttatggttgcgtgtgtatatatgtaataatttgatttttttggtaactttatataagtatttgtatatatatgtgtatattattgtgtgtatatatatatatgtacttttgtgtatatatatgtatatatatgtatgtgtatgtatatatacatatgtatatttatatatgcgtatattagtgtatacaattatagttattattttttttttctaatattttttttgtatataagttttcggtgtcactttacatgttgtgtcggttgattatcgctccttattgtatttaaagattagtatgattttataatatgttactttagttttaaaaaataaaaatgcatattagaagaatttgagtatcttatatattcatgcgtagtgaagtaggttctgtgaataaatgtactgcagtcggatgggtgacaaatattaatacttatactgctctgatattgtgcttagaattttatttgtagatattaaaaattgagaaatgatcaattttaaagtattatgctgccgaatttttacgagcataacatattgaatttgattactatttttttaaaatatatattattaattaatttttttataaaaaaataataaaagttagaatattactaataatatttgtaaaatttaactaatatttattagtaaaataatatagaaaataaataagctaaataaaaaaaaagtaaaattagtttttattaataattagttaaaattagtttgaagaatagttaaatttgatataattacttaaaaatgcaaaatattaaaataatttatttctgttataaaataatataaagtagatga

SEQ ID NO: 117261 - DNA, 3260 bp, Cannabis sativa
taactttcaaataacatagaaaaaaacctagcataaaatttagtatacgtgcctcgcacgtagttttttgctagtatatatatatatattgctatttgaaaacttaggaaaattcttaggtggatgatttttttatagaattttgagatttgtgttttatgtcttcttgcggtgttggtaactgcacttagtcttagcaactaagctgtttacgtatcattttttagaaatcaagtcaaatgtagttcaaagtaatctttgtgatgctttattaattaagaggtgaatgacctcttttggaatgccatttattatgaatttgaattttagtgcactttttaatttttaggtaaaattactattttttgagatttttgtaaggtaaatgacctctttaaaattttggaatgatattacatcatttagatggactttggtgagacaaaatttgtcaagacaatatttgttgagacaaaaattgtcaggacaaaagatctcaaccttgtcctaaagaacaagggtaggcacctagcatacatcctgtccctatggagttactctttttcggttaattaattatttaattaatttaattaggtgaatatttaatttggaaagtagttatagatatttcaaagttgttgagatattctttcaagtggttgagagattctctcataaatatcagtaaccgaattcagttatagatttttatttatttaaacaattaaatatgatttaatgaaagggatttaactactataaatagaagcctgatttgagaaatcataacacacttaatctaaaccataattttcgaaattaaagggagaaaaagaaaacagttttctctctcaattgctcttactcatgtgttgagaactcaacaagaacaaacttatacactttatcctaatagcccacactattccttgtgttggtggaacaattcggaagacactggtgtgattccaattgcaacatcctcttcaactagattcagggatacaacatacgagaaagtttgaagataccttgatagtcatcaagatgtatttgttctaaatttactattcttatgttttgatttaacgtacacacatttggatatctattgggatatggtacaatgataataaggaacacaaaactcttccactgcgtatctgatttagtactataaaacaaacactctcgtcttctcatggacggatggcacaactgttgggtacacatgaatacccataatttccatcacatgtttcatagcaaccaatgcatcttgcattcttttattttgctatttttgctctgctatcttggcatcatgtttagtagttcgttgccttaatgcaatcaatttcgtacaatcatcttcttcgtatgctttgtagtcattatggccttttgtatactcagtgtcgttggtatctccttctccttcaacatccactcaagaggccacatcctcatccgaacaccttggggctttatgttggcttgaagtacgcgaagcattccttgttaagaccatcctcgtacaatattggttacaattttccttttagaaagcttcctacaactctcaataaaagtaccaaaatattgaccgagattttcggcaataattaattcaggatattttgagtaattaatgcaaatttaaaaagagtatttttacgtggttggggcattaaacaaccttagtccataagtcattttatttcagtattgtctttcagagaacaatttaattgatccccttttcttcacattcttgggggtatttataggttcataatggtgataaaaatgccacctttgtcttgcttgtttgattatactttgtacaatttcctaaacccggccttaggtcacgatttcctattctataggtatgtgctttggctcaatataggtgattggtgagacaatatttttctcttactaatgacttgacagttcgcaatgtagccgtcaaacgaggcatgggatgtcgcaaagtcaaagaattataggtttaaaccctgaaacagactttccatggtagaaagtaggttgaccttccccatgtcgcattaaatttgcgcatagtgacagccttgggccacacaccgaatcccatacaatccagctttagcctctttgagatgagtcttctcccagaggggaaaaggcaactaactaccgtcctagaaggtcctctcggagatgactaaaattctgaagcgattcttgactcacgcgcttcgcatgtatgttttgttgtagcacgtcccgcaacggggcctcattaccacatggcttcctcttagagtaccacatattttgagaaaaaatctaagcaaaaattaattataacatataattagcaatattcattaataatatatttgtatttcctatattcataaatatattaccctttactcaatttcttttagaacataaagcctaacacttgataagatttgtgtacaaattgacacactttatttacactaaatcctatgtttggtctcgtgtttatggcatactggagtgcaccttcaatggacctataaagagcataattaggaataagttccctaccaaaattggaaagtcttaacccactatccataggagtgctctgcgttttcaccccttgcagttgaggtttgcaaattagatcttaaagatatttttgttggaacagcaaaatcccatttagtgtgtaaagaacttgatagccaagaaagtagtgaagtttgccagatcttttaaagcaaaagtgttacttaggtatgttataagagaaaatgaagttgttcatcgttgtttgttatcacgatatcatcaacattaatgacgacataagtgtgacttgttaatgaaatcttgacaaacaatgagtgatttgttttagcaaacacaaaaccaaaacctataagagcacttaaaagtttttcgaacaagccctaggagcctctttaaggtcatataatgctttatgtagcttgcaaatttttttaaaacatgtggtatcaataaactcgaatggttgcctaggggtgtacgtcagtcagtttggtcgggttatagtatatttttaccaacccaatacaattttcgagttgcaaatatttaattgtaacttgcccaattaaaattagaaaaagttcaacccgcctaatgatttcgtcggtttggttggattaactcgtccaaaccgttcttcactttttttttttatatataattattatttttagtttcta

SEQ ID NO: 117262 - DNA, 3776 bp, Cannabis sativa
acttcaaatttcttgtattgataactaatcagattgtaaaaagttttatttagagcacaaaacccaacacaaaagtactcaaagaaaatgtaacgtttcaagtttgaaaatctatgatctacagatgaagaatgtaagaccataattcaaaatagttggatgaatgaagaaacaactccccttctagcaatcattcagaatatacatcaatgtgcatttaacccgtcaacatggcatccgagtaaatataattcactttttaaagaaattaaagaggttcaatcgaaagttgtatttttatacaatttgcaaagtgaaagaattgcaagtgaagagtcagttacaactagaaaagaaactcaattaattacttttgaagaaagatggcttttgaagaaagatgtcttttggaagcacaggacatgtgtacattgattacaagtaggtgatcaaaatattaaatattttcattaaaaagcgagtgcaaaagaaaaaaaagaataatacaataagaggtatgctatattgtaatttaaattaggttatgtaataattcaatttagtgagttctaattatttattttcaacacgtttagttgtttgatcagtagaggtttatttgatatgaggagtcttttaatctggtaatattatctattattagtgtctaatgtttaatctagttgtatattttttaggggtaatgtgatattttctaaattgtaattaaaaattttatatatcggagaaaataaaataaggacgactatgtttatttattaaagtaatacttatttagttcatagtgaattttggcttagaaagaaaatgatgaatttaagttatcatagactagtagtgattggttagttggttttaaatagatctggtactttaatattagaatctaaaatatttctttggtttgtgttctaggcttttctttgtagtgatattttgtgtttattataaaatattttactaagcggatgattgttggttaaattgtccaaataggtttgctaaatgaagagaatatacaatgtacaaataataatgagatggagaatataacaaaaagatactatacttctctcttcacatctattttgccttcagatgagagtattgacgaattgtatttacaagcagtaggacaagtggttactgatgagatgaataaaacactgataaatgcatttttattagaggaaattgaagaagcgacgtttagtatgtcgggaaatgaagtcctggtctagatgggatgagtgccttattttatcggaagtattgggatattgttggtctggcccgtcagcatccaaaacagtccttgattgtttaacaggagtagctgatgtgatttcgatttcatcttatgaacaatgtgtaatggtttgaatatgattgtgtataaatgatatattcaattaataaactatatgaatattattattacttttcttgttgagtcattgtgactcacaagtgctatgtggtgctgctaagggcaaggaaaagttagagcaaccatgaggtgactaccttctccagcaatgtacatattgaccccactagcctgtgtgctgagttgccatgagttgttttggactggttgtatctgctgtattttgaattgctattgtctatagtcttttagttaaatctttttataacagggatccccggaacatctttttactgccgttacaatgtctatttttagtctaattttttaatattctcacattttttttataattaattaatatactagtgttaatctagtttataatatcacacacgtgacgttcctatggagtagggccttacaactttgtatcagagcagccatagttttaaaggtcctgaggactggttgaatatgtacatttgctgtgaagacaagtcgactcatggtatagtaagtatttatgttatttgctattgccttacctgcttagacaattatagtgtatgatgggagaagaagcgtactgactatctatactaagaatatgtgtatgatatatgcatattgatattgatatctgtttgagttttaagtgtttcgaaaatgtggattaaatgtgtgacaagctgtacagtaagggcaattgaattgcttgattggtgagttgtttgggctcgggacaaacgattaagaagagaatcttttattgccgtaatactcgaaacatgtaaattctgttatgcaagatatgattagaggataagggaaaaatagatctgagatctgaaagggcaacaagctcgttttatgtctattcatatactacgggcacttcctgttgtaccattggatgtggtcaaatatataaacccaacttacgagcagatcagttggcaaaaactaaattaaccactaattatgaaaccgaacaaaagattctagggcgaccaggatagcggtcaaaatgagaataaaaaaatggcaaccttattcttagtgttcaagatgcaaaaagagtaccatttgggctaatatagagccatatcttattattgtggggtagtgggtcatttgaaaagaacatgcccacagttaagaaagactgttgttaaagaagaaaagtgtactggtccttcccaagtgccagttaagattcaaagggatccgagtatcggtccttcggctgactcaagttagaattttatgggcaatattatagttgttgtttcaattgatatcgatattaaacattatacactcaatgaagggacatcaaaagatctaaatggactgtgcctgtatgttatttagtggttgttcatctgacagggtagaaaaaaaaatggcaatatgagttaaatttgctgatattcccaagtagaatataggacatgagtagttaatggaggtatccatcaattgatttggagaatggaatattttgattaaaagtgatctagtgttagtattagtgtgataatttttgagtattgtccgaaatcctaggtgaatcaaaggcaatgattgtgtgggtggatctattcactaccagggggcataagtcaagttgtgacaatcagagccccatgatttttggaggaaagaccagaagttgtgcaatcccatgttgcctagggtaaaggtcatatgtagtgattctgagattatgtaggcgtgggattacatagtggttgaggacctgaatggattgctcgagactacctatgttagtaagaagcatcttgttttgtagcccaccatgaaggaactccacagttaagtgtccttgacctggggtggttttatttaagaagtttcccccatgaaccgtgcgaaccagaacaaagcacattggaaacacttggattgatctctggggccagtcgtcagtccaggaagcagttagagtgatgtagtcgtgtataagagccatcaatccgtttgtgtaaggggcctaatggaggcttgaggcggggacgttaccagagtaacgtataaaaaatgtcagggaaagtagtggtatcactaaggtaaggaagattacctgaattacttataattacggtaatgatggagaatactttttgttatacccgaaattcggctagcacatcagaggaagacagatgtcaagctgggaagaataacaactcagacacgtaatcataattacacttgaaatggaataactcattaaaagcatataattaacagagtatgtttacaactcgactgactgattagtcttatgcaagataaaaatatacaaactgttgccttgtgcctcgatgagaaacca

SEQ ID NO: 117263 - DNA, 1969 bp, Cannabis sativa
ttggagtagtcttagatgacatatagctaatctttgcaagaaatttattgatgtttcttttgtacattgtatatgttaaagaaatttatttatttgggattataattggatatgtaaaatatgtattaggttatgtgttctattttgaaataaagttttcgattcaaggacatgattttaatatgtagattctaatttgacaatttttgatttaatgagatgtcaaattaaaaatagttaatataacagttggtaatataatgggtgatggtttctattttttgcatcgtatttttttggattcctgaatctttatcattagagaaataaggtttcatagttctttgatgcaaaattggaagattatactctttttacaattaattagtacttccgttgttcttttattttattgttagatttattataaattaattagggtttagaaaatttataataagagcatctctaaattaatttttgaaaatttatgatagtattgatcttatattaaattatttttacatttaaaatattcggttaagtattcatgctaaatatatgtatttttttactttggttataattgtttaattactttgtgctgctaaaaatttatttctggttcaattgttaattgcaacataaagtgtgtatgctatattaattttgcattgtgtaatctcttaaaaatcatgtgctattaaattattacatagagctcttatcatgtgcgctaagcgattaatcttttctggaagtgatagtatattctcgttttcgttaattggtttaggtgagtttggacaataaggagggtattggtgattccaaccctgaagtgatggatccatgccagtcataatcaaaatttgtcatatcattctacagatttattacgtcatgacctctccttaacaaaggttctccagttacctttgctccataatcaacccagttttttgtttcatcatcaagtccattataaaagaatagagtaaaagacccacttgaaaaattagaataacatctctctccaagcttcttaaatcttccctgagaaaaatagaatgattcattgtgttattggacaaaattcacaaagtatagtatttggatttaccttgcaggtcaaacacattcaattaaacattagtaaaattaaataaaagaaaaccaacgtagaatataattaaactatattgatataaactaaaatagtacctaccaacgacgccaaaaacttgttgtgataaatccaacatgcaagtatgcgtatcatttgaacaagtaatactcaaataagtgagattgttcccacgaggactgtagccaagcatcaatcaattgaattcttgtttatatttgcaatcgaataataaattttgaaactaataaactaagcaaaaactaaataaaacaaacaaataaaaatgttaacaatggatgtaaaattagtgatataatttcaattactttcattacccaattgttaatactaattaatcattcttcttcctcttatgtgatggcaaattataaattaatctaactcttttcatatcataaaagtcttaacttgcatgctaactactgaatctctgagatagaacaacatataattcgtattaggcaataatctaacagtcacataagcaatgtgaatactctcgtctcacatcaaaacctatgtttattcatttagagcactctcaatactcatttttcaaattttatattgagatcatagataatgcataaggtggccaatcaaacacatgtaataagcacaaatattaataaattataatactagaaaaagaaagaacaattaaatagtactaattcatggaataatcttaatcaatatccatcaaatccctaaatagggagtttaggtcataatcaaatctataattaaattaagcacaaataaaaacataaaaaatcaagagaagagaagaaaact

SEQ ID NO: 117264 - DNA, 2041 bp, Cannabis sativa
tcatgtgaaccattcaacataaaaaattttttgatcttttattaattagtaaatatgattatactgaaatgggttttatttagggcacaaaacccaacagtctagtcattttgtggctagaattgacggcatggttagagatttctggtggggcttgaaaagggaaacgaagggatccacattaaggcgtgggacaagttgtgtcttcctaagcctcgaggggaattgggtttccgaaatactagagagatgaatcaagcttttttggctaaatggggttggaatctgttaattggatgccaatctctgtgttgcaagatcttggaagctaagtatttgagaggaaaaagttttctccagtgtaggtacaaggactctaactcctagttttggaagaaaatagtgaaagctcactcaacgctccggaacggggcttgtaaaatggtttcggatggtaaggacactaggatttgggaggatccttgtgtcactcatggtagagacttttatcctaaattcaatgggaacccttccatggggctcaactttgttgcgaattttctgagtgacaatggggactaggatctccaaaaacttcgctatttgtttgaccaagaaaccaatgaagccattttaaaggggggaaaaccttcgggtagtggcaatgattcttcggtttggacaaaagaaagcaatgccaagctcttgtgtatgtcggcttacttaattcaagcccttcatcgggctactctcaatgaggtttcgccttccctatgtaataagctctagaacagtaaaatcttggagcgtcacaagatcttgtggtggagtatcctctctggtgcgctcccagttcgatcaatcctcagcaagagaattcctattgacaatcccctttgtcctatatgtggaaatgaggatgatactagggaacatctttttctttactgcaacttggcttttcatttatggcagttctcctcgtggggtatcttccctatgttagatagtggtatttgtatgtgggactgggttaagtccataagagtttaaaagacaaggctattgatgtgaatgaagtctttttgtatgcgcccattgcggtatatactatctggcgggctcaaaatgataaggttcacaataataacctgggtagtattaaattttatattgactccatctctttttgttattaagattatagagcttcatttggtccatctcaaccatcaacctgaggcgatgtttggcgctcccctccgctgggttggatcaaactgaattgtgatgttcgtgtggggttagagcacatgtgcatttctgttgtcgctagagatcatcagggtttggtgtgttgggtggttacgtctagacttaacttcacagatgttgtgtggagaggcagttgctcgttgtttggctttacaggcgacgatcaagaagggtgcaattttgttattgttgaaagtgattctaaggtggtgattaacactctcaatggggtagattttagatgggagattaaaaactactcgagtcattatcttagcatctcttctatttttgtggatgtaaaggccatacctacaaacttattgtatcaggaccaccaacagatctttgtttttatttttatataacgatttcttttttaaaaaaaacaaaataaacaaaattacaattaactagtacataatataatatcaaaaaaacattaactgacgattaacattccaagtagcaacgttttatcactgatatcgatccatattccttcatatcatttataatgcattaattttttcttcaaataacaactacatagtgattgttatactactactactataatttattatccatttggtgataacaagtcaatactgaatactgataggaatgaaattaagaattttgatttattttaaaactaggcaattaagccgcgcttcgcgcggtcttataaatttttatttttattattattgtgattacaaaatattagtactgaataagtggtatattatacgatatacta

SEQ ID NO: 117265 - DNA, 1750 bp, Cannabis sativa
actgcccgagatagcttcaattattttcccatcagccccacgagctacacacccaaaaccgtacttgtgttcctccgcaaagatagcaccatccacgttcaaaatgttattttattgttataaaaatagtttaaaaatattattttttttaaggcctaaattaaaattaactcaggactgaccgtgttttaaatggaactatttgtttccattacattctacatttgcactgtaaaaaaaaaaacaatttgtgaatatatatttacagaaaaaaaaaaagcatagaatgtgtttcattagagaaatgagtaaaatcaaaaggttgtaatataatataaatgaaagtgatagtgaattttattttctggaaaaaagaaatgatggtggggttaaataaatagataatggaacaatttttagttttttttttttttttttttaaatgatagataattttattattattatttttccaatggaaaatgacaaataatttgggtgaatagatttatgtttattcttattacatataagtaattactgggtgaatcattattttttggtatttcttataataaatttaaaatttcatcatcacaacgtggctccagccatgcctcaacttatagttgtgttttttacaaagttaagaaactaagtatataaagccaaaagtaaaagacaaaacaaattaattatttatatagaaaaagaaacaaagaaacaaaatatgactttgacaatcataattcatatagaaaatggtatcctttaaaatgaaaaaaaaaaaataaaaaagttttaccaagaggtttaattatgagaaataattccttaaaaaaatatgacaaattaatttcttacaaaataaaaaaaaaatacaatataataatcgatttcgaaagtaaaaacaccaactaataaataattatatagatcggaattactttatatattatttttaattttttttcttgtcatttttttgtttgagttattttagtaattgttatgtgaattgctatataaatttaaattgtgatttaagtaatcatgttagttgcaatgtgagttattatataaattttcgtaaatatacaaaaaaaaaaaaaatcactttaaaatgtaaaaaaaagtccttatagaaattcaaaacaacaatatcatattacgtgactcgtttaagtaatgttcggtaatcatttaaaaaaatcagtttctatttaattagtagtagaaactaaaaacaaacagaaaattatgacaaaagttcataaaaagttcactttggtacaaataagttttcattttcaaaaaataacggcaatagtttctaagcttgagattcttgtaagtctgttggtcatctttttaacgaatctgttaatttcttcctaaaatgtcacgtgttgatattaaattgaaacataagttcttaaaaaaaattaatttgatgcagataagtcgtaatctcaaaaaaattatggttatagtccgtagatacccaatttaacaattttatttgtaattcttaaaattttcatgtgtcaaaaatttattggttgacaacataaaaattatttaaaaataatttaaataataaaaaattatcaaaaactttattttttttcaatttcttttattaaagattaaaagacattatatatatatatatataaaaactttctacaattcgccacccacccttcttgatggtagaggcttgccgccgacaagtgtcatccattta

SEQ ID NO: 117266 - DNA, 1351 bp, Cannabis sativa
ggcataaaacccaacaaaacctcccccaagtttatcttgatttgaaagaatttcattaaagtcaccgattaccatcgatggaagttgaggggcaacatctttgataaacacacaaattaaatatttaacggtctaattcacagattgtttaacaaaagtaaaagagacattggttttaaaccaaaggggggattcatatacaaacgactacaaatggtattaaacaattagactcaatctcagcatatcatgcatattacagtagaaatttatccaacttagtacttctttcaaacccattgcttccaccaaaattggttggaaataccctatcactaatctcgaacagtaattattagagagtcctacattgttaatgtgtggaaagataatagaatatataagataaataggctactcctcccattaccaattagttttgagatgtaaccacattcattttatcttaaattctaacgaaaattgaagcatcattagacaaatgtgtttattatttttattgctagtcaatcttgttttggtaagacacgaatatatagagacttcacagatgaattttaacttttccatcataaaattatgtgagattatatattttttaatttgaacattattatatatttattaaatttatgatactaatctacttttttattattttttttagatgtttctctggccggattgaagacataattgaaatatttgttttttttccttttattaatatgtctagagtatctttttctcatgtaagttgcaactttaacatatgtggcctataaattagtttaacatggttttatgataataattttttttttagatgaaagaatgtaatataattatctttgttattttaattacccttacaaaaaaaattcttcaaaataaaatttgccttttgttttagttagtgttgaagttaaaataaatgatatattttgttcaaaaaatcaaaatcaaggaaatattgaaagttatattaagcagattttgaagaaagaaacaataaaaagccatgcatatgtatagatgaatgtcctgaaaccattacactaaaaagttcatcggcaaacacagccaaacttgttgcaacacaattacatttctttaaaatacttgtactgctagacaccactagacactactgagcccgtctgactctgagcttggttttactggtcttccaatataactgtttccaagaattaagacaaaacagtagataccagcaccaaaccagggtcggccagagggtggggcagccggggcatacgccccaggccccataattttcgaggccccgaaaaaatttaaataatatata

SEQ ID NO: 117267 - DNA, 2312 bp, Cannabis sativa
ttgtgtccacttgctgagattggtgaaggtcaagattgaccttgtatttgtgtgttagtgttgactttgtgtagggatatatcagtcaattcccaacacttttaatattctcagtataaaagtaagtaagggtagatctcacgtaaactatgattaatttattattctctatcaaacataaattaaaagggagttttgagttgcaattaaagagcataaaaagaaaacaaatgacaaatgacaattacaatattaaaaatagttaattattattcttcacctccaacaatcaatcaagaacaacaatgataaatattatattttattccaaaattaaattattaatcccgtagataattacttattccagtctccctattacaataattatgacgaaacactcaatagttaaatctttttactaaacaatagatttacgaaatatgcaatctatttaatctagaaaaatattaaattctataaagatagattaatctaagcacaaatttatttagcatataattcatttaacttaagttatattctttatcacaaataataatacccgtcacaatatcattaaaagtaatttatcacttaaatatagaattctaaactattaggtgaatagaaattctaataatgatagtagaatagtgtaaaacttaatttagtgaccgtctaaataaaattaaaactttaatcataaaattagacatagaagaatataaacattttaatatgaaggaataaaataatcaaattaatcaaagcattcaaaaaattatatctcggattttaaaataactcttaacctaaaagaagaatactccataatctcaaacatactcataagcataattatatgttatgacatgtgattgaagaactagttagttggtcaactctttcctaggttcactaactgattctagtaagttagttacctgggctccaaggtaattaaatctagttggtctagaaactcatctactcgagtcactaggtatacagtgatgtctaacttccttagagttaatgttttctagttccattaatgcaattactgagttgagagtgaaaagaaaaaaacagggagaaggagggttgtacatggaaagcttgtgtatctgatcaagctattctcaatggtgaggtattttaaggagttaaactccattgtcttaagctcattgtcaaaccgcaagctctctcttccattcttttgtacaaattgatataatcaataaagctaagtttttctctcaaaagttttggagtattgaattctattttattattgttcattgtttatgacttatttgatctagttttagtttattcttgattatggtgatcgaatcacaataaattggtaccagatccataggctattgatccaagattcaagaatatattattcacactttcgagaattcaaccaagatagcttcatcaaagtttaaggtggacaaattcaatggctccaacgattccagtctttggagaattaagatgaaagtacttttggtggtttagagaattgtagaagcgattgattagaaattgcttgatggattgaaggatgagaagatcaagagagacacagaaacaaagtctcacagtgcaattcttttgagccttggagatgaggtattcagggaggtacccaatgaagaaactgctctgagattgtggaggaagttggcttcaatctactttaagaagtctttggtaacaagttgtagatgaagaagaaactctacactgtaagaatggatagctcaaaggaactctacactgagtcacctttgggcctcttgtttgggtttggctgttagacctcgtcggcctgggaggattgtcatcattcagggcattgtcctaattttgaatgttgggaaaattggcacaacatttatcacgcctttggcaacaatgtcatcatggggcccactatcggctccacatcattcttgctagaaaatgactgaccactctgggatcttgaatggccttattaagattgttggtcgacatagattttaaccataggtctggactctttcatcctaattgtacaggttcatttgccctctattgtgaaattcttaattacacaagtgcacgtaggggtgtatgtcagtcggtttggtcgggttatagcatatttttattaatccaatataaatatcgggttgcaaacatttaatagtaaccaacctgattaaaaattaaaaaaagttcaatccgcccaataattttgtcggtttagtcaggttaatccgtccaaactgttcttcacttttttt

SEQ ID NO: 117268 - DNA, 1054 bp, Cannabis sativa
  modified_base (989)..(997): a, c, t, g, unknown or other
aaaaaaaaaaatgtttaaaagtgtaaaaatgaaaaaggccatcttttttatgacattttctatttaaatatccatatatttaattagtttggttataaaatgccatatttagtgccattagctttacatgccatatatatcaaaccttctatttatttttctatatttttataaatatttctatgtaatatttattttttggagtgttacttgtcaattaaatattattgttaaatattgactaaatgattattgtattgactttgaaattttattgttaaatatacacagtaatcattcagttgatatttaatgataatatttaactaacgtcttaaatttaaaaaaaaaaataattaaacttaagaaaatttcgcccgaaaaaataaaaattaaaacagaagtttcacttgccattattctattttaaaaatgacaaaactcattgttttgcttgcgagtgtggatgtgtattgaacaaaataaggatcaaaagttggatctatttctaaaaccaaaatgaaaagagacaagtatatgatgtaataataatattaatggggaagcgtacgtggcccaatgattgaattggtgaactagtgatgatgatgatgatgatgatgatgcatgcatgtttgatgtgtctattctctatgaaatgatgatctctgaaattccaatttgactagctagtagtacggcattcatttatacaacaaatagatgcaccatatgtaaatttatatgaaaatccggctttggactagtctaaaagttattacacatctattgtttacccttttgttcttttcttttcatatacatgcataaagaaaaagaaaatatatattctgctcaattattgttacataataaagaaagattttagacaatgtggtgagtgttctgatcgagatgacaaggtacatcttgatcacatatcatgtaaatatatatagggacacgattttgtcccgtgatgtactttnnnnnnnnntattccgtggtacattagatgagtctcagggtacattaaatgagtgtcagggtacgt

SEQ ID NO: 117269 - DNA, 2389 bp, Cannabis sativa
cagtatttttgtaaaaaaatggtaaaagttagtataccatgtaaatttccctaaaggagtgcagcggcccaaagcccaaatcaattgaaatatttttgaatgatgaaattttaaaaaagaaaaagtaattaaaagaagaagaagacgcttacttgagccattaattgatttaaaagaccaaaaaaatgagaaaaaaaaggctgagttgtgacagggataaacagcagccccgaaaaaacagagacaaattaaaagagaggaaaagatggccagagaaaatctatagagagagcaccagtcttttctaaaatcctttaagtgattgttcttctattacgagtgctaattataacatttttttttacaatttttatcaattttcatgaaattacgcgtgagtattttcactataacgattatataattattatgcaatcttctctcttctctgctcttctcacttcttctatatatacatatacatagtttaaaaatactaattaagttgtatttgaactttttacatacccaatattaaataattatagatggccttagtgttcaatgtctaaaggttagaaccccaactggtggctccggctaaacccacacccaaagagctcaaattactttctgacatagacgaccaagaaggccttcgctttcatattcttgttatacaattttacaagtatgatccatccatgaagagaatagaccccgccaaagtcatcacacaaacactcgctaaattttcctagttcttctcttaaaattttgattatgtgttgattgtactgctttcaaaactctttcttatttatgtgaatatgtcttttttctaaagtatcaacttttattgttgaaacaaatgttaatttttttttatcgatacttatcttttaataattggcccccaagaatttaatcctgatgtagtacatccaatgacatacacgttgttgtgctttaatcatttaccttacacttccactattaaaattccttttgatctattttactttttcttcaacaaatatatagtgttgattattgtcgttttttagaatctgccattgtcgttttttaaaaatatttgacgttttaattacgactagctatcgtttttcacatgtcctttttcatttttcttctcattttattgtttttctttttctttttctttttctttcaaataattgtcgttgtcagactaattcaaagtgtagtgtataactgtatatatataatattgaatggaagaccaaaagaaaaacaaaggctaggttgttggcaacaacactttttataagtaaatagttctctaattaatgatatcataaaagttatattaaataatttgatatatgctataaaaattgatttaatcaaatacataccgtcacagtttaacaataaagaataacattgttaattacaataatattactattttttttaagtcaccaataatttaagtaaaaattgtttttggattggtgcatgtgggagtgtgtgttatattatttgttataatataatatagattaaaatatttaagtctgacatatattaatatgagattaatatatatgatttgttgaatgttgtattatatcatatatatatatagtataataaatacacataaaagttgtaacatataattaaggaattacaaatctgaaaattaattgtaacttaaggataattatataaaagttatggaatcaatgaaataagtttctagttgttaaaaactgttacaatactcaattataccattttaatgaatattgagacgttggaggaagatttaattcgaagaggagttataaaaactaaattttgagttttctggaaacagttgtttaatggttgtttttatgttgttttatgggtgttttacaaatacctggaatcagtttttgaaaacgttcataaacagacataaattaattgaggatgtttccagctttcttgtccaacgtttttatcccattaaacactaattaaagtgttggtaacagacatataatgaaaggatttgattttcaaatgtgatcctcaaaatactataaatagaggtcttgagtttactttgaggtgaacaagtttctatcaagagagcacattgctagaaacactttaggcttgataaattccggaaactatttccattcttttttttttctcttagtgcttgtggtatgggaaaataagtttttgaacaaaggtgtaagaccttgttcaagttttgtaattttcctatgatacacttgtggtgtatgtggtaggggtgtgcagaaagtcatccaatccaattccaaccgaccaatccaatcccaatcgatccaatagaatcgaatatccaatcataattggatcg

SEQ ID NO: 117270 - DNA, 1441 bp, Cannabis sativa
acttgtccaccttctctagcgccagcagctggggtagaatttcttccttatttttagcatccaaaagatctatcatggttttgtcatgcttctagagagtgtacattgaatggacaaaggcttgcttcaaagctttgacatgtccagcttcctgttattgaagacaaccctttaaagtggagctttcaccctctagatcagtgattttctgttaggattcttcatgacccttcgtctctgcaaccagtttgcgctctgcctccttagccctattaatggcctctatttttttagctgcctctaccttctactacaggtcgagatggagcttcaccttcttctctagtttagtctcattgatgaacttgttttcgatgatcttagcttgcttatcgtactcttgagacaaggtggtgatctttttctccttctcttcgacatcgagcttgacttgccacacatcgagcttagcatgctgcacttcaacttccaattctttgatacgggtgagggccttggagagcatgtctttggatttttctctgcactcctctctattttggctaacttcttctcctgggccaaggacttatccagagattcagacaccctctattttatagtggtctttatatcggtattggcctcagctaaggctctctctacttcctctctccttcatttagcgttggcatgctccaccttcagcacctccaaatcataagctagttggacgatgagagaacagttcctctctgccatcagaccaatctgcaaaggaagaagcatgagcgaatcaaataacgaaaagactctaaaacttcatttgtgttagagaagtgttgatcttacagtattggcctgagtcctcacggagtcagctacgtacatcaggtccctacttgccatcatagcaaacctgttagcattgagcctacagcttgtgatagcactctgttccaatagatttgccaaaatggtgacaaatcagtcccaatgagaggacaaattctctctaccagctcaaccctattaacaataggaggggcagccttgttcgacctattgtagtcaccgaactcagtgttatgcctgaaagagatgttggtggacaatctactcatctcctcgacttcacagctgcacctctattggtaaaattgatccactgcctctagtcggtcttccttctattttgtcaattgtacaggcctgacaggaagcgcaaaaggagcaagaggcaactcagtcctttgcttggacaactgggttgaagtggccagaatcactttagacactggaggtggtggaggaagatcttgcttgtccctggacaaccaagtactttgccttggtggcttttcgccatcagaagaggttgttgttagatatatttcaccaggatctagatttactaccatgtatgtttcattaacatcct

SEQ ID NO: 117271 - DNA, 607 bp, Cannabis sativa
  modified_base (541)..(549): a, c, t, g, unknown or other
  modified_base (575)..(580): a, c, t, g, unknown or other
ccgccacatacaaatgtgtagctccagagtcaaataatgcagagaaaggaaaatttgaaaagaagctgacctaccaccacagatggcctaacatcagtgttggcctgagtaatgccaaacacccaagatggagtagctatttcctctttccttggttcttctttcttcaactgatggttgtctctcttgaaattccctactagaccacactgaaagcatgttttcctattacactctcccaatgatgtttcttgatttgagggcactttggaaatgtaaactggcctctagggccaccatgctaaccaccctgaccttagttccctcagaacctcttgttttgactcgagccaatcggttctaatggagcttttgtcttttgatcaaaattggaatcaccaccaccaccactagaattgaaagtaggcgggaagttaccccactaccaccctgagtccctcgaggttcatgtataaactctacgacacccttggccctaagagccttctctaccatcttagtgttggaattattttaccannnnnnnnnatttactaacaagtatgttatttaannnnnnaaatatgaacttctaaaatgatatgaa

SEQ ID NO: 117272 - DNA, 813 bp, Cannabis sativa
tttttaatattttttttaattaagcataaaaattcaaatttgtgatcaaaatttgatggtttgatatttttaaaattaatatttatagttaaatttatttatacccattaaaaaaaaacacatcgcctaatcaacttttccaatcgtacaacaacagtccaataccagactcaaaataccaaacagacatgaaattggcatataagaattaactttaacttaaattaataaaatggacataatcatcaatactatgtacaaaaataaatccaaagcatgtatcgaaatgaaaaaaaaaataataaaaaaaaagacaaatatgaatattattaaaaccaaaaaataaaaaccaaaaaataaaaacaaatccagctccagcgagctcttactgcttctttaaatgtccactgcatatgtgaactgatgcaatctaaccacttaggaactcgacaatacaaacaaatctatcattaaaaataacaataatcaggaagagaagaggaagagattgatgatctttgcgaaagaagaaaaagagaagatctttgatctcatgaaaaaagaaaaaaaaaaattcagagcggaactggcctaaaattatatgagcttctagtgtactttatatgaaaaattagtattatttaattaggaaatgagtgaagagaatgagatttgtgagtgggttagtgagatgaagagaaaaaggtaaagttggaggggtgcatttggaaagccacaatgtaattggatttgtgtgtaattggaggtaattacacaattttgcatgtttgtctgactatgtaattacactgt

SEQ ID NO: 117273 - DNA, 1494 bp, Cannabis sativa
aattgtattgatgagccacttggcgattttcattagtacatatggtcctattatattagatgacaaatcttaatcagaaataataataataattcttcattttttttataaaaaatggaatgatttggattttggaaatttcccacacagtttctatatttctgttcatattttgtgtatatgattattatttttattagtttgtccatttagagtaatgaaggtacaatactcttgtattgtataagtaattatgggaaatttgaggcacacattttagtttattttcttacacttaaattatagtgtaattattttggtggtaaaaatattttattttatgtatagttaatattataccgcgtgaatgaaatgtaaaagtattgaattatgtataaaaacataggttacttaatttattactaattagttttgagatggaatttcgtgatacttgtcatggtatcagagtttcatttcgatccatacacctatctagatagttagccaacactatgagataggaataaagtgattcaagattagtgagtaaaaataaccaattaaaaatatgtttttatatatatatatcatttttaaaattttcccataaaatagctatttttaaaaaaattatatttttacacaaattttgtataaaaattcataaaatttgtaatttcttataatattgtaattaaatgactacaagaatttttaaaaatttaacaaatttgccaaaaaataaaatatacataattagaattttagtaccacaaagtaatttacataactatttaagtttcaaatatctttataagtatataacattcgaattacattattgaaagaaaaaatttacataattttgagcaaaatttataaaaaagattacaaaaatattttaatatgtaattttttttttatttttacctagattatcacaactagctcattgtaatttattaattatatgtagaaataaataataaattataatataataataataattattataataaacgaaattgttagtgaaaaagaaaagaacaaattaagacatgtcgacgtgaacaagaagaatcataataaccacaagaatttcaccaagtataaattttaattaattaacctcatataattaatgcaaaaaaaaacatatgtaagagacattaattaatttatttcttgttattaattatgtatgtatacaactcgtacacgaaaacaataataaaagagaatagaataattaatgaaaagagaggaaattagtcaaaagacattaaaaagagaatgtatataataataaaaatgcatttaaaggattgttgaaaatgatgtgttgctatatatgcatccaattaattacaaattttcatgcaaggttaaagtcttttgaaaaaaatagctaatatttatatataatagacaagatgtattatattcttaggttaaagtaccaaattatatcccttgaattttacagat

SEQ ID NO: 117274 - DNA, 1650 bp, Cannabis sativa
gggcataaaacccaacatccccaagcatctacagtggccttcaatagtggacaagtctttgaatttcactttctcattcttttcttgaatcttccataaatgactttaagctttttcaagctttttgaaatctttgattctcacgttgttatgtagtctcttttacattataatttgcttgatagctttaggacatataatgtatgacttcatgatataaaatattggattttgagctcaaattaaattcttgactctttgagtcacgaagaacatgaagaactttgtttgagtttttgaaaaatagaagtttgattctcctgagcctctggccggcacatagggtatgttcgtgaccctagtcagtccatgcttataatctaggaccctagttggttcgttcccctagccctagaaagttgggcggttcacgactatgaatcccatacctggtcggttcatggttttgtacccaaaacttggctggttcatgacatgtggtttggcatcatgagatttggtcagttctagcccatacttagtctttgtatagactctgtatggtgtctcaagcccatttcacccttatcacgtacttgattcccatgggaactttgtatggcatgtcttaggtggagtctaccccagccaattagcggcatgaactcaatgtctgtttaattttttgtacctggatctcgtactttgttgcttaacgactttgtacattagggctgtctggctaacacctttagacttaggccaattgactcgtgatttgtctaagtctttttatttcgtctggttgctcacctccctctacctttttacatagatgaacatgaacgacttttggggaggtgacaactggattgacgaagacttgctcagtcttctctacaaagaccatcgtctagtttagttagataattcttcttctaagggttcttcgggtagctccccgaccaattttaaggttagcagtagttctctggaacctgaggttcaacaccaccgttattttgagcgaatagaaggtgagctacggtcggttcatctaggaactaaactaggggttgaggcagttcctccccaagtcatggacttatattgtccgattcggtgtgcttgacacgttgcccactcgatgggcaattcttttagtcagagatctccacgcagccgaggctactgttactattgctaaacagtttgagccatacctaccatggctaggacaaagcaaacgtgtcgtagggaacctcctaaggaccctctcattgctgggttgatgacaagaggacgtgtctatcatgtcgagcggctgaacagccccaagctgaacaaccagaggccgggtaggctgaggaacctgtggctgagcaacccatggccgactagggtgaagaagcctcgatcgatcaggatagtgagtttgaggctaagcagactgaatctgcttctgggtgaggtattgctaggaggcagtataagacttgtacagtagtcttgggcaatcccttgggttcttatgatgaggttggacgacctttgaatgcttggtcaaccatcaaaagagaaaattggagctaaactttccttttctataaaagaaaagttgtacttactgcccacgattctgtaggtaca

SEQ ID NO: 117275 - DNA, 912 bp, Cannabis sativa
agggcataaaacccaacagaggtgtccaagatcgatggtttcctcgaggattattatattgtcaaagaaattaataccgaccaccttcctctctagctgatcccctcataatgtcatcctccttttaccttgggattaaggtcaagagcctaggcagctcttcaaatgtcagagtcggctcagaatatctcccttctagctaccacaaccaattttcttaagtacatactttagccatccgaagaggttcaagaatacaaacatgcagttgaggagattatcaccgagtagggggctccaaaaaataagaaaactcctaaggggtatcaggtgcagactgaccatcctatcaagatcagagatgaccctaaggtagttattcgtcctactgcccctgtaatagggaagggtaaggccatagtagtggaagattatggggattcatctgacgaggatgtcctctcttttcttgttagcgagggtgctccccccgaagtgcagggtagctattgctttacttatctttatttattcttacttgttcaaatatttaacaagtattttcttctgtgcggccctgtcagagaatatgaaatgtgcactcataaagagcatcggtgacgcatccaaccaaaaaccaccaactaaacgatcaagggtagaagttgctcttcctacaagcattgctccgagctctaagacaccccaagtagaagttaggaggagctcgacagttgtcattgtagatgttcctaagtcccttcctccggcaaagaagactttgaagaatcaacctccaatcactttgaccaaaagatttaaaagggccagtactaaatggcccatctaaaagctaaataccactccacccacctgttgggttttgtgcaataaataaaactcatttcaata

SEQ ID NO: 117276 - DNA, 2492 bp, Cannabis sativa
ggggtcgcgtttgatcatcatccgatagagagggaaccacagcttcatcactggaggctgctcttgcgtgcttaagcatcctttgaacagagtccccaacctgagtagtctggcgagtgaactgccgcctggttccaacagaaggagcaggagaagattgagggctaggctcgttaatgaccagacccgcagttctgttgcaagagggtgtggtgtggtgtaagtagtcaaagctattccttttccttttttggtatgggtgataatagaggtagttatgatcggtggagggatggtggaagaagagggctgttgggggaaagccataggtgcactagtgagaggggtagtagaagtcacagtgtgggaagctggggtgtccatacggagaaattggttcatagcatgttgtaagctatgatcattggtagaactatgaggaaaaagttcctcaaaaggagtcgagttggagatttcgaaagggttcttcttgagatgggcatgggtaatgacccgaagagagtcacggtattccaggaggggtggggaggggaaattgtcgcatcgcaataggtatttggaacatttgttgtaggtatggtccataagaccacaaaaatagagaaattgggtaggctttcaaacttgaaaccaatccatttagggtcatggatggaccaaaaacggatagtcatgcccgtacgaaggggctttgtgatatcaagcaacactcgatcctaagataagggccgaaactctcaagaagggacaatgggtaaatttcaataagatctcccagttcatcagcgattaactgagccagctgaggacttttacgcccaaacggaatgttatgagcttggacccagaaaggagtatatcgaattgtattaggggtaggtgtaggggaaacatcagggtgggtaaaaataatgacgaatttatcgaaatgccatggctggtcttctaagactcgacgacgatccccatcacattggaaggtggacaggaacagaccagagtgatattcaaaaaattggacagggaaacgaagtgtccaagcctcaaacatggctttctcaatccaggccggcttcacagatttaggagtgagaagtttaaaaattaggcagaaagcgttcaaatcagtggaaggagatagggaaatgtggtcgaattcatgaaccaggttttcttccacagaaagggttgtgagaatgttagggtttgttgaagaagacgccatcgacagaggaatggggtcagtagatgtaagcaagaagaaaggatatgggggtggcaatcaaagcagagactgaaggattaaataaaaaatcatagaaggagaaggttgcagaaaatatctggagtacgagagtcgcctcaaggagtgaaacgatctctgaagcatctcttcgattcctgcaaggggcttccgcagatgggctagggaaatgattactctggtttatgtctggagaagagggaaatgacggttagggtttttgttggggtgttgtgaggagaggggaagagatagaaagtctgagtaggcattaaatgtgaaaatggaagagctgccaaaattaaatgaagatgggagagagagagagcattaaagagtaactgagcgtgagagatccgggcgatactcgtaatgattaagagtgacatgaagcaataaatacagaaaggacaaagagtttgcggagaagaaatagggggaaggcggagagagcacttgctcactgtaccagagctaagcgtggacgaagcttcaagaagaagacctaatcttcaataacttgtttgattagatatattctattatttgtatattcatttgacaactatcttttgtcccaaaattagtagatattttcttgggtgatttatagaattattcttatcaaattagttattaatttttaaactcatataattgttaatttacaatttatcgatctataatctatatctatttatatgtatatatgtattataaaaaaaaagcacgaaacatatttaggtggcatcatgataattaatttttaccatataaatttatttttttactgtcttagtttataggttttttatttttcatcaaatatataataatataatataattaatttgattaaaaaaaattttttatcatagttttttattttattaatttttccttgtaataatttttattggctcacaaaaattttcaaactaagttatttaaaatgaaactaataaattatttttttctgagaaatttacatgctttactaacttttccaattttcttttatttataccgtgacacgctgaatataactttttttgctttttttcttttttttttatttcgacagtatactgccttggttcaaattatgtatgctattattttattttttttggctgattgggacatgggctgttacaaaagtgacaacttatttatttatttatttattttaatggatgtaaaaatt

SEQ ID NO: 117277 - DNA, 2573 bp, Cannabis sativa
  modified_base (34)..(41): a, c, t, g, unknown or other
tgattattggaattataacaatggataattaatnnnnnnnntatatcgtggaacatatagagcggtctatataactgagagtgcaattccaaaaaaatctgaagctatgggaggttgttgttttggacaaacatctgaagtgttactggtgtctgcaccaatagaagaagtaggattagtagttgcataatattgagaaaagttgtttatgctagttgttgtatttttctgttttagtggaaaattggattcaaaaaacacaacatctcttgaatgaaagatacgattggtttgtaagtttagtaaggtgtatgctttcatgttctcaggatatcctataaaaatacaagctctttctcgaggagcaagtttgtgatcagaggtgacatgggatgcataggccatacatccaaaatttcttaagtgagtgtaatgtggtttttttgagatgcaataattcatatgatgtcttatctttgagagttacagatggtgtacgattaagtaagtaaacagcagtagtaaccatgtaactctaagaagaaagaggaagattggacggtaatgcaagagcccgagccacattgagaatatgttggtgcttgcattcaacaacaacgttttgttgaggtctacctacacatgaattgtgatgtgtagtgccttttatgttgtaaaagttagtgagtgtcaattctttggcattgtcacttctaatagctttgatattgcttttgtattgaatattgacaaaagtaaagaagttttgtatgattgttggggcatcagattttacccttagcaagtaaatccatgtatactgtgaatggtcatcgacaatagttaggaagtacttgtatccttcaattgaagatatgggatatggtccccaaatgtctatgtgaataagatcaaaaacaatattagaaaaagtttaattagatggaaaaggtaattgtttttgctttgccaaatgacagtttggataatgaaatggaagagatgaattagtagagaaatgtagttgtttattgattttatttgtaatgagtacagaggggtaacctaggcaattatgccattaatgtttgtctaagagaacattacatgaaatagaaatatgaagtatttcttgctataagtaatagaggttgccttgtctcttagctatcccaatcttcaaggcccgagaaggtccctagatatagcattcattagaggtaaacaccattgtattagaactgttatgtaataaggcactaacaaatagtaagttaaaattaaaggatggtacatagagaacatttgtaagagtcaaatgagtgttaataatgactgtaccatttctttcaattttaactaaagtgccattaggtgaagtaacagttttatgagatggattgtgtgtgaaagtattgaaacatttcatgttgcagcaaacatggtgagtagcaccactatcaacaatccaataagtaaaagagagaggatctatgttactagaaaaattgttgacacctggtgtatcatgacatgtagaggcatctgtggtgggttgtaactgttgtgtcaacattgaaataatctgttggcattgagcttgggtcagctgggatggattggcatcattgttggtggtgaaaattgtagagtttgtggtggattcatggtttgagagttgtctagtttgcgattatttgtgcttgaattagcaggttttttgttgccataaccaggggaaatccatgtaaaagtaacatttatctttgtaatggccaggtttttggcaatgagaacacatgggacgaggtttcttggatcttgaatttttatttgctgaaggagcagcagaaccagaattcgaagatgttggtgtggaggtattagaagcaacaagagtggaaatggattgatttcctaaagttctttgacgttcttggtgaataatcattgagaaagcttcgttgaggggaggacagggatcaaggagaaggatttgatcacgaacgacatggtaggattcattgagacctttgagaaattggagaagttgatcatggttgagatgatcttaatgttggtttgctgcagcataggtgcaggggatcttgggcctcaactggttgatttcatcccaacttgcagtgagtttggtgaagtaagaactcacagaatcatctccttgatgtaaatatgtgagggtttcattgagctcaaaaattcgagggtcgtttccttgattgaatcgattgcggatcacaatccacatttcagcattagtgttgaggtacattatactgctcttaatctcagaagaaatagagtgtaaaattcaagacataaccatgtggttacatctagtccaagaactaaagagagaatcattagggggaggttgaggtaaggtaccttcaagaaatggagtcttgttgcgagctccaatggataatttgaaatctcgttgccatggttgaaagtttttgtcatttagaactggagtagcaagtgccagtcctggatggttagtagaacttagatagtaggggctgttggaagttattttaccaggatct

SEQ ID NO: 117278 - DNA, 1268 bp, Cannabis sativa
  modified_base (1213)..(1229): a, c, t, g, unknown or other
aacctatgcacaagggaagaatcctcaggaaaaccatgtaatttcctgaaatccgaaaaggatacccaagcttcatccacatcatgacacttcaacgctgcttcaagcttcttcaacaggatttcataagaggaaccttcccagcatagcttttcactctcaacactagtagaaaaatgtttgatagttcttctgagatataattctcgaatttgagttgataccaaggcattccgagaagtagctgaagccacacgaaatctcaatgaactgctacaccaagtgagttgacctcgaatttgtttcatcagtagtagtgccataaatacagaccaacaacataatcgtcacaaagtgtgttgaagtagctagctgctgctttggagacccttttatgtattcaacaatgacacacttgaaaaatcacaacatgcctcttaacccacaaatggcctgatcaaaggttctgcatataaatcactgaaaacttcaaagagagggaaattctcttatggacaacaccaatagcacaatatgaaaagagacattctaatggggaaccttaaggtgcctgagaactagtactgttattgatgcatttcaatatcaagtcttatacattttgatttaatacatagcaaaaattaaacctatatatgaaaccatcaatcaattatagtgtattggacatcttaagataaaaacttaagagaatctgtacaaaaaatcagccactgtacaagcaaaaatcacttcaaaatatggttatggaaacaagaattttccaagaatctcaatgaaattgtcaaagaatttcaatgaatgttcttcatattaattctatcatcaaaatgcaaaaatacctcaagacaataataagaaaatttctaaggtttgggaacaaactcactcgcgagactcttctgtgattgaaatctatcgtagctctatcgaatacggcgctcgtctactggtattagtttcgtcgaggggaagatgaactccggcgccggagtggagcattggtttacggtggcgcagggaaagagaacggagcctaacgttgtttctctcttttgtctgcgtttcaatttcctttgatgggcctaagaggtagatttgggctcaatttcggctattgggcctatctgttaaagcccatattgtcaaataggggtaagttgaaaaataccccttttattaatcaattaannnnnnnnnnnnnnnnntttatatttatttgaaacatacctctttttatatgtatt

SEQ ID NO: 117279 - DNA, 5196 bp, Cannabis sativa
aaaatagtttaactaataaatataatttatgtaatatattatatacacttttattaaaatatatatataaatcggtttaattcggtttattcgaattaatggggcggtttagaataatttataaaccacccaatatattcattgggcgatttggtttttcattgtattatttcggattgtattttttatgggtttattcagtttgatttgggcggtttattcagattgggcagtttgtaaattttgttgaacacccctactacaaaatgtcacattgctattggtacaattaaatatgttttaatttaataattttataaaatataggcgaccctaaaaaattgctaccaagtcttaacccaagataagggttttaataattggattaatattttatgttaaatttatcaaaaaaaaaaaaaaccaacgctaaaaaattatggtcccatttaatgtagactaatttgtggagccccatccgtttgactctctaaccattgagataagaccgcactctttgactctctataatcatctactttacccttgtttttgttttttgataaagatctactttaccattgtttgagccaaaagaaagaaagagagatccatacttcaacatttagatagacgcgaaggctgaaatcatacatatcctttctttggtggagtaaagtacaagttttcccatgtaaatccattagtttgttaaaaatacctttcaattgattctaaaatcctttctcattttcttccatttggaacctaaattttatgtgggaaaaggaattcaatttttctcctattcagatttaacttaatataagtttagaccggacggcttacacttgaaatgaaaagtggacaattctacttttatgagggcaaaattcttgagctactacatgaattgcgatagttagtaataagacatggattataataaattgaggcagagaacataatttagagacagcatacaagtctgattatgccgtttgtagtcaggggcactcattacatagccgtttcatttgtgagaaacaatacaatggaatggtcttccaaaactcccatgacaggtacactcattagaggtagaggaatgccaaaatgtacgggtccagtaaagagaagccagaagaaactgtcattcatctggattcactattcgctaataccctttctttttctcattgaagtatcgcgattcttggaaatgaaggggttcatttccccaagaaacccatccagataccatttctctggcaaatagttccagacatcgaaccggtctattcccagcaacatactcctgtagcaggcctaaaaatttaaagatgaatcaatcaactgggatagaaggaaaataataataataataaataaataaatgggataaacaaatgttaacatgtttttgtgtttcaagcaacaatgtagttattcacaagttaggactgcatagccattccttaacaggataaagctatacttttcaacccaaaggaagaaggaatatactaagccacacttctcacaaactgttgggggtagtggtttctcttaacaatggacaaatacaaaatcaaagaacacaatcacaaaatttatggagaactaagaacaaatcaacacaaaagcttgcacaagttaaaaacatttgtccaaaccactgacaagttgcgagagggattcaacaagcctagaaaacatatcaagcaatttcagtatttttttgaaaaaaaattaagattcttggagagctagagagagaaaattaggagtgaccaaatcccaaaaaccattcaaataggttagatattgttattaggctcaaccaacccaatcaggccaagtaaaatgacagaatataaggaaaacgcaagctgtacagacaacaaacaatgcgtcgcctgcattaggcgtgatcaattcccgaaaacccttcaaataagctagatattgttattaggctcaaccaatgcgattagaccaactaaagtgacagaatagaaggaaaatacaagctgtacgagcaatgtgtcacctgctcgcctcctttgcgcacatgtgtgcgcaatacatcgtctccaggtctgatcatcttcttcaaaagtgacctaaaatatctacaaatgttcccaaactttctcgggatccttatagacatcatagtatcactttagaccccaaaatacaatttttaaattcctacaacaaaacgtcaaatttcacctccaggccctgtcagcctctccaaaagtgtactcaacacctccaaatgttcccaaaaaaatttagcacccttagatacttcattcactttaagcccaaaaatacaaatttaaatgcctacaacgaaaaatcaaattttacatctccattatattaagtcatcaagtgttttccactactttgtgcaatcgcttactttatatttaaccaactgtaacacaaacaacaatgcgaggtaaagtagaggatagactttaataagtattatgtatcaacaattaaacaacagaacatggtaaagaataaaaaccccagactatgtgccaactgtaatacctccaacggggggcttcctcgagtaatcacccgggatgctaatgataatttgattatcttgtatggaatctatttttgtggcactggaatccagggactgcaaacaataatgtgcaaaatctcagcaacttaagaagtttttcatccccctctaaaccatgccagcaacaatattaaaattataagctcacctccccatgacatcgtcccaaaagaatgcattcatatggcctatgatgaaaaagatccaaatcacttatcaacgaaccatctgctttaacctgcaatattcaagtagaaagcaaaataggacctaagcactacattccagaaaaaattcaactatattaattgttaacaaaaaaagagagattactttcaaccagtaaaaggtagaaatatatttgaccccccacgctggaaatagttcttcctcaacaaagccacgtaatttctccctattggtcacccatagcgctacaagcgctccttctgtgtggctaagttgcttgataggaagggagaggaaatacttattcggcaaagttgggtacctataatgttaagtagaaccaaatcttatataatttgctaaatcaggcttcggaaacataaaaaacaaaatggatttcagaaaaatgaagatgcagagattgaccactcatataaacaagtatgtatctgtccattttattttcacagaagtataaactttgctgggaaatacctcaatttctggtaagcacttccattttcccatggtggatcaatcacaataagattgaagcaacagtccttctcagctacatcataaaggtgcaggaaaaattaatagtaatattcagtacaattctatgagtagaagtagaactaaaagggttttccacagtaagcaataacttgaacaagaaaagttccggaatgaacagcttaaaaacatttgcattttaatgaatggtaatgcaaataagaggtatagaagataatgttaactgcacatttagactccaagaacgaatataatgtcatttgcaggaattaccaggaattaggttgtgaatctgcctcagatcagacttccacacgatagaatgcaaaaatttaaaagagaaaaggtaagacactcttgaaatatatttcagcatttaagcctacaaaagtgggttaacacgtaaaagtggcaacttcactgaagactgagaactagatttcatgacatgtcttataatagtggccaccttagtaagttttggggaatttaaaaataacaagtaaaaatcatcgacaaattatgaataatcgaaagtgttcttcgttaattttaaaatggcaaaactaacataccatgtagaaacaactatctggaggtaaaatatattgagtgttcataaactcagcttccacatcttcactggtgtcattggaaattaagttattaaatacagggataactcgttcagagaattgagtggtagagtaacctgaaacaataaacaagttattaagattaaagggaaacgatcaaacactgtgcaatcccaacagaggcataaaattaactatattggataaacacccagaatttcagtacgaaaagtgattcaaatatctctacttttccataggtgttttgagaaaaagctcggaacagtgagaaattctggaataataaagtaaaagcccacctccagtttcataaggatgaagttttagagtaatttcgtataaaggagcttgccagacccgtccgagttcaataaatgactctacagctgaagttgatggtgatgatggcgataagtctctgtttttcaaagaagatgaatctgaaccatttctcaaattgttcatgacctccaaaagatcagttgctctcagcaaagactggcatgcctttaataacagaggttttgcttccttcaaaaaaaaaaataaagaaatcacaataatcaagctgagcctgaaaatctcccttaaccaaacagtgatttgttacctggtgacgctgatcggcgacccgttctctttcgttgagagtgtgaggattcgtcttcttcttccgctttctctttcttgaagtcgaagcatcttgcgtcgcatgtttggaatcgaaaaaacgtgagtagtactcagaaggggaaaccctaaatcgggagtaagagcggttgagaacatgaaccgggtcaatgaatacggcattacagtcttcaaatctgtaaacgccggtctctaagaacatagatagtttcttgttcatttccaaaacctccattgtcgaaaggctcaaggcttgcagtacccctgtgactgtccggcttaagacggactcataaaacaagagcactcacaacaccatctccaaaatttattttacaatgcaacctgttaaaacggatgtattcatatacccttgacttatttcggcattcaaaaaaaaattttagtttaattttttttaaccaacaaattccggataatttacaatatagaaaataatattcaaacaggttgaggagcaaaatatgaaggggtgtaaaataaaatagtcactcgtgcaatacactgtttgaacgtagtttttagcgtgttaaacttttccaaatttcttaaaattttgca

SEQ ID NO: 117280 - DNA, 2745 bp, Cannabis sativa
  modified_base (84)..(111): a, c, t, g, unknown or other
ggagacacttaattccgctgccatcactctaagttatacttaacttttatgtgttttgtttctcgttttagaagttcatatttnnnnnnnnnnnnnnnnnnnnnnnnnnnnagatctaagttcctggtaaaattaattccaacacaaccaaccatgaaaattttcagttggaatgcgcgtggtttggggaatccatgcgcattctaccatcttcgttttcttgttaaagatcaaactcctcatgttttatttattatggaaactaaattagaatgtaatgttgtttctcgttttcatcaatctctaaatttcaataatggacttgaagtccctagggtaggtttaagtgggggtttacttttattatgaaaagaccatgttggtgtaactctcctcaattttaatgcaaatctttttgattgttacatagtgtttgacaatggacctattggcacttatctgccttttatggtgcactagaagttcataactgaatatacacttggaagctcttggaacattgtaaagatgtttctcctttaatgacattgtttgtaattggcgatttcgatgaaatgttgtcaaacaacaataagcttggtggtgcattgcgcaatgagactcaaatggataattttcgaaaaaggtcttgatcagtgcaacctttatgaaccaactttcaaaggtgatgtgtatacttgaatcaaaggatggcataatgtgaaatgcaataaaggagcggctggattggtgctttgtcaatgataaatgggaagaaaactttgaactaattacaacacatcacttggattttttcaggtctgatcatagggcaatttcagtgaatgtaattgcattagctagccaaaatcaatgttcccataggcacttaaggttcgggttcgagaaaatttggcttgatgatccagaagcaacaaaattgattcaaaactcctggaataagtagctgactggttcgacaattgagaatttttgtcataatattcaggcttgcactagttctcttcaacaatggcacaacaaaagatatggcaacatgaagaaaaaaatctcaaaggctaaaaaggatgtagctcacctaaacaatactattgttagatcagttgctgcaatggttaaactgaaaaaaattaagacatctttgatgaattgctagcccaggaggagacttattggcaacaaaggtcaaggataaattggttgcattgtggtgatgaaaatacataattttttcatgctcatgcctcttctagaaagtcaaataacaccatctaatccttgcaaaattcatctggtgttgcattaactacaaaggaaggaatgatcgagataatttgttcttactttgctgatttatttacttctactggtactgactatgaggcattaaactaggctctactcaccattccaacaacagtaacagaggtataaccaatatcttttactgccatttacagaacatgatgtcttgaacgtgcttaatttgatgagtctagacaaaagcctaggaagtgatgggatgtcagctatgttttatcagcataattggatgcatgttggttcagacgtaactaaggtggtccttggtgttttaaatgaaggccatgacatgagcatcttgaataagtctataatcactctaataccaaaagttaaaaaacctacagcaatgggtgattttagaccaatcagtctttgtaatgttatttacaaactaatatccaaagtgttggtcttgcgattcaaggaagtgctcccgatagttatttttgaaactcaaagtgtttttcttccaagccgtctgatcacagatattatcttggtttgttttgagcttgtacatcatcttaaacataagacacaaggtaacaaaggctttttagcactcaaactagacatgagcaaagcatttgatagagtggaatgggattatctttctgctgtcatgaccaaaatgagatttgaccaacgatggacttctttgatcatgccatgcctttcctctaacaacttttcttttctcttaaatgaagaggttgtgggtaatgtttggccaacaaagggacttagacaaggagatctattgtctccatatctcttcctgatatgttctgaaggtttttcaagactccttaatcatgaagaaaatttgggacatttgaatggtttgaagcttactagacgtgccccttcagtctcacacttattaattgtcgatgatagtcttttgttctatcaagaaaattcaaattcagccttagctatcaagcatgttcttgatgtttatcactgcacgtctggacagttactaaatacgcagaaatcaatcgtgtctttttctcccaatacacaggataaggcaaagaattttttcagtcatacattaagaatgccaatatgtgaatgccatgaagcttaccttggtctccttgcttattcaagccacaataaaaaagaattattcaacaatgtcaaggaaaagatttggaactacttcatgcttggaatgagaagctatttttcgttggaggtaaagaggtgttataaaaggttgtggtttaatctatccctacatatgccatgagttgttttcgattgtcgattgatttttataatcaagttgaatctatgatggcaaacttttggtggggcacctgttggactttgtgctctaaataaaactctatttcaatgtaatctttaccattcaattatcaataa

SEQ ID NO: 117281 - DNA, 2350 bp, Cannabis sativa
agttacttttaccagcacaatagcgaattgtgctggtaaaagtgacatttcttgtagtgtattatatttattaaaatatacccacttttgtaaatgggttgcctaatgtgctcttacactccacttaagtctagcacataattttcattaacttaaggggtataataggaacaccatctataaaaatgggtatatcttaaagaatatgaaaataaaagtaacacttaaaatatgtaaagtgggtatacaataatgtaatttttttttgggattttttataataaatttaaaaattaatgctataattaaattattcaaacaaaataatattatattttaattaagattttaaattgtaaaatattcaatacacataacatgtgaaaggcacctatatgtcacatgctagtgtgacatattccaatataaacgcctttaaaaaataataaataaataaataatttcaaacttttagttttttttttttggaaagaaaaatgacttgatatagtttgctgtgtcaacttcttaggtagctagttttctttaatttggctataaatagctatataccttaccttttgtacatactttcattcatattgtcaattcatcatttgtcattatggaattgaaatctttgtccaaaaatcaggctaaattgatcaaagagatcaaagaaacgattttcttatcgttaaacatcaatccttactcgctcgtttctcttaattctgcttacgagacagcatggatagccatgattccgaatcatcgccaaccttctgagccaatgttcgagggttgtttaagttgggtgcttaacaaccaaaccgaacatggcttctggggaaacaacaatgagagtggcatgccaaccctcgggtgtctcccagccactctggcttgtattgttgccctaaaaaagtggaatgttggttcggacatgataagtaaaggtacatatatatgtcactattcaaaaatacaatataagatatttatatataatttcgatgtaatgttaaataccttagcattaatttttgttataattacaataataacttttttgtaaattaatgtaaaaattatgtagggttggagtttattcattcatctagtgcaaagaggctcttaaaagaaatgaaagaagaaggctttattcctcaatggtttgcaattattttcccaggaatgattgaattggcagaacaaattctaaacatccaaatcttaaaggatgaatccgtcgtcgtttcgaatatattttaccataggcaactcattttccaaaagtaaatacactttatatcattttttatgtgtctaacataatatataatatacaatattattaaaccctactctaaccataagcgggttaagcatgtgtctcgagttcacttaattcaagaacacaaatttttttctctttttgaaattacatattatttttttactaattttgaaagataacatttttttttaaaataaaagccctaaaatatattttttcttattatctactaaattttagagttgatcctgtacattatgatatttcacaattagttacaataattaatgatgatgtgttataataataataataataataataataataatttatttttatatatgtacagagagcaacatcataataaggaggcaaatttgttatcatatcttgaagtgttgccattatcatattttaataaagaagaagactataattatgatataataataaagaagttgtgtgaagaaggctctttcttccaatctccatctgcaacagcatgtgctttcatggcgactcaaaattctaaatgcttgcattatttgcaaaccttagttcacacattttccaacaacaatattattaataatatcactataggtaattaataataatttattattattgttgctttttaatatttattttgaaattatatatatttaattaatttaattatgtatacagttcctactacatatcccatggatgaagatcttataaagctttgtgttatcaaccatgtcgaaaggttagggttggccgagcatttctctatggagatcgaacaacttctccaacatatttataagtgcgtctttttttttttaatttaatttgtattattttgttcatagtgcattcaattgatccgtactcaacttcaaaatacttatatatatatttttaattcaatattttaagttaaataataacaataattaagatcgtttttaattttgttgatttttttttttattttgttttgtttgtttgtgccacttggaggactaaattgtcttgagtgatgatagtatgagttga

SEQ ID NO: 117282 - DNA, 1106 bp, Cannabis sativa
  modified_base (83)..(88): a, c, t, g, unknown or other
aaatgacacacaaatgagtgataaatacttctgtttctttattgatatttaaaagaatagagattacattgaaatggagtttnnnnnngggcataaaacccaacatttagaactattggatgaacattttcatacttcctcagagtataattaaggaagttgagcagctttgtaggggctttttatggggggttaagggagagaaaagtaagattcacttggcttcttgggacaaggtttgcctccctaaatcttttggcggccttgggttcaaaattggttctaattggaatagatctattcttaaaaagttcatttaggctatcatggataagcatgacattctttgggttaaatggataaatgacatctatttgaagggggctgacttttggaaatatgacttgaaggtagatgcaagttggtattggaagaaaatttgccaattaaagaagaaattttgcacgaatagtattgttgctgctgttcgtagaggtaagtttcttataactagactctataattggttaattcagcatgaaatagatgtgttctacaaagctgtctggtgtaatttatcccttcctaagcataagtttattttttggcaagtggttcatggccatctccttacaagagataaattcattagattccacatagagctagacacaactatctgccctgtttgttgtgaagaggaggagagtcattaacatctcttttttggctgtgtcgtttccaaggcagttgtgaaagaggtggtcgatggttggttttggggcttggccgattgagtataacaaatgggtttgttgggtgacagggaaggtttcaggtatcatcaacttgattctttctgctataatttatatgctgtggaagaacatgaacaatagtgtacataatagtagttgttttactatcttgaaaattataaatgatgtaaacatatagttaaatataggttgtatagcttaaaagataggaagcttattcaagtgtatagatatatctttagaaacattaaagattattggaggatcaatgaatatcacagataagtctttcttcttattttaattgctatattgaaactttggttt

SEQ ID NO: 117283 - DNA, 2955 bp, Cannabis sativa
  modified_base (2739)..(2754): a, c, t, g, unknown or other
  modified_base (2827)..(2842): a, c, t, g, unknown or other
  modified_base (2914)..(2929): a, c, t, g, unknown or other
tttagggcataaaacctaacatgtgcttctagaatgcttctccaaaaaaagctcggattagagccaattgttactgtgagaaacgaaccattgggataatatctagctttgaagatacgggccactggagagtctggtttgacaagaagccgccagccttgcttacccaagagtgccaaattaaaatcacataaattgcaaaactccattatgaccattgttttgtgcttggaaagacgcttcgaagacatccaatggataccagaatgattgttgctagatgattgccaccagaacttagccatgaagctctccatatgcctagtaatttcgagaggtaacaaaaagacactcatagcataactgagaagttcctgagcaaccgtcttgattaagatttccttgcctgcacgagagagaaatttagtaccctagcctaagattcttttatgcactttttctttcaggtaccccaaagctgctgatttatttcggctcattgagctagggatattgagatacaagtttccatcatgcgcaatacccatgcccagcaatgcaacaagtctttccttaaaatccacactggtattggagctaaaaaagatggatgacttagtgagattaacctttttccccgatgctaattaaaacttgcgaagaacttcttgaacccgaaccgcttcctcatgagtagctttacaatacaaatagctgtcatcagcgaagacaatgtgggctattctaggggcaccgtcggccactttacacccatgaggccaacctcgttgttcatatttcctaagcagcgctaagagaccctccacacataagataaagagatatggagacaaaggatttccttgacgaatacctctagtaggaacgataggaccggtctcatggctcccatggataacttggtacttggccgatgtcacacatttgaggatgaaccgggtccaatgattagtaaaaccatgctttctcaacatagcttcaagaaacctccactcaatgcagtcataagctttactcatatcaagcttgagggccatgtaaccatctttacctttccttttcctattcaaatagtggagaattttgaacgaaaccaaaatattgtccaagattagtcttcccagaataaaagcactttgatttgcagaaataaaagaatccatgaaaggcttcattctgttgaccataactttagtaatgattttatacagaacattacataaagctataggtcgaagatcagacatatgctctggagttttcttttttgggattaagatcacattagcatcacgacatccattctcaaatgagccgctctcaaagaactttctgacactactaataacatcctgacccacaatattccaacatttttgataaaaagtcagggtcataccatccggccccgaactcttatcatggtgcatttgtaaaaaaggcctttctaatttcatcatcaagtattggcaagcataattcctcattaccaaaaccagacacaattgtatcaacacaatccacgatctcatcacaggatacaccagtagaagtaaacagctaatggaagtagttatacacttcctcagaaagacccaaatcccacgagacccaaaggccatgctcattctaaagttgcacaagttggttattacgtttcctaacactagatgcctgtgggaaaagctactattgaaatcaccttcttttaaccattgttgctttgcacattgtttccaataacattcctgttgatccagagactcaaacaacttctttttaatctcttggtaccattgcacagagacactatcacgcttagtttggagtgatttcagatcagccttgtaacatttgatatgatggttcaacgttccggttatctttttactccaacgagaatttatcatcacaaggattaagcgtattgcccatgtctaacaaatggttattatcctagcaatccttgacaatttcaaaacatagagggtccttcaatcaaacattttcagataaaaaacagcggctagaggcaaaattatacaacactttcggttcaaggaaaatgggtgagtgatcagaaggtgaaaactccaaattagttggggatgcatttagaaacacctggttccaagtagctaacaccagagccatgtctagacgaacctcaatccaagtgctcgagcctctacctttctcccaagtgaacggatgaccttgaagctcaagatcaaataagccacattatcgtagtgtgtcattgaagccgtttatcaaccactggggataaggtctacccccacatttatcttctgtgtgaattgtattattaatatctctaataacacagaaagggaggtccgatttgctggttagtgagtggagaaaattccaagtattctgtcaccaattccggtctagttcaccataaagcccagttaatgtataatctcttgaatgagaagaagagatagcaaatcaatatgattatttgagaaacccaacaacgaaccttcatatttacttttccaaaggaccgcgagcccaccagcaagcccaatagcttccactacaaaaacacccccaaaattgaagagacaggccagaccatctattgacctcgcttttagccaacgacagtgagtctaatttagtaagtgattagtagtttatagtgattgatatatagtaaggcaatgtaaagacacaagaattttnnnnnnnnnnnnnnnngagcagttcggtaatagtctaatcttcattatttgtattaactcaagaacaaggagaaaggttccttttcttnnnnnnnnnnnnnnnntatctctgaatatgaattattagataatatctctccagtgaaacctttcgaccttttgcccagtgaacatgnnnnnnnnnnnnnnnngctatgagcttggagaggaagtattt

SEQ ID NO: 117284 - DNA, 4936 bp, Cannabis sativa
aattcgcatataataaattatataataatataattctacaataatactcaattaactagttagggctttgctaatccattttcttaattccagggtattacaccaaatgttgctattaatttttcaaagaaccattctcatgagatattattttctgaatctgccatacaaaaagttagtgagaatattttacttgttgcatcttgtgtaatagctgttagtaatgttcccccgtatgtagcttttagaaaagttccatccactacaattataggtctagatttattccatgctttcagtgaagcatttagtgccatgaaacaaaatgagaatttgttgttttcttcagttccaatgtgcactacagattttgggtttgttgtttggagcatatggaaataactaggcaacaactgataagactcctttgcttatcctctaactatgttaagagtgtgctccctactcctcaatgtcttcatgtaattcatttgtaacccatatttatcattcatctcaaatctaatatctgctagtgttattgttatttttatgtttaaaagcttgtatttaatacaatctcctattatctttgcagaagcttgcatttgatcctcaaatctgatgcttagtgagcaagtgtgtttgtcattgtatttccttacaatgaaattctttgttgcaccattccttgacgctcttagtgaccacttataatctttatccaaacactcaatttgaaattcctttgtgcaagatttttttaccttgtattgaaattgttgttttattacaaagtagctgaggacactcttcaatgttttattatctttgtacgtctgcccttttcaatttttgaatgttatttatctgtgatgaccaatgcttcttcattgttgatttcttgttgatcaattgtctatcttgttagtttttctatcatttttgcaacaactatttgtgcatagtcaacaaagtcgaatgcctcatcatcttcttttgtgttttttgtttgttgatgttccccctgactgagttttatattcaagcatgtggacttcttgccctgtgtcaacctcagtaaaaaatggtatttgtgtggaccatatttatgcacaaagaatattttgtcatgtccttttctcttgattttaactgcaagtaagactctaggctttcatcatttgtgatctttaatgttggatattcagattgtatctgaaactgcatttgtagattagttgtgtttctcttgcagttatattttcgcaacagtttgtccactacttctgtacatttacagttttcttggaagcatatcccagtagcttcaaaattaatgtaccgattgttctcatccgaatgttcattgctttgaactagaacgaatattgattctatttttttacaaattaactcagttagatttatgaaaataaaaataattaaattacataaattaaccaatcaatcaacaataaatatcatttatttttttaaaaaaaatattaattatttatcaaaataaaatttataattactaacacacaattagcaagatcaattttgttgcaaattattaacaataaatcaataatatatatttatatatatgaccaaaataaattaacgtttcaaaatatatgaaactcaactttatatgtattatagatacataaatacaaatttattacataaattaaacaagcaatcaacaataaacattccttattatatgtttttttttcattttttcaaattaattttttttcaatcaatagcaggcaatcctcaatatattatccaattagtaattatcaaaattaatttctatttattatatagtgattcaataccttgtaacttttttttagatttgatagggagctccgatcaataatttttcatgtcattctaatatgatctccaatatttaaacaataattttagattatgtagtatagatcttaccccgttcatttcgagttttgtgcttatgatgtttcatacctgttttgaatatcattttgcatttaattaatagggacctccgataaataattttttaactctttattgtatgatttgcaacattgaaattacaattttagatacgtagtatatatcttacctagtttattttgagatttgggtttcggatgtatcgtacttgttttcaagcagatttattttataggattttgttgttgatggattgacattttctgatgttttttttaacctggctaattaaatagagaagttttttttaggatttttcattgtgttgttgtttatttttttgttttaaaaagcttggcccaagaataatggtgtctctatcatttatttttgggcagagagtaacgaaggtgttattgatgatgacaccgtatattgtgtaattaaattatgtattactgtataaaagtataattcttcgtgtattcgtatatatattaattttttacttttttttgtgctcgtgtgaaaatttctcaaatatttttatataaaaaaattatgtatgtttattccataaaaatatgcaattaaaattttattttgtatgcttaaggtgtttttttgttttcaaaaaacttagggtgcgattggtaataagttttggtgccctctgtcaccattatataaatatattttttaattaaaaaaagtaaaattattttcaaaagatatatttcgtcaaaatattttgtgtatattgatataaacaaaaatgtcttttaataagggactgatgatactaattccaaaagacataacaaccactgtttattaaatttctgttaaatgtgacatcgtttttggtattcttctactattactactattgtccaaaatattaattgatatgaggagggtctatgtataacttgttatatttgtaagaaatttattataagaaaataactttagaattttgcattggcaccccttaggtattttcctctcttttctgattttctagtattgtacttgaatatttttgttttattaccattttgtcaaaaaatatattttcaaacttacgataaattatggaaattatatgtgattgaatatttttctgtgctgattattagggccttttaattcagaagggatttggtgtacagaatccaatggacatccaaggtataatagaaagttactacacctttctttttatgtcctcttatccttctgaagaagaaattgaggctatcctttctgttgtgccgtgtcgagtcacttcagagatgaacaattcatttttgcttccttttgttgagaatgaagtgaaagaagcagtattttctatgccttccgataaaagtcttggagaagattgtatgaatggaatgttctaccaaaattattggaatgatattgggaatgtagttattaaagcagtcttagaatatttgaatgggcaaggagatatgtcttctattaattctacgattgtcactctagtccccaaaactaaagcagccaacaatatgaaagatttcagaccgattagtttgtgcaatgttcttcacaaaattgtatctacagtttgggttcatcgtttacaaccatggctagactctataatacactcttctcaaagtgctttcattggaggtcgccgaattacaaataatgcaatggtagcttatgagttattatataatctacgaggcgttacaactagaaggtgatgttactcggtgatgaaattagacatgagtaaagcatatgatagagtggagtagaattttctagaatcaattatgcttcaactcggttttgcaactccatgggttagtctactcatgaagtttgttcgaacggttcactactcttttaatatataaatgatgaagttaaagggaaagtggttcttactagaggtttacgccaaggagatcctctttcaccatacctttttcttttttgtgcggaaggtttctcctctcttttatgtcacgcagaaagtacacacaaaatttttggatataaagtcgcacgaactgccccattagtttcccatcttttctttgtagatgacaatattcttttctgtcaggcaactcctaatgcttgttatactatgatgaatctatttaatttatattccaaagcttcaagacaagtaatctcattaatttcattcaactaagttttattttttttattttatattgtggtaggatgtaggaattcattaaattatactatgcccaataatggtatactgattttatgtcttaaaatttgggaagatttcaaaacatggaaggattatattaccaattctttatccaatttatttatttaaaagtgtaagtatataatcgacaattttactatagtagtttattaagattatatatagaactaaaaattagacataaacaaatcttgttctttctttcccttacttatgtatattcctttcttttataaactgtaaattattgtaacttagtactcaacaatctagttaccatcaatttattttaaaatatgttccaatttttatatatatataatttatgaaatggttggttttgttagtgtataattacttaaaagatctactttctagatttacatagctttaataattgttttaatattgataattcactagtatttttcaataaataattattatagattatttcttacctattgcagattataaatttcactatgtccacattgtatttctccccaaatactccagacgatctgaaatctctttatgttgaacttttcaaatgcaattgactgaggttatatagaaatatttaccaatgctaagtggacagaataaacaacgactgttcagtaatataaaggagaaagtatggtctcgccttaattcttgggaaaacaagctcttctcttatggtggtaaagaggtactacttaaagcagtaat

SEQ ID NO: 117285 - DNA, 1240 bp, Cannabis sativa
ctgggggtgagagacctggcgcgccacctggtattctaaggtcaggggacgaagatcatcctatgaatcgtttgggaaagaatccgaatgatgataggattattgtttgtatgatggcccatgtgggcccagatgcggcccaagttgttgaaagaccacaccatgagatctgccaatctcaaactccacataatcaccctgagcctttaattatctctgggcctactggaaatgtggatgagataataaatataatgaatgggcctatactcaatgagggagtgggtccaacagacaaagatgagccttggtttcatactaaggtttcaccttctatgttgggctctaaatcttagaaaagaaaagccacgggtagtgtgacccccattgtctctctgagacctaaattcttatctccatctcttaacccaaaggatcaggtctcatctctaagcaagatcacagttgctcccttcaatcttggaaaggagtcgcctaagaaggattgttctggttccaggaagtcgagaggctgaaaagcgtttaacaagaataagcttatcgaagataaggctcataccgatactgtcaataatgagttaggtattaagtttatttgcaatccttctgagaatgagaatcaacttttaaaagttagaattgagcaaaatttttaagtgggcaaggaggcggcccttatcaagccccctcaatcccaatgagagctctttcttggaatttccgcggtcttgctagaccggcggaaatccaagctctaaaggattgggtgaagaagataatgttagactgtttatttctgatggagactaagattggggttgctcagatggccaacatttgtagaatcttacagtttgatcatcacaaatatttaccttctacggggcttacgggggggaatgtgtttcctttggaacaaagacgctggcattaaggttatagacttttatgattatagtttttttttttttgtacggttgaagacaacgttgttttgaaaacttggagtctcttggcaatttatgggactccctgtaatgatcgctttagtaatttggattagtaaaagcaattagcactaatttccgatattttaatatatttaattattttttggccccattgttagatataggcattagagttataacttctcaattctagagattttattaaactctacgggtattatttgacttatatgtgaattatgttattt

SEQ ID NO: 117286 - DNA, 2734 bp, Cannabis sativa
tttttttttttttttttttacctaggtatagtagttaattgtggaatttttcctatgcattttagatttgattttaatatgtgtttgtactattttttttaattttatttttattattattttttgggcattttttagtatggtattgtttattaacaaggttcttatagttttagattttatgtttaatcgttcttgcttgtttttttgttgttattttctagaagattattaggtatagtatatgttagattatttgttttgggttttggcatatgatgtttatatggttgcaatataatttacctactggttatgaattagatgtataatgtgaatgattttttattagttttagtatagtttgaaggtagttttgaaccgtttccattatcattatcatgtttttgtttgtttgtttatctctgcaagattgagaatacaagttctatccttatgattatttcaagtccaagtgataccctactttgacttacagtgttattgacaacattaagaaaaaaaaaatatgtgatgccaatatttcgtactattcaattctattttttcttggatatttctatctgagatcaatcgatattcttatctgaccccatatatttcaccttaatcttacaaaaaaaccaagtccatgcattatacttttctaaatctacaatagacaataatgagagaaatttgtgaccatttgcatcttgtgtgcaagctgagaacaatgtgcttcaaaatgtagcttttaaaaaagttccatcaataacgatgattgatgtttatgctgatatttacagattgtcgcaatgtagtttggttttattggcatgattttagttgttctgtgtgaatgtattttttttaagtatatttctagttttaatatagttttgaaactatctatgttttaatattcatgtttctatttttgtgttttttgtatatctatggattgagaatacaaatttcatccttatgattattacaagtctaagtgtgtcactacttgcacttagtgtgttattttagttgtagttgagtattttcttagttgcattccagcacctgattcaacttgtgtattggccactagcttcctaatttatataatttattccttgatcaaactgcccattgtaaaatatgagaaaataaattgagtcattttccttgtaatttgaaaattcaagcatgataagtcaactatgaacaaactgtctaaaaactgaaaggcaacaactatatttcttgttaagcatctagtataaaaccttaaaataacttataaccccctatgtgaaacaaacaaacttattaccacaatcaagttttttctgtacgagtcgtgtattgccaattacaagccctattttaatatataataatattatagtagcacaactattattcagcagatttacaacataatcacaactatgaatggaaaatgtgtttagacgtcgttaagtaaagatttatcaatattttttttggcactcattaaaatcactcgtaagttaataatattttatggataaataattgttagaactctataaatcaactttaaatcaactaattttatatatgaaaaaagtctaatcatatattataatttttttagagagccttgtgttggattgtcgatatgaaacacttacaaatgtcataaaactattgtatagttatcagtttgtaattattgacatgtcaatttctagatcgttattaaaatattaagccaaccgtaatgcaactacttagaaacataaaaaatagaacaatgtttccatgttcgtagctcgagaagaatgcagttttactttatttttcgtgatttgatatgaataaatccactattgaatgctgaaaaacaatgataatgcaacaggtaaaatattagctattgtattaatacattttttctcgaattatacatgttttggattgattggaacttccatatctatttcacatagatctacagtttatgaatctgcaaatttaattaggagggttagttttctggaatttgaattatcatttatggttgagtttatgtttcaagctaatttttctgcaaatttttgtatcattcagtaattgtaaatgtttgtattggtttgggtcttcttctcaagtgaagtcatcggaattaatagtggctttgattgccgaggttaattcattattgttgtcctcgtttgattgcatgaagggttcaaggaagagaagcgtgggtcatgtgactggatggtgagtgcaagaggtatttataatatgtgagctgtataaatatttaaattggcggctcattgtaattttataatattgttgcctttttttttatagggaactttacataattatatactattataaactttattacgaaaacaacttataaaacatattataacgtgatatttagatattttatcaaatatactgtatattaattaattagtaacttataaattttttttcatatttaaatttctctatttatttctatatatatttcaaaactaataatatattaattaaaaagttatgatggtgtgcaattttttttacattaattaagataataaaataaaaaacacattgtcaatagtataaatattctttgtgtaaattacatataactttagatactaacaacttgtaacgcccgcattttataataataaactcggaaattaattttaataatttatat

SEQ ID NO: 117287 - DNA, 647 bp, Cannabis sativa
tccttgggttgaatgttgtttagagtattttgttatgagactgatttttggatgatatttttttcaatttgttataaagttcaattgttatttagtaataggattttactttcatgcttgttcacttatgttaatggtttttgacgaaattagtttttatatattttttaaggttagtagagttgaagaagaaaataaatctaagtctggaagcaacatagatattggtggtattgataattctaaaactgagatacattaaaattattaaaaactcgtttctaaggcttgtcattttgttgaaatatattttgtttggtgttttattaacttggataaatgttctctttattatcttgttgtcatttttgtattctatatatgtatagtttgttaacatataagtatttactttgttaattttcaggtttaatgtgttattaaacttgctttcattttcggtttgtacattttaataattggttgttatattttttaaggttgataatgctggaagtaaagttgatcaaataattattgagaataataagcttgctaggaagaagaagagtaagaaggtatcaaaaaatgatttctggtaaatataggctagttaggatttttacctcctaaactttgacatgtac

SEQ ID NO: 117288 - DNA, 1333 bp, Cannabis sativa
attcaatagcagccttggagatgattgcatcatgccctaagcagcgaataacgagactccaaccttgggattcaatgagtgcttcctgcagtagaacaattttaaaatgattggattagaaactcttttatttattgttattttttccatactttaatatagaatgcttactttgtttctggtgtggccttcaacaaaatactttaaggtgatcaaaatctttcttttcaaatcattgttgtgtgattttcgaagaacattgactataatgtcactgaatccttctatggaaatccaatctttgttaattgaactctctctcataagatcttgcatttgatttagggcttcatccatggacttatcaacacctgatagcaacttctccttggaagatctgatcctaaggcagtaatttagctctctccactcttctattgattgtctcaaaggaaggtttgagcgaaaagaagtattttcaagaacttcatgagtatcagggtctgttctcttaccactctcaaaccaatctgcaatggcagctctctcacatgtagtgccagtacaaaggctgacaggattagtcatcacagttccatttatgcaacaaagaaaagcattaagtggtaaaatgtattcttctcttgaattatatctttcaatggcctgaactcgctgttcgtattgcttcttgacctcttcatactccctagctgcgtcagctcgagagaggagctcaataacctgaccaaagaagaaaacttcagccctttctttcctgaagtcagcctcctccttttctcttttgaaatttgcaagctctgtgcttattgctgacggctcaatgggcaccccaactgccattgctatttcctctagcatgtcatttgcaaaagcttggtcaagtttgttatccctaagaccctggtcaagcttgtcaacaatttgaagttgagagcttgaagtctcgaattccactctttgcatctcattttgtagcctatggacttgatcagatattctatgaagtacttctgtgtttgcaagggataaagaagctaaagatcttccaatatctctcgtaacatcttgtacctctttaacaatgtgtctgcacttgagaagcaagtagaaccgggctcgctgagtatacttctcaaccaggttattggcccttttaacatctgcttcaagagcttctagagcttgtcttgcagcctgagactcgttcagctcttgaagttgcaattcctttaagacaggttcaatgtcagataagtgctttgacaaaaccctaaaactctctttctcaaaaacaacatccttagcagca

SEQ ID NO: 117289 - DNA, 768 bp, Cannabis sativa
  modified_base (52)..(56): a, c, t, g, unknown or other
ttaatatactattggacataaaaacgatatactattgtgcaaaataactatnnnnnacacttaattattcaaggttataactgtaattttatcatcaaacttctaacagaattgacattttgttaatttttttataaaaatgaacatttattgacttaattgttagatttagggtcattttgcattttggtccaaaaaaaaattgatttgtggactaattgttggtttaaacaagagagtttcgaagtttgagcattttttaatcatagtatattcccttttcttcaaagattttggttcatctataaataatgtctttttgctacaaacggaactatatatttagtttagtgtttcaaaaaaaaaatatatatttagtttagtaggacttgacttataaagttataagatggcaaagacaatactcgagcatattttttttttaataatataattgattataaatttaatcaataatttttttaattgaaaatttcatttaactacacaacttagcctcaataatgacatcaacatgagatgattagacactaaaaaaatacaatataataactgtatacttcgaatatgaattgttagggtaattaacattaattatttatattttttgattgcacatgattatatatattgtaggccctatttttaagaaataggcattaggattataatttctcttttgaaaattttattaaactctaaagtggtgtttggttggaggtaatgaaatggaatgtaatggaaagg

SEQ ID NO: 117290 - DNA, 2455 bp, Cannabis sativa
tcacacattgaacaaccgatattaggaaacagtataaaaatagtcctttttttcattttattttttataaaaaaaaacaccatattctaatattacataaattaaattgagattttacgtttagcatgacgtctagatctttcttcttttaccctaaatgacgtatgtctttacagatttgtaactaatgaagtgagaattacaactttatatatagtgttaataactttaatttgagaaaacttttttttttcttgaacaattttgcttttcaatgtattatatggtaaatagtaacataaatatttaaaattaattataagcagaataaatttaatgattttttagcggtatatgaactaaattataaaaatttaaaaataattaatattacaaatatctctctagatttaaatatttaaaattaatctgagatttataagtgtcatgtttaaaataataacaaagtatgtactaacaaaactgaaaaaaaaattatattattataaatatcaggtacttatgctgctaaaaatttattagatttatgttgcttactctttataactttaggtactcaatatttacccataaatataaatatatattatatattcatatttatatagttcaatgggaggattactttcactttatataaacctaagttttaaaattaatataacactacgtacgtttttttttctttcctcgaagagcactatacgggttttgaaaagaaaaaaaaagttgtcaaaattaaaaccccaagctatgtatgtaagtcgtttttaaattttaattaaattaaattcataattaatggcacgagtataatataactaattaattaagataaaacatatatatacatatagtagtgaatcacatttgagattgccaaaagtcaaaatagaagaccttcatttcagaagaacaagaaaagtcagattgctctaccattattgatgaaaacatgcattttcgtacgtatatatatcttgttataataatgaaaataatttaaaaacacaaaggttattgattagtgcatgtcaataaattaagtacgtagtacatatatatataattgacatggctgatggttatctcttccatctctcaccatacattatttaacgatatatatagatcctataatcttatatacatatatggtaattaatattaagctatatacatatattaatacataactaatatatagtagttttattacattcagtccagctgtagagatttcaaacacagctgtattaatatgggttgttattatagataagcataactaggtctaggagagtgtgattaggaaataataatcaattggcatttatatatatagcactatgtattgtaatcaatgtaatatattctatatacattttcaatccaagaaagattataattaattagctgcgcgtgtgctttctatataatttataaaaaaaataaaaacaacaaagaaaaagagtaaaagaagggcattctcttacataaccgtgtggtttattatatataattaatacatagtatatatagactacatataatagaatttcatattattaaaagaaaaggaaaaaataaacttggctagtggcaactattattaaccacaatatatacactaataaattcaaattacgttggcgcttaaaacccaacgtatcaatcaatattattcattagaagtcggcaagtagctatagccagaattattaaaaataaatggttttcaaaattatatatgagtgaataaatatatatgtattttatgttaatttaataaacatgtaattaatattggtgaaagcgagataagtatggctaatgcatgaactgtttcacaacttgatgatgtttatataaatatgtatataatgtgagtcaaagatatggttttttttgcatatatattattatatatagttgctttcgaaattatgtgtgtaagaaaattgacactcatagcaaggagggccaatcatagacattctgaaattaaaaaacattatcgatcgacctaattcaaataattatcaaataataaattaagtagggaatgcgttagcgtcataatttatagcgacttaacatataaacatacttacttaaaaataatatttgagcatttataatataatatatagtatatgtaattatgcatacattatagggccttcacatcatatatatgtatatactaatgggtattaattagagcatgtctaaggactttatcaaatgtagtgtcacactatcattaaatttggtatcaaaaaatattactccaatgacaacaccaaaaattacacttaaaaaattagaattattacatagaaaatataaattgacaatttatttgcaaaaatacctccataaggtgtggacaacatttatacctttgatgtgattttaattaccaaaatac

SEQ ID NO: 117291 - DNA, 1387 bp, Cannabis sativa
tggaagaatgattgcttaaaccttactagacatttagttgaaatttccattaaaatattgcttaaaccgttttttatacaaagaagtatttttgtatgtatatacaaaaatctgcttccagcataatattgagaagaaaaacagaaagaacataattttgagttacaatgagcattgtgtcattcaacctatcaaaatacacagaatatcaatgttacaattgcatattcttcccgctttaccctatcttccaaagttgaatttcgatgagaaaagaaaaagataatgaaaaaatatttgactcaataaaatttttcataccaaacataaaactttgattttctttttcttattctccacactttcttttctttatattttccttaccaaaatctaaccttcaaacatagccttaaagagtttcggaaactggtttatcttaactcgttgattctgaagcagagaaagcaacccaattctcatcactaagattaaacagagtgcttccagcaggaattggttttgttgcaggataaatggtgacctttttacaggataagataatccggtcgggcgagggcttaatgcacgtgtcatttggctcaacgcttaaatccacaacaaacttagtatgattattagaaacagaaggtgaagatgaagatgaagatgattcagttttcgattcagaagaatcagacgagatcgtatcctgtgtgccaccatttatgtcggacaaagacaaacctccttctctacctgccattggggatatcaggtacagaaaagaagttgtttttaattttaaggcataagaaaaatgtacattttttcactttctgtcaagataaaattagttgtattagtattaatttacttctgctagagatgacaatctatatttacaaaactaagccatgccaaataaaatcaagatattctaagaaatactaaaaaatataacacctaatgcactaattttaacattgttattaatttcaatctatgatgtcacactccttttctttcgagtttcattctcctccatgtttcttcttttttgtattctttgttccttggtatctgtcacaataatggggtattattactattttgttaacatttaaatatgtatgagaataaatttacttcattaatagcataataaatttataaacttttactaaaaatttgacaaaaaaataaattacacaaatacattaatacagaaaattttcatttttatggattaaacttttttatttacaaaaatacagatttctaaaaattgtttgatatttttttttattgttttataatttatttatatttaatttataattgtcatgaagttgattttctcgttgtttttagttgttttatagtt

SEQ ID NO: 117292 - DNA, 1374 bp, Cannabis sativa
ggggtgcattgtagaataaccctaaatatattatgtttgatgaattaataataaataaataaataagaaagctgggttattggagatatcaataagacctatccatgaataaaaacccacaaatcttttatcttgattgccaaatgccaactaatgtggggttttagtgttaacggttctagtaggaggaaactaggggagggtatatgtggtagaggctcagtcagaagggcttacctcttttttgcatattattattttttggaaaaagatttttttaagtactagtgttaccgaatactttttataaatgacactttataattaattagttagcgatattttttaaaagttattttcttaatttatatgagacctaatatttaattatactaataataatttcaataatacattttaacaattttgttttgaaaatggtttgggacgttgatgggtgaggatgaatggaatgggaatgggaaatggtgtggcctgcttttgtgtggtttgcgggggaggtggattctatattttcttgaaaatataaatatataattaaacgtacacaccaaaaataattaaatcaaataataaaagaaattaataaaatagtgggggaagttccaacttccaagcttgagggagattgtgccatgtatgaaatctcacatcatattttctatacatggccttggaagttttctaattatgaaggggagttcagtttagttactttcattgaaaaataataaagttaggctgagacttgagagttgagagttgagggtcagaccctcactcgcttttatgtatttattttcaatcaaatcttagctgggaatattatgaagcttttatcttctttttttttctttctgaacaatgaagaaaaatttcattgaaaaataaaggcttataccattttagttaattatttatttggaacctacacgttagtattttcacatttaagtgtcattttcatgtcttattctgaattttacttaattagaattagcaatattagaaaatgaattaattaaagtgacttaccaaaaaagaaaaaattaaagcggaaagttttgactagaatatacgtgtgtaatttgttttcaagtgttttttgttttgaaaaagggttagtgctgttcaattttcttttttgtaaggtaattatctttgattgaattctattcaaatagtcttgtcttttgacatggtgagtatgtcctaaatagtgtttgttttgctatcgttatcttgatcatggcgtctagtagttactcagtgaaagaaattgaagaactctatggaaatatagagattgaaggggaagatgatcgcatcactacgtttgagtttgaagaacca

SEQ ID NO: 117293 - DNA, 1531 bp, Cannabis sativa
ccgcaaaccgcaccgcgcggtttaagaaaaattcaaaccacgaccgcaccgcaaagaatttcaaactgtattttttttgcggtgcagtgtggtgtaggcgatttgagcggtttgaacggtttgatgaacactcctaactgaccctatgcccctctctatcttcgactacgtcgaaaggtctagtctccttctttgtctttctttgtcgtcgacaccgcgctccccctgtctgtctcttagtctacttctttttttgggtggaagaaggctgaagttcattcccatactcccaaatcgtctcccattctcctcattataggtcgatggcgacgaaagataatccatcctgtgtcaccattgacataaaaggaacccctcaaaatccagaagccttatatgattttttttatcaaaatgtgattatcgatagtttattgatgatttttatttgtataacatatttttgtcaatttgatatttatcgataggttattgatgatttatgtttgtgtttttgttaatttggcatttatcgatgatttttgtttatgttttgttaatttgacatttatcgatgatttttgtttatgcacaaaatagtggtacacagacaaaaaattatccataaactatcgataactcatcgataatcacgttttagccaaaaaaatcatacccaccaatatctaaggtttcaaacacatacgaatgcatcagtggtgtctaacacttttaaagatgttatatcgttattgatgtaattaagtatcgatactatataaatgtattaatttttaggagatattgctaaataaattactagaccccatttctaagtgttgtcagtactcatggctaataatattataagagatatcttgtaatatttatttaaattatttttttatgatttaattaaaaaattaaaaatatataaaactatatttggtaaaacagttttgattttttattatctattttttgaataagaataaaagtaagttactataaaaatattaatttttttttattattattaaagtctattttatattttcctttatcaatatctagttcattttttttttttatatatatatatgattttctttctcagctctcttatttttttttagtgaaaatacattagagtttataaaaaactagaaaggccaaacaaacaaataggaggattacaaataatatcaaaccaaggccaaagacagcaagagagccttgaccaccaaacctttgtttgatctaaagaaatagccaatccaacaagaggatggatagtagcattagaccccatcttagattgttacaatgttcaatagaaaatttattaaaagacttccttagaggtttttgaagaagcatgacaaaatttagggctatttacaaaaatataggaaaatgaagatatgttttgaaatatatgtgattaccctaaatatggcattttttaaaaaaaaacttacaaatatgggaaaaagtcatgaggaatgccataaaaaactttaaatttgtg

SEQ ID NO: 117294 - DNA, 1231 bp, Cannabis sativa
agtagtagtaaactcctcgtatattaaaatgaattttatttagggcataaaacccaacaatcttgtcttctctagactaactttgtctccctaatttatttaaatattaattttaaattattatttattaagaaaatatataaatactattttgctctagcatgataaaattctccttttcttactttgtggcatccatacctttggccgagttctttggttattggaggtattgtcttctttttaaggctattggagaaaaccttgtatttgtttggaatggcaggagaaggtttcggtgagactttcatcttgcttggttgaagaggcacgacacggagccaacatgtgcatcagcggcatgttgtcgcttaatggcagtggcatggtgcctctagggcaccaatgacataggaccgcaagcaatggtcccacgaccgtgtagcatggcaaggaatgaggctccttgcttcgggcagcacggcacggtgtcgagggagctgcttgcttcgtgcctcttttgttttctccttgcttttatttgtcactgccttggtatctttacttaacgattttttggggttaagataaagtaaatataaaaaataaaaaacaaggaaagtagtaacaataaggacatcttaatattattatatcacattttttaacaaagaagaggtccaaaattaaatttttttctccagtattaaaaatatatataattttttaatgatattataatatactaaaattattttcgactcatagataaattatggattttgtttaatcgaaaaaagaaaaaaaaactagcactttaaaaaatgaaatagatattagtttataatgtgtctattttgataattatataataatatatcaatttgtaagaacaaaaaaacgtattttttaaaaaatatttatctaaatgaaacctcaagtaataaggtttactcagacaaaaaaaacaaagaagaaaaatagtgaatgtaactaattaaatagtttagggtgcttttataatggactctcttaaaaaggatgtattgaccatttacctgtttcagcatgcagaagaatttttttgtaatgaccgcatcagtaatttggattagaaaaggcaattagcactaatttctgatatttttttataattatttatgaatttaattaattttgatctccattgctagaaatgggcattagagttataatttctcaattccggaga

SEQ ID NO: 117295 - DNA, 1828 bp, Cannabis sativa
ttttgttagtttaaaatgtattggtttaagaataaaataatttagttttttaagaatagaaaatcaaatttcccacatattacatgttattatgcaaattaactattcattatttctttaatttagcaatcatggtgacattaattagtatgagtagtatatgcttgtgtgagtgatgcttagttgtgatcatcaatttagtagtggcataatggcattgatcgtgagggatttatatatatttgctaattaaaagatgatccatgtgttaatgattcttagtaataattaattaataactatatgattaattacaagaaaaaatgggtaacatattcataaagttttacaccctagacaaaatattaattagcaatttttttaactaaaatagattaatcaatttttttccctaagccaaaatattcattagcaatgtacaagttttcataaaattcaaagagaattttaaattcagacatttcaagatcaacaaatttagtttgcattataataaaccaaaaatgactgatatttatagttccttcgaactaaacttgaaaaattagctaagtttctcttaaaagaaattcacatgagattaatttaataaaattttcattgatactattaaaaatagcacgtgaaactttactattagaaatttttacataaaaaatacaaaaattaactttcatttcaaaaataccttcacacgacacacggtattataaaattttatacctttctcatatacatgtatacattttaaaaaaaaaattaattactaaatacatattttggtcacacatcaagcatgcacatgctgatgtcattaatttacaatcagactcaactattttccctctcttttctgtacttctttttatttttatttttatttttgtttttgttttttattttgaactgtgtacccacaatcagagtcaagtttctcccccagaatctcttccccaccatttccaactctcattcaagcctcacttctccatcatctcaaccgcatctcatgatttttcttctgtttttttttttctatatttctatataatggctatcattcattcgtcatcttttccattctctgctgcaaaaaactctctgttaaacatgctaaaactcaagtgattggtgtcaaatctactaccaaaaaaggaaaaagggagaaagaagttagatgaagataatttctctgatgatgcttttgttaagcccttatctaaacagaggaaggctcctatgaagaagaaatctaaaagcattataaaatggaggaagttgtgaagagtcatatatatttctgatggtaaaaaggagaagaaacaagataatcgtttgattgaggttcgttttacatttgtttttggtttttgtcctaatttgggtttgatcgcctctgggttttgtttgtgtattttgatatatgttgtatcttagggatttttatgtttgttttgttctttcggtagcaacaggttcacttatattggacattagttgattttaggttgtgtttatgttttctaacttaggaagcggtttttgcatgttgagtgtttattggtgctactataaggatttttttgcatattttatatttaatcgctatttgtttgttgtttgtgttgatatttttttggaaaatctttaagtgtagtgtgttatttgttttgggtgtttggcgtgatgacatttatgtatagttgctgttatattttgatataatattttgattgattaaataaatgttacaagtgtgtcacacattttaatctagtgggggattgctatattattttataatata

SEQ ID NO: 117296 - DNA, 1705 bp, Cannabis sativa
cttgagagttctagaaatcgccatccttgcttgaaagattgttcacatttcttattatttttgcccatagtaatatttgattggtagcaagtttttgaaaaccaaatccaaatccatattcggattttggcttgtaaaattgaaaacggaaaaatgacgttttctccgtttttaaagtttttttccaaaaaccagaaaataaaattaatctcctctgatctgctcccttcccttctgccatttgaaaaagaccaagcatctctatttctcttcgattaatggtaactcgccaactctcctaattttatgtgaaagatctcgaccatattatttttagactatgggctattgcagtccattatataacatatatatttagatgacatcacatttctcatttatatatatatatatatatatatatatacatttcatagtatatgtttgtgtatatttatattgtgtcatttttatttatatcagtttttaatagttggtgtagtgatctaactttacatatatttacttactttctttttttttcttttttgatgaagagaaatttactttgttttgtgtataaaaattgtgaaaggttgtcataatttgtgtgcatactgtttaatttacttcttcaatggaccaaagctagctagtacctgttttatacctcaatatgttcttagtttttactggaacgagaaagttcattaaaaataaaaaatagagatgggaaccacaatataactaaatttaatagactcaatgattgtaataattctcttttcataatttataagttggaagttgtagaattaaattgattggagtcaatgattatgggattggaattcaaataaaaaaaactttaactaaaattaaattcaaccaatatattataaatttaatttaaccggctatataattggcttgtttggcataactttgaaagatcttttgaagtctctacatttagatatgtttggataaaatatgagaagagctttttagagaagcaatgactcactagtttttttaggaaggactttaaaaaaaacacagaaagttattttttttagtttaatgaatcttttataatacataatttaccttttttcaaaaaaaaaaaaaaaatcacattcttgattgttatattacagcagattatttcatattcttcccataatgaaaacctaatagtcttcaaccaaaaaaaaatacagcagccatttttattgaagaaagaaaaaatagtattattgctttgtaaaacaattggagttagtattctttaatttttctattctcattgtaatctattaaatatatttcatataaaaagaacatcactatatatatttttttttagaacaaaagaacatcagtatatgaaggttagtattctcgataatgccgaatatgatattgtctcttttttaaaaagaaataaaaaaaataagagtctctccatatataatggattgtatttatcatccattcaattactaagaatattgttagtatcatatagataagaacatataattaattttttaatttttttattcttttttctttcttggtattaagttagaatctattttttttttaaaagcattataatctcattgtttgttaattaatgtaacaaacaaagactccccaacattgtatacgttattcatgtttaggttcaatctcagga

SEQ ID NO: 117297 - DNA, 943 bp, Cannabis sativa
agagagagagagagaaagaaagctgagactacatagtcattggggatctcagatttagggatttcgagggttggggttctcaaatttaggaccatcggatcctttccccgtcaatctcagggttttggggttctaggttggggcttgtggtcgattggggttggggctaactgtcgatcgactgagagggtttgaggctcgaggttcttagatcatgttttagggagtaggaaaaagaaatgtaaaggaaaggaaaaggaaaaaaaaataaagatatttaattttctaattatttttttttttaaaattgttatttttatttttgtattatttttataatatttaaattattaaaatgatgtggactaatgaaaatatgtcacgtgtatattggcctacacatcaattgtacaaggtagcatttaacacctattcactaacaaaatagtaaaactcacaatgaaaataaaatttaacaggtttcgcccttaaaaaattaattcatgggattaagtgtaataaaatgcaaaatcaaataatttcaccactgatatccctaaataaaataattaaaaaataacatctctaacaaattgaaatttaatagtaactgtcattcatccataataattatcattgtttccttttcaaaaccctagtttgctcagttactaatgtaaaacaaattctcattaacctatgatatcaaaattcattattaaaccccttcaaaataataataataacaataattcaaaataaaaataataagttattagtacaacaaaatgattaacaaagatgctttcatacaaaaattacactttaaatatccttaaaattttaaatgatgattcaaacacattatgtcagtattgagctacgttatggaactaccaatagtgtacacctaaaatctagcaggtttagccactcgcatctt

SEQ ID NO: 117298 - DNA, 2169 bp, Cannabis sativa
cgacgacaccgtgtgaccaccactacaacgacaccgcgcgaccaccacaactggttctccctctctctctcgctcgcaccaccggaccaccagttctacctctctcacgctcgcaccactagcaccaccgactggatgacgtcggagcaccactgcgcgggtttctcccatccatagcgacgttagaacactaccaacaccaactgccagtgaaggtatatttatttatttatttataatctaaatttatgtatatatatatttattgtatatatatatttatttatatatatatatatataaataatgacaccatttaattcggtcataagccttgaacatattcccacacacttcatgatcgatcggataaacctccttttgaaaccaaaagccaccatagtctttttcaagaaacaccattagatttggtgataagccttgaacatatcctacttgagactcacaaaactagtgccaccctttagtcacatgaaagaatcaaagatttcatgagctatgctattttcagcaatctagcgacccgagacaaaactggactgataagcaagattaaatacaagagaataggccttaatctattagccaaaaaattaaagataaccttataggtgatattacaaagcctaatcggcctaaaatcatcaaaactggaagtgtgagccttcttaggaataagaacaacaaaggtttgattaatttcttaaataaaatccccagtaacaaagatttgtataactgcctttatgacatccgcaaccacaatctcccaatgatctcaattgaattttctcagcataccatgatccaaacttggagccttaagaggcaacatagaccacaccacatctttaatttctccaatagagggaatatgaatcaattcctgattccactcatccaatatacataggctaaccagcaactcaagttgacactattagaaaaataggctttctcttcagtttttaagctggttttagtaaaagacaccattaactctgccactgttgagccaaaaacccacgaaaccttaatataaatatccttaaacaatattatttttaaaccaccaccgttaacaccactatatttctgagcattgacattgattttccaacaactatcgtagattttctaaccaccaccgcgatatccaaaacctatatcatacacactaaaaaatattataggctaaacagaatatattatagtgatgtatacctcaatgcaagttaagagacaacttcaaaagcctcaaagtctctgctgttagctgactgtcattctcgataaatcttagaaaattatcggcctaaactcttaggtctaccctcatatcttaaaataaattaattttctatagtgtatatgcattttgggtgagaaaactagaagaattaaaaaaaaatgagggaaaatgattgtatatggagaaaatagaggtttaagagagttggtggcggcattttttgttgagagaaaagatggagaagaaagagaaaataagagtttcagatttgaaattaaggttttatagacctatatcttccgttatttcaaaataaccaaagacataggcgtccccatatatctgatatggggctacggttgtggagacctatgtcttcggttattttaaaataaccgaagacaaaggttcacctatgtctttggttatttccctacacaactacaaatttaccttttagtgatacttttagtgacccgcacaaaattgcgggtcaataaaatgttaggagtgaattttagtgacatgcaccaaaagactttaaaaatacagtatttttgcaatgcgagtcactaaaaatatgaagtgtcactaaatggtaactctcataatttctataattttttttcaaaaaataatattggtctatagtgacacgccaagtgtgattggataaacatgtcctaacgtgtcaagcacgtcactaaaaagtaattatttattttacttttttaaaaaataaattatttatttctcttttaaataataataaatatatgtaaaaaaatttgtaaagacaattggactttttggtagtacttaaataagtaaaaatatatatatatataaaaaaaaaagactcgtatttataattcagcctctctctctctctctct

SEQ ID NO: 117299 - DNA, 996 bp, Cannabis sativa
tgtctctttattgatatttaaatgatagagattacattaaaatagagttttatttagggcataaagcccaacatatccataatcacagggttcatttaccattgacaaatgttgtgcgctgccaaattcatacaataaatgttggaggatattgcgcaaggtgaatcccctaatttagtgggatcatattggaggtatctccacataagcctttgcattcgaatatctcttagatagttccttggggaataccccatgacgacatccgtataagccatgttgggccttctttccactgcccgagaaccattcccatacctgggcggtctgatcttataattgatgagtttaataagttactcaacatggaatcggagactcactcccttagtgggttaacccactctttcaagcctgagaatgagccttcctaaaaagagatgaatctcagaagtacacgtgatatcctcccggttaacaactacccactttccccttaaaaccttaaaatttctatagattcaaaaaaaaaaataataataataataaataaacctagaaaacaagagagcttcgtaccgagccacaaattctcgaagcccttgatgaggtgaacacatttcatagctagttgagctcaatgggacaggagatgatgatattagggcaggaaaacttgagctctgagaagagagaagccaataaattatagagagaaaaagagagagagggttcatgaggagggtgggacgtttcagttttccttgggttcttaggtctggcttcgcctgagttgatggtgatggtggcggcaccatgataacgaaagggagaatgggacagtgagtagcagggagggagtttgggcttcggggttaagattttcgcggttcagggttacgagggaagggacccgaggtctacctgaggtaaaaggtgttggaaatattttactaggatctagatttactaccatgtatgtttcattaacatcct

SEQ ID NO: 117300 - DNA, 1010 bp, Cannabis sativa
ctcttaactagtacgctgcctgtattgccgaaccgacacaatggttttgccgctatgatatcacccaaaacatatacaatcacaaacatagcatgcatacatagtacgtttgatgctagtcttaccttgtttccagactcatgcatgtcgcttgacttgaataggaaatctcgtgatgcacgaaggccctatgtcacatttgtgtaaatggataaataattcagataaacttcctcaggaacccatacataaaagctagagataaccttatcgatacccagcttggtaatgtcctaaactctgagaaaattcaaagattaaaggttctggtagaccaaaaacccctaaccagcaaaccagtttctctagctctaccaggagaatcgattaaccggttctcctgcaaaaaaaccttaaaaattcaaaactcattcaattcaatcccaaattcaaccataacttccaaatcacctataataacattccaggaccatttccaacaaaaaacagaaagaaaatgcctaaagtcacaccatgccatagttgagccaagtttgagttccaagaactcaaacttgctcaaatctaaaatcatctaatagcaatacttcaattaagcccaaaacaacaattacaatctacagaatgtagccctaatcgaatcagaaatcctaaattatcaccctaaacctaacaaaactttaacaatagcatgaatagagttttctagggtttaaccttcaattaatacaccttgaatcctagttgaaacttcaggaagaatcgatgttgcagctggttctcctcaggttgagctagaccgaaagaagaagaggaggaggatgggtggttgtagacttgatcttccattttctattctatgaatatcgtataatatcactattattattgttatttgtttaaaaggggaccaagtatcttctaaagggaaggacacgttgttggaaatattttaccaggatctcgatttactaccatgtatgttccat

SEQ ID NO: 117301 - DNA, 2109 bp, Cannabis sativa
aggtggaacctgaacttagaagaaatgtccccactattttagaacaaatagactatcaacatggacaacttaactcagaagaaaatgaaaattaatgagacctaagtgactaccggctgacaagagacagaataaaaaggatccctaagcctactcaaaagttcagtttcaatgcttagaatgaagtgctagcttatgctttcctaactgcaatagaggcagcaagtacagaacctaatacctatgaagaagctatgcaaagcaagggctctagaaaatggtcaaattccatggatgaggagatgagctcattatagaagaacaagacatggaaagtggtaaagaaaccagtgggaaagaacatcataacatggctgtttaaacataaggagggggtcagaccaggtgaaccaattaggttcaaagccagtcttgtggcaaaaggatttagccaaaaagagggaatagactttacaaagatattttcccctgtagtgaagtataagactatcaaaattatgctagcaattgcaacacaatttgacttagaagtgcaacaaatggatgttacaataacctttcttaatggagaattgaaagaagagatttatatagagcaacgcaaaggttacataaagaagggacaagaaggaatggtatgtaagatagaaagatcagtgtatggacttaagcagtcaccaagactgtggaataaaaggtttgactctttcatgactaagcaaggattttctagaagtgtttatgacacttatctatactacaaaggcacacagtttgatacagcaacatacttgctattgtatgtgaatgatatgctgattataagcaaggaaaaggctaagatagaatatctaacggatttgttgaaagcagagtttgaaatgaaaagacttaggtgaggccaccaagattcttagaatgtacacaaagagagacagacagagggaaactagtgctaagtcaagaagactacatcaacaaattacttaaaaagttctcaatgaaagatgcaaaagtgaccaaacaaccaattacctatcagcatcagctatcaaaggctcaatgccctaatactcctaaagagattgatcaaatgaaagaggtaccctactctaacgtagtaggtgttgtcatgtacctaatggtctgcacaaggccagacctagcatatgtcatgagcatcctaagtaaatacatgattaatcctagaaaagaacactggcaggcaatgaaatggacattcagatatctccttgggatagttggattggtatttagaagataaatgcaaaactcctagttgaaggctatagtgatgcaaattttccaggagatatagacaatagaaaatccactactgcatactactttactattggaggaagttgaattagctagaaagtacaactccaattagtggttgctttgtcaaccattgaatttgagtatattgctgtcacagaagcaattaaagaagtcatttggcttcatgtctctaaaaggaagttaccaagaaaaaccgaatcccaacagtgtattaagatagtcaaagttgtatacacctttgcaagaacccaatttttcacgacaaaactaaacatatagaagttaaatatcacttcataagggataaggtaactaaagaagaagtcaatatccaaaaaataccaacacagaaaaacctagctgacatgggtactaagattgtcaccctaagcaaatttaggctttgcatgagtttgctaagggtagacacaagaggatgaacctaagaagactaagagctagcaccctcagaagaagctaatctactaccatttgctataatagatcaacttttatggagatttcggtggaaattgttgaattaaattcccataaaagttgacctgtcataccagggcacatcatttcagttaacaaagagctaatacaaatcaactaacctaacaaccttaactgcctacaatgactataacaaaatcagagtaacaactcatggagtaaggggacttaccagatcatctatataaagtgctctctttatcctttacaagacacgcggaagagaatcctagagggagaaaa

SEQ ID NO: 117302 - DNA, 1663 bp, Cannabis sativa
  modified_base (41)..(43): a, c, t, g, unknown or other
  modified_base (229)..(229): a, c, t, g, unknown or other
  modified_base (1614)..(1620): a, c, t, g, unknown or other
accaaattgtaacaccctaacaattttaggcatgttaacgnnntttttaacttaactgtgcagctcgttgctaatcaactggtttattgaaaatcgtgattaattaaaattttacttaattatcaatagactttaaaattttgtacttataataaaccgggatcttgttttacaaaatatttacaaaaagtttcactgtgcatatataaaagtttgtcgcctagcgacnatacaaaataagccctaatgtcccgaagactaaacgctctagaggaggttatgaggaaaatgggttttgctgagaattggatttctcttgccatgggttgtcttaccactaatagttttacttttcagctgaatggtggattaatggggtctttgctaccaacaaggggtcttcgacaaggatgccatctctcaccgtatttgtttctaatatgttttgaaggtttgcctaggctacttcaaaatgagaaaagattgggattgttaaatggcttttctcttactcgacgtgcgcctcccctctcccatctactcttcgtggatggcatttacttttttgtcgagccaatgagaattcatgcctcaccgtcaagagagttttagataattaccatcatgcctcgaggcaggttctcaatttgaataaatgtgtaatttcctctccaaacacaactttggctgcacatgtattttttcataaacaactttcaatgtcgataagtgagtgtcatgataagtatttgggtttacctgcctatacgggatgagataaaacacaacttttcagcggtgttaaagaaaagatatggcagctgatgcacaactggaatgaaaaaaaaatcagcagggggaaggaagagcttttgaaggaagtggtgcaatccattcccacctatgtaatgagttatttttgtctgccaatcaccttctataaacaacttgaatctatgatggccaatttttggtggggatctaatgctacgggttcaaaaatacattggcgaaactggaatttactttgtaaaacaaaaatggatggtggattgggtttccattcttttgagtattttaaccaatatttactagcaaagcaagcatggaggattttgcaaactcataattctctactcagtaggctattgaaatctcgttacttttcaacaaataatttccttgaggctcaactagaacactctctttctttgacatggtaaggaatattatggggttgggaacttttaattgctggtttatggtggaaagtcggcgagggcataagaattaagagtggtttaaatcaatggatacctggctataattccttttacctgactctatatacatgtccattaaatggggtagtggcaagcttaatgatggttgaatgtcaatggaattctgatcttccaaaccaatatttttcacctttggatgtggaacaaataatgaccctaccattaagctatttttccagtgaagactcccttatttggcatcatgatcatactagtttttatactatcaaaactagttatcatttggcttcatctcttgatgacatgctacacccttctgttgggtgttgtgccctaaataaaactcatnnnnnnntaatcagatttacttactaataaagatcaaaaataaaatttta

SEQ ID NO: 117303 - DNA, 1569 bp, Cannabis sativa
  modified_base (1528)..(1542): a, c, t, g, unknown or other
ttttaaaatgacaaaaactgttttctattctcacttttacaaacacaattttaaaaactgaaaactaaaaacacagccaaacaagtaagttttacttttcttttctacctatatatattaatgcgaaatttgtgaaactaacattaagaaacactaaaatttataaataactcacttaatttattggtcgcatgcatagtgtaggtttatggtcgttttgcgatcatagtagttgtttatggtcgcacagtataatttatgatcgtttctacgaccatacaagattattttgttaataaaaatttgataaaggctagttttataaaatattttttattaatattatatatttgaaatgaatattaaaatatattaattaaatgagaataaaaagaatttttagtgatatattttgaaaaggcataaatatgatgtaatgtaaaaattttaagtttaagataaactaaagaaaataaaatattggtataaaagataaaaagtaaaaaattgttgaggtcgtctaaaagcttcattgcggttaaaagtgagttttattgttaattatgaattttaagcaatatttaatacttaaatactaaataagcattatttaacacgctatatcgaatcatacattttaattttatagacccttgctattgttactacctgtgctgaaaatataaagcctaagacaatataaaattttgagttcaattaattcctttccttacacatggttttgtgctgtatgcctaaaccaaccaatattagttagaagcatatatatatatatataaatatatatttattatattacacttaagtttaattaaatttaaagataaataatagggcaattttctaatgagacttactctgcaaaaaaaaaaaaaaagaaaaaattccaatgaaacttagggcttagcttatttatacctagatcttattgctataaggttttagtgtactcaacatatcttatttcaaattaaaaaaataataaatacttttgccttaaaaacttttgatatattatgaaatccttctccttaaaaaggatagctcgttaaatattttttccaaaacataacaattacataataagcatatcttttttttcttcttcttaagtttatctttcttttaagtaattaaccctttgtcccccaaactttgactattaccaatttttcccaatttttgtttttaaaaaaattaatttaaaagaaattataatttatattaatccttaacaaatcttaaaatattaaagaaaaattataaaaaatatggtgaaattcttaaaatagaaaaacctatgattaaaaaaaagcagttgcaaactaaattatatttataaactcatatcataaaaattaaaagataaaaaagtatttgaaaattaaaatttaataaaaaatttacaaaaataaacttaaatttagaagaaaaccacattgaagcttgttcccatcaaattatttttttgcaaaaattaattttaaatttagtttttttttttttnnnnnnnnnnnnnnntttttttattttttttcattttttttt

SEQ ID NO: 117304 - DNA, 3120 bp, Cannabis sativa
  modified_base (3066)..(3095): a, c, t, g, unknown or other
tatatgatcatttgatatgaaaattaagatcatacaacaagaatggaacaaatatatagtcttggagtaccatcattctcacaaatagaaatttatattatcattaatttattatgttcatgtctacttaaaattttaaactttagtatgaacaaagttgtatacacacatgaatgattcgattagttggataaatattgatgttgcaggaacccctcatccataatttagagtccacacatacaccttggaagagttatagataatatacggtcatacatatacagtgatattttaaaagtatgaccataatcttacaagatatattatcaccaaaataattgtggatcgtatgtgcatgagagggagacatattcatgttttactatttttcctttagtttatgttttgtcctatttgatttttttagcaagatttttaacgaggcaacttgcaaataattataaatataatatatatatatatatacaccctttttttcttagctcaggttgtgtcccactaggtttgcttgataatatttttaatgatacaactttaaatcatgctaacctacttgcactttatgtggcaagtagagaatgtgtgggagtgagatcatgacataacatattcaagaaacatatggattacactcaataaaatagtattaacaccagcagttatctatgaagataatattgcttacatcgctcaactaaaatgaaggtacattgaaggagataggattaaaacacattcacaaaattcttcttaatatatttcaagacaatacatattggtgtccaacatattcaatcaagtgtcaatcttgcatatttatttacaaagtcattaccaacatcaataattgagaagatggttcacaagattggaattcgtcgattagaagatctccatgaatacctaaataaggggagttaatttacgctacactcttttttccttggccgagtttttgtcctattaagttttctggcaagatttttaattaggcagttattatggacatctaaggggaagtgttataaaataggatcagtttttcatttttacacttcaaagcttttttttttttttttttttgtatttttacagaaatccttatagcaaccaacggagcaacttaaattgcaacacaaatctacatagcaacccacatagaaactactagagtaatccaaaccgtaaaaataaaaaaaagttaaaaaatagtatatgaagtgattctcctataaaatattatttatatggtgtccaaatcactcaaatattttctattaattatcattaattgtaattactattactcttcttagtttcctaatctatgactcgaatatttgtataaataggggatcaccctattgaaataaagtactgagaaattttcattcagttttttttctctcttcatcatctttttcttttcttcttatctattttatattatttattaataattttataacaacctttgtatttttgaaaagaaatccatgtctataactggttgtagataaattgattaaagaatgattgaaagttagaatttttgtagaagatagaaaaaattggtctagattagatattactactctaaactttttaagggaaaaattacaattttatgtactttatagtacttaattacattatatgtgtttaaaatttatttacaatttaattaactatgagaaaaatattcttaattttatatacaaactatatatagtaaacataaataataaatatatacaaaaaataaataataaatatacatattttatttataaatttatatttaaataataataaacacattatatcaacatatcatcccatatttataaaattgggatcacataaaaccaatgaatataatattttgggtcttgtcttgtgacatggtgagttaatctgtatcgtttgtgtgttgatcgtattggttaaagtagttgtttggaaagttttgttttgtttggacagatttggtctgtgtggtttttctgtcttcgcagaatggaagaacaatatgcggcgttttcgattcatgatgaggatgaagaaggtcttatttttgaatcaggggctgatggtttaacagaaattgatgacagatggttgctggtaggacgttttttgacaaatcgagccattgattttcaggctatgcaaaataaaatccccactctctggcagccaggaagaggtttatatgtgaaagaacttgatccaaatctcttcttatttcaattttaccacgaagttgatatagaaagagttatagaggggagtccttggacgtttgatcgggcaccactaatcattgaacgtgtgaagcatggagagaacccgagaaatatatcactgctgaaactggacttatgggtgcaactacacaatatgacaaacggttttatgtcggaaagagtgatccaaggggtggggaattacatcggctccttcgttaagttcgatcctaataatttctcaggcgtttggtgtgattatttacgtattcgagtgaagattagagtggacatgccactaaaaaagaagaagcttgaaatccgaggcggtctgacttgtcaggtgatgtttaaatatgaagatttaccaaccttttgctttatttgtggagtgcttggacattccgagaaattttgcgaaaaactttttgaagtcccaaaagagcaaattgtccatgaatatagtcttgaattgaaagctgctccaagaagaaggaactatgctgatggctctcggtggttaaaatcaggtctggcggttaagaacagatggatgattgtccagaagcgagtaattccaatggtggtccctcgaggaatcacgtcccaccagtcatggggaaccaacgaataatgattgccaacaatcagggaccccctttactacaccctgaatcacgaaatctgaatggagaggcagttatgaggcaagttcataatgtgaatggagcaccaatgaatatggagaaacccctgattttagggaaggttaatgtgttggaaattattttannnnnnnnnnnnnnnnnnnnnnnnnnnnnnttattaacatcctaaataagaactt

SEQ ID NO: 117305 - DNA, 2264 bp, Cannabis sativa
tcttcaacctcaaaaaaccacttcttacaaatgatgagtatggtggtatttataaatctgggatatatggttcccaaagttggagactgcaacaactaagttgttaagtcagttacgacttaacacttaacaaacataacaaactcctcgtaaaaatatctccacgtcaactcagtaataagcttctccaaatgagaggcacgcttcctggacgaatgtcccaggcagacaaatcatgttccttaaagtgtgttccagataggtacaaagacaacatcaaccttatcgttttgtactttaccacatgtgagaagattttagtgtagtcgactccttgaacctaagtaaaacccttagccacttacatggctttgaaccgatctggttcattctcattgattccctctttcaccttgagaatctatttgcactctacgatctttttattctctgatttctgtacaaccacccaagtcttgttctttcggagtgaattcatctcttaatccatggcctggagccatgttgacttatttccacctaaaattgtctcttcgcttagggctcttcaatctaagcttgttgtaccactgccagtgcaaattctatcaagtctgcttccgtaaatcttgccggagggtgaatctatattctggttctattccgtgccaattgataaccttctagacttgcctgtctggatccttcgagaacttccatttggtcaatgttatcttccggctctacaacaacttctctttgtacagtattattttttaatttcacaatagctttcacctgcgaaccttcttctagacgttttattctgtactccatttctatgtgagtagtgttctcgttttcagaatttcatggatcacatggagacacactaccttttctggctgtcaagtgggaaaattccaaattattaaaaatcacatttctagcaattactacatttagtctacccttcttcggaatgcatattctataacccttgatacctaaggcataacctaggaaagttcccttaactgatctaggttctagtttttcaataaatttatgtacatatacaatacatctaaaggttcttaaatgcattaggtttggggttctgttgtaccacatttcataaggagttttcaagcttataactctttttgggctcctatttataaggtaggttgcagtacctagagcttccctcccaatttttttttttctaatcctgagctaaacaacaggcacttgactttgttcaaaaaggttcggttcatcctttcagcaatatcattttactttggggtctttactactattctagtaatcccatatatttacacaacttgtcaaattcggagtgttgacaaactccaagctcattacctgtcctaaggttcttaactttaagatatgtttagttttccacccgagttttccaagttttaaactgttctagccattcattcttagttgttagcaaataggtccaaagacatctactataatcatcaactatagaaagaaaatatttcttaccggagtgagtaggttatttgtatagcccccaaagatcagcatgcacatattcgagtatcttcttcgttgtatgcccttttaatgtgaatttcaccttattttgtttccttaaaacacaattttcacaaaatggtaaggtacaagaatttaaattttcaattacacattgtttgtacagtttttaaggccttgttcactgatatacccaagtatgtgatatcacaactgcatatctaattatagccctttcactaaaatcgcttctttggttggaacaattttttcttggagaacatacactccattgatctattcatcttccatcactatcaacaaacttttgatgatcctcaaacttccgtttatagacttataacagtaaccctcatcttcaagcgcacctagggatatgatgtttcgttttaactctgaaatgtgtcttacgttggttagcactttgattctaccatcatattgtttgatggcaacctttctagttccaatgaccatgcaagaatggtcatttcccattagaactttacctccatcagcttatttataatcataaaatgattctctactcggacacatctgataagtacatttgaagtcaaatatccactccttgttcattgaagattttgagatggagaataattcttcctgctcatctctctctctcactttctctctcctaatttttctcttttttttttttt

SEQ ID NO: 117306 - DNA, 749 bp, Cannabis sativa
agcgttgatagctctcttctttaattcttacttcattacttcaagttagttcctaccttcggatagtttttcaggatacgacgacgtcaacaatgtaatttatgaatttgttagggtagaattaggccatttgggtacgattagttcttctggtatgtttcatccttatgctttttcacataagtattcctcatgtttctttcttttttttggtttacaactgagccaatggacgagacctttgccttgttggacgctttggagagtcctaaagatggccataccattctgctagcagacttctcaagagttatagtgtaatatcctggaaacttaattatgaataattagggtttattatatattatggattaattagagagtaatgagcaagattatgatcctactaatttaattcagtataaataatgaattttgtcatgcgtggataaataagcgtaatttattaattatagagatttattaagaatatatggatataatgtaagctatttgtgaaataaaatattttaagttcagtgaccctagagacctgaccaaaggccaaaaatgtcaaagcagtcttagttaataatgttgatgtgaatattgtgataggttgataataaaattatcgggatattttagggtatttagatttgacaaaatacctttgggataaaaaaaatagtggctaagaaatgccaaaataattttattaataaagttttaatattattattattatt

SEQ ID NO: 117307 - DNA, 3081 bp, Cannabis sativa
  modified_base (1787)..(1794): a, c, t, g, unknown or other
attaagtattaaattctaatataatttaagataataatttttaaaaaatattattaaacaattataaagtatcacttcataatagtaggcaattatattttggttagaaggagaagggatggatgaaactgaataaacggttcaaataaggaagagtgaaactgacagtacttggtggggttctctatgtaatatatatatatatttatataaaagagtaaatgagttcacatgtatgagagagagcgtggagcatgtgctttggtgcagcagtcggccaccatctcctctattttcactctatcagataagaaattaaaggactcccaatagatatagatctatttttattgagaaatattaaaatatattattttattattacattagtgtaattaaatattaaatttcatctaatttaagaaaattttaaaaagtatagttaaccaatcataaagtactacataaaaaaatactaactactatttatatttatttttattattattgttctaattatattttattatagtttgtacttaattattttaataatattttagaatttaaatttaccaaatataaattaattttatataattattaaaaaaaatagtatttttaattaaaatattattaaaaaatttagtaaaataatagctagttctctatctattctctattatagagaaccatcatttatatttatatgattcaacttattttatggagatgctcttaagaacatcttcaacgggattcgtccattagagtggtcttgctattttgatttaattttcaaaattaatttgatgtaaaatgttgtttaatttgaactatgaccatgtgacattttctttttcttttcgaaaaaaaattattaatttaatgtaacgtgagaacatagtagataagagaaaataaataaatcaaataggctcatctcagggatcttgcttctctttctttctctctctccatgttatattttagtattcttttaatataaataatattaattaataatatatttatatatataaggtacagaaatcagttggtgtagtctcataggcctattcattacagtttcagaggaagaagaaagaagggaaagagagaaaggcatatatatatatatatatggcatcttggaaaaaaacgattgcatccccattcaagaaagcttgcactttcttcaataatcaaccacaacagtccagggatcctaatcataagaagtctcatcatcatgatcagctccaaggtacatataatatattcctattatatatacattgatattaattatagatatatatatgatataatatcggttattggttgaatttgcagaaaacgaaaacagtgcaaggaatctacatggagaagtaatggcatgtggttatgaagatgttcaagtgatgtggtctattctcgacaagtccaaatccacaccctttaaaattacatcttcttaatcataattacctacctaataataaagtaattaatacacctacctatatataatataattcacatgatcacatatatcattttgttcatatgtcataccagactctacttaattatttggatctggtatgtataatggcatgtatatatacatgtactactactactactactacttcttctactactttgtaggtataattggtggttatcatttttgttataatgtttgtaatgtttagttatctatataggaaatccctgtgatgaaagtttaaatcacagtgagattattattattattattnnnnnnnntattattattattattataaatgagatatgagacaattgaaaattccatggccttcttccttatccatatgttcttaggaaacatcactaagactatgtttggtacaaaggaggaagagtaagatagagagaggtatattggtgattccaattttcttttttaaattttttcacttataattttttatttttcttcataaatttatatattggctcctgttaatttttatttttacattttatccctcatatttcttccctgtctccgttcttggtaggatagatagagagttttcaaaagatgagaataatagggatgaagaggataatcactttcctttctattaagttgaaaggataaaaattaaaataaatattaaaattactatattattatttttaatataattatatattttattttaaagagtggaaaagtcattttaatataactgtttttatgtttttttcttcaattctcctatttttggagggactaaaaattgtgtatttggaaggaaaggaatgggttaccctccatcaatcatctccattcctttctccctctccctctctctttctctcccctctaccaaatatagtgtgtaaatgtgttgaagagtactggcatttcttcacttataacagtctcataaactaagcactaataatctaattatgtcttgccaaaacattaataaagataagaagagagtgagaaaaaaaagatatacctcaaaaggctctatgtcctttgtccttgagttttgaagaggatatgaaagcaactatgtaccagcactaggacaaatatgaatcccatggaccaaggatggtccccctctctaggcctaaaactaaaaggccacaccacaatcaattcactcatccatttcttccttcctttctttctttctagactatacaatttacagtaaagaaaaaactaaaaaataatccaatcattcatttcaaataaaaatatcaaaccaagtctcactcaaactgatttaaatgctaaacagattattcagaagtgcgacctaaacttttctataatagcattgctatgaggcacttatggtgcttaacactacgatgaagtgtccctctataggtagttagaaattttcactaatatttattaaagtaaaacaaagtgagacctgatattaaattgtactgtagaaaatagtgaatcgaattatctgtgtatttcatagaatagtacatatttatatacaaagctaggagactaggaaataggaaactaccaacaaaatagga

SEQ ID NO: 117308 - DNA, 750 bp, Cannabis sativa
aaaaaaaaaaaaaaagccatgaattctaagaattacctgattatggacccaatactagaataccagatcattaacttgaacttgtcccaacctaccacaacccaatccactcagaattgttacataaatctataataatcaataagccttccacatcccaaaagagaataatactaaataaaatcgatttttggtaacgtacgtatgagcgtaagcaccaagagaacattgaaaatttcaagatccaaagagaatcacaaaaattattggtgtaactaaaattgcaatgactaaaaactatcaaagaatacaatcaaatgaaaatgaaggttaaatttcataagggcatttcgaattttgtgataggatccggtgagagaactgaaaacgctaaacgcgggcgtgcgtgcatattatatatatagaaatggataaagaaagagttaccgtagaaatgtgatgggtagatcggaggtcaacgggcggagacggtgtggagagtaaacggcgaaagtatgaggataagagaaccccaccggacaaatgaagaggatggagaaacgtacaaaagggctgtttgggtaatatattcaaaatggtgagggcatttatgtctcattattatgttctttcagtaaaatatgaatgaaagtgataaacgaacaaaaacaagacagaaatactaaactactaaactaacacacctagcctatattatatatacaccaaaaacacacccataccaatttt

SEQ ID NO: 117309 - DNA, 1606 bp, Cannabis sativa
cggccctgacccaaacccagaccccgaccccaactctagacctggatggaccccagacctagaccgcgacctcagactcaaattgggaaccaggccctgaacttggtcccacaccccagccctagacccagccccggaccttgaagtggacccagatcttggccccaatctggactcagtcccaaaccccagccccgaccccgaacctggaccctgaactctgaacttggactcagaccacgatctcggtcccaaacttgaaccttggactcgaaccatgatttcggtcctaaacccgaacccaaacttggatccccacccatgccgcgaccgtcatagagattttcgacatgattaggttaaataaacctaattcaaaaaagggaaaggtgagagacttttgggggcacgaattttgagagaaagagcaaccttggagactaccaccattgattttcaacgagtttttttcttccaacttttcttctatgttttcaattagttttatgcaattgtttagaatgacaattatgagctaaacttatatttaaggtttttaatggaatttgtctaatattttttatgatttatgattccaatataaaaattaaaaagtaaatattgattatgctataattgattagttacaggtctctatatacgaaatgaaagtattttatgtggcttgtagggttgttcatcaaactgcataaaccactagcaccgcaaaaaaatgtagtttaaaattctttccaatgcgatatcggtttgaattttttctaaactacgaggtgcggtttgcggttttgagttattaatatgcggttcaaaccgtaccgcaacacattataaaaatactaatttttatatttatttaggttcatatgtgaaggtccagcccaaaacccactaattattgtattattgaaacttgaaatttttttcatatttattttcaagccttatggtatttttgactagtgttgcttaagttttattgtatttgtaatagtttaattattttgtggtagttcaaactacagaaatcgcactacaccgcaccattttttgccgtgcggtttctgcagttttttacttttgcacaacaggtgcggattggaaaattaaaaaaaccgcatgtacggtttgatttgaaaaatagtcaaaaaccgcaccacctgcaccacaaacacccctagtgacttgtgtggcgtttgaattattacttattgatgattatatatgcatatgttataccttaaagatgtaggatagtatcatatagtttaagttttttatgtcttaaatcacaatagaaaataatttataaattgctatcacactagtttaaaagaagaagattagttgcattggtgaagtaaaaagtagaagcaaaggaaattaattttcctaatcttgtaaatcacttttatttgctttatttattttctttctcttaattgattacaatcaacattcaaattttgtttgcgaatagaatttttttttattaattggtatttaattataagagtaatttgcggtataaatacctaagttttatacctagtagcagataaatacctaagtcgtatttttggcggta

SEQ ID NO: 117310 - DNA, 596 bp, Cannabis sativa
  modified_base (561)..(565): a, c, t, g, unknown or other
tttaattccgcattttatacataaaacatatatatttcagtttatacatataaatgtctaacacacacttcacaggctgctattgctaatgtagttcaagattattttcaaaacatctacactactgatggtgtagacaatgagaccctccattttattctatctaaggtgccacggtcaatatgtgatgctgataacagagagattactcggccttttttttgcaaccgaagtctatgaggctttaaaatcaatgaattcagatggaagtcctggtgttgatggcatgtcactagttctgtcctcaaagtcctcaacgaaggcagcgaccctgctagtttcaatcaaacattaatagcacttgtccccaaagtcaaaaaatcgctaaatatgactcaggtgcgacctatctgtctttgtaatgttctctataagcttgtctccaaatcaattgttataagactgaaaccgtacctctcacaagttatctctgagtcacaaagtgcttttttctcatcaagattgatcatagataatgtatttgtaaagcccgcttagttnnnnnggaaattatcagttgtttatgattaattatg

SEQ ID NO: 117311 - DNA, 1234 bp, Cannabis sativa
aggaggtggaagatcgagaataggaatatgaagaaatatgaagatgatgatgatgtagtattctctatggaagtagtagtggaaggaaaagagaataataataataataataattataataatattgtgaagaaggtgaatatgatagttgataataaagaagaagggccttatttggtatgggaagagataacagtggtggtgggaagtagtaatattaataataatatgatcaaaccaagaagaaaactacttaacaatctctctggttatgcaaaacctaacaggattatggctctcatgggtccttctggctctggaaaatccaccttacttgatgccttttctggtaattttctttctttaaattcttcccattttaatatatatcagttaatttcttctatatatgtatatatgtacttgttttattaattaacttctttgattaatgtatattatgtgctcttaaattaattaattaagtctctttttaagtttttatgtatatgtataatgattggatcctttgcatgtgcttccaagtacaccttgtaattaattatatttatagtctttttttattttgtttgctacctatatatagccaaatctactttctatataaatatatagggacacgattttatagtgtatttttatggaatgtatttcttgatgtacagccattagccattagatgtggtagttatttgatctgaaggctggaattaattttggggtaattagagttaaaaaatggtagcgtaccctgagacacattattacgtaccttacaacgaaatacattccgtgttttacatttttgggtacaaaatttactgcctaaatatatatacaaaagtatagatatggtttaataacttaattgatataacaacaacatgcattcacttataaaatccaaactctaaaattaaacagcatgtaacacataaaaaaaaaaaaagataaatagcggtataaatacaaaaaattttaagtttgtaagcgacataaatttaatgtttatttttagtggtataagtactcgatgtttataaaattataatttttctttaattttatcaatacaaattttattattgtcttaaacaggacacatacaaggcctgaattctagatcattggatttaaatagaaacatgtaatattaattacttccaaatattcttttaataaatttaaaacagagtttgtactgataaaatta

SEQ ID NO: 117312 - DNA, 2836 bp, Cannabis sativa
tacatcacggattacaattcgtgaaagtacaataacagaacaaaatcatatccctatttatgtatattttttgttagtatatttaaattaatttttaaataacgatattattaacctgaaacttaatagtgaggtacttatgaaagttttaaaactatagtttaaatattaatatcgtcaaaaatataattgagatatttatttataattaggagttaaatttatgtatttataacgtaaattactcaaaagagtattattgtaatagaaacaatttttttttagaaatatggaatttatagctagatcaaattagatctcatagtcattacaaatactattcgttggtatagaaaaaatttcaaccatactagaaatattgtgagcaaaactcaacttaaccatattgtgagcagcaaaattacagtctaaaaatattaaaacaataacaactcaaaaacagtttagataacttaagacaatgataaacataactatcaatactccaacaaggccatgtaccctttaaaatgttgataactatctccgaatcgctttccaccatcatgaatcgataatgtctcggtgttgccgtttcaagttccagcaagcaagccgctacttctccaatgagaggatcataaaattagagtttcctcgaagccgttcacaaaacttccccaagatggtttctagctaaggccacaatacaaatagactccaccccaccttaacatcataatttatctttattaagtcttaaagggatggggaccagccctccaccaaaacaacaaaggggataagaaggataacagaatcataatctgcataacaatgagtaatagaatcaatatagtactttatgctagacatgttattattatgtatcttatcatttccaacccttcaaatagtatccaccacaataaaagtatatagaaatatttcgttcgtaatgaaatcaaattactccttatagtgttggactgtttttgaaagtgatttaaataaattattatataatgagtattacatacaacattggtataaggcacaagtggtgtctagcaccacttagatgtgacatcttgtaaatggctagcgatattctataatagttattaaattaaattatgtaaagcatgacacttaattacaccaatagtgatatgacacatttaaatgatgcttagcaccacgggtgtaacaccctactaacttacgcatattactgtgttttgttaattattgtgctaacctttgttattcaaaggttttagtataaaatcataattaataaaaactttcataatgtataacaactttactaatatacattataactacataaattttgcaactctcaagattgcgaatctatttttcaaacacaaacaaactgcaacatatccaatgtgtcgcccaacaactaataaaattgagctcatgttgtcccaaagatcttaacacttcaggtctaaccagctaaatatatacaatcttcattgagttccaaactcactattgttcagctttaatcttacttttacctacacaaaaaaatatttgtgagtcgacagtaagaaaagcataaaatataaatagatatccgacttgtaattaggcgtccatacacctaattaaatatagcaatttaataaaattttcatcaacaccattaaaaatagcatacaagagtttattattataaatcattctcatttaaccattcaagcctaaatttgacttttattttcctgattctgtaagagatattacatgttaatagaataaaattaacataaattacaactctattataaaataacacaaacacaaaataagaaattgaataaatcaatgttacaatacctaaatgaaaagaatatgttaaaatactcactcacaactttaagcatagaatagtggagatcatcatgtttacacctttgtccaacaacttatttctcatatccataaacactaagagaactctttagaacataattttaagaattatcaagccttgtgttttctagcaagtgcttgtcgagtattggtagcaatcagattaaaaatttggtcttataacaattgaatcttgtgagtagcagtagtgtagtgtaaattgaactaaggattgctcatgtttgtttgctttaatttagtttagagttgatttttactcgaggacgagtaacgattaagtttgggggtgttcgataggctagttttatgtgtattttataaagtattttagaggttgtttcaattgattacatttattttttacagaattacgctttttttctatttatttcaagtttaaatggtataatacataatgtaaattgaaaataagaagaaacatattaaatgagatgaatatgatgaattatcatagaatttagagttctaggatataagtgatgaaaaattctatgttttagatgctcaacacactccgtttgtgattgaaaatcaagtctaaagttttaagatggtttttaactatgatacattcacgttgagaaaaaatatttgaataaaagttctagatctctcttctagcttttccaaaacatcttgaatcatccaattccaagcaatattgaaagagttatggccaaaatattataagccatcgcactaggaaactcaccgccaaaaatcgagctttaagcgccgacactacaaggtagtatcgcggcccaccacttttaaactgtgaaaattaggattttatctttttttagctatataaagtaggggtgttcaaaaaaatttacaaaccggccaacccgaataaaccgcccaaaccaaaccgaataaa

SEQ ID NO: 117313 - DNA, 510 bp, Cannabis sativa
aaatttggaacaaaaatcctaattagccatattaataaatagttctacattcaaacatatatattgtgaacataaactctaatattgttttcataagaatagtttgaattatataaagttgtaccattcatcatgatgagggagaaaaccccaccagggaatttgttcatctatgatgatgatcgactgacctcagattgatctccattaaattttattgttgaaaggaataagacgaatcaaataagctcataatcaaggtctgggaaatcatagaacatcagctccagtttgcggaactttataaaaatgtgtttagaatttgtgtacagggtttgagatgatttacaagttgtgacccttgcattcaaatgatgactaatatcacagttagtcaataatgttgtgaatttttcttctcaatttcttgccaacccactttcattaatccaaaaaaaaaaaaaaaaaaaagctaccccattgccttcttatatgtcaaattcagaaatc

SEQ ID NO: 117314 - DNA, 1977 bp, Cannabis sativa
  modified_base (38)..(39): a, c, t, g, unknown or other
aggttgttaatccaacatacatgatagtaaatagatcnnggtaaaataatttccaacataagagccttcaaaatggtcatgatggtgaacttgtatggaagcctttcgaagatgataagttctatactaaatcttcttttctctcaatcattaagaacaaaacaagtctatgagaggagattttaaaagatttgtggaagcttaaagtccatgagataggttgaagctattcctctggaaacttgggaggcatattcttccttttactatacgtttagggagaattttcagtaatgtggaaaagtgttctatttatgattttctagatgattctttcttacatctcttttttcatcgccctttagctaagagcctttggtttgcccatccttggtcaattaagagcgattctttggtgttctctaaccctctaaatttgttgaaatggttgttgaagcccaactttcttggttttcctcattgggacacctgaacttcattcactaactttgttgtgtgtctttgtgtagacacaaaaaattagtcaacaccgtctcgctagattggtgataaaagtaatagatgaaagaaattaaataagatagacaccactatttttagtagttcactctccacgtcgcgatgataatggaactagaaagactctccaaatttatggagacgtagtagaatgtgaaaaatgagctagtggaactctccttttataggcaaggaggtccattaaaatgttaataaaataatacaaaaaatatgaaaaattattatgggctaatcttgaccattggtgggatctaatagttaaaatgactccaaatgatgatcgtcaattttcatagcacgaatcacgtctgtcagatcgtttttaggctttttgtagacaaaatcacacttcaacttggggataatttttttacttgaaaacttcagaattgagagatgaatgtgagcatgtgtagaaacagcttggaaatagcttttcaatgcacttggaatcacgtcaattgaagtaatattgagtgagttatggtcgttagactaaaggttgttcatcacccacatccagcgcccaggttgacattctaacgtcaacttggacgttgtatgagtggtaaatcgtgtcagaactatattttttttcgaagcctaagtgatattatgatatcatttggccaatttcttgggtctggtgaaatcgttcaccagttctcagaggttttgtatttttacagaatcaacagacttgaaactacttgatttgcaatagttttgccaatattttactttgccgaaaaggtgaaatatcgaagtttgaatttgacttatcacaagttgtagctctcgtttattatgaaaaatagttatattctcaagacagaactagatttgaataagcagaattcaacacaccaggtcatacttcaacctgggagttgggtggtcattgttaagcttcccgagacttgttttgatactttcgtggaatttagaattacgaaagagatctcctatctcaatttttaccaagataagaagaattcgcggagcaaaatttgcgtttgtgcagcagaaccatgtgaaccaactgaacgttaagcttagcgcaaggactagcaccattgtaaatctgggcgctaggtctttgttttggtccccaaatgctttcatttacttttggagaacacttgtatgttcattattgatgatatcggagaaaatactcgggagacttcctgggaaaaatccttggaactggccttggttgacaaaatgtcaaccttggtgctggaaccctagccctaggtcaacttgggcgatgtgtcctctttttggccactagaaggctccatttgtttcccaaaagcacatgtatcataattattgatgaaaatagacaatatgcttggaagaatttgttagaattatcgttggaaatggcccaagttgacaaaatatcaa

SEQ ID NO: 117315 - DNA, 1120 bp, Cannabis sativa
atctcaatattatgtctctgacttctgctcgtccgaaacagaagatctaatcatttgtaatctaaactcttaattactcatcaaactccttcactttctaataaatcacatacaatattcagtgaaaagttcagattttgacatatacacctcaattactaggtatatgtttctattaactgatcatatatgtataccattgtatatttagactgctttaaattactgttctatatataaatgcataatccatgtcttgttttttgttctgttcattatgaacattcatgtttttggtcttataattgaccaatttggataacgacctctctctacttcaaaattaatacatctctgaattgtttcttcatgtaatctagttttctgtatacagaggaaaaatgtccggagtgtctatggcgatggcaccacggtcggagccagaccaaacggcgaccacagccacagaatcccacaagaggaggctcaatgaggaactggaacagccggtaacaggtggcataatgggttcactgcgcatcatagagcttcaactcgtggccttcattatggtgttttcagtaagtggcctggtgccactagtggagttggtgttcccagctttggcaagcgcttacctcttggcactgtccaggctggcgtttcccacgcacactggtcacgtgacaacaacctcagaagagctgttccacggtagcaaaatgttcagagtgtacgtgatcatgggaacactcattgggctgttcttgcctttgggttacgtgttgggagggttcgctagaggggatgaccacgccgtacgctccgccacgccgcacttgttcttgttgtcgtttcagattttgacagagaacataataagtggactgtctttgttttctccgccggttcgagctttggttccgctgctttatacggttcggaggatctttgtcattcttgactggactaaagatgtttggatccacaaaagcttacctgcaaatgctcctttcaaggtcaaagtcaaacttccttttattacgtactaatttgatatttgcacgaatgatataggcacccactactcctttataatttgaatttattaattataaat

SEQ ID NO: 117316 - DNA, 1853 bp, Cannabis sativa
gcatgtcatacatatttttcaagaaaagatgctcagtgtcagatataacaaatgtaaccagatgcaaaccattcaaattgtatagagtccaatattggttcttaaatgagtgaaggtttgagtatttaaacctttagtgaataaatctactagttggctccctcatagggtggtatgtttggctccttaaaattcagaggtagcggctcgaattggattccccttgagaaaggcgattcatcatcaaagacatcttcgtcccaatgacattgtttggacgtggccaagctacacttcatcaaaggtcttccatctccctatcaagttcttgtcttctcatgttcaacttttctcgaaggtccggtggtatgtgctttggcccttctttatggcaaggataagccggtgacagtgctcgcttttcagcaacgacctttcagttgagtttctcccatagatcgccatggattgcctttgacttggttttttttggtcgcgacgatggttctgggtcttttcgagatcgagcttttgaagattttagggtattactcgtggagtattttgacattcccttttcccccagctcacttccacctttcttttgtgcttctagctttcctcacctgaccagagttcctttagagcaaacttttaggagttcattgagtactatctacatgtttgtgatggtttcctccaaccataagttataaacacgattttgcgagctttaactgtttctctttttcgggtcgatagtgtgaggtttcgggatctcttgatgtcggcggtgaggggtgccttattagtgaagatattctctgccttgactcaccctcacccttacgtgtgatggaagcgatcgttccatctcgttgcatgtccactacgacctcctcaggacggttgtcctcttctctcacttaagtcctttgaccattatcatcttcttctccaacgacaagtgctggggggtctcgccttaaggcgatgagctgactgttgtctaggcgaatctccacatctcggagatgacagaagcatctaggaattttgtgatgattgtatgtaagaaaacaacttagtctgagcttgtcattcccacagacggtgccaaactgttgatggtgaaaactcatcaacgaaattataactgaaaaatcgaaacttagatgcaagacctaggattaagatggagatcttgaaatatgaaaacttacaataattttccaacccccctcaaatttgagaatgtggtgcttatatgctctaatggcatgggatacaatagtggtcccaaaggacaagatgacatccatgagctgtaggttgcaggttgcaggtggtggtttcacgtcttgtacctttgtctggtgtcaggtggtcctgaattgcacaggtagtggttgttgtgcactcttggtcgggatgttagcacttgcatgaggggtgtccttactattcgtacctcactagcatcaaaacttgtagaggcatggttgtacttgatttgcatgcacgtcacgtccttggaatgcataccttgtccttgcgatcatactttcactacattcgtcttcaacacttgggaaaatttcactacgcatttttgtgtcatcaaggagagcattgccaattgacttgcatgcaagtcttggccaagtgacttgcatgcacttcttgcttaagagacttggatgttacacgacaaagggatgtgcaagcttggcacatggccgggtgactttcatgttgcatggccaagtgtcacgtgtgtgccaagatgggacgttacaagctaggtgatgcccacaagttggccaagtagtggtcaagtggtggcgcatgtt

SEQ ID NO: 117317 - DNA, 1196 bp, Cannabis sativa
taatttttctaataaaataattttattaaaaaaattataaaattaataattttctcttaatttttatagattttttttttcatatttttactgatgtcctctttttccagtttctttttatttatatttttccaaaaacaaatgttatttttactttgcggaaaacatcatataatcagtactatactaatactagtaacgtaaaaacaaaactgttttgaaaataatattataacaagttaacaaccgtcctatttttgtgaaataaagttaaaaatactaaaaaaaaacactataaatccatatcattgtaaaaaaaaattatcaaattttgtcagagtttacattgttaagatataaaaatgtaacaccatatataaaatacatgagcctaaatgattccaagatataatgttacaatatgcagtagttagtgtgtggaaacgcgtagtctatcaatcaattaattaggtcatgagtcatgaccaggaaaaaaaactctaagaatcatcaacagagggcttgactaaagtggatgtttaattatatataaataaatataaatatattatgagagtctcaattatgaaacatttgaactgtcgaacttctgcaataactcttgcttgctcttttttcccatgaacatatgatccatatcatatatatcttaaaaatgaatttgaatatatatataaatctaaaaattattcattttgtttttgaactagctagctagtagatcgtactgataatatataaagaaactgttcacttcacttgtatatgtacataaaatgactttgatgatgatgataagtgaataattaattgaaggttccacgtttgaatgatcattaatgtgatattcaggccagggcctacacctttcatatcgacagttttgaatattcatgaatattgtatataataaaaacttggtagaaatttggtgttaattaattaacaatgacacttattaattatataatggcatggtagctatatctggttagctttttctctttctttttcatttttgttggtagagatcaagtgtcggtagtgtaccatatattaaaatggaattataatggtaattaattacatattatgagacttttgtgttagtaaacatcaaaatcatgtaaaaatataaatacatatatatacattcatgtttggtcaaatatatt

SEQ ID NO: 117318 - DNA, 3332 bp, Cannabis sativa
ttggtaatagtggcgttggtattaaccataattcttgtagtggtagacaactcccaactatcttcaacaactttaaaatacattggctcctttaaccatgaattttcgaatctaaaaactcttgtagtcacctgaatattctcggctacagggactaaatgtaaggggcagtggtccgaagtggacacttccatgctatagagtttagctaaaggaaacttagcaagccaactttctgaaactagagctctatcgagccgagcctctacccataaatcagttcctcgacccctttcccacgtataaggataaccactcaactccaaatcatgtaaactacactcatccaaggtatcacaaaatccattaatcaaccaattcggatataaattacctccatttttatcttgttgggaagaaacattgttgatgtcccctacaatacaccatggcaagtcactttccgttttcaacgatcgaagaagatcccaagtacgcttttgcaagctacggttgggctcgccatataaccccgtcaatctccactctccatgatcacgactatgaacaatgccatcgatataattagagccgaacctaactaattgaaattcctcagcatctcgccaaagtaaagccaccccaccactcttcccttgagcatcaacactaaaggctccttcaaaaccaatacagacctgaagcttttcaaccatttccttcttggccaaagtttcacaaagaaataacacaatgggcttcttttggataacaatatccttaatgaattggatggcccatgggttcccaagcccatgtcaattccatgtaattagactcataatgatgggtgggctgggaaccaagacccacctttgacaagttttttggcccatcaccaacatacacctcattctccatcatttcacactcttcatcttccacatcagcattctcactaatattcccactttccatacgcctcctttttgcatccaatataatcttggaaatatcttcaccatcatctcccacattaatactgtcaactgattgcatgggattcactttccctattctttggctagaagtaacaccactttgaatacccaatttcttacctttctaggcaccatcagaattgaaaccattaccctggaatgtggaatcaacttccatgatcttagccacggattcagcttgcccctctgtccccaatcgtcggccagcatccgtttccaccgccggctgttgctcagctccagaacgcaaccattgtgaaccaatctggtggtttcttcttctcatctgcgccttcatgccaataccatacggtttaacgatttgatcgatatcatgatcaaaacatttagcacaaaacctttcagaatggcctatgatgccacaaataaagcaaaaggttgggagatgttcatattgaaacatagcccaaatccattcaccattttccttatacaatttcatatgccgcttcaacggtttttcgatatcaactgttgtacgaaccctcaagtaatccctccaaacacccacaaaattcttaggatccgacttcacatacgtcccaatgtaactacccgcactacgcaccaccttatccatcataaacccagttttaaggttatgaatctgtacccacatatcaagcttgtgcaaatgaatcattttaggattctcaccacttttcaaccgatggaaaataagaggaaccttattaaaagtccatggacttccatcaatcaccatctgaatatcaatctcatgataaaattagaaaatgtataaattagcttccaattcctttacatacacacctttaccgggcttccatagagatgccattaggtgtctcttggcgtcgaaatcaatagatctgcccgtgagaaatttccctacaagacaccatctatcatcaaaagtctgttcaccaccatcagcctccccttcaataagaacaccctcttcttcatcatcaatctggaagttctcatattgtttagcaagatcacccattacataactactagaagccataacacgcacagccaaaaggaatacaaacagcctaaagccacaacaaccttagaacctgtcagtatcaaactcaccaatcacaaacaaaccaaaaaaatatgggacgaaaaggacactcacagtttcacttttgcatacgtaaacacactcaaaagagagagactacaatacattctttaaagatgtattttggtagattttttttccatttttctagataacttaaataaaaagtaacattttaatttattaagaaataagtaacaaaactttaaatttaacaaaaattcataaactactttctggttacttatttccattagttgctcttaaaataattgttttaattttaaattctaatatattactttttttaagcaatttttacattatattctaatctaattaagaatataatgaattaaatagcaaatatgaaaaattcattaataaaattagtattgtcttatgtaactcatcttattaattataatgttattataatgtttaaaataacgttttacttcttaagattttatttttataaatctatttaataactcaataaaaataacttatttaaaatactatagagtaacatttaaaagtgaaaattaaaaaaaaaaatgctttttagtaactcgattagttattaaaatatgttaagttactttatttaacaattatttcatgttaattgatatttaggaaactgataaattagcattcaaaaaaaaaaaaaagaagaagaaactgataaattataatcaaatataaaaaattaacaataatatatataaaatgttagccttaagtttattatcaaaattagtataataataattatttattattttaaaatataatttattttatgatatttaaagtactagtatatatatttttgtagattattttttagaaatctattaaaataacaaaagcttaggaagaatacaatataataattttgttgaaatttaaaatttaattaattttttatttttgtcaattttttttaattaaatagaaaagaaactaaaaaattacatatgtttttaattattttattttggtgacgcataaaaatatatatccttcccgcatgtcaaaatgaccatcttgaagagaaggtcgtggtgatgcaattttttatttcaaataattagccatgtggtaggagaagtgtttttaattttaattttttttttttcaaaaaaaagagggcaaattcttttatattataaacaaaaagacaaaagacaaaaaaaaaaaaa

SEQ ID NO: 117319 - DNA, 1857 bp, Cannabis sativa
ataacggtagaaggcatcatcactgtttgatgcacctatgttctgtaaagccatctttcacttcagcaatagagttggaatttaagaacaaaagtggatgtcacagtagagataagctagaatgactataagcagccgaagtgtttccttttaggaatctctcaacaaaaatggattgatcttcagcaaaaagaaaaagctgcatacacttgcaaccacaccaagagtattcctcaaatggcccgagatgcatacagccaacagctttcgacaaggacctgttcttttttcttgatgaaggacaatactcaccaagcaacccaattgtttccaaaaagaatatggcctgttctgacataaaataaattacaacgttcacaaattcaccttgaaaagcagcagacaacagaaaacctgcaatgtttcacaacaaggatatttcgaattagaactgtaaacatacaagtatttctgataattataaggaaaatgttaaattaaatccagtgaaaaactattgaagacaaagatcacaactgatgattagacaacaacacatgtaagatggttatagtgaatcaaagacagtttaaaacacgacgtaactctaccagcatggctgagggcctgagaacaaaaaataaaaaaatgaaaaggtaaactagtagacaatcaatacgagctactgcacacaaattaaactgtggaaagaaaagtagtacaaaaaataaatcaacacacacccattccatatgagaaaaatttacagtcatgcattggttaacttaaatacatcatagtgcattacaataacgcaagacaataaattaagccctcgggaaacggttagtaaataaagaatcccaatagctagtttccctattgcaaaacattgtttgtgtcaataataaaccgcagctcaagtaaaaattaaaactctacaaagaataaactatattgattcaataaaattaaatcaaactaaatatataccaagtacccatagccaaacataaaatactaaaatcaatgccctgaaggtagtgaatgttcatacaagataagagatatcatatatgcgaataaataaacatttgaaaaacaagacccaagaaaatttttgtccatggtagcatacaataaaattaggtgtcccatagttatgctcatcatataaaagtaaatctccatcgcagcataataagctagacagaaatattgagaagagtataaatttggtggaggcatacattttacgaacacgcagcacaacattcttttcttaatttttcttttttccttatatcacgtaaatcataaaaaccctaacatcggctatttccaaatacgagtaaacaaacaaaatcgaaacaatgaaaacgttgacggatcgaaacaaactaaattctaagaaaagagatgataagaaattaagttgaaagtaagataaaagagagctagggatacctgtaattgtaatgagagaagacaagaattagggtttcgattcgatctattgccaaggaaagagcaagagagagaaaaagaaagagaaggagattatgagctgtgagagagagaagggcggcgaaggtgtgtcttatatatgcatagggttggagcgtgaaaggggacaatttcaattttaacaggaaaaaggatattttccaaggaggaaacagcgtgttctacttcaactttacaatctatatattgtctaaaaaaaattgtggcaatattattaattaattcttgaataaaattaaacactacgctctcaaaaaaaattaataaataaataatcactataaatttaaggaaaattctaccatgcactcccttaaaatagatatattg

SEQ ID NO: 117320 - DNA, 1232 bp, Cannabis sativa
aaccaataaagtttcttgtgttgatatggattccccttttttgcatagttaccaccatatattagttttcttttaccaaccacttttaataactccacatgttatttaaaaatagtagatttacctaactattatctttctttttacacatgttaaatacaatttagaaaaacacacccaaatacccaaagctcaccaaagccgaagttgttggcatggggatgaaaatattagatatggaagggtttgttctcaactttcaatctctatacccatttatttcttaacttgtttctttcttgaaacttcttgggaaatcatactcatttatttgttcttatattcatgcacatatatacatactaccatatatatagttgaatgttattaccatttatggtcttgataaatgttgataaattcatacacaaatactaaaatagaatcaccacatatatatatatattaccatttcaatctaatactctgttttttctcttttgctctgcagcaatttacacattcaaagtgatgatttcatcgaccatgtacagactaaaatcaaaagtaatccctacactgatactaagggaatcacttattattttgaatgtttctcttcattcttttccgatttccaatgaatttttattttttgctattgcagcggtatgtgttctgattttcgaactttggatcgaaaaggtagaaacaaagctgaacaatttcataaattgttcaaggtattacattgctctctctacttttatgtttatatttcacaacttaacaagtttgttattaagtttggaatataccaacccaacttgtttcctaactatgtttcaaatattacagcaaacttttcatgaatttgaagaatacttattgcttattagattgttttctctattagaagtttattatcatttttaaggtatcaaatcatttaaaaatcgcagttttgtaagtttttttatgattaattatattttcatcatttttaataggtataatgagcaatccaataaatcatctcatcaaatttctctattcccccggtgagaatttataattgataactaattgatataatatgatatgatattgagacatactttattattctttgggatatattgttgggaaatttacacccactactgatttttcccattttattacatttatactgttgcacggcaaatacaacatttatactgttttttttt

SEQ ID NO: 117321 - DNA, 1170 bp, Cannabis sativa
tgtaattaatggactaaatttgtacaaattataaaggggtataaattttgatataggttgtattattagggtcaaaaattgaaatttcccaactactttttgaataagattttattgcatgagagagatgctataataatctcaatgtgtggtgatatatagagaaaaaaatatcttttgaaatgttgtacagtgtggcattgaatgtaagcaatatattgatatagatattttgtcatgatatgacgaaattggctaagggaatggatttttcattaccaccattttctaattttggcttcacaacagaatggtgaaagcacctcacaagtcacaccgtataataatatcatagagattatctttaatctcttattatcttttcattatctttttttaaaaaaaaaagaaattaaataaatacatatattttatatataatgatagaaatattttctgtattaaggttaagcagagccttgtctgttggaccaccttggttggcctttgttaagctctaaccattgaattaccgtttcaattttgtcttttttttttccactgagagtgacagatcgatttaagtaatgcatatcgtattcgttgaattcaaaactttaataagcgtacaagttaattagctacataaagataaatggcttttgattttttccttgaaaataaaattgtgagagtccatcgatggatttttgtttttgataacgttgtgtgatatgtgtggcattttagactttccatgtggtggataattagtttcgacttgtcaccattggtatttggcacttatttgtatgtattactatactataataattttgtcaaatgaattaaacatttattaattattactaataattttgctattaatttacattctatatcatccacactgaatgtacaaaaatatgtggtttgtaactcttcactttgtatttttttttttttttttggtggtggtactgtgtggttttaaaacttatatccaaactccatcataccacaatattataatatatggaaattactttatatactatttttttaatttttcttttttaaatttaccgtttgggtttctaaagtagctgcagcactagttacaataggggtttctatacgatttttgttacaatttaggttgcagcgcta

SEQ ID NO: 117322 - DNA, 1324 bp, Cannabis sativa
aaggttacatccacatcatgtgtccagagcaacaaaagaccaccactaagcccgacacgtgggacctctaaaccattaggaaatttaagtggcgaagcaaatttatttaaagcaccaacaaggaatttagactccattatatacaaaagagttgggcgaaattacttcactaaaagggagagagaacgaaatgctcgcttactccccaatccacgagcattccaactgatgatgctcatggctctaggcaggtacgctgagcgtcacccgcctcttcaacttgtccttcatcaagggttttggctaagttgcgtgtgcgtttgagcatttttcgaaattcttcagcattaaggcagtcgggtcttttcggtttcactctgcgattgatagtggtgttgggagttctgaaccgatgtagtgccaattgcaaatcggagaggttgtgtggagttaagatccgccataatggtggaaaaggcttcggaatctgggacaacatgatgagaaccccctgtggtagccacaatagtagctgccgtggtcaaagaggacttaggaagtggaatcttgagttgttcagtagtggtaacaggtgaggcattgaggttgttgttatttgtagtgtggggttgatggagagatgcaggaaggccatatgaaggtgttgcatttgtaacaggggctgaattgagtggaaggaggtttgcaggttggttaagatcatgtgattggtgaggaaaaacattgtgggaagagctagccatatagaaacctatagaagtggtttgtggttgacccaaatgttgcacaccataattagaaggaggttcatgaaaaaaaccttcagaaaagataagaggttgatggaaactatattgcgacaagggagccaaagaatatgggctatcaatgtgaggcctaagccgagttcgagtactagcaatatagaatgggtttgaggttactcagatttttgctcctagagaatgaacatatcggagtagtggtggagccgaggaagagtcgcatttagctaggaactcatggcagtggttcactatgtgactcaagcggccacaataatgacagaaatcgggaacattttcaaaacgaaaggcaagccaaacagggacagccattccatggaaatgaaaaccagtgccacggggcaggggctgggtaacatcaagctcaatacggacacgaagataagggccccaagtctccttaagagaggttgtatccacttcgataaattgcccaagaacttcactgtaacgtccccacttcaagcctccattggatccttacacccacggaatga

SEQ ID NO: 117323 - DNA, 894 bp, Cannabis sativa
atgaatataaaaaaaaattagactaaaaaattcttctagatgttaaaacaaattaagggtgcatcagtacattcattttaaaagtatgcattataaaatgaccctatatttataactatattaacatgtaagagtgcggtggacactattaatacctttcattcactatttattattgttgacgattagattgtaattcaatcactttaacaaggtaagaattaaaattgggaatcaacgggagtcaagtcgtcgttgactttaatattatttatgaaaatttgtttatttgtggatgactttagagtggattttaattcaatcgctttaagaaactaaatcaataacgactcttctgtattggaattgatactattttatactttatagtaattaaagagacccaaaaaaaaactacgaaatagtcactacaattttttttaatttttttaatagacattgctgtgagtgggtctattattgaactattttgattccatcaactttctgtggattatactaagcatttgattatatatggcaaaaaagacatagagtgtatattaataaggtacatattgtagataattttttatatattactttaatgattgtattttgggataattacataaagtattattgttttgtaaaaaaattacatttttaagtttaaataatttttttttttttatatttttacactttttcatggaaacaatatgaaaacaacaagaaaactacgtaagagtaacatgaaaataacatttaaataacgtcaaaataacagcaacaaaaaaaacaaaaaatcaacaacaaattaacaagagtacaacataaaaagactgtattttctgtaaataaaattaaaaatatcgtaaaatatttaaaatt

SEQ ID NO: 117324 - DNA, 1061 bp, Cannabis sativa
caaaaagccattacccaaaaagtagccttccccatattgacattataccaatctccatcatcaggccattcttgaatgatgagtagcttgccatttataatccatggcctatttcgaagaattgccactcgatcctccggtttgtcgaagaagattccccacactcctggctttaatgttttaaatttccaataacccttcagcttccagatctggcttaaaatgtctctgagcctagacctggaaactccctttccaccaaagaagctgactaatactccagtattgacgatatctgctgtaagttcaaaatcaggctccaattctagagtcatagattccaaaaaattgcttctgaggacttcaatgtcctcatttgcggcttcagtattttcattttttggggactccaccaaccctctttcattgtcattattaggttctatcattccattaacattaatgggaggtggttgttgttgtaaatctggtgcaataacttcaggggcccctgttacttgatcagagctggtattcgcagatactccagaggcattaagggacccattggcttgaacaatatcctccattgttacctcacgagggttaccattactgtcctccataacttaatgaagaaaggacaaaacttgactttactttgaagacaaaagacttgaaaggaaggttcagtatgcagtaatgtgtaataggattatggggcaaaaagcattgatttgaaaacacagaagttaaggtggccacaacggttgaaaggcataagaacagtaggtttagtgatttgacatcaagtcaagttggaagttccaacactctcacttgagagaaaaaagagtctaaccctatatggagaaggttattacaggaaaattagaactaataaagaagcataatagaaaaaaaaaaaattatacgaagtgttttcaccaaaactaattcctaactaatctttaaatgtttagcttatcatctcccctcaagataggggtgtcaatttgatgccttggaaaaaattatttgatatgaatatgaaaaactaa

SEQ ID NO: 117325 - DNA, 3085 bp, Cannabis sativa
ccctaattctaaaatcaagctgatcaattatgggcaaaagaaaactattttttggagatactttatttaggtcatagaagtctatacaagttctccacgcgccattcatttttaggaccaaaactagatttgaaacccaaacgggataaaatgcctctctaatgaagttgtttgtcaataattcattgacctcttcctttagagcattctgtctctagggattaagaagatgtctcttctgttgtcttggtgaatagttaggatctatgttgaggcagtggcaaatgaaatttgggtcaatcctgatcatgtcaaaatggccccaggaaaattgatcctagttttccattagaaaacagatgaattactactttaattctttcccaatcctttaccaatttttacatttttggtagggttgctaggatctattaccacctcctctagctcctccacagtcccaagctgttattgttcatcaatgagtcttgggtccagatctttgatttgttcttcattatttgcctcgttattactaccatagtctgatgggtcatgactctttcttttaagtctacactatagcattttctcaccattaattgatcccttttaacagtgcctattctagaatgagtcttcaaagatagatgttttatggagcttattgctcccattccagtcaaagcagagcgacccattatcatgttatgtaccgagggtaggtctaccacaaagaattcttgcatttgtgttgctggtaatggtgactctcccatcgttaatggaagttttattgttcccaagcttgcaatgttgtttcctatgaatccacataagttcaccatgcacgtttttagtgtgacattctccaatcccatttttctcaatgtctctttatataggatattgactgagctaccgttatcaactagaaactattttattcttttattcgtgagttagactattttcatgactggatcaatatgtgaaaaacgaacatgtgacacatcttccttagtgaaaacaatgggatgtttcttgagttttgcccacttatgtaatttaggcaaaaaagagttctaatttcttacttggtttatgtaccatatctgtgcattactactggtcctgcgatattgtgccctccaaaaattaacataatatcctacaatcatcaggtggtggttggatattctgattttggttttggttgttgggtggatttttctcattccctctgtttctcacgtaatgccgaaagcaacctcgagaaatgaggctcttaattttttccttaagttgacgacattcttcaattatatggccaatgtctttgtggaactggcaatatttttttatcacgtttactcctcacgttcttcatgggttcgggctttcagaaggcgaccctattttcatgtgcaagaaatatagtttctcgagtttcattcaactctgtataaacagagtatattagtacatatttttcatgctttttctatttctttttaccttttgttgaacctttggattcatctttcctttttccttagggctcattccccttgctcaaatttacatttgttgttgcaacacaaacttctacattacttgagataggtttgttttttgagcaaccctttagtattttgagctctgaacgaacctctcctttctgaacatatatcaatgctctatcattgaactcgtttattatccttacgggacaaccttgtatgtcatcccataattttcctcttgcagttatctcaacctgtaaagcagtcaattggatgatgtcatcatgatttctagcttttgctgctactctgttgaagcgacttaaaaacaccttcagtgactcaccgggttgctactttatgttagtcaatgatgaagcttcatgcctcctacttctcgctactgagaattttttttttttgaaatctcgtgatagttgttcccatgaggttattgaatgtttagtaaatttatcaaaatgtccgctgctctagttaagtaggttgggaacaagatacaccgcaagttatttcctatatttcttgtttgcattatagtgttataactattcaaatatgctactgggtcagttgttccatcataaggagccacatggggatttttgaatccctttgggaagtaagagttaagtatgtatggatgaaaaggtttaggctcctcatcagagtcatatccatgttactttctgtactcttcgtcttggaaccttcaaaacttatcctccaattgaatgaaccttagatgaattgaatcatcaaccggttgattaatttgctctaaaaaattaggtgtgtttcggtttagcctttctcggagatctagagcatttctgtttaattgttcatgcaaatccaatgcctttgatttagtttttctcgaaggtctggttcatctcgtgtatcatgacaccactcttgtctcaagttataataactcaccgatcttgttggtgagacacttttagattggtaacttctcaaatcactgacactttcttgctcattgtgatactcacattgaggagtttcttcccttcgtggagggttttcccatgtacgcgacctggatgaccaactttgcccttgattcctccttgacccacccatcgtcgtgttcctcgaggatcattttgagttgacctctgcatctcaaaaatgttgtctacacggtctctgctcaaataagtatacatgttgtcaatttcattcctctggggacctcgctattgctgaggaggatgagtcgatcgattagcgggttgttcacttggattctcattattcctatgagttgatccttgaacattcggttgcacctatctagaagttgcggcaccttggttttgtgggtcttccttgtcaacatgaaacttcccttgtctatcttagttgttgttcatggggacgagtggggtattatgacattgggatcttgtgcccttctggttcatgatccgtgaggccttctgttaggctatttttagcctatgttttggactgcaataatgtttgcttttcaacgttttaggacataatta

SEQ ID NO: 117326 - DNA, 1272 bp, Cannabis sativa
ctcactggattcacccctagtgccaaagaggaaggaactaccagttgagcatacgtcggaaaggggggacctaagacgggctgactagtagatggagagcctcgtgtcgatgtgggggaaaatttggagctagagaaccttaaagaagtcttggggtaagttcacatgcatacttacaccctccaccacaatcaggttgagacctacaccataatgaactaagaatttgaccaacaatgacgagagttccaagggtggatggattttacctctagggcgatgtgagcccaacaataagaagtaaatcgtagggtgagagaagttgcttacttgatctaataattttcccaattgtttggaaggcaaaggattgaggactagctgcccagacgaaatgatcacaggggaaagaggttgtatatcacaagtagtgggcttgtgaatggaccagagtaacatcctaccaactacgtgcaaccacccaggagagacagaccaactaattcaaggccccaatagcataatcaatactttctagttgatgaacaagtcttacctagacactaccttgtaagggatgaccaaaataacttttgacccatgactgtaggaagagatgaagatgtacctcctcgtcatggagggggtcacaagggaatgtcacttaataccactaggatgggagagtttgggtgtatggaaaaataggaataataaccaacaaccttgataagattgaactaggtctaagaatgatgagtcccactctaatggaaatgatgatggtgctaaaagttggccccatgaaaactgttagtgaaggcgtgataatcgtcaggataatctacccaaccattgtaataataaccaagataacatccataaagatggaaacccttctaggccattaaggtccacaagccaaaacctgggcaggaggcccaaagcgaattctatttttgaaaggatgggacccattcctaggaatgatcttcgaggtgtttttaatcgaatgagggataattggaacgaaaattttgtcccccagcataacagtcagcctattgatttagacaattttttcctaaataatagaggtaattttaagcccattgtagttcttgttggtattatggtactaaattaggtatacagtaaaagaatttgtattatctgattatcattgtactatagcccaatggatctccaaatgtgtatacattaaatctaaacataaaatacaagattagaatatatacctcttgatgacta

SEQ ID NO: 117327 - DNA, 1256 bp, Cannabis sativa
  modified_base (1214)..(1217): a, c, t, g, unknown or other
acaatacgacctaatacggcgttctaaacgagccattagaagattaaatataatatatatactcattaaatttatctttcttgtaaacgaaaaatatcatcgtaaaaacaaattagaagattaaagagaaagaatttaaagagaaaataaaagagagagagagggagatatatatatatactaacatctgcatcaagagggttcaatcgtgccgtcattgctacctcaaacttgccatcgctggccctcttgaagccttggtcgtggtcatatttgggaagaagagggtctactccattttatgcgaacagaacgttttgattttgatatctatattttaagctgaacatgcccctaaatgtttttggccgtttaaattttcctgaactattgagattgttagatttaaggacttttgtgtaatttcattcaattttactaattgtttatgtaccaaatcaggtcccgcaaactttgatatgtactaaatcatgctccctaaacttttatccatgttagaatttcttttacgaaaattagataacaaccatgtccgatagcaatcatgatttagtacatgatttagtacatgttaggaggaaaaatatcttagaggtgaagattttgatagcaatcatgtccgataacaaccatgttcaatttcatacaaaagttaaactaaaaaaatccaaaaataactattgtgctcccttcatcgtcattgaaggcattaagaattatcgtcattgaaggcatgacaaattatcaagaatcggcacaactgctaggaagaggaattcatatttaaattggttgagttcatcgcttaattaggggcagggttttaggattttattcgcaagagtaaagagaaaattgagaatctattattattttgaattttcctgcttaaagaaaaatatatgtttttggaaaaattgacgtgagaatttaaataaacaataaaatagtattgataaattcaattaaaccataaaatagtgttaataaattaaattgatagttctgtcaaactctattgaagttaacaataaattatgttaaactaacaattgacgttagattatcacattttatgtaaaaagataaaaatataacattataaaagatatatattatgtgatatattaggcaacacaattccaaaatagctagtgttgaacgataaaattttaataataataataattatnnnnattattattattattataataggaatgggtcagtcaaaa

SEQ ID NO: 117328 - DNA, 3858 bp, Cannabis sativa
  modified_base (218)..(225): a, c, t, g, unknown or other
agtgcagaagacggtggtaactaactcgaaggagagaaggagatccaagctcagatcttgttattactgcgacagaaaggaataagggttagagatcttagcgggttgagttattattattccgttgtatcaatgtaaggctttgtaaactcttatgtgtttaatttcatcgtattagagaatttgtatttagggtgttaatgaaacatacatgttannnnnnnnagatcctggtaaaataatcccaacagttagggctttcgaatacttgggtgtctgtagactcatccacaaagtctgaaacttagctagggcatgtctctcatgcatcttaggacaatggctgagtagattacccataagaagttgataggaactaagactaatgcaagacgatgcacaagatatcaacctaggtgccccgcccaacactaatgttggtcctaagttgagccctgggatgtccccgtgatatcctcaactatggttcttcattttagggtcatgggaacctgtttgttgaaggttaatactaagaaacaaatttgctggatcttggtgcttacttagaagcccttagtgtgcaggtaacagtgtgtaatcctgggatgtggggccccgatattgtttacctcgtgccacatgtcaaaaatagtgtccacatcaatattatattatgcttggtgtaagatataactaaataaagtatatttcttttaaatatatatttagattttgctgttacctaaaaataatgttaaataatttgataaagctaaattttcaaaaataaataaactaaatctttttcgataaaaataataattctagaaactaagcaatatttgacaagatataattttttgttcaaaaattttaaattcatattataaaaacaataaataaataaaagtatttcaatcaaattttaaaattgagctaatttattaaggtatgtactcatttaattagtaccatgtattttgaaataaaattaaaaatagtacactgtatttttaataatgatatcttagattttgaaatcatacatatgtattcaattttaatcaatataattttattaatatgatcaaagtatcttcaaatttgtgagttataaatttaaattttattatttaactacacataattgaaaatagattagtcattgcagacaaccaaagtgccttcatcccgggtcgcttaatctcagataatatccttgtctcttttgaagtgctccactatttgaaaagaaagagaaaaggaaaggaaggcttcatggcacttaaattggatatgagcaaggcctacgacagaatagagtggcaattcttggaggctatgcttcggaaatggggtttcacgaaatggtggattaaactacttgtcaagtgtgtctcctcagcttgctatacggttgtgcatggtggacatgagatgggtccgatcttaccaacaataggcattcgacaaggcgatcctttatcgccctacctttttatcctttgtgctgaaggcctttcggccttgctgcatcgatatgaaagcagagggctcatccacgggtgcaaagtagctaatggggcgccaagaatatctcatatgttattcgccgatgacagctatctttattgcaaggcaacaatgttagaagcttcaagaattcaagaggtgttgaacaaatttgaaatggcttccggacagaaagttaactactcaaagtcatccatttttttcagcacaaacacaaccgtggacacacaaaacatcattagttgcaggcttggaatgaatattgcagctgaaaatagcttgtatcttggcctcccaagtacaatgagtaggaacaagtcggctgttttgggctttcttaaggagagagtacgtaaacgaatccaaagttgggaatcaaagtttctttctcgtgcgggaaaagagattttaatcaaaactgttacacaatctctcccaagctttgcaatgagtgtttttttgcttcctttggaaatcacaagggatatggagaaagtaatgacaaagttctggtggcaatcatcaaacaagaatgggaaagggattcactggctttcgtgggatcgtctttgccatcataaggaaagaggaggcatgggatttagacacctacgggattttaatttagcaatgctcggaaagcaaggatggagattattgtctcgtcccgactcactagtagcaaggatttttaaagctagatatttccccaatggaaattatctcacagcctctttgggtagtaatccgagctttgtgtggagaagtgtttgggaagctcaacaagtagtcaaaaaaggagtgaaatggtgtgtgggggacggcagtaacatcccagttctgaatgaaccgtggctgcccagtgatgaacacccttacattacttcatcacaccctgctttgaccaatgcgaaggtaggaaaccttgtatgtgctgaaggaggctgggacgttgaattgcttgatgatttgttcaatgcaagagataaagatttaatatctcagatccctctgcttgattcagtggctgaccgtctgcaatggaggcttgaaacgtctggtttatattcggtaaaaagtgcatacaaccttctccaagttgagtatggaagatggaacaataatcctaatgatgttgcaaaattctggtcatctttctggcgcttgaagcttcctcccaagatcaaaaatctgatatggcgggcgggtagaaattgtcttcccacactatgtcagcttcaaacaaagagagttaatgttttgtccctctgtccagtttgtaaagaggctgaggaaactatcatccacgctctggccacttgtcccaaagctaaacaggtgtggaatcgtgtggggataggcacctggaatcggagtcaatctgacagcaacacaactgaagaaccaggtaattttttggactggtttaaggcgatttttactggtgcaagcatggctgataaattgttaatgtcggctctttgctgggcaatttggaatgggcgaaatgaggttgtttggaaaaggaaagagttgggaattgaaagcatagtagtgttagctaaaggatatcttgatcaatggacaagtgctcaacattctcttattgagacatcatggactggtttaaggtcgggtgatggtgccgagcgttggtgtcctccaacagagaacagtatcaagatcaatgtggatgctgctatgtttaatggcggaaacaattatgggattggattagttgcaagagattctcatagcccgttagtggaaggccgcaccaagtattatgtgggcagagttaaccctgaagttgctgaagccattggagtgaaggaggcattgagttggataaaggatcggagtttgcaaaacgtggtcattgaaactgattgcttgttcaagctcttcgaagttcaatccacatggtttctttatttggtcaagttattaatgaatgtaaacaactcttgttggagttggataatgttaatgtgtttttcgttaagcgatcagcaaatgtagtagctcataattcagtgtactaaatatatatattttcaaaatacaaattacaatataagcattattaaaaataaaagataccaattttatattttgataaactataaaatatcaaaccagtatatatatatatatttacatatttctaaatcaagctaaaaaaaagtccattataaaacaactttgttaaatccctcccaacttaaaaattatgttaaatatgtacattatgacctcgtttggtacactgtataatggttgtattgtattaaataataaataacactatgtttggattaa

SEQ ID NO: 117329 - DNA, 2732 bp, Cannabis sativa
aatattattttattttttaaaaataaatatataattaaatattattataatatgtatatagttttaattttatacaagcaattctatcgtaaaagtatacaccttatattttaatgaccgcatgatctaaaattattaatggtcaaaaaagcttccctaccggtaaagaacttatgctaagtcctaccataattttgccctatatatacatataggggtggagagatatgtgggggcacatgagcccactcaatttttgataatttagttttttgttgatttttttttgtttttgtatattttcaattttgcctccataatttttttttttagttttatcatcacatatatatatatatatttttttcctatataaatttatatttctcatttttttcttcacataatttcatatttattctcataaaatatatattttttttgactttattttcttatattaatttttttgatataaactttatacttttttctccaataaaaatattctttttaatagtgcctatatatatatataaaaaaaaattttgcccccttatggctggctctgtatacatataactaattaagtgtccataataactaaatatattccttaaaaaaaaattaaaatatatgtcattgtgatgatgatgctcagcagtgctagtggaatatatatacatatactgatctatatctatacatatatatcagcacgtgctaattaatattcagatatcttcaaaatttgactaaatttgagccatgtaagtgtacttaactattatacatcttcaaaatgatgaagatgaagataagttatagaccacaatatctattgtaataagtgtgcttttagatatttgtgtagttttattttgaaaaggtatgatttataaattattaattaattttaattttatatacaaaattatttatcatccatccaattaatatttatatttgatagctttggtccctaaatttgttgtttgaaagagaccatctccaaatatactggagtgaaattcaatatatgtccaatcccttaaacaaaaaatatttatattattttttgaaaattacaaaacaaaaaattaatacatatatattgaagtatagaaacgttctttaaatcttatctgggaaaaaaataatttagcaaaaaaaacgttatataaatgttcagccaaaaacaaaaaaaaaagttccttgtgttttttattttttataaatttattaatgtgaattttatgtttaaatgacgtacgtttaaaatgattttttcagatggaatcctttcttcaacgaaaataagtatatatatggattattattttttattttttataaaaagggtaaaaatctgaacatattattaaatttacctatattcttttttttttttaaattaaaaaaacaaaagaagagaatttatacaatcttataaatgtcaaccgataatcatttttacacacaaaaagtccccatctcatcatttcttcaaataaaaaaaaaatatatatttgtatcattaattactaaaaaaatatatttttttcattatttgatatattatatatctagaataaagttttttttggctaatatatctagaatgaaggtttttttttttgaagaaaatatctagaatgaagttgattggttaaaattatccgttatagattatgtggcatgatatatattattttataattatttgattctcttaagcactgactagtagctattggtatgtatagtgacatgtgattttttttttaagaaatgatgtaattttattaataataatttgtaatttaatatggataaacatagttttatgttgtggattgccatgttagatagattgaaaacaaaagaaagacttcacaggtttcaactggtgaatgatgatgagtatgtactgtgcaaaacaaccacagaaacatttcagcatttgtttttttcctgcaatttttcacagcaaggacttcagcagataaagagatggctgggatggaatatggttacttcctccttgaagaacattataaggtggatcgaaagagcaaagataggcaaatttcaagaaagaagtgtttgcagcagctattgcagaattggtttacatgatctgaaagtgcagaaatgaaaaaaatatggaatgcgaatgctgttctagtcgacacaattgtacagcaagttcaagtagcagtcaagaatagaattacatgtgtaaagccaaagaacatacatcaaaaagatctacaatggtttgatgctttgtaactaatagcaattgattgaatacctactgtaaatagaattgaggcctatctatttcaggtgctcttagctttgtacaaaaacgttttagtaatgcacttcatgactgatttaccaaaaaaaaatttaatatggatattttttttgttggaaataaaatcaggattagaattagaaaaatgaactaactaactgactgttttaatctcaaatggttttataaaagaaactaaaataaaaacagataaaaaaaattacatcatcactgttaaccttaaaagcatctacatttgatttattttaccgctcaaaagacacaacattaaatatgttgcagtaagtttattcaaccccttaacttaaacatttaactaatgtacaatgtacgtaactgcactgacaactaggggtgttcacaaagtatccgatccaatccaatc

SEQ ID NO: 117330 - DNA, 1046 bp, Cannabis sativa
caaacctgctcaaacttcccagaatagtacaatagcataaatataacatatctaagcattccaaactcagaattataccaataacacaaatctacaattgttaagtgatattggattattgaactcaacctaaccaacccttagcttaacagccccaaaatctcaaaattaaagctcatacaatcctaaacaaacatctaacagcaagccctcacaaacacacacatacacagaacataattcatcaaaacttaatttaaacttaactttaaaaccctaaaaccctcaagaacaacaagaaagcttacctcaaactttggatggtatctagagttgaagaattaacaaagaaatgaagaaaataggcttagcttcttagggttttctcctggtttcctttaagccgaaagagaggagagagagagttaagaaattgcttttgtttttctttttgttttcctacttaattaactaactatataataaataaataaaacctagatagtatattcccatttcagcctaaacataaggccaccaaagacaaaacccaatcccaccaaattaccaatttgccccccctcaagcactaaaattcaaattaaaccctaaggacattttggtcattttaactaatcccgccaaactgacaacttaaagttctaaactagtgcggaatatttctaaatcaatccatcctatattgtcgtgatatttctaaccactccgtggagctttccacaatcgatgggcccgaaaacattttaattcaaaagttgtatccacgatacccacatatttcaaaataatttccgtaattaataaattacgcttcatttaatcatttaataaatttaccttaattactctaactaagatcataatcttactcaaataccaaaataataacatatttaataaaatatgtctaattaaatactattttaattttcgggatattacaataaatgttagagattttcacatatacctcacgtaccgccaaccaaacttaaaatgatgacctcgccctacccatttgctat

SEQ ID NO: 117331 - DNA, 1364 bp, Cannabis sativa
  modified_base (1318)..(1327): a, c, t, g, unknown or other
gggtccacaattaaataatttcataaataataataaaataataaaaattagtgctaattgtctttactaatcccaattactaaagcggtcattacacaaatgatacatgaacactaagctcaaaatcatcaaaatttcaatatacacaaaaatcagctgaaagttaagtctcatctcataattcaaatcacaaaaaacaattctacctcaagcaattcttccaagctcaaactcgaaaatccacccaaagctttgatttttcctcaagattcaacaatatgtaaattggcttaagagagagagagagggagagagagagagagagagataagatcagaaatttgtttctctttaattaaaatacttaaggcatttctagtaaaaaggtggttaaaagaccaatttacccttagtgctaatattctatttaaaaatcattaaagggaaatatagacattacacttctacaaatacattcatatattctcaaacaaattatgttataatataatcacatcataaaataattttgaatcctgaaccttgttcggacctaaaatatcttgttgtgactaaactgtatcaacttgtcaaaaatcacctacagtaaaataatataaacatattgtataataatatagtctattagtacaataaatattaaaattatgattttaccctttctggatcaaaattacaaaaatacctctaactcataaatgggatcttaaatgcaataattctcaaataatttctatataattaatatatagtaatataattactcaattataattaatttattttaattaaagttgctaatctatttattaatctcaggataatacacatttgccttcccactaaaaccaagtactctgttctttgattctttttactagctcccaatgtacgatgatcaaggactttagctaacttcttcttgaattgcttccttatagtaggaggagcctctatcgcttgtcgtcttccttcgatcttgtcttcatgaaacttctttaagaaactaacatggaaagttagatgcaagttaaacctcttaggtagcttcaaattttaagtcatttcacccatcttctgtacaatcttgcagggaccagcatacttctggatcgttcctttatgcaagtgtttgtttgtgatttttttctaaatttggagcgtgagtttcagtaacactctatcttccacagaaaactctaagtctcgcatgtgcttatcaccatatttcttcatccaccttgaagctttactcaggctatccctagcaatttccaattgttggaatttattttannnnnnnnnnagatctactcacaagtatgttgtagatcggaagagcg

SEQ ID NO: 117332 - DNA, 1743 bp, Cannabis sativa
catctgcgagtccgacccagactgtaccaccagctctacatctacaaccattagttccagccttattgttgcagcgagaaccagctcaagtgcccagtcagagcaatcagtttgagaaacctttcttcagtgcagagtttctgggggtgatgcaagaaatgataagaaaggaggtgaggacgtacatgtctgggattgagcaaaatggtctgtttttccacactgaagctattggaaacgccgtcgttaagcgtatgggacttggcaagatcgagtagaagagtactgtccatccctcatgaaattctagtttaactttcatagttaaactgggaggacagttgcagaggagtacgagagctagactgatgcacaacccggtctttttttattaaaattttccgtttccttttttcttttttaatatatatatatatataccatgaaaataattttggtagtgtacagcaggacaattgggggtttaagtctatttaggttttctttatgatagagaagaagagggacattggctgtggattatggatattgagattgaggaacaatttcctttcaaatgttgagaacccagaaatatgaaaaaaaaaaaaaatcatgaaaatctcaaatgctttacttctagagtttcttgttaaaagaaaaacatttaaaatgaaacattatttcaataaatagaaaataacaatttggtctctaacttctattaaaaaaataaaagaaaaatgaataaaacaaatgaaatcatcaaaaatattttgaattaagttggttgagagttgagactgacggacagaaaggctgtaaccgtttttgtttggttgctaattggaggtggccttagaattaaggccgttgaatttatggcatgtgacacacgaagttgcacctgtcaatttcattagctattaactattattattcaccttcaattctaccactatgctccaaattatcgagtcttttcgatctttgatttttttttgttctaacgtgacatttttaagcaaacctgttaggcttattcgaagatatctatataaattggttggttattgctgcatttattcgaaactataaattcgacctcacgttttcaaaaaaaaaaaaaatgaaaattattatttgaagagctcgtacgagctcgggagtatctgaaatgttggctggtcgaagcactcttcatggcaacgatcacaaattgacaaccacgatcacaggagaaaaacacgggatttagaagtttacaacgagagaaacccgaaattgaaattcgtttgggttttcgagttctaggagtggctcaattcgaagcttggctttgacaagtggctcgcgacgaagaacccaaattttttatttcaagagcttgtacgagctggagagcatctgaaacattggctggtgagagcattgttcagggcaacgatcacggaacgacaacgacaaaccaagagaaaaaccatgggatttggtagtttacaacgaggggaacccaatattgaacttcgtttggctttacgaggtctaggagtggctcagttggaagctcggcttcgacgagtggctcacgacgaagaacacaaaacaatcatgattatgaatttgacctcaataaccttttaggttcccaaagtcaaagcaatagagaagcatcatttaaaataagaggatataaatttgagtctttttcatttttacactttaaatttgtgtttttttttt

SEQ ID NO: 117333 - DNA, 1485 bp, Cannabis sativa
atcccacttgaccttccccaggcggtgtgggattgcacaacttacccggtgttttcccttacggatcacgggactactgattgtcacatcctatcttgtccacgggttccccatcttcaagccgctgatagagtcttacaatatctcaagaaaactccaggccaatgcattttcttttcatcaaacactgtccctagtatcactgcttatgtagaaacaagcctgtcatcagccaatgttcatctttccttctttgttgatgctgattgggccagtttccaagacataaggagatccgttttaggatactgcatattccttggtaaatctctcatctcatggaaataaaaaaaacaagttatctctcaatcctctgttgaagttgaatactgagctatgtcaaacgcaacatctgaactcacttggatccttgcctttctaaaagattttggtgtttccatctccacacacaccaagatatattgtgacaacactactgcaattcacataagtgagaatcctgtctaccatgaacacactaaacatgtgaaaatcgattgtcacttcatccaagaaaaggtccaacaaggttctctccaactgatgcatgtttcctcacaaaacaacctagctgatatcttcaccaaggctgtactccccactcagttcaacaatattgtatccaagatgggtgtcatcaatatttacatcccatcttgaggggggcccttagagttagttagattaattagtctgttaattagttgttaggagtaactggttcagttagttaagttggttagcttctctttctaaccaactttgttttttcattgtttatatatttagctcatgtgtattcaaaaattcattaagtaataaatcgagacatagttttcttgctctatttctctcatataagcacctaaatcaatgaccaaagtaccatacttttttaaacatagataggaagaattaagagcagttttaccctgggcataagaacatgaaggtgcatcagatttgaacttaagaagtttcaatagctggtctatttgttctttggtgaaccgtggttatcctaagttcgcttgttgctcttttgaagcttttgtcatacgtggtcattctcaggtctcctttttcttgcttttggtggttttccatggatcttccaacaagtgtctcttgtgtgtcatattttttttgcagtaataggcttctttgggttatctcctattgaacctcttcctaatttgacaaacaaagttgatgtgtcattggatgtattagatgtatcgtaattagagttgttaacaattgtagttccttcaattctcctccaattggaccgtcgaaaacatttcttggatagagggcaacgatttctaaccgagaaccactataaaaaaactgttacctttagtgacaaccttttagtcataacataatttttttgtgagtaaatgtgacttttagtcacaa

SEQ ID NO: 117334 - DNA, 927 bp, Cannabis sativa
ttttagaaaatacagagtccattttgtcatttaacaaaacacagggtctaatctgtaacttttgcaaaacacaggattcaaaatggtatttaccctaatgtatataattgatgttcactgacttgtcctatttaccttggttttcaacaatttcatcagatcaacgtacatggttgacacatactcaaaaatcataataagaagattgaataaaatttgctcaacaatttcttggttatattctaaaaaaaaatccattcaagtattttttggaagtacaaaatgataaatgattttttgttcaaaataaataaatgatatgtgtacaacaaaatatcttaatttatactgactatatacatcttaaaattaaataattcagcaaaaaaataataataataataataataacaaaacaaaacaaaaaacagcttaaataaaaaaataaaatataattctccaacatgtgactgtctttgcaataaactaaattagaattcggaattaaatggaagagataaaattaaaaaatataaaaaatggtactcaagttattgagtataattaattttaattatagtattttaagtaaggagtaaatcagatttaattgctgttaacttgccaattcttttataattttactggtcatttagtaaaaaaaaaggaactatttatgaattgtaatttgtgtgaaatgtaagaatatgtatcattactctatataaaacacagagaaattctcctttcaaccataaaaggagatgtattggcccaagtaagagcttatgggttgtagccccactgaaaaactaaaattcattaaaaaaaatttaatataaatagtttaataattattcactaaaatagtaagaactcctccacaaatatttttggaattatttcacaaaaacataaaaacaacaa

SEQ ID NO: 117335 - DNA, 1274 bp, Cannabis sativa
  modified_base (1248)..(1249): a, c, t, g, unknown or other
gaatgactattctatttttaaatagaaggaaagaccattccaatgtatgatgagaaaaaatttaataattttttatcttttttatcaattttttttttatgtattttaaattttattccattccttttcattctttccaactaaatgccacctaagtactatcacgagctgatgcagtcaacatctctgttgtctgaattttttcttagatctgttaactgattttgtcatgtatctttcaaagggtttaaactcagaggcggatgctgaggcaaacttggcggtcgaccttgctggtgaaacttaaaacttatttacctttaaacagttacttatttcaataaattcatgaatgtaaaaaactggacttggtgggatgctgcagatggtcaagtccaagaggaatgtgccacgtcgttgaagtagcaacctgcaatcagtcttgttggtgtggcattcagaaattcaagccttccgttaagcaatggagttggtctaatcaacattcttctgcatgtttgctccagtagatgactgaatccttgagaaggcttagtagtagttagagtgagcctctacttgggaatctgcttgaacaagaagacatgtgcatcattatttctgatgaacttgaaatttctaactcacggatcttcaacagtttatagccctgaatgggggcaatgaacttatgagacaagaaattgaaatggatacagtcgattcttgtcctgatttatgagatcatggatgattggaggataaaatttctttctcacaatgcttcactgcttttgggtcctgtaatttgtgcaatttctctttcttttctttgatatcaaagttgggtactcctattggattatgaacgtttacttgtacttaattgtgattacaggcaatttgagctcattttctaagccctttgagtttgtgcgtgagttgctcctaaaaatatttaagcaaaactattttaaggaataattagtgtttttgtctcataacttacaatactactaaattatatcttctaaaatgatatatctatatcatgttaaaaaaaatttagtgaactcttctatttacagagatataatacttttataattttttttttatcatgttgaaaagatttagtgaactcttctatttatatttatagagatataatatttttgttagtttttgttattttatcatttaaaagttgatgtgatattgttaagagaaaaaaacagaaaaatacannaaaggaaaaaaaattacaaaaatac

SEQ ID NO: 117336 - DNA, 2227 bp, Cannabis sativa
  modified_base (2194)..(2201): a, c, t, g, unknown or other
agcaaaattttaattattcacgttgtccaataacctcgttgattagcaacgagctgcacagcaagtttaaaatcacgttaacacgcctatgctagttagggtgttacatttcaccaactcttacagaaaggaaaaggatttttgttaatctctctgtgagaaaattatgattaacagtgcagaatcaaaacaactaaactttaaacaattaagcgattagcaatcacaagattaacaaatcatgaacactaatcaaatgaaaaataggagcaaatagagtattgaaaactagaaataataaatgcagaaaattcattgttagtttaaacaagtaatggatagtcgatcaattgttagtttaaactttctgatctcgttctctctctctctcttccatggcgaggaagaggaaggtggtccgaaagtcgatcaatagtgttgcgaaggttttgcctgagattcagagtgagaagaatgatgcagaggattcattaatcgagactgatttactaaagatacctggaattgatcacagagatccttctattaaagaagaaggatgcgaggagacggaatcgttgaaatcaccgaggagtagaagcttggcggaggaagtggaattgggggtgaacattccttctgcaactcagaaccatcattcaacgacacaacatagttggaaaaagttcactgagggtaagaatttctgttctgatcccaagctgactttaacaaaacctattgttaaggatggtaggaaaattgctcaggtagacctagatgaggtgaaattagaggaagctaattggagttctgctattatttgtatggtattgggagaaaatatccctgttgctgtgtttgatggatttattagacaaatttgggggcatttaggcattaaccagattgcgaggatgactatgggtctcactatggtcaagttcaatgatgaagctactcagatgaagtgcttgagaatggagtaattcaatttgacaggaaacctattacagttcgaccttggacctctaatttgaatgcggtcaagcttgttaagtttgtccctctatgtaaaagactctataatcttggccttcagtattggggtaaaagaccttaagtgctcttatcagcacaattggaaaaccaattatgattgataaatatactaaggaccgaacgagagttcaatttgctagagtccttgttgaaatggacataactgataatccagaacactctttctgttatttgaatgaatatggacaacttgtggaggagggaattgattatgaatggttacttgttaaatgtaagcattgtttggggtatggtcacataatggtagattgtaaaaaaaaaaaagataagcagtcagagggtgataagggaaggaaaaaggttgagaagaatgatttgaacatggataaaggaacgggtagtcaagctggtgaaaaacaggctatagttcaagaggttaatttagatgttgatgagaccaatggtggcaacttattgtcacaacctgcaaccagtgagaattttataggtggaatgaatagctgtgttaataacgtgagcagggagcagaagggatgtgtccaagaaaaggaggctgatgttaatctaagatcaaaaatggaagtcacgtggcagtacaactcaccaaaaggaaggctaaccaagcacctgaacaaacgaagaccccgacactcaaacgggcatcaactgacagactagcttcctctcaggagctatccagcaacccctgaccggccacccttgggactgcaccatggctagctagcctggtcaccgcagggagcctagccggccaaggagtgcactgcaggctttcctggacacttctacacgtggacaacgggctatgggttgcaaattgggccttataagacaataagatggctgaataatatctagaatcaagggcgttttgattttttgtaaatatctaacaaactatgcaagtattaaaggatttgaatagtaaacttagggtttgaggcctcctatataaaagccttaaccttaggttaaaaacctaagttgcttcgaagcgagaaacctgcttctaaactttaagtgtctgataaaacccatttcaatataatcagatttactagttaataaagaacagaaataacaatttatgttacatggttcacatgannnnnnnnatgattatatttaatgtataaattct

SEQ ID NO: 117337 - DNA, 1941 bp, Cannabis sativa
ataagtagaattagcggcgaattctggttctggtcgctaatgctaccactattagggacgaatttcgtccatcgctaataatattgtggctattgataaattttattgtagtgatagtatataataagacgatgtctaacttaactataaaatattagcacgtgagtatataatatttactctagatataaattattactcactttgtgaatatattgctccacatacatataagttagttcctgaaagtctaaatttactaaataaatgagttatattaagtaattgaccggtctgaaaaaaatagtggtgagggattgaatccatggcccatatatatatatatacgtacacacatatttataaaaatacacataaaactataaatttacacacatatataaactcacaaaaataaacacaatcttatacatatatatactaagtacacacaaaattaaactaaaattactatacaaaaaattgaatataaattaatatatacaaaatttaacctaaatttatacacaaataaaagttaaaataaaaaaatataggtcaccttgattgaaatgatgaaatgcgaagaacaattggaggcttgggcagcggttgctagaggtgcggtggcacgtcctcgtcggagtccagtgaattattttttttttaattattttttagaataaaaatgaaaaaaaaaggaagagaaagagagaataaatgataaaggagactttggtggagaaaataatggctcgggataatgaaaatggtggttgggggtggagataggtggctgccggctgtggtggattggagaaatcgcagagaaaagaaaaaagaagaaagagaaagagaagagaaaaatgggggggagggggaggttcgtgcaaggtatttattcaacttggacttttgccggcgcacttaaggttgccggcaaaagtcgaagttgaaataatggcaatgaaacgtagcgtttcattaagttctatacttttgtcggcacattaatgtgcgccggcaaaagtttccaccaaaattttcacccacgttttcaaccgggcgagaaattgaccgccaaaaaatttcacaacttttgccggcatatttgagcgtcggcaaaagccaaaatatgatgcaacatgccgattcaataaatgtgaatacttttgccggcgcaattaagtgcaccagcaaaagttttcacctacttttgcgcgcacgttttttcactacaagggaattttactgccttttttcactacttttgttggcacatttatgcggtgcatttgaattcgccggtaaaaggtgactcgaaccgccaaaagttctcaccttttggcagttagattgccaacatttaccagcgaatttaaggtatttcgccggtaaaagctactattaccagcaaagtagatcgccaacaaaagtgggacctggactaaaatttttgcccacttttgctagcaaatttattgactttcgccggcaattgtatacttttgccgacacaatttaaagtatacattgttgtagtgactaaacgaaccagagaaagaaccttaaatgaaccaaaccatatcagatgacaagacaacctaattccatgctattgaatatacgaagggattatgggactatagtcttccatatactcttatgaattttaatcattttagttagtgttactaagtgttgctatatatatttgggaaatttatataaatatatattatatagatttatattacaaaaaaacttatataaaaataatttgttattataccgtgacacgtcatcacccataccgttactgccgggattaatttggaaccaccggcgatgaaagagacgcgcccacaactccacttttctcgaccatccctgcgcgtggttaacaagattaaaacggaaagctataaatatcatagaaat

SEQ ID NO: 117338 - DNA, 1218 bp, Cannabis sativa
tcccacttattacctgattaacacataatataaatataaatcctaattatttaccactagacttatcgggatctcaggaaatttggaaaaatggaaaaggatattttacttgcacagaaacatgtccaacaattgaatttttttgatggctccagtccaaattactcccatgatgttcaatcatctgaatctattttggatgtactactggccaatgaagaacaatattggcagcaacgatcgagggtcaaatggcttcaatcgggggaccgtcacaccaaattttttcactctaaagcttcagcaagacattcaaacaataggatcaaagctcttactgatgatcatggaaatatcgcaactacaaatgagggaatctctaatttggttgttgattactttaaaaacattttcattgcatctgatgaggatcattgggctttatctcatgtcttatcaactatcccaacaacaatctcattagaacaaaatgagtttttgtcaagggactttactgcctcagatgttattgcagcgttaaaaactatgggttcagataaaagtcttgattttgatggaatgtcggctataaattatcagcacaattgggatatcattggtgaattagtaacaaaagtggtccttaatgtcttgaacaatggtggtagccctgaatctttgaataatacactcattacattaatcccgaaggtaaaaaaaccaaagacaatgaaggattttcgcccgataagcttatgcaatgttacttataaaatcatttcaaaaatgttggctttacgcttcaaagaagttcttcattcgattatctctgaaactgaaagtgcgtttctctctaatcgattgattacggacaacattcttgttggttttgaaatggtacacagcttgaaacataggaaacgaggctctaaaagttttgctgcgttcaaacttgatatgagcaaagcctttgatcaggttgaatggtcttttattgctgctattataggaaagatggggttcaatattaaatggatttaactcattatggcttgcctacatactaattccttttccttccttatcaatggcgtagttttgggttcaatttttcctcaacgaggcttacgttaaggttggtgatccgctctccccatatctcttccttatttgttcagagggtctttctgttggaactattttaccaggatcttagat

SEQ ID NO: 117339 - DNA, 1017 bp, Cannabis sativa
ttccatatatatatatatcaaattttaatctatttatattatcaaataatattataggtcatatatgtcacattagtctggtcaagtgtgcatgcttactgtacatgttaatgagaaaaacgtccaaaagttgagagtatagctatcaatttgatggctttctacttattacttaattagcaagactattttgagaaagaaaaggagaacggtgaggttttatgtgtgggcagccaacatatatatatatatgagttggaaaattctattgccacttaactaattattataataatttaatatctggtgttaggaaagttttataattttaaaaagtattttctatctatccatttgacttatgctatatatcttcgaacaaaaagccatatataatatataatatattatatcttttggcattactctctcaaacccgtctgtttttattaaggcataaggcagcactgtctattaatatgtaccccaccagaagttattcatttggaaagaaaaacaaaaagtaaatacctttaggttcttctccctctcaacaagtttgaagatatatccaaaagttttcagagagagagagagatgggaagatctccttgttgcgacaaggcaaatgtgaagaaggggccatggtctccagaggaagatttaaagctgaaggaatacattgaaaaatatggaactggtggaaattggattgcacttccgcaaaaagctggtaacacaaaatttccattgatgggtttataggtatatataatcgtcgtgtatatacagtatgtattaatatatgtatatatatttgttggttttgttctggatcaggtctgaagcgatgtgggaaaagctgcaggctcagatggcttaactatctaaggcctaacattaaacatggtgaattctcagatgaggaagacagaatcatctgcaacttgtttgctaacattggaagcaggtacagtaatttcttaatcatcatcatcatcttcttcttcttcttat

SEQ ID NO: 117340 - DNA, 1737 bp, Cannabis sativa
tcttttattgataacaaatcagattagattgtaacgggttttatttaaggcataaaatcccaacataggtttccctcatgctcccggaatatgacctccaactttactagctccgacgatatagttactgaccattcaagcccctcaggggatacccaatacacaggctaacttagttttccttgctcttagaccagggaactcatatctgccccggttggttctgccactcatggatggctatgtggatactatctccaaaggaccacacattgccgaaagcactcgcaatgcataaaaaagatatttgaaagaactagattatcatggagaagtgtgtgcactagtacaatctctagcccaccattcacgaacaatgaatcttcccatcaccttcacagaagaagatgcctgatacgtacacttcccccataatgattcgttagtaattgaagcccaggttgccaacgaaagattgtccagagtattagtggacaatagaagctctgtcaacatactattcaagtttgccttccaagcaattgggatgaccgaagtcgatcagattccatgccccatcgagcttcaaggctttaatctagattctctactgccaatggggaagatttagctcctagatactttgaatgagtgtatcattagaagcactactgcctccaattttaagcattgtatatttgtggtagtggacttccccactgcctaaacactatcctaggatgcccgatcttagttgactttgtagaaattacttccatcagcacctatgcatgagattcttatgtgatgaccgaagcattatagttgtttggggcgattagagaagcgcaaggaaatgttacaacgtctctgccaggtcagtttttatggttagagaggaaattgaagaggctctcagagcactttcctagctaggtcaaaggatgattcaggaggaagacaaattagattcttgattgaagatagaaagaacaattgagatgttggagcatgttgaggaaatcagtattaatgaagcagaccacaccaaatttattaaggtgggacgaaatctatcttcgacggtaaagaaaaagttgtatccacagtgaagaagaaccaagacatattggcgtggagccattcaggtatgattgtgattaatctgaagtggtcctagtttgccaaaaaagaaggccattggatccggttaggatagaagcaataaaggtgaaaattaaaaaaataacttccatagagttcctccagagctctatattttggctagtgaacccagtattggtcccaaagccaaatgaagccaggagaatgtgtatcgacttcacaaacctcaacaaagcctgcccaaatgattattttccactctctcagattgattagatgatggatgccatgtccgaatatgaattattgagtttcatggatgcgtactccagctacaaccaaatcaaaatgcaggtagcaaatcaagaacacattagcttccaaatagataaaggagtatattgctatattgtcatggccttcgggctcaagaatgccaaagcaacatatcaaaaattggtgaacaagatgttcaaacacatcttgggaaagaacatggaggtttatatcgaggtttatattatcttagtctgaaactgtaagttctttctagactaagtcatcaacatagcaatctagtattttaaatgaagtgtaaaatacttgctagag

SEQ ID NO: 117341 - DNA, 3317 bp, Cannabis sativa
  modified_base (34)..(71): a, c, t, g, unknown or other
aaatctgattatatattgaaatgagttttatttnnnnnnnnnnnnnnnnnnnnnnnnnnnnnnnnnnnnnntaaaacaaaatgtgcatttcaaaggacgattagtgatgacactgaactgcaaatttgtgagcttcactagggcaggggaaagaacataccgacaatcttcaccacgatcagtaagacacttgagcaactgtgaattttgcgttctaacaataaaagctccaattccaagagtggatggatcaataaatggcaattatgagagcctaacatgcgacaatcgataatcgctctaggcaggccacgtgttgattaggcgagcttatcaactagctggacaataattagtggggaatagtccagttattcaggatccaaataaaacaaacatctatatccctgaaggatcacagtacatgctagaagaatgtccgactagtaatactcaacagacccaaggtaatgggtcgtccaatctgaggccacaagatcaaactttgggccacaaactagatgagtaggtcttgcaagtgcattatcttgggggaatggtcagtataacattcgtcctctgacgaatataccaaactaatcaattttttaaaacaaccgaacaagaaggccactaggtgtttcagccatcaacagattgggatccgtacacgatttaagaggtgatctaaatcgcagaaggggacagaatggtcaacagatctctcctaatgctcagcagtcaatctaaataactgtgtgcccgacaatgttctaagaggtccacaagtgacacaagttggtcaacaggcatgtcaagttgatccagtggtgcaagcctaaatagatcaacttaagagccttgtacaaagcttagccgacccaaaactcgcagacctagaacttaactagactagaggatcacctttttcaccagaatttaacacccttaatctgccgcccaagttcaaaatgtcaacacggaaaatagacacgggcaaggatgatcctctaccccatctcaagtactttgaaatgcaaatggacttgcaggcagtaaaaggtgatgtacggtgtaaaatctttctagcaaccttggtggaggttgcccagcagtggtacttcaagttagctctaggaaaatttaactcatgaaattccttcatgggaaaatttcacgcacagttctccttttttaggaaactcctatctcacttagaagacctagtcaaagtaaagcaagtatcgggagagcctttgagagcctacatcaacagatttatgattaaagccacaaaggtgaaagggctaaccgaggaagggaagttggccaccatcctaggaggaattaaacctcttggagaattatgaaaagacattaaaatgctcactttagggtcaatgggatagttcttagattgagttcatggatttataaagctcaaagaagtagtttggtgtgtagatacaattggtcagaaaagaaccattcacacaccactgctgccaatacatccgtccagcagaatcaaaattctcataacaatagcagatcaggtgagagtggtaaaaggtcaagtaatgacaaccaacaaggtaatgggaagaaaggcaagttcaacaataacttcgagtagcatctttgagagaatgcctcaaagttcactgtctttactatccttaccgaggatataaaaaccatctttatgacaacccaatccatggtgtcatacaagagaccttatcccatgaagaaagatatgagcaagagggataccaccaaatattatcgcttccatgtagactatgttcatgatactaatgagtgcaataatttgaaacgaaaaattaaattcctcattaggaaaataactcgcacttttagaagtatgtcaagactgaccaggatcaaaggttttcccaaccagataataatcaaaatcgattgatgattccacctgtggacggacatctacaagtaattattggaggccctcatattgttagagactcgaccaaagctagagaaaggtatgctcagaccctaaagcacaaaaagaaagatgaagttttggccatggaagaaagaaagcctaaacaactgcacaaggaagaaccaatcatatcctttagtgaagaagattttgaccacattatttacccgcacaatgatcctctggttgttgatgtacaaattgtgaataaaatggtggctcagactgtgattgacaatggagcctcttcaaatattcttttcaagacaacatacgagaagatggggcttcaactcaaagacttggttccttgcacgcaactggtgtatggcttctccgaccagatcattgctccacttagacatacccgcctaccactcacagtaggaaaagctctgacaaccacaattgtaatgaccttccttgttggaacttttacgcacaagtgatatatagaagtaactgctttcaaatcatatagaactggacgacccaacatgacacaaaaagtagagagaacattaatcaccaaggattggggtgggttgtctgagaggcaatcaaaggactttatgggaatgctacaaccttgccctaaccaacaccaaaaaggaagaaacatctagctagagttcagagaaaggtaaaagcattaccaaatagggattcgccgaaggtggggatgaatatatggatccctaccttggggaactaagtgcaaatgttgggtaggtcgaagaattagaagaagttgagattgatcctactatgcctaccatgaaactcaaaattggcaagggtttattgctcaaaataaaactagctttaataaaaaaaatttagagcaagcctttacattttttcctcgtcacatgaagacatggtcggaattgatccaattgtcatgtcccaagccctcaacattgatcccaacttttgtcccgtccaacaaaaaatgagactgatggataaagagcgtgcacaagaattgaaagaagaggtagaagggctctgggtaaatagattcataattgaggccttctacctggcctaagtagctaaccctgtactggtacccaaaccgaacaagaaacggcgagtatgtattgatttcaccgacctcaacaaagcatgcccaaaagactttttccacttccaaggatcgactagctggtagatgctacagcaggccaagaaatcctaagcttcatggatgcctactaggggtataattatataagaattcatccactcgaccaataactgttggaaattattttaccaggatcttagatctactcgcaagtatgttgattaacaccct

SEQ ID NO: 117342 - DNA, 1338 bp, Cannabis sativa
aaaaaaaaaaaaaaaaatttacgtgaaatctgatatttaaaagctaattagtaattttttccctttcatgtaccaaatcgtgccccgtgaacttttttggctgttaaaaattcccccgaactattgagattgttaaatgtctaatttcattcaattttactgcttcagtgattgtttatgtactaaaccatgctccccagattttgatatctaccaaatcatgtctctcaaactttaatatgtactaaatcatgtccctagaactttcattcatgttagagtttttttactaaaattagataaaaatgcttaaatctaacaatctcaatagttcaggggaatttctaacggccaaaaaagttcaaggaacatgatttgatacatatataaaagtttgggagaaaaaattactaattactaataatgcataccttatgtgatactagatactactactgataccttttagcatttttcgtataaatatatatgatactataagagagagaaatatattttaagaatgtgttttttctagcaatgtaccataactattacgagtactgagtactgctattacccatcatagtatatcaaaaaaattttatgagatcatgtattataattagttaatatttttttataattattattaaagtataataaatagttcctaacattaaattatacagtagtaatatatataaggctttactaatatttcttaaatattacgactaacttattatgccatttaatttttttaattacgttgttttaaattctcccattagtattataatttggcccccttaatttcaagtctagctagctccattagtatccaataacattttccttaattatttcatataggtgtcagtctaatatataattactagtagctagatttataaatgatattaattttaaagctagttaagaattttacatagaatttttacatgtattaaattatgccatctaaatttttctagctgttaaattttttttttttttttttgaactactgaaattattggatttaacaacttttgctcaaattcattctattttattaattctgcgattgtccatgtactaaattatgctcccagactttcatatttatcaaatcatgactctcaaactttgacatgcatgtgttaaattatgcccctgactttcatccatgttggactttccttattaaaattagacaaaagttcttaaatttgacaatctcaacactactacaatgttagcctttagaggcagttttttcaaccccatttataaaaagggaagctaaagggtgtgaaaatacccgctatgttc

SEQ ID NO: 117343 - DNA, 1484 bp, Cannabis sativa
aaatcaaaagctttatttatataattgttattaaaaaaactactcatataattatattttggagtttatttcattaaagaaatatatatattttttattttttttaataaatcatgcaatttttgttaataataactagttacaatagtaatagtttgcattctaatatatacatctctccattagagacacgatcatgattaaaattaaaaaaaatgaaccatatattcagccgcataatcttaaatcgttttacaaaaaataaatgtaaaagtaaaattaaataaaaaggattgcagcatcaacgttaaccttaattaagaaaatctatatttagttttatctactgcacgttcagaaaacataacagtggaaactatcacagtaggtttattaaacctcgtagcttgagcagccaactattgtgtaaagatacgtaactgcaatataacaaccccttcagtcatagagaacttgttattcccaactactaacaacgattttatgaagagtcatcaaaagacaaagaagaaccaacaacgaaacaaaataaaataaaataaaatcatatcatagagacaagattaaaacacttaaaaccatgtcatagagacaagactaaaacactcaaaactatatttgagagacaagactaaaacactcaaactcatttcacagagataagactaattgcaatattaaaactcgaatcacaatagcaaaacacaatctctatcaagctgtgcctatgcccaaggaagactagtaggcctgaccggagagaaaaagacagccttctatcaggccgacccataaattagtaggctataggaaaaatacaataattttcagaatcaataaaaaaaaaatgtgtaattttaaaagagaaatatgtttttgggatctttagactaggtgggttctaggcacagtttagcatgtccatgttcaagactggagttctgctttctatagttataaatctagaaagaaaaaattttaattttttaattttgttgatgatacagaaacaaactttttatttggccaacaacaacaaactcatatttgtatttagaaatattattaaaagttaatcaatgtgtgtatatatatataacatataaagaaccatgtaattaaataattagtgttattatttacaataataaggagtgctaaggagactctcttttgtactttcttttgcactctctttataaattagtgacaagtgtcatcttttgagattagtgtatttatacttaataattagacataatattattacattattacttatatgccattacaataaaattatcctaaatatttactaagagcttaatataaatatatatcttaaacaaaattataacatcatttaaaaaaattataacgtatgattagaatttatttaataatttaaataataatataaatagtaattgaagctattttatttatatgcttttttacaacac

SEQ ID NO: 117344 - DNA, 1395 bp, Cannabis sativa
  modified_base (1343)..(1347): a, c, t, g, unknown or other
ttttagtcacaatatagaaataatgatttataattagttacaatttttttacttttagtcacaagttttgttgtgactataagtaaatttttttgtagtgtgtcataactaattaactaatacaaatagtctgaatcttgacatattggcaattcaaatgaaaggattagaatccaataagctagagacatatgtagtatgtgactagattgaactaaaccaacataaatgtatatttgcattttattatactctcataaattaattacataacataattatataatgttatgtattatgtttttaagcataaaaaataatataacattacactcaataaggttatatggtatctgtgtttgcctcttaaagagtcatattaatatttcatctttattaataccatttattcttatcccttgtgatatagacatatagtgaattactcagaaaaatgccaactatatattttaaacatagaacatgatgcagcatcaagttggaactcatggctaaaattttgactcaacgagttaacaccatcatgatcaccatgaataacagatttaaatttcttgaagctattccctaatatcactacatttttcaatgtgtcttcctcattttctttcattagattcatatgcaaatgcaatggacaaccaagcatgaagaacaatgttggtttattcacctttagcctattattctccaacacttgaaatcccatatcactcaaagctttattctcttcatcacttagagttggatcaaatatttgtatggtttcactaatccaattcactttttccttcaacaaaagtgctaggcttagttgcaaccttgatttttcactattttttatgctcccaatacaatatatcaccatatctatcttactatcattggtagagttcacaagattttcaagacgtagtgaaatctcttcatttttttgaatttgatccaaaaacttggtgaaaaatggcatggtcttcagttcattcgtagtacgttgcacaagttgttgtattgttagttgttccttaattaaagaaaggagtgatagagaaaattaattaaaatatagataatataaaaagtgtgaaactattaggttattcttatatgattgtatccatttaacaatatttaattggtcaagcaagaattaaagagctaaatgatttgtgattcaaaaattgtgtttttaaaaagagaattttgggaataaaaatttgatttttttttaatgttaaaaattgtaactaaaaatgtgattagttgtggtgtgatttagcgtttttgagtttcaaaaagttaaggtgtcgtttggtaacacnnnnntaatcagttttctatttttaaaagtgaaaaagtgaaaatatttttcaa

SEQ ID NO: 117345 - DNA, 1902 bp, Cannabis sativa
ttcaatattcaccaagattgtcgattatacccaaaacgacgtcgcagatacgcttcaagccttcttctctacgcgccagctcaggcggataagccaagccaggaaatcgtcggaacgcgttacggcacgcgttggggtaatcttcggctgcggtcacgtgcaggtaagcgtagtcgaagttctctgcgaccaaatcctgagcagaagactggagggcgtcggcagcgaagccgtacttgtcggcgcactccttcagaactttcttcattgcgacgtcgtttccataggcgctgagcaactgagacgacagataagacgacgtggcagtggagttggccatcccgatcccaatcatgattgtcgcgagtcccttaacgtccttgtttttgctcgtgggatccgatttgagagaggagacacacagatcgtagtactttgtggttttgcaggttttgtcgatggaatcgttggaatgggctccggcgatggagacgatgaggatgaggataaaaatgggagaagcggccattatttgagtgaagttttgggagtagtgtttctgtttggatggagagaaagtaagatggaaaatgatgatgtcaggtcatatatatatagtgagaagctagctagctaggtaggtgtagggagtcttatcagtgttttgttgttgtatagcttcgattttcttattgtttgggaggaggtgagattttgactttcttcacgtacagtcttttactatataacctctacaatatctctaactagtaaatgaatggggttccttatattttgtttattaataattaagagtgggaaattctataatacaccctctaaaaggatatactgatacatttctatttgttttagtatccgaaataattttttatttaaattttttcttatgatcatgtaaattatagttatttaagacatcccgcaaaattttaaaaaatttggaaaagtttaacacgccgaaaattgcattcaagcaaggtgttctacgcgtgactattttattttatacacgtgtaaaatagactgtttgaacatttttttctatattgtaaattattccaaatttctcaaaattttataggatatcttaaatagctataacatacaggaatatgaaaaaaaaaaaaaatagactcaaaattttttctagatgctgaaacaagtagagggtgcatcagtacatcccttttaaaggggtgcattgtagaatcacccattaaattataaatttatataaaattttgaaattttatatatttttattttactcaaaaaataaaattaataatctaagaaaaattataacacaattcttcaaactagtaaacatttagtgcttcgcggcggatatataaaatattttaaattatatattaaaaataaattatgtattttaattaataataattacgtaataaaattatattaaaattttaactttactattaaaatatttgtgacatacatacttaaaataaagctatatttaagaataataaggctatttcaaacatctctatgatatggtacctgattttgattcagcatggatttgtacaatttgtttgctttaaaagtgccttttgctccaacagctgtgatgttggcttggttaaacttttgtcttatacgacaaagcttcctccaacaccaactcgtgtcccatttgagattgtaagaccaaaaattctctccttttaaatagacagcattcacccttttgacccaaagcagctctttcttcatcgaaattccccaagtgaatttagcaagaaattgttacgaaaattctgtttattacgcaagtgtacgtatcaagtagtatctcacgcaagtgaggttgaaccacagggaattggattaagtactactaaatta

SEQ ID NO: 117346 - DNA, 888 bp, Cannabis sativa
aaaaaaaaaaagaaatactactaaatattatatatacacaccttttaattttcaaaattactaaaaaaatgagagaaggtaggatcgaatcatttacctcaccattgtcagaaaccaatacttattctttgtgctataagttcttatgtaattatatcaatgaaatatttatatataacatattttttttatgtatatatataacaatgttaattattttggctcctaaaattgtggggccttggcccgactaccacactctctaaccagtcgtgacacaattaattaaatgagaaactacgtgacataactctcttaaatattaatatatattcttaatattattttattattattaattcatctatttattttttatgaaggactattaattttagactttttaattattgcaggagtattttattgcggtccaatttccgtagttccagatctaaagaaattatgtttagacttttctcttaaaggaagcaccaaatttgttttccacaaagagaacttctaaattaagcaaattctttgaaaatattatgacctttattttgtatttatttttatagatacttagagataaaaaagagtaatctcatcaaaaatctattaggagaatcattttaaaataacattcttttttctttgagattgatattgagagggcaaaaaaaaaaattaggagagagacgagattaatattagtgtttgctgtattattatacttctttttggctttgtatgtttttgaaaatgaggtttggttttttttattatcattctatatttgagtattttattgtatttctcttacgtactatatctattctatataaagtgtgtctatataactgaattcttagtttatgagaaatt

SEQ ID NO: 117347 - DNA, 640 bp, Cannabis sativa
  modified_base (42)..(58): a, c, t, g, unknown or other
agtaaaaaagtaaaaaatactgtctgacagtatttttgtaannnnnnnnnnnnnnnnngtataccatgtaaattttctaaaataaaataataagagcgtgttgtcttttatgggtgatgcagccattaaagatgatcaaatcccaaatttactttaactttctctactttcacatcacaatcacaaacaccatctaactaagtggaaatgaggagtaaaaaaagcacttgctctatttctaaaataaatacaataatctacacatatatacacgtaggactacatgcgtgactatattatataattcaacttgtaaatttatatatatatgtatattatgtaaaaatgcaaacatgtgcattaaaaattattattattattggtgttgctgtaaattggcatgaagtatgttgtgtatcaaaacacattctcattatttgttaaaaaaaaaaaagagaattatctttcaataaacaaataatttctctttatttttcccctcattttcaaaggaattgattataaagctaagcaaaaagaaacataacttaaagaaaaatttactaacatctaaaaaatacaaaaattcgctaatacaaaaaaaaaaaaaaatcatttatttttaaaaattttttattta

SEQ ID NO: 117348 - DNA, 2186 bp, Cannabis sativa
atttaaagcttcttcacatgaaaaattttctatttcttaaaggtaatttttctatttctagcttggaataattttatttgagtatacataattatttatatatataaatatagatgtgaaaagttggattttattgaatacatgcttattaatatataagttttatggagatgttgtttgtttataatattgcaacatttaaacctcatcatcattcctcaaaggacaaagggctaaagttggtgcttgattagcttgtttggcttccttaaatcataaattttgatgctaataatgtgatcctagctttattcaattgtgcttttggagctttacaattattagccatttcaaacaaagttttgattatatttgagattaccttctaaattaaagttcaaagaacaataagtattatcggtgtttaacactaccttatcttgtaaatagttagtaatatttcataatagttattaaattaaattatatgtgattcaatatttaattacaccaataacaatataatattttaagtggtgctagctagagggtactttaaagcatttcttaagttcaaaatatgtgccaaaacaattagtatgaacaacctttatttgttctgtgataatttaagcttttgttttactcttagagtgcttccgccttgatagggcggtgctctgagcaaataaacttagcttaaatgggtttttattagaataattctaagtaatatttggcttaatacttattcttgtatacaatttgacacatgggttccacactaaagttatgtttggtaggaagaataaagaatataaaggatagagaaaaaagtaaccatctctatattgtttaatattaaaagtagaattgaaatgatagaatgtaaattattactaaaattacaattctatcattcctaaaagaattaattcttattttgtttaaggtcaaatatgatattgtatatatttttttttaatctttttcttaaatccctcaattttaagaagaattgaaaattttgagtatagagcgagaccaccattctttttcttttttctttccctttcgccaaacaaataatttcacatatatccctccatatgtttccttccaacccctttcctttcacttttcattccaccttaccaaacatagtgtaatttcttgttactacaattaatgtgaaatatttgagttaattttccatgtcaaatatttattcataattaaataaatttatactcatgatgattgaagattaaagattgattgatttaaagtgagaaattatttataatgaaagactgagagtgagctggaattggaaccataagccataaatattgatatatggtggtgaacattacaatattattcattatctaagctcatccactaccattattataccattattttataggcatatatataaatataaatatatcaactttttactttattttcttgcccaccaattttatatcctttcttaatgatacatttcaatttagaatagaaggaccactatcattttttattttgtttatatatatgctaaaatcaaaggaccactaatgctatattttgctattacaagttacaaagaaaaaattgttagtacctataactatttgtactcaaaaaattatgcaatttttatttagccaatgccaaagtatacagcattactttctatttgatctctatatattggaatcgaaaatttttattcttctatcttttttattattattaacaatttttataagaaaaaatttctaatttgatttatgtattcaacttgaatatgttattagcttttctgttttgttaagtaataacttgaatattgtattttacaaaatagatcaaattgatacttgaagtcaattttagtaataaattgatacccgagctcaattattttcaataataactttaaatatatgttgaatgataacttttggtttaattatattaaaaagtgttttaacttattaatttggtttattttttaaaaaatatagtctctgagttattatttaacaaagtataaagattgataacatgttcacatgctaaacacacagttcaacggtatcttctcatttttaaatatatcacaaaaaatagttacttttagtgacaactttttagtcataacataaattttt

SEQ ID NO: 117349 - DNA, 1517 bp, Cannabis sativa
tgagcagccgtgagagcgagcagatggagattgtacatgtcggggcagttaggcctggagcgtacggtctttggaatatcagggcatattttgtacagtcgctatgtgaaaaactttcgaaatattcacagtgaaacttttgtaaatattttgtaaaacaagatcctagtttattataagtataatattttaatgtctattgttaattaagtaaaattttagttaatcacgattttcaataaacttgttgattagcaacgagcagcacaattaagttcaaaatcaagttaacatgcctaaatagttagggtgttacaatactgatgagagccacattgataataatttgtgcatattgtttgttgacccccaaaaattactaagtgtaatatttggagtcattagtgtcatgctcaaaagttcgccaggtgtagattcaaaaatgcacccaagtgaagctccacgcacaagctactccatccagctaaggggagctccacgcaccaagttgctccacgcaccagctactccatgcagctacggggagctccatgcgttagctactcgacgcagctaagaggagctccatgcataagctgctctgcgcagctagggggagctccatgcatcaactgctccacacagctaaggcaaactccacgcagctagggggagctccacgcatgagctactccacgcagcaataagtgccccctcagctcgaacacatgtagcctcatgtttccatgtatctgatctactcatagaaatagaagcaaggagaagatctcaaggctagagatgttgaagccaagaattgcagacaagatggcgactacacaatgaatattggtataggagacaaggctcctttcatccgagatacaagcaaaagaggcaattttaatgtaacttaggatttctggtacatcagactacttgagatacaatgttatcaggtgtaaaagtgacttgaaatcctatgatttgaggatctaataaggctctaaagtgtgaagggctcactataaatagagcccatggacacattgtaaaggggactctcttgtagagaaaaggttaatgaaactgtagtatttctaaatagtgaagagagtaatatttactttaggtattcttttattaagatcctaaaacatcatcttaaaatattgttatttcgttgatgagttcttaccgtcaataatttggcgctgtctatgggaaaagacacataaaagcaacgtcatttctttacacaaaattgctaagaagatgccaagatattctcgccatcgccaagaggtggaagtgtggcttgatgtcctttaactgattgcctcaaggcctgacccaccaacgcccacttctaggggaggaggtacaggtggccaagtgccttagaatggagaaggcacgaatggtcatgatgttggaattattttaccaggatcttagatttattaacaagtatgttatttaacatcctaaatataaacttctaaaacgatatgaaa

SEQ ID NO: 117350 - DNA, 1443 bp, Cannabis sativa
ataaattatatgcttcattaatttgttccctagattaatctatctccataaatctcaaagctttatgtaagttaaataaattacatgcttcgtggatttactgcgtaggtaaatagttagtgattgagcgtttcaccttgattacatgtaatagggagattaggataattgactgcttcagcttaatctgtaggattaatagtttgattgaaaattaaaattacattcattaataggaattaagaatgattgttgagggtggcgaataacctttaactaatttctcatatcgtagtctcaattttaatttgttaatactcttatttatgctactctaaacctgaaaaccccctttttctagctttagtcagtaatttttgagtaattaaataaacgtagtcctcgtgggatcaacccttatttatgattatactaaaataattaaagttatttgaattaaaaaattagtaaatttgttgtggcttacgacacacaatagtgttcccttctttaatctactaagaggaagtaacaaaaggttcgaatggactgatgaatgcgagcaagcattccatgctctaaaacatcatttatccaaaccctcgatcccataaaaattagtagatggcaaagagttattcatctacctagctatcaccgagcatgcaactagtcctgctctggtgtgtgaggatgaagggacacaaagagtactatctcagcaagcatctcattggggccgagtctaggtatcccctattgagaaagctaaggttgtcattttaagcccatgtaatcaaattatcgattgactaaccacccaggcaagttctgatgaagccacaagtatcaagacgtctactcgaatggatattagagcacggccaatttgaaatgtcctattagccttgcacaacaatcaaaggccaagcataaattgattgcatcgctgaatgcattggcctcgaaaaagatgaccacatggtctgtgaagaccagttgcacacacctgagactatagctcaagagggttctggacctccttagaagctttacgtagatgggtcctctaatgaacatggctctagtgcaggtctcatccttgtaaatcctaaaggattttgcactcactgtgcattgcggtttaagtttactgtaactaataacgaagtagaatatgaggcactcctagtagaacttcatttggcactagctaacaaagctgaatcactagagatttatagtgattctcaacttgttgtcaatcaaatcctttgcgaataccaagcccaaaggcttaaaatgatggcatactttagcaaagctaaagatatattagctcagctaaagcactactccattcagacacttatttcaaacccacctttaataacattttaaaaaaagtatagctatgagctaggggtgtacgtcggtcgattt

SEQ ID NO: 117351 - DNA, 2393 bp, Cannabis sativa
tatgagggaggaaatgacttttaggacaaaggtccttgagccttggtcaaactttttgtgtgttattcttcttcttcttctctagctttcttgtataatcttgatgaaatactttaatttgtattttgagtattttgattgtaattctcttattctttcttggaatgagaaattttccaacaatgcctccgaccaatgcctagtacgagtggcacaaatccttggtactccctatacctaacttagtactagtggaaccaagccaagtactttcggtctcgctcctagtactaatggaacaaaaccaactaactaacccttgtatggttaacactgacaggtacatgatatatgacgcgtcctgttgtgcgaccattgatggaatctgttactcttgacacattcaactaaacgagccaacgcctaaatgcttctgcccattacttagcaattaatggtcaacacaaatggttagactatttagagtctttactgacgcatatgatcatttaagaaagctcactaattaagtgcaacgatgtaagccctaattaacaaatataaacaactaacaatatacttaggtcataacctaagtcaaataaataattaaatcgtcaaaactgtttaactaactttagagtgctaaactctacctgtacgtgcagatgtctacttttcttacatggaatgcaagtaagatacaactccatgtaagaatagtaacgatttcgatcaacaggatacaactccacacaaacatccaaatgtaatcataaactaatttccattattggatattgatgtagttactctcaagagctttcctgttttgacagcacttttccaactcaaattggtacctaaaaccagtttaaatttctaacctaaaaatagtgtaaaaattataacaacatagccacaaatgaacataaaaggttaataaggaaaaagtaaacaaaagagtaaatgaaaatcataactgataaagaaattaaaaattattcacaacttttggcgacgtcttagtctgtggctaagatttaagaacaaacttaaaaaaaatataaaatctataagattttttttgttggggaaaccgataaaggtaaaaataataaaggtaacaaaaattacacagttaggtagggctcttctatccaaaaaagtttattgtctatcctaaggcatgcggctgacatgagagaaaaatactctaggaaaactagactataaaactttaatatcagaaataataacctccaattcattcaaatacactgtttgaccctccaaagctgagaccgaagaaagtgaatctaaaaagaccctttccactggaaatcccacatcttaagccaaacgcagacctactagtagagcaacctggaaactaaaaaagaacctgcaaacgaaatagtttaaaagcaataagtacttttaattttcaaatccaaaaaatattaaaatataattgtaatagagtcaccgccaaagggaaaccctttggtttgactcttcacctaacttctcattgatagcattttaatggtaacaaaataatataaattttagatattctgctacaaacaaattggttagaaaaagttctcttttctatctttttgcgacacatggtacaattcgccgctaaaagtgataaaaaattggtaccaaatcttcctaccgaatttatctacttttggcaatgcattagtagtgtcacagaaactaaatcgggaataaatttcataattgtgtcacaaattgtgcacattaactgatgacgcttttgatcgaatgcgtcgtaaaaaattctcatttcttttagtgaattagcccttttttaattttgttactagttactagatatcgcataatcctctactagcattccggatgatttatcgtaattagtcctatggctattaatagtgaataatttagtttcttagtgaataatttagcaaattatatcaatagaagattatataggaattttttaggtttattgttacaaaaatatcacattttcctttgttaaccaatcttctttttaaggttttgggccttagctcgttgaaagagctataatggtcttttttcaaaaataccaactttaattatttttttaatccacaagaataccattcttaagaattgtcataaaaatccttgtttaatttgtaactagataaacgtgatagtacacaatattacaaattttaggtttccacaaggattcaagtttacaaaaatgtcatttctcttactttatgattttataaagaaatcaaaccttttataaattagttttatttttcactaagccatttgtagtaacttaatatttatagtcttagcttatgccacatcttttttttttttttttt

SEQ ID NO: 117352 - DNA, 3017 bp, Cannabis sativa
aaggattattactctcctctccctcccttatattctccatccttcatcaactctccatccatccaactctccctccttcctaccaaacatagccttagggttgaagccttgggccaactagggtttcaaggcacaactatgtcctggcaagggtccctgacccatgcaagaactctagggttctagattaaaccctagaactagccagctctcatatgtagcatcattggcaggccaagtcacaaacaagaccctataggccggctagggtgtgcaagggataaaaaaatatgtttttcaaggacttaaacgtgttctttatgactcaaagagtgaagaatcataatgaatctcaaaatcaaatctttttcatcaagaaatcatacattatgcatcctaaagctatcatgcagatcataatacgaaaattattacaatctaacgtgagaatcaagaacgtaaaaagcttgaaaaagcttgaacataataattgaagatccaagaaaacaagaagagaatgggttttgaaagatacccactaatgaagtccattgaggatccctgtggaaagcttggattgttaaaacgaagaaaaaatcctaagatttgggaacttggtggcgtcgggttcctaagggaagtgaagagctcattttttcttttttctcaagaagaatttggagagagagagagagtgtgaaggtggtaatgttggaatgaggtgtgtccaaatgaaccttatataggttatagcatgcccttctctttaaatatgtagtagctagtaacacagcctgcaaaataggcatgtagaagaccaatagtttcctgttgggaacgtgagtagcagaaaaaaaaataaaataaaataattttcaaatgaaattttcatatagagagcacaagtatttgactagccataagctacccagttaagacttcgacagtcataactgaagttggaaagtccctattcgtatagacgtccgaataggtacttgtgggggcaaatgtttcccaattttttcttacatgatgtggcatgtccacatcagcaagattgatgccacgtggagtacaacttgtcactaagagtaccaagtcatcatgcacaacttaccagttgaggaaaagtcaaaatgttcaagcaggatacagatacaacaaaatggccaactagaagggtttggtcggccataaagtggcatgtgccgaccagcctctagcaaagggtaggccgaccagcttccattttggtagacacaattgatgtttctgcaactttcaccttggagagacaatggctcatttttagctacaaatccatgctaacaacccacgaaagtaagagttcaactttagatatttacctattctttaggagcaattaattagttattttctatatattatatatgtgaaaaagaaaggatatttccttactttaagggatattaacctactttagcttagatcttctataagctctcatctatataacgagcactaggctaaaccaaaaacctaagttctaaaaccgtagctctctctctcacacgcctcttgttgtatgtaatacatgaagtccatctgtcatcttactcatctatgatctacctaattttgttctcactattgtaattcatagggagccactctggagatcacaaagcttgtgatctgagtggcattctctatcaaatcaatacaattgaaatgagagtaggtcattacacgttaaccaagggtgtcgaacctctataaaattgttgcgtgtattttatttacttaatttaatatttacacgtaggtcaacataaagtatacccccgagtgatctaggaagtttggacatctctaaagtcatgatcacttatttaaaatatagcatgtgcatgaaacaaatgtgtgaattcctctgcaaatttcttctttttcatttcattgtacccacaggtttacattaaaaaaaagaaagttcacaaaaatctcacacacaactgtagaggaacatcaaactagataccctagcctattggtaataataatgtaaatgatctgcattctaggacctaggaatctctaatcaattcattctcttaagttgaaatgttccctctcctaccttgtgttgaatctcgtagggtccttcccagtttgatcctaagaccccaacccccgattcttgtgaggccaggaagactcttctcaagacaagatccccaatgtcaaatgtatgacttttgagtttagaattaaagtgtcttgcaattttgccctagtacatcttgagtttactattctcggagttcctcaatcagatctaatgattcttagagttgagaaagatattgagttgggtcataagtgtctcctcggtgagatgggaccttgatttctacttaaatgactgcctcatacccacaagtcattaatatggggtatgccacgttaaagttctttctatgcctagaggactcgtggaagctcctctagcaaatgggctttacaagcttagagctttttcttcaatgtcatcttcaatatttttttcacgacttcaacttgtctgttcctatggtttggcgacagctgagaagctcttcataatttcgtgttgactatagaagtcggtgaagtgatcactggacaatcttatggggatgtctgaagcgacatactatattttttatgacaaaatctaggtcctttctggaggtaaccatgttcatgggctctgcttctacccatttggtgaatagtcaacaatgactatggcgtattttacttctcccttttcagtaggaagggatcccactaagtcaattcgctaaatagtgaaaggccatggacttctcatgagtgtgattactattggttgtgcgcttggaaccttggtatatatctaacattgcacacaccttctgtaatatcctaataagtcaaatggtaaataattagggtttatatttatattatgagttaatcaggtaatgagtgggattatgatcctacta

SEQ ID NO: 117353 - DNA, 1897 bp, Cannabis sativa
tttgaacccgaaacccgtgaacccgaaacccgccaacccgaaacccggtaaacccgcccgatgttcagccctattgttatgtattacctcagtacaattctcctttcttgttaatggggaaatacaagattgtgttcttcctcaatggggactgagacaagttgatcctccatctcttttatttttgttttacgcggaggcattttcaaatcttatccaacattctgaacgaaatggaagcttgcaaggccttaactttgggagataaggtcttatggtctctcacctctttttgtcgatgatagtcttgtgttttttgaagccaatgaacgagaatgtagatgctttaaagatttattcaaaaaatattacctcttttttgccaatgatagtcttgtgttttttgaagccaatgaacatgaatgtagatgctttaaagatttattggagaaatattccagggcctcgggatagattgtaaactttcataagtcagaaatgtgttttgggagatgggtgtctttggaggtcaaggcaagagtggcaacgttaatgaatgttcaggtggtggatagttatggtaagtatttgggattactttcttttgtaggaagaactaaaaaggagttgtttgatgtgattaagaattgggtgtgaaataaactaaagggctgaaaagggtcattgttctcagcagtaagaaaagaagtgttaatcaaagcaatcgtccaagctatacccacttatatgatgagtttttcagctttcgaagagtactattaacagtttacacaggatggcggcaagattttggtggggttcgtcaaacaaggacacaaagattcattggggtaagtgggcgactctatgtaaactaaaggaaaaaggaggattagggtttcaggatatgggactattcaatcaagcactacttgctaaataagtttggagatgtattcaatttctggactctttgtacagcaaagttttgaaggcgtcttatttcccaaatgacgatgttttggcggctaagtgtggcaataatgcctcttttgtttggagaagcttagtatgggaaaaaatataattttgaaggattactgatggagaataggtaatggcaactctgtttgtgttctggaagatccttggttacctcagcccgtgacttttaaaatctatgataaaccacctcttcctacacatttgtatgtcatagatttaaaaagagctaatggagaatgggatgagaggtttattagagctgtcttcaatccaaatgatgctaatttaatactgagcattcctactttctgaatgggaaatcgaagacaaaattttatggcactataacaaaaatagtgagtactcggttcgaaacggatatagaatgacagtagatttataggttcaagaagctcaatctgatactcggactggtgagctgcggtggtaaaagttttggaaactttagattcccctgaaagttaagcattttgcttggaaagtatcacattcatggattccgactaatgcaactcttgttcagagaggtgttaagatggaccctcagtgtactaggtgttaagggtgtacatcagtcggtttggtctggttatagtgtatttttaccaacccaatataaatatcgagttgcaaatatctaattgtaacccgtccaataaaaaaataaaaaataaaaagtgtaacccgcccaatgatttttatcagtttggtcgggttaacccgtttaaaccaatctttattttttattttttgcattgttgttattttttggtgttcaattaattgatttgaaaaaataaatgtatagtatatgtcttttaaaattaaaatagttatagtttaaattaatgttaaaaaataaatatgaatt

SEQ ID NO: 117354 - DNA, 1872 bp, Cannabis sativa
  modified_base (1429)..(1432): a, c, t, g, unknown or other
acttaatcatcaccaccaccataatcatcagctacccaaaaatgagtgtgagcatgaagaaaacgacaatgaaactgatgaggaggagattgaagaagagggtgatctaaccaagctccaatctgacaaagacttaaatcctggtcctctgttttctctcaaggatcaacttgagaaagataaagtatatataccactttcattagtttcttatacatgttttctgcatatattcattatataaataattttcattttccctttctttctaaaggatgatgaaagtttgaggaaatggaaggaacaacttcttggaagagttgatctctctgctgttggaggtacttttaactctttgtagaattatagtaattgcactaaaataaaaaaataaataaaaacaactaaacctttttcaagacttattttgggcatatctataggagagctatttgggttgtcgcaatctaactagctaataaagtttgagttgttagaagaaatgaaatcaatcagtaactaataaatatataaagggttgttgtattggattctagttatacatgtataaggtcaactttattgatttggttgaattgatgactaatcagaaagcaaagagccagaagtgaaaatcataagcctgacaattcaacgacagggtcggccagatcttgtgttaccaattccattcactaacaactccaagaaaagtctcttcactctcaagcaaggcaacctttaccgtctcaaattcacttttactgtctctaacaacattgtttcaggcctcaagtacacaaactgtgtttggaaatctggagtcagaggtatatataaatatacctattatatatatgttataaattaatatttggaaaaacaaataaatttaaaatgattttgttatgtatgacagtggataattccaaaacaatgttgggaaccttcagccctcaagtagaggcttacacttatgaaaccaaagaagaaattactcccaccatcatttttgcaaggggatcctattgtgtgagaaccaaggtaagaagtacaatttatttatttatattttttagattggtcttcatatgaatatatatttatatatgagtacttttatatatacacttgttcacagttcatggatgatgatgggaagtgctacttggatgttacttactacttcgacatcgcaaagaattggccaacatcctcttgacctgaaattaaatttcttgtataactatgttacattcggccattaatgttagtctgtgcccctctttgtattttgtaatccaattaacacaagtgtaatgcatctttttctctgttcaatgaaattaaaataagtgtacacaactctctctttctatctctttctttaatcggtctacggttttttataaataataataataataannnnaataataataataataatgtttattcttaaaatataaataaactagtaaacatatatatggagagcaaaattttacaactaagtgagacaacattattctaaacacttaaacagagctcatgcggcatatgtatagaaatgctagtgacaacttaaagtactaagtatcataagagatagtgtatgtattttaattatgagtctaaaatattttcacttaataaataatatgaaaaaatgttaattaattatgtattttaattacgttatatattatttttttaactttttttttttttttaatttatggtttgtatttctaaagtgatttttctgataatttttatatgggttgctattcggtttttggttgcgatttaagttgcaccgctagttacaataggagtttttatgtagaattccgtaaatatacaaaaaaa

SEQ ID NO: 117355 - DNA, 845 bp, Cannabis sativa
tacgaaattctacataaaaaccctattgcaactagcgctgcaacctgaattgcaacagaaaatcgtacgaaaaacccttattgcaactagtgttgcaataactttagaaacccaaaccgtaaatttacagaaaaaaaattaaaaaaaaaataatatataagataatttcttaatttaaaattaaaatcattgttaccttaattatcattatattattaaattataggatcaaaatttagatatttaccatatattttgattatgtgatatttataatggatatctaaatattttgagatattttgaactataaatagaattatgatatattgagttttttattagatattatttcttaacttatatctaattacctgattcaaaattctattaaaaatatttattttataacttagttataaaattgaaaatatctgtcaatcaaattttattacctttttttttttttcatataaatactaatttaattaataataaggtctaaattaactcatggtttttttttttttttgaaaaggtaactcatggttcatttaatgatatactttattaaataaattaattttgttaaaacttattaattaattatatgtaaattaactacaaggtttacttattgataagtcctagaatatgatttaaattaactcttagttaacttgatggtaaatctaattaattataacgaaagtataaaattacttctttcatctttaaatattcatacttaataatatgaataggatatattagggctgaacattttgagcgggtttgacccgaacccgagcaacccgcccgaacccgaactggtgaacccgcaa

SEQ ID NO: 117356 - DNA, 1632 bp, Cannabis sativa
tatggccacttgagctagcctcacatggttataaaagagccgtacttaacccatactttttctaacttccaattgctttttggcggcgcctaccaaaaaaaatcaatgcaagagcaagagagttattacaacatgtacatttatatattaaatatgaaatcatgttacaacttgcatatacatatatatttatacacgtatacactctatttatatcacatacctcccctccatccctttcaacacattccacaaaaacaccccacaaaagaagagtacctaaacttcttcaaaaaaaatggctaaataccataaaaatttcatcttcactatctctcttctcttatcttacttatctttaagcatctcttattatgatcatcataataagtgttcatttcctaaggagtgtggtaaggctaagactaatggcatgtttgtgtttggaagctctttggttgataatggcaacaataatttcttcgaaaatagggcaaaagcagattatttgccctacggaatggacttcccaaatggcccatctgggagattcacaaatgggaagaacataatcgatttgctcggcgaacatcttaagttaccgattgatttcattccttcttttaaagatccttctactaaaggactcaaaattgtttatggtgttaatcatgcttctgcttcttctggcattttagatgacactggcatcattgcagtaagttttatataaatattataattatatatagaatacttaaattatatgagtaaaattgataaaattagactaattttataatgtttgtaaaatgaaaacttatttaattttataatttttctttttgcaaaatgatatttgtttggaatttaaattgagtgtcaaattttcaaagagtgtttctattattttatgaaagatgtattgtcactttgtaaaaaattataaaaacaaaaatattgtgcaaaactatataaaaatttttaaaaaattatttaatcaaatacctctaatatttaattagaagtgtaatattttaatatataatacagcaatatcatgataatatttttgataatttttttttttggagttactattttataatattttcttcatttttgttagatgtcacacattaaaatttagagacaaaaagtgagatcacaccacgagattagaattaattaaagtaacttattcacacgttctttgtaatattaataaaacaaaaatcacggaaaaagctcattgttattaaatattaaatagtgaaaatattatttcatgataaatattttcatcataatatattaatatttatttgtgattaaatcaaactttagttattacaattaattatggttgtataactaattagtatttttattctcaaataattgttgatattattatatatagtttttttttaatatattattaatgatgatgtaattatgataagatatattttctttttaatttcaaaatataaaattgtgtacgtagtcaacagaatttatatcatatgctatacgcctatacctaaaaaaaaagattaaatagaactaaatccatctaatttaatctaattacaaaaaaaaaaatagatatctaaatttatttagatt

SEQ ID NO: 117357 - DNA, 1525 bp, Cannabis sativa
  modified_base (1484)..(1499): a, c, t, g, unknown or other
atgcaacataaaatgcgatttctaatcttatattaattagtaaatttgattatgttgaaatgggtttatttagggcacaaaacccaacaataaaatcccaacacagttcgtagaggtaacaaccagtaccgtccaaacattccatacatgtcacccaaaggtctttcctttaaaaatcactctcttgaatggttgatgggccataggaaggtacgatggttcgcatgcattgtactatgacctaatgtggggggataaaaactgatgttgtaccaaaaaaagcattgtcgtcacctcagtggtctgacaagtacggaggtggccttccgtgacaccgtatgggagtaaaacttattttgagtctttccgctgcgtacatggacatactggaggagggccttcgcttttgtaagtctcttttgaacccaagagaaacacatttccttctgcacatgggaataagagacagcatgcacgactgatcttccacgtgcccctactttgtaatggatgtccctttcgagggatccctttacatgaactagggctgaagattaattcagcttcttttgttgggtttcgcgtatcacgtttacaaaaatctggacaacaggtataatccttaatctatatataggtataatttaggaaacctaaaaaaggctttaattgtatcattattctctcggaggaacaaaagttcttgctcatatgttgatctaaacacaagaacacaaatatagttatatcctattagtccactctaatccttgtgtgtggtggttgatctggaagatcaaggtctgagtttgacgcaccatctcttggatacaacttataaaaggattcaaggatacctaatttacttcaaaaggtaaatatatcctttcatattttattttaaatttaatatgtgtacatatggagatcttggggtgtggtacaatgataatccaaataaatgcttccaccacatacctaatttagtaccacaaaattaacactctcttacttactttacttaacttttattgtctctcgccaatctagcgagggagtgttggcccattttatgcatcaacagtcacactttgagtatcttgcttcaatttcattagatttttactcaaattatatatatgtggcccgtttctttgatgcaaatcagaccttaagatcattccaaagagttgcagcgatttcatcatagagaatactataagaaatttccttagacacaaaatttagaatccaaaaaataactatattattgatctgacctatttattatgaagaatgtaatcagatggaggtggtttaggaataaagccatcaagaaaattgagtatgttcttgatagatatagatatctgcattactctacttcaagaaatgtaattatcttgcccagttaataaaggttgagagactagaacattacctagattatctccatgatggagattgtgacagtcagtagtccnnnnnnnnnnnnnnnnaaataccgggtaagctgtgcaatccc

SEQ ID NO: 117358 - DNA, 5311 bp, Cannabis sativa
  modified_base (34)..(47): a, c, t, g, unknown or other
aagttcatgtttaggatgttaataacatacttgnnnnnnnnnnnnnntcctagtaaaataattccaacacgcgaggaatacctcgaggctctaggactaagagacaagaagcaaaccaagagaatcccaaaatctcaggacgaacaacctgggaatacaagggatgtcccaatggatatagcaaatcaaccaaatcctagtaatgcaaggaatcaagaacatcgacgaaaactttccattgattggctaaccaagggaatgaataaactaagatgccaaaatcatctcgcatgaatgaagaggcaaggcagcctcgaccatggaattacggatttcctcgtgataatgagagaaaccatggaaaccaaccaaggtcaagtggtcttccatcaagacatcctcaacatccttctcgcacaaataaagaaaatgtgcacacgtacttgagtagagaatgtgtgtctaatctctttcgaagaagaagaccaacacgagatgaagcaagctcaagcacacgacaattgcgatccctcgggcattgtaggtcaactagacaaacgcgagatgggagtagatcctgacattattatgctgaccagaaaagcataagtaactcacgtagttatcagttcgagaactactctaagacaagatctgtcagtaactattaacaaaggcatcgcgaacctaatttccacgagagattaaattaaaggcagcctgaccttcgccagcacctaaatcgaaatgtgcctaatttgtgtgataaccttaaccaaaatgcaaatcaacaaccagtggatcccatccaattacgaataattcaattagaggataaattgagaaaatatcaagatggagaacatggaaaattctcaagttgtgatttaaacgaagaaaccgagccattccatctagatatcttaaattcagaatttcctcagggatttaagaccccacatgtctcgcaatacgatgagaccacatatccagtcgctcatttaaataattttaatattattatgcgagcaagcaacgtttcaaataaattgtgttgcgttttattcccaactttcttaacaggagccgcaagcagttggtttgataaattaacccatcattccataatatcctgggaacagttatcgagggactttcaaaagtaatttcaggctgaaagagactgtcgacccgaagtgccatctttgaccaacataaagcaacaaccagggaaatctcttaaggcatacttgagtgcttcaatacgggtcaccttgtgaaagagatagtcagttgcttgaatgatagtattaaactaacaacacttcaaacaggaatcacaactgacttatctataataggaggtgagttatgggatgatctctagggtcgccttgtgaggaatattaacgagtttaatgaaagagcacaagtctttgtgcgtaaataggaagccaggactgaaatgaagttgttaaaaactggctcaggatgtaaacccagctcaagtaagaaacaatgagcacaatcacaacaaaattagacaatcttggtggatcaaatacaaaaagaaaggatgagtcaaaagaatcattaaaaaacaaaaaaagtaacaaaaaaaacatgagaagtatgtatccatttacttagtgtatactgagttgaatgaaactcacaaaactatcttcctcgccaatgaaaacagggttgcaatttgcaaactcgagccaatgaggcacgcgaggcacaagtgagattcaactaaataatgtcgattccacaaggatatagggcataccaccgaggaatgtcgacaattgaaagatgagatagaaaatttgatctagcgaggatactttaggcagtatgtgagaattcaaggaaatgagcctaaccagcctaacaacccgaataaactgagatcgcaacctcctcctgttgagagtgaggatatgttggtaatttctggaggtccgcacctcgtaagaaatagcaaaaatgccaaaaagaggtatataaatgaagtgaaaaatggacaatcagcaattgctctagaaccattgaaagagcgaagtcaaatgaaccgccaactatcttctttgaagaagatacaaaacatgtgcgatacccacatactgatcccttcgtgataacggtccagctcgccaataaaagggtgaaaagagtactacacataatgggagttcagtcaatatcctctacaaagacacattaaaaaagatgggattagaggatacaaagttgagaccatgcatggtaagcctatgcgattttacaggagatagtgttgtgagcttgggcatcattgagcttccgttaactatgggagatctgcctttatcagcgacacaatgcaataatttttggttgttgacatcccttccgtgtataatgtactaatgggtcgtacatctttgattgggctgggggcattgagttcgattaaacacttatccttgaaattccctacacagttaggagtgggagtggttagaggcaattaattattgactcgagaatgttaccgagtggaacttcagaataggagagtcaatcatcaattaatggtaattctaactgaagaaaatgagagagaagtagaagaattggatccgagaatccaaaatgaaagtaaccaactcaaaccaatcgaacagttggagaagttattttagatccaaacaatcccataaagtgtgtatacattgggaaaaatttggacgaagaacgaaaatagcaattaattatttttctaagggcaaaccaggatcagttcgcttagcgccactcagacatggtaggaaaaatccaaaagttatttgccatcatctaaatattaaccccaactatccagcaaaacgtcaaaagcgacaactattagattttgagagaccaggcgcactcaaaaaagaagttgacaaattgttaactaatgatttcatacgagaggccttctacccctcgtggatgtcaaatccagaccttgttccaaaaccaaatggcatctgtagaacttgtatagattttttagatctgaacaaggcatgtcccaaagattgctttccactactgaggattgactagttagtggatgcaacaacaggacatgagttgatgactttcatggatgcatactccagatataaccagattcaaatgcacgtccttgatcaagagcaaacgagctttgtaacaaacatgggactttactattataaagtcatgtcgtttaggttaaaaaatgctgaagcgacataccaacgtcttgtaaatggtatgtttgaaaaccagattggaaagaatatggaggtcctcattgactacatgttgataaagtcggtgaaaagtgaggatcacacaaaggacctcacagaatgttttgttatactccataagtatgacatgaagcttaaccttaaaaaatgttcttttggggtcttcttaggaaaatttttgggcttcatagtgaatgcgaggggaattgaagataacccagatcaaataaaggcctaaatcaagatgccttcaccaacaaagccaaaagaagttcaggctttaacaggaaggatggcagcactaaatagattcatttcgaagtcaactaataagagtgcctcccattttttaatgttttgcgaggcaataagaaaatcgaatggactgaagagtacgaggaagcatttaaggggataaagaggcatttgtcaacaccccaagttttggccaaaccaataattggagaaacattatacctttatcttactgtcttggagcctgccattagtgcagctttagtgtgagaagagggtaaacactagcaacctgtttactatgtcagttaaaggttactgggggcagagtcgagatactccacctcttgaaaaactttaactatgtttaattcatgcatctcgcaagttgtgaccatattttcaggcacatccaattaaagtcttaaaaaataaaccattgagacaagtcttatcaaaacctgatgcttcaggaagattgataaaatagacgattaaattgggacaatttgccataaccgatcactcgagactgtcaatcaaagggtaagctttggctgactttttaatagaaggaataaacttagaagaaggtttagatgttgagcgcgaagcagaaacatagaaactgtatgttgatggggcttcaaatgagaatggcttggggtaggagttataatgatgtcgccaaaaaacttaaaattccactacggactcagatttctgtttgatactttaaataaagaggtaaaatatgaggccttgttagtaggtttgagaatagctgaggcactaaaagtcaaaaacattacttgctatagttactcacaactaattataaaccaagtctttggagaatactaagtgaaaggcctaaaaatggctaaatatttaaagagaattcggaagaacttggaaaattttgattattttaaatttgaacaaattctaaaagaacaaaactctaatgcagatgcactagcaaaactatggctaagaatgtcttctagaagcacagatctcaattggatttggataagttgaatttagtaccggttgaggtcttagatgatccaagcatatgtgaagaggaagaaattgagatgatagaaactttgccaacatggatgaatccaattgtcaagtatctagtaagtagataacttcctatagacaaaactgaggcatgcacactcttatactcaataccacgttatacgatggttgaggggaaattgtatagagaggttattccatgcctctcttactatgtgtgttactagcagaagcaaatgaaataattaaagagatccatgaaggcttctgtggagatcatgcaagttggcagagcttatccaaaaagattatccatcaaggatattattggccaacaatcaataaagacacacatgaattcgttaagagatatgataaatgtcaaaggttttcacatataccttgtgtaccaccaaccaaattgagaatgatgacctcgccatatctatttgtaatatgcgaaattgatctgattagggccttaaccacaaggcgaggaggagctaagtatgcagttgtggcagttgacttcttcacaaaatggaaagaagccgaaccttttgtttccattacatgcaaaaagtttcttgattttgttatcaagaacattcatatgcaggtttggcatttgtaatgccctgacccacagggacgctgttggaattatatttatccaggatcttagatctatttgcaagtatgtt

SEQ ID NO: 117359 - DNA, 2744 bp, Cannabis sativa
atctataagtctcttctctcctttatattactaccaactcttacctatacaatgaaataatgaatggtcattcaagacaacaattatatgtttttacttaaatatatggcaagactatacggtagaatttaacaaaagttttttattggtaggaaattttttttaatttattattgattttaaatttattagaatgtaaggtatatatttttacaagacgattgcatttacatgtatatatatacaataaaaactccatactttctataataatatatttacttttaaaaataaaaaatattaatatttaaaaaaaattaaaagtttataatattttttaattatttttttttcaaataatctttttttatttaacataaaatttatgtaaattaataatgtattcactaaacctgtgaatataatttaaacataattgaagatttaatcacctaaacaatggataaacattattgtaaaaattcaaataaagttaagagataatgatggttaaactcctaatgtagttttattggtcaaagttaactatttatataaacactttgatggcataactaaaggtagtagattttgttgtagttagtggtctatctagatttttttttttaggaaaaagtctcaccatgatggaactcaaaaaaggtgggggcgagaatacattattgagtagcatctgctactaataagttctgaatataacttggggaacccgaccatcaaacagtacttgaggacattgtaagagcgactttagctaagatgtaggcaacaacattaagatagcgcggtgaaaaaaaaaatatcttaaaaactattacaaagattaccaatttcatctaagataagacccaaagaggaaactagaaaaattttgttcaccactttttgcacaacattcaagcaaccaaattcatagatgatattgtgatacccaaagcaatgacattggaccataactaggaaactaggctactttctcttatcttcactacaatatcactcatcttcacctcataatataataataattaaacttgttcaacaatatatataggattgttctgtaatatactgatttatctttatttgttatgatatttgagaaaaatttgtagtctaattttatatggtcgtcttaaaatagattttttgaatcttatttttcagcgtgttaatttttttttttaattttcaaacttttgaaaaatgtgctaaataactacaaataagtagaatttatttttttcaaatatcacaattaataaaaaaaaaatattttttagagattgtcttgtagaatttttttatgagctcggtctaaatatatatatttatttatatattttttttatttattttgttattatataaatttaatatattttaaagttagttgttattgtaataaaattaattagttattttatttaatttagataaaattataaaattaatacaataaaaaaataggggaaaatacagatttttaattgtagaaaaatctgtatttttctttttacattctcgacaattttaaaccgttgagaagttcacattagcaactaaccatcgcttattttacccattttgcgacattcgtataggcgacagttataaaaatcgacgatagtactttaaatgactgtttaaaacgtagaaaaaactatttttgtagtataatgtgatattttggttaattatactatatttataattaaatgtaataaatataaacataatattatctttgtgataataattatgtaattgtacacatattatagaggtaagggctagtatacttaaataagagaattgctaaaaagtaatactagtatctaatattatctttagtgtcatattactattacaataattaagtattaggtttgtataacttaaaaagaacttttaatatttaacaaatatcgttaactaattataaagtgccacttataaaattattaggcactgctaatatccaatagcaatacaccttaaataataataataataataataataatacctaaattttgacttattatcatcattaattattaataaatgtggcattaattcccttgggtacgtgggagagggggagggcaatttcatgtgtccacacatctaccaagcatatttatttattagatatttattatatgtgaatttattattattagaaaatgaaattaagtttgtggatgagacacaacactaacttcttccacacactaaggtgggcaaaaggggtcattgagtcaaacatgaacatatataactcaaaattagtacgagagtcagtaggggatttaaattcatcttaaatgacttactttcggtatatattaacgttagacttaataaacatgtcgggttcagattcaaatggctaacacaaaattaattcattattaacttatttaaagttaccttagtacattaacatgtcataaatagatcataaacgtgttattagttgacatgtttaaacaaaatatgcttataaataagcaggaccgactctatgttaatttgggccttaggtaaaaataaaaattgagacccagtaaaaaaataaagctattgggatttaaaatctcaacattttaattattaaattaatcaaattaatttaaaaatattattatttattttattactaactatatttcaatttttttttttttcgaaatagggccctgagcggtggggggcct

SEQ ID NO: 117360 - DNA, 1022 bp, Cannabis sativa
  modified_base (966)..(974): a, c, t, g, unknown or other
ggacttttattgcaattatccctaattattacgaccaaaatttttaatgcaatgtaagttgtattatttaatacataacaaatgattcgtattagcttatattataatatttacaaaggatcgggggtcaaccccaatttttgacccggacctggacccaacccgtagtcggtgttggggtcaaatttatgtgatatgtggttttgaaggatgaactagatatggacagttccaataatatattataactttacacaatctattaatacaagtcaatactgaatatatactgtattaaataatgctaatacaatacaatatgacataccaaacgagctctaaaagtttattaccttattatttttctctcttaagtaccaagacaagccaatataaagggtgtctaaacattttctgtatttttttttatattggggaggaagaattcgaacttggacctcctttttataaaaaaaagtgtggaaccagtaagttatgtttatgaccacttctctattttttgggattaacggtagatgataaatttgtttaaaaaatattccaagttttattctttttttttatttaagcgtttatatattacacaataccgggattcgaacccaagacatctaacacacacgcactctcctaagaccacttgagcagggccgaccctgaaacaaattgggtcacagaaaaaaaaaattattttgagcccttatgttagaaaaaatgtggtattttgcaaagtcaataacaaaatacacaattttataaggagaaaaaaaaattggactaggtgaatcttaatcacaggcttaacccgcctatgtgcaagtccgctaacttgaactgacctcgagtggttactccaagttttattcaaatcttgtaactttgtattattgctctttcaatcaaagttagagatttaaaaataaataaatgggtaaataccatttnnnnnnnnntgttttgcaaaagttatcaattagaccctgtgttttgttaaatgacaa

SEQ ID NO: 117361 - DNA, 1240 bp, Cannabis sativa
ataaaatattcatttatcagaatcaataatattattttatttccttaattagaaatattctaataatccaatgtatgaaaataccaggcctacgggtcgtactgaacatactctttaaaaatattggtacatcacgacatgatcacctatatttttctatggcacggtatgatacgacctattttttaaaaaacacaataaatataggtcaggttagcacaatacacataaccttacaacactctattttctcaaatatatattatataagaaaaacatttaagattattgacatatagaaaattaacatctatcatgatgatcaattgatgtaattgtaggcttgagaatttagataaaatctggttcacccttaatccccttaaagcaaatttccccccaaaagtaggagctctttttgaacttattaaatttaatattgtgatttatgtaaatataggacacatatttatggtatttttttttttgtttaagcatttatatattataatgcataacatgaattttgaacctaagacctcaaatacacgttcttatagccatttgaaagtagctcaagtgatttatctatgatattggtatgggctagtgtacgtcttttccccgtaggagcatctctattttgatattttcgcacgtgaaaaaattataattaatttttttaatgtctctatttcaatacaagagaagaaattatatttctttttatgaaaatatatattgaatcatttaagacctcctatttacatttttatgaaattctcaataatttttagtgttgaaaacatgttttgaaacaaatgtgttataaaaccgacttatttatatcattttctttttatatttttcacattataaattatttaaaatttattaaaaaaaaattaatttagatcttaaataactgcattgtttatcgtcttttacagatatatatataatttggattgtaatccacatatgagaaaaagctgaaaactgatacttttgaaacttgtttaattatataaatatatatatatatatatttatagatgcacgtaagagttattttaaagtctattttgaatatcataaaattattcataattttaccaaaaaaagaactttgttatttgttatattactacagtatatatatatactagataaatgttacgtacaatgtacgtatacttagttatatatttaattattttttacataatttgtattttag

SEQ ID NO: 117362 - DNA, 1597 bp, Cannabis sativa
ccagattttatcccactgctcaagagtcattggcctatttccattattcatcaaaaccaggccatgttagccaagcaagtgtggcgcattaacaataaccccaattccctccttacttctcttgtaaaagccaaatactacaagcataacactattcttgatgcctccccaggtcacaacccttccttctcctagtgaagtattctttggggtagagatttggctacaaagggtcttctctggaaggttggtgatggctctaccatttctactctttcttccccttggttgcctgacgcccaacacattgtctataagaatggttgtcagccctcggtgtccactttatcctttttcatcaactctgatggttcctgggacatcaccaaacttaacatttactttgattctgacaccgtcccttcccatgaatccacaccataaggacagtctcatttgggggtgccacccttcaggaattctcatggttaactcggcttatcatcttgcaaattcttcatccaacagttcctcacctttatcttctagccccaatccttttaaaaattggtggaaagtcgtttggtcctcctctattccccccaaagcttttcaccacctccttccctttaatcttaaatctctattcgcgaaaagccttgtcaacccccatttgttccatctgtaagtccaaagttgacagactctcattcccttctagaatgttccagagcaggtaagttatggaaatttacaaaattttatgagttcttcaagactaacagattttgtgatataaaaaagtttattttgcgaggttttgacaaatttcacaaagagaatcttcacttactattttccatcatttggactgtttgaaattctcgtaacaaatttctttttgcagaaaaggaacctgttttccaagatatagagccgcatgtcatctcttacttgcaagaatactcttaagctcaatactcccagatacatagtcatgatgtttctaccaatgatggtaccccagattcgacttcgtctattattgttcccaggctccatcctggaaaattcaaactttcagtggatgctgctgtccaactatctcacaatttgcatggatatggagcagttattgaagactacataggtcgggtcattgctggtttttcttctaaggaattttctcgtttaccaccgatttttgcagaggctaaagctttgcatagagctttacttcactgcgaagcagtcagattcccaattggtatgattgtttctgattgcctagttcttgtcaataaggttttaaagaaacaacgagattcctcggctctttctgataagatggtaacaaacaaccaaaggtgagctcagaaggccttgcagtagtcgagatcggtccaacaatactcgttaaatggcttctaaaaaggacaggatggattaggaacaatggctgatattgaagacctaataacacgcacttcatcttggcgtcctacaccgctcgctaaacattaattgtgccatgttgtaacgtccccgccttaagcctccattgggcccttacacccacggaatgaatggctcttat

SEQ ID NO: 117363 - DNA, 612 bp, Cannabis sativa
tgtatgtgttgtacagaagatatatatacatatcacaataattataatgaataataatgataataacaataataatatagtgtcagtaacacagcgtaacatatgcatcaccaatgagtcgactactggtgagaatcacatgggctcgattttacgttttgaaataacaactgataatatatatggaagatatattataataataataggggtccagtatactagtactactttttgctgtttcagggtgataagtttttaaattacagacacctatttattcatctatttaaggacattttacaatatattttgtttccaatagaaattataatctaatttctaatttttttttgtgtataatatattatagttataataatattatctacataatttttggaaaatttaaataacttacaatatcaaaatacatataacagttagctatagctatatacacgtttctctatatacacatgcagtcaactgttcttctttccctttttagtactaaattattcataattttttcaaaaatagtgacacgtatgcttggcgtttggttggaggtaatgaaatggaatggaatggaaaagaaacaattttcat

SEQ ID NO: 117364 - DNA, 4459 bp, Cannabis sativa
atattcaaccataaacatgaaaactacatgtaaacataaatgacttctaatgttttattgataacaaatcagattagattgaaatgggttttatttagggcataaaatctcaacatccctatcttgacatcaattcaaaccttattcatctcaacttatttcaacctgtatcgattcttcttaaactgacacaacttttaatttttctaatcatttacacgtaaccatcattataaagttaactgattcaacatatacgataaaggtaatactactcataccgagtacccacagctaagctgagaatatccatttcccaattcctcaactaacaataattgatcaaagatcataccttgatcctgaaattcccttcttacttcagtcgggatcttgataaccttctcaaacacatccagaaatgtacacaccataggtacattcttatttttactgacaatctcttggtatgaactaccatattagcttatagtgagtctcccgttgacaatgctgattcattagaatctaagattcttgtattcttttaccgttattatcaccaaagtttcaccttttcaattcgtactttaccatcactgtctcgtagtcaataatacccttatacttaaccatctacttttaaactcatattatattcacttatatatactagttattaacaacaacgtctctgttatctaataaaataaccaacattcatttgtcacttgataaagtaatcaattacccttttattgtctaataagacaaccgtattaattctacaacaggttcatagagtaataactttatcactctcaatgttactttattaagtaacccaatatttctggtcgtctaataaagtaacccataatatatatatatattttacgatctctacattcgctagagaaattaatctcgcttataggagataatcaattctttaataggtaacaacatatcattcccttaacaatataatacgtggtctaagcccctaccataaaataaatttaaacacaatcttcctctctaggaaaacacctttcactatcaaacattcagtaagcttatcagctgtcttattttcgttttaacataaacctcaataatctaatacttctaactgagacccacatatagaaggtcatctaaattcctcctttcaatcatcggggttataacccctacctcactgaacatagagtggaggcctccaagaatcttcccaaatgttattatcattaataactagtactcagtcaatctcattaatatatatcttaatcacttgggtgtatttcctttattcacatgttgtgtgctcctctatttttctgagtgagtcttacctttcttaaaatttctatggctactccatatacaagattcaccatccattagagcttcaaaagtattctccatcatcatcataccataactgtcaatgtagatagtcttctttatcttaacaatattagtattcttgtcatcatctccttataaatcattaattgagttattccttaattaacatggttcaattcatgcttcttgggatctattctctactatatgaacatattttctgtaacacaaaatagcacaattcacttaatcataatcttcaattcacctcaaatcccggatagacacaatcatacttatctgttgttctaccttcaggaattttaaaccacctttagggaaagaagattacattctttaaaccacttgagcaatcaccctcaatggtttctcatattccatgacccacatgacataccaaatactcatcttactttcaaaccagcttactgttttataaatttatttaagttgtttgttttgtcaactagtttattaaataacaacacacatcacttcatgatcatggtagcgataaattactgtctctcccaacattcctaaactgtcaaatttttccatcgaattgcacacattttcttattggattctatactcaatactttaccagtcattgctttgcactgttaataattctcaaataacattaatactaataaatattcctctacatatcaatcagtcatatagctatactggattatctcaattaatacatagtcagagcaacctacaattaacttaactcaggcttattctatatacatattgctaacgatatcagataataattaattatataatgggtaaataatacttactatctatgagtcgagcttgtcttcaccataaatgtacatatctagctagtcttcaggattttttcaaccttggctgccctgataccatattgtaacgtcctaatccttagagacgccatgtgtgtgcgtttataaactagtttataataataaactagtagtttagataaattatgattaataaaaactttaccaactaatttaaattataaaatcatgacatagtctctttttacgattacggatcccctatttaaaatattacaagacacgctattattgtattattataaaatatatttaaaagttcagaacatttaaaatacagttcttgacaactcagcaccacttgctggataagctgatatgtacatttgctggagaaaatttttaactcatggttgtctaaataactctacctattacctgcaccacgtagcacccgtgagtcacaaggactcagtaagaaagtaataacaacaatcatataatctattattcaaatattatcatttatactcagccaatcaggatcaaatgattacacattacttataggataaaattcaaatcactactaacatcagtcacaaacaaacatcaatattcgacaataaaaaattattgtgctaataatagaagtcatattcattttttgacaaagtgttcagaatcgatgttcgtacatttctcctatgcataagtccaagtcaatacatatattcattcaaaattatctcagtataaacatttaatgatataccaatacccatttaataatatatattatatctgttacctcataaagtaacaatttgtggttgcctaatcagacaaccctgatgctctaaccctgcatccacatgtctcattgcctaatcaggcaactctgatgcccgaactcgacatctatatatctctctcaatgtctaatcagacaatcgacaagtaggttaccaaataattatgcccgtttatagtcatgccttttgatacctaaccttttggtatctaaatatcattgcctaataagaaaagctttttatcattgtctaatcagacaatgtttacatcgttgcctaataacataatctttttcatcattgtctaatcagataatctttacatcgttgcctaataagataatctttttatcattgtctaatcagacaatctttacatcgttgcctaataagacaacattttcattacataacggtaataaccgtgttttaatctcaatatccatcaatcctcaacaataataattacattataacataacatgttatgtagtacaatatactttttttttttttatatatttactctgaattcatgcatgtcggccaattcaagtagagaaatattcttgatgatctcggcctatgtcgcaataatggtaaactcataagtgtctatctcaaaacattgcttaatgttcgcattagataacccatttctaccaaactccgtggcataaacaccctaaaataaaatttatattttgtctctaaaacatataccatattgtaaagctcatcaatagcttcgaaacggtatatagaacgtctaaaatagacactcgagttatggccaaattataaattttgatcatcctgaaaaaactaaaaacaacagacggttttagtctgctccaaaaacggtttaccatttttcccaagaataaataactcaattttaaacttttcaaaaccccaccaagacctaatcaattgattcctaacttcacagaatacatatatattatccatacaacaattttaacatagtaaaaataaaaaacgagtccttaaacgaaaaacactaataaagctcgagctttgagctttaaagctcaaactcgatttctacttcaaaactacctcaaattcagcaagtaaatactgaaatcaatcctatattattgtagaaataaaaccccgagatcacagattccacaaccattctaaaacacaaagtcaacatatagaacttaacttttcaacttaaaaagagaatcgattcttaccttaagaatttccctcttcattgattcactacccacctactaacatggctaaaaacactatgtttttggctgaaaaattgaaaaaatatggatggtggaggtgcaggttcttgtcgcacaaataggtttcatttttagttttacatctttaaaccttaacttatatatatagggatatgattttgtcccgttattgtactttcacgga

SEQ ID NO: 117365 - DNA, 1624 bp, Cannabis sativa
agaaatgggggagatatggtggggcggaggtggttgcggcgagggttttgggtggttctttctctctggtttggctttgctaagtgaagtgggattgaggaagaagacgaagttgtatataccttggacgaccctatggcgtcggttcttttataggaaccgacggcatagggtacacgtgtaaaataaaggtgtaccctatgtcgtcggttcttatagaggaaccgacgccatagggtaatttcataaaactcaaattattttatttcccaaccgactctaaatggtataatgcaattctatacctacagtttttatgaaaaaactgcctctaaatgtcaatttttaataaccgggaatttttacaccctttagcttccctttttatacaatgggttgaaaaaagggaagctaaaaacccattttgtagtagtgtgagaccttgtggcatgggtcttgttgttaggacttagtaggaattccctcctataagtccctcttggtggtcactcccttgcaacatatactctaagtattgcctattaagtggaacaagtggcattagatagggaccatgagggagagtgagggagaaaaggagcttgaggagagatagagagagaaagagagtagggagaggcaagtggaccggggagctcctttggcgcgcaaggagtgagtggagcggggagctcctttggtgcgcaaggagtgagcggagcggggagctctctttggggcgtgcaaggagtggtgagagtggggagctttcttggtgcgtgtggggaatgatgggagtggggagctccaactccattaagatgcacgcagatggtggagcgacaacggggagcttaactcgagccttaactcctcctcttgttggcttacccatttacgtgggtcaacttctgtttccttgtcaataggcttttaagcgtattttgtgaattttcgtataacaccaatgactctaaacattacacttagtaatttttgggggtccagtaacatatttctaaaaataaataggtgcgacataaatatcttatcttttgagtttcatacacttatgtatcacatttattattttctcaaaggattatttttttttacggattaaatacaatatgttatgtttttgttatagcttttaaccttaatttctttaaatcttactacatctaactaaactaacatgtgtcaattgattaattgtaaactttcaataaaattttcattaaataatttcaaaattgaaaaaaaaaaactaaatgataattatttaataataaaaaactaaatacataaaattataattatgtttctattagtatttttctcaatatttaatttttttatttttatttattttaaaattatttaatgattttttaaaagaaaaatgagttgaccgctaatatatcgacatgtgacattttacttaatcaaatcaacacttcataaaatttatagtaatgactccaacaaaaatttaacatatcgtatttaatccgtcaaaaatatatatataatatacatgttgggttttataccctaaataaaactcatttcatataatcagatttactaattaataaaatatcagaaattattttatgtt

SEQ ID NO: 117366 - DNA, 966 bp, Cannabis sativa
tagatttattagttgtacatctaagattatgttagatgcatctgttaaatatgatttcatctatctgttgccaagtcaattttagttcgttttatttgtagtttaactttttgctagcgtggctaaacaagttcttttgttggtcatgtcagttattttaaagtgttgagtataaaaagttgagctagctttttctaactaacaccttcatctttgatagaatcatctcgagattcttgctctgctagggcaaaatactttttaatgtattctgtgtgtttgcaggttgtaatttattagatcttcaaggcttgaagaaggaatcttaatctgtaatgtctgaagtaagtttagacttatctgctaaagggagttcagctacttggaagcaaaatgatattgtcttctcagatctaaggggacttagatctttgttcttgatagtaaccaagtatattggtaactgttgtatgaaattatttcaatttacattgtttgatttgtgagtcataactggagaatgtatttggatgatttcatagtgaaggttatttacccggttcttggggacccaagcaatacttggttggaatgagtttccaatgtcaggagaaacttgtaatttctatgttcattgatttgcatttacagtctttataattgtgttgaaaacttaaaattgattaattaactttcagataatcttgaactttttggtttttgttagccctgttcccggataggttctacacggaagaagcaaaagggtgccacgtcagatcatatgggaattcccaagttacttacattttattcatattttattcattttaaaaatgttttatgaatattcttatgaataatttaatgaagttttatgaaacttaatgtgctatataagatattcagcctatcttaatgtttgaatatttctaaatatatctagcactataaaaggaatttatg

SEQ ID NO: 117367 - DNA, 553 bp, Cannabis sativa
gcggccactcctccttcggcctttcccggccatgattcatcggagcaatatcccggagacagcagcttcgacgcaaatgtcgtcatggtcctctcagttctcctctgcgcattaatctgttcactcggactaaactccataattcgctgcgcattaaggtgctccagcttcgtggcctcgtccgattctagatcgagtcctgtttcggctcaattggccaccaacaccggagttaagaaaaaggccttgaagactttcccaaccgtgagctactcttcggatctgaatctcccaggacttgatactgagtgtgccatctgcttatcggacttcgccactggcgagcgtgttcgtcttctacctaaatgcaaccatggatttcatatcaaatgcatcgataaatggctcaattctcactcttcttgccctaaatgtcgacacaatcttctcgagacttgccagaagatcgtaggcgtcgttgaaaacccacaagcgaacccttcggaatcgcttccgtcaccgccaccggcgggtcaagaagtagtcattaggg

SEQ ID NO: 117368 - DNA, 2433 bp, Cannabis sativa
aaaaatatttatgtttatattgattgtcataatttaattagtaatcaaactaattagtttttagcagaaaaatagattttcacttcctttaaaattataacttctaagcattaaatgtgaaacaatttaatgtaaatacataaaattaaataatattattgttaataaaatgtagaaacaaacaataataatttctaacaataaaaaatacgtaatactaaagatgaaagaaattatttaaaaaagcaaaaattataagcatatattgtattgagaattaaaatcaaaataaatacttaattatacactagatttcatatcgcccaccttaataataaggaaacttagaaatctataagaaaattaactataaaaagttgcaaactaacactgagcgcttagagcattttcttagaattgttctttctgaaactgtattgaattctaaaatcctaagcttttatttataggaaggtaaaaagactaatacataattaaaatttactaataattgcatggggtgaaaatgtaattgtccaaaagtaaattcagaatgccacgtgtcaagctcagattggaggcctttaatgagtcactgccacgtgttgcatggatgaaattgtatatggtgcaacttggggacacaaagagggagagcctcagttgcggagttcgcgtgtcgatgaaacgagtggcccatgtgggccggttgggtctcgcgcacatgggaggaaggggggataaccccctactgctgcctatgcgaacgaaggggacagtgtttcgtggcgttcttgtctcttagaggaagaatttgggccctttttaggccggctctttttggctgttcggctcatgtatttgggctacttttttatcatattttctttctttttcctttcttttaataaatgctatttttctcaatcaaacacaaataaaattaattctaaacaaaatatttttaacataaaatatatcaaattaatttcactgaaaatatatatttgaagtctaattaacttttcagaagaataatgtgttttcttatcttttttttttcaattattccataaatactagttattatttataaacaaagataaaattaaatctaaatagaatattttaaacatacaaataataactttaatttcatgaaaatattatttaaaatttaattaattttgtatttttacactataaaatatataatattttaatatttaatagatagcaactttgtggtgaaatgaattgcttgcttgttaagctctcctctctttcttcatatagtcaaacacttctaaggtttaggttttccttatttaaataaaatcttattaagttaattaagataaaaaaaaagacaaattgggaaaaaaaaaattaagagcttggctgtgtgccacatctagtaggcccaaatcaatttttgccatctagaaaatcttgcttaaaaataaaattttcttttaccagtttatttatttattcaatttaaattattcagataataattttaatttaatatttataataatttttaaataaaataaatttattaattagatgacaaaatatcattattaacaaattaaacataatctctcttttcttctcaatttaatacagtattagcgtaaattctcaaatatgacatagtctacttatgaatttttaattgattaaccaaatcaatttattaagttctatcagattatattatcccagattttgtggggtctatgggcctatataattaagctcccaataaattgatctaaaatttaccatgtaaatttcttaacttattagtttctcatgactccactatagattcaaaattacactattgattatatagaacactttatgtctctaatatggatatgtataaattatctattgttacaattaaaacaatcattgatcttctatagattatatacatcgagtagagataaaattattgttttactcttcaatgtaatttatctttaaacacttaatttcttgtaaatgatatttcaatgaactaatataattacaaaaatgagtacttcaacatttaatctcgtttagccaagctcaaaagaagtcattgcttcacttctaaataattatagaagttatagatgtccatatatatgattacactcccactcaattgaactatcgagttctcaagatgtaagtattgttatattttataatataataagtgtagattaaaatgtagtaatatatattattatgtgaataatatatattaagtgtttggtaaataaattgtgtaatatataatttatttaacctaaagttataacctacattttgtaatatgaagaggagttacaagattaattatttttgtgaataaaccctaacccttatgtttattcaggtcctcttacgataattttctcagat

SEQ ID NO: 117369 - DNA, 2014 bp, Cannabis sativa
  modified_base (406)..(410): a, c, t, g, unknown or other
  modified_base (1987)..(1988): a, c, t, g, unknown or other
gtggaagagtaaacgaaggtggtttgtgatagtgggcattgtttttcttccttttctttcttcattaccaaatacccaaaaagggttttagtctgcgtatcgattggtgtggcgggagaagacaaagtccaagttttaaggaatggtataagaaaaatttgttgatggagcgtagcaaaagctggaatagctcagctggttagagcgtgtggctgttaaccacaaggtcggaggttcgaaccctccttctagcggttttattttgtaagttggaccttttagcccaaaatattacacatataattaggggtgtttgcggtgcaagttgtaatatttttacgggtaattaccattttacatcctgtgttttgtaaaagttattgattggactctttattttgttaannnnnaaaatagaccatgtatttttcaaaatactaaaaataagatcatgagcttaattttcgacaattttttttcatacaaccaacttgaagacaattcctaacacgaacaaatacagaaaatataaataatttctcatagcacatttagatcggattattattaaattttattttggcaaaaaatcaattcagtgtcctatttgtactattttgaaaaatacattgttcattttgtcatttaacaaaacagagggtctaattgataatttttacaaaacacatgaccataagatctgtatatgcaattttgtaatttctcaaattacaactggagcataagatcttaaatccgtaaaaaccatactgcgaaaatgtggtgcactgttttaaacggtttacattatcactattacaaaacattataattaaatttaaaatcaatctaatagcattttaataatataaaaattattaaaattttaatatcataacatatatatactagtcatcaagtcattataaataaatatatacaagtcatcaagtcataaaattttaatatcataacatatatactagtgataagtagatttggacaaaagaaccaaatggtcgattttctacgaaatctgtctatcttactcaggccttggcacgagcgcctcctactaatgttgctctcgctctttggaatttcggaatcttagagcgtcacaaagtaccgctcttattagaagggtgcatattgaggatgtgtcatgccctatttatggttagtgagagaaaacaatggaacatctttttctctactgtaactttgattttcacctttggaggttctccccttggggagtgatgatagtgttggattatggggtccaagtataggattgggtcaaattcataataattctatatgtaacattaagcattgtattgactctgtttctatatgttacgcagattttggttcttgtatgtttccttcgccggtgatggttgcgcctccagtttggttcccctgccggacgattgggtcaagatcaactatgaggttaaagtcaacagtgactcaatgtgtgtagtggctttggctatagaccacaaggagtcagttttgtgggtggctagcaacatcctcaacttctctgaccctcttattggagaagttgtggcctgtttgttaggcttcgaatcaacgatcctttggaagcatttgtttgtgataatagagagtgattttgagacggtgatcaacacgatgaaggagactactttcatttgggatattggtaactaagtgcttcaatgtaaaattctctcaaaccttttaactagttgtaattttgtgtttatttctagactgcagtttcgcaacccataatgtgactaagtggacatttgcttgtaatgtaactagtatggtcgatccgtcctccataccagataacttattacgtaatgaccatgaggtctaactttgttaagctttaatataattacgtaatttattaaaaaaaaataaataaattatctttaaaaaataatgtaatgtccatactgttaggttttatgccctnnataaaactctttacaatctgattagt

SEQ ID NO: 117370 - DNA, 1567 bp, Cannabis sativa
tccaatgacccgggataaaggccgcttgaaaaggcgatatcaccctgtccattatccctttcagcctttgagaaaggattcgagagataattttgtacacaaagttgcataggctaattggtctgaacagttccaccttctctgcattcgagactttcgggatcaagcaaatataattgaaatttaaatcctgatccaagagagctgatcgaaagaaattctgcacacattcgatcacattagctcctactgtatcccaacagcttcgaaagaaagtacctgacatcccgtccgggcccggggctttaagcggatgcatttgaaagacatgattggatatctcttcacccgaaggaatatcgcacaggagcttgttttcctcctctgttattgacggtgtaatcagcccctcaaggtcttcaggtaaacagggattagaagatttaaataagtctccaaagaaatcattaagtacagctcccttctccctttccttttctcttcttctgttctccttatcataaagtgcccagatatggttccgtttccgtctcaccatagtcgaagcgtgaaaaaatttactattccgatcgccatacttcaaccataattctctggatctttgtttccacaccatttcatttcgggtccattcttcagagattttcttttttatgagttgttcttcattcagatactgatcaaagtcatcttgagattgaatccaagccaacctattctccaaaagcttcaaatttgcttcattgtctccgaaagatttcttatgccacatctggagtgcacctttagtagcctttagttgttgaaccagagagttccttccattacgcttctcactctgcttccacgattccacaatcacttctttacaggaactctctctcagccaggcctcgtaaaaacggaacacccgtgaccctcgccccttgttcatctccgtatcaagaagtatagggccatgatcagaggccacaataggtaagttaaggaccccagcctttgggcataccgtaagccattccgtatcaactataactctatcaattctttcccgaactaagccaccattgaacctcttattttgccaagtatacttgcaacctttgaatcccaagtctactccacccgtatagtcgaggaatgattgtagaatttccccatccttctctgagaatcttctccctccaattttgtcttctctgttcactatcacatttagatcacctaccactgcccatggttcttcctccttcgacacataactagtgagttcttcccaaaaccatgccttctcttcggaatagggggggccgtacaccgcaaacaaagtccaaaacctttgacattgaggctcccaaacccgacattcaaaagctgttctgtgaattctcaaaaccttcacattggcatccaatttccatagcaaacaaaatcccccagccgttccttccgagggaataaattccccaaaatcaaaattcaactccttacgaacaaaatccatctgatcccgcccaattttagtttccatcaaaaaaatacaatc

SEQ ID NO: 117371 - DNA, 1621 bp, Cannabis sativa
  modified_base (27)..(32): a, c, t, g, unknown or other
gttaaaccaagaaatgccgttagatannnnnntttaatatataaagatatattggtaagtttaggagggttaacctgaccaactcatcggacgggttacttttttttttctttaataaaatgtagtataaactgagcgacgtacatcacaataaaaattattgtaaatattatcctatatttagattctgctcaaatatttaaacaagttgtgatgcaacatgtgacgttataaagaacggtgccacgtagcaaatatatctggtttatgataatcgcctgtgtaatgaccgcttaattttagtttgagaattagtagataattaacgtagcaaatatatctggtttatgataatcgcctgtgtaatgaccacttaattttagtttgagaattagtagataattagggtctaatttcactagtgaacttttaattatttttttataatttcagagatatatttgaattctaggtgtgctatttatattatatataaattttacattttttatatttttatgatcggtaacagtggaacgcgacgtattgtctatagggttaccttagtttgagttagcatgtttagaatagcaagccaatttagttagacattgagaatgtcaagagcagtcggggttatggtttcggactattttacccctatgtcattttaccatttatttatgtgtgtgggggtattttagtcatttttgtatttgtgaattaggtggccctttctctttgtggcagcttggcactaatcttttagttgtaaataactaagaattatctaagtgattggaaaaattagaagaaaaaggaaataaaattaaaaattaaaaaattagagttttggcttcttctctttctcttgttcaatttaggtagaaaccatggaaaaaattcagtttcttttcttcaaatcaagaggttttatcaagcaattaagaagtataatattaaggtaagccatagccctaattctcctttgatttttgcaggatttgattagtttaaacatgcaattattgatgtaattgttgtgtaggttggatgaactttagtatagctttctgaggttattttgagattgtttatgcttgtttgaagtgaatttgaggtttttttgtgatgttgaccaactcaaacttggttcaacaatggtgattttggtatttttgtgttttttgagattctattgcatgaaaatggtttattatggcatgtataagtgttttggagtttattggaagttttggggtagttttggttcgatttgggggtcttttgtttttctctagtgaaaaacgacagactgtttctaccatttttcctagtgtaggacccaaaaaaatagcctaccgtttttcaaaaatggcatgccattttttaggcaagttccctatttcgtagtttttcttgtatttcctcaatgcttatgactttgtcttgctagatatcgataggaaaatatttagttttgagtttgaagttcccagaaaatgatttagcgtgtcacttatcagttttacgaatattgtgacttaagggcctataaactgtcgagcagcaaattcactcaggttgaccggcacacctgaattcgaaatcgaggtaagat

SEQ ID NO: 117372 - DNA, 2659 bp, Cannabis sativa
  modified_base (2588)..(2603): a, c, t, g, unknown or other
ggtaaaataatttccaacacaagaaccctaatccatagcccttgacatgagaaattatgtcccaactttttgtatgaaggggctgttggttttgtggtactaaatcaggtatgcagtagaaagcaatttctaattaccattgtaccacatccttagattcaccacatgtatatacatgaaatcggcaataaatagatgaaaggaataatttacctcttgaagaaaattagggtatccttatttcttttcataagttgtatctttgggatggtgatgaagaactcacagcgtgacctttcgaaccttctaccacacacaatgattagtgtgggctaatgagataaattgtatattgagttcttattttttatctcaacacatgagcaaaaaatctgagagtgatgatgatggaaaaaggtttaatctgattaaccctttttaggcttccttaagacttataggtaaatagttttaggtttatactatatataaaataaaaaccattaaagattttatttgaaataaatatttgaattgaaaataataatatttgattatttgaatgaatatttataattaaatcagtgatagatatttatttcttataatcgattgagagaatctctcaaccacttaagagaatatctcaactacttggagagaatctctcaactaaggaatatctcaaccactataaatatttgtaactacttttcaaattaaaataaatatttatcttttaagttaattaattaatccaaaaacaaattcagtaggggaaaaccctatccatagcatatgtcaagtctagtacacaacattgcatacatcaagctcccaactgctgatgcataaggatactttctcatgtcctccatctcttgaggagtctgtggacattgatccttacacagagaaattccatgtctgtacggaaactgtcctttcttggaattctccattgggaatatttctagcaccttatctatataagttgcctgagatagtgctaaacttctcctctttctatctctatagattttgatgcctagaacatagctttcttcttctaaatccttcattttgaattttttgactaaccacttctttatgtctgataacctttctacattattttcaataggtagaatattatcaacataagaactaggaataccactatattacctttaaagtatttgtatacacaaacttcatcttcattttttttaaaaccatatactttaagggtaatattccaagaactaaaggcttgcttcaatccatatatggatttaagcaatttcccgtccttattccatataaataacttcatcgagattgtcattcagaaaagcagtcttaaagaccagttcatgccgttcatttcagacttgatcagtaggttcacacttattaacttacctatgaagggtgatcaactaacttgggataaccaccgtgatggtgcgaaccacatttagtcagcccttgatgtagctctaatgaatggggattggctcggcctcttcccgaaggtagtggttaagtcccttcatacctgtaattcggaccatttccctctctgcattagtactacaaaccatgattctagaccgactaggtcttttcgttttgaggcttggtggactagagacccccgaagctcgctaatcgtggaggatgcctgaggctctgtgtctcacggctgggccccggccagggttttcaagaaagtggggccactggccttgcactttgtaaatggcagaaggtccaattcgggaaactcgatactcgtattgctaatctggaacgccatctaaaggagatccaggactcacctacgggattgaaggatggaaagaggaggttgagagtaggaaaactctcaatgaagcgcttaggcaaagggccatttactggcagcaaagagcccgtatctcttggattagagagggagacaagtgctccaaatttttcttcactacggctaccatcagaaatagacgtaatgcagtggagagtataatgaataaggacggggtgtggattagtaacagaggagacattggcaaggaattctggttttttggggagtattttcaccaatactgttaaggggccactggaacgtctggactatcttataggagatcacctctcggcaattgatcaaaatgaccgcatgataatcccagattatgaggaaattctccaaactttattctccatggggagttttaaggctcctgggcccgatggtatgtcggccttattctataatcactattggagctcggtaggtgaagatttctgtgaagcagttcgtgatttcttcgtttcgggtgtaatgcataagggcattaatgtgactaacttaatactcatccccaaggtgcccaatccgaagaaagtgactcagtttaggctaatctccctttgcaatgtggtttatttggtgatatctaagatcattgccaacagaataagaccgattctcccgagagtgatctgtcccactcaggcggaatttgtcctggggaggagtattaatgataatgatgttcttgttggaaattattttnnnnnnnnnnnnnnnnactaacaagtatgttgaattaacaacctaatatgaattttaaaacaatgaaaataa

SEQ ID NO: 117373 - DNA, 2145 bp, Cannabis sativa
atctcaagcatccaatgacgtctaataagaaattaataagaaaatattaagtgtttgtcgacatctaactccgagccatgatatcatctctccatacatatctccaaagtattcccctatgtcattaacctcaaggtctattttttcacctttatccattctttggcatacacacttcatccgtgtaggacctccatggttgggaggttgcaaacaatgacctaagttctcatctttagagcaatcatgtgtcggcacatcatctgccatatatgcatacaatggtagttacacatttcaatcacataaaatattatccaaattctattgaaatttcggtagcataacaactataaatcgaatgttcctgaaaaaaattaaccataaaatcaaaacatataacaatccacaacaataaaaattaaattccacccatgcgaccgcaatatatgtattcgcatgcagaacttacttcactacgaatgaatatttaagatattcaaacttctctaccatgattattaataattaattaaaaggtagaaatattatacctctatctcaacacttggaaaaaatcgtattctcccttcaatttagatccttgatgtttaaccacaaaacctacaaagaaatacaattaaacaaaatgttaaataataacattggccatgaatagataacatgattgcattttaagcacaaagcaactaactgtatataatgggaccatttagatgaaaaataaaagagatatataattcactttgtgaaccatggtacaataatcaattatagaaattttgcatgatttgaaaaatgaattttcatcatgtgagtgtaaataacaataaaagtagaatatagtaaagcacagccataaataaacattcaccagttaatatgattgaatagaacatagtctagaatcaacgaacaaaatcgacatttcttttctttttttccattagtttttgagtttaatagtggaaccctgacatatggaagtgtaatacactaaggagcttaggaacaacacaacatgtgtacaagtactacataaattctataacatataaaagaaaaatgaatatgaaggctcttaggcctagactaatctagatatcaagatatgctaatgttatggtgttgattcactagaaagtaatttcattttcaactttgatttattgcaatgtacaaagtgagggtccccttatacggctggaaacacaatggtctatttttgggccaatggaatatgccattattcatcaatttttgcaacaaaattctaatggggtaaataaatgtgcagagtggggacataattatctagttatgaatatcagaatttacatacgtgatagctaaaaaaaattatcattttataatcaattcaatctatatattatacatggtcatccacttaggaaagagattatttatatcgatcatgtatattcatgaaccttaagcaaaatttccaatacacacaaaatatacattgactaaatcagaagctgaatactactcttaaacatttaaaattttatcactcccaataccattttaatttagaaaacaaaaaaacttacattggtttgaatacacagtcaatcttttcgaagattttccactgacagacatatataatacttcttcaattctttttttcagtaaaagacacaaacataaacaaaaataaaatcagtagccgccgagataaataaacaatcaagtaataatgtcataagaaaacgaaaagaagattctcttttctgaaagcttcaaaccaaaaaaataaaaacaaaacctttaatacttaaaaataactaatagtcaacacttaaaaaatactaaaagaaatactctgtttacagttataattcaaagggtgtggaatttttttcaagaaaaatgcagaggcaaaaatgtgaaagtaattaaatctaaaaatggtgagcacatccataagttgttagtttaaaaaaataatctaatcttatatacaatctccaaacacactttatctgagttttatacttctttctgactcataaatttcatggtcgtttccaccctgcgtaaaataaaacatagcataatttatgcatgaatcagtgtaattgatctactgacaga

SEQ ID NO: 117374 - DNA, 2307 bp, Cannabis sativa
gacaaaatctgtggaagattggtagaaaagattatctcatggatttgttcgtaattgaaaagatttgcaagtgatgttctagagaaaattcatagctgcaaaggattatgatatagaagtaagctcactgacaaacatcaaaaaataaccaagagaaagccttaagaagtatatacagagaatgatggatgcaactacaaagactaaggttaatgataatatgaaactagtagccttaacttaacctcgggaatatctaccagatcctttctatggggagagtcacaaagaaaaaggtctaacactctgttcaatttcttggctagggcccaagttttcataaacttagaagaactgtatgtccatgcttatggagtaattccgacaccatccaccaaaataagtagtgcaactcaaaatccccaactatctgctccaactattgtcccttcgggaagtacgcttacaactctaacagtgtacgaacctggtgcctttaaacaagcagctgcgcaggctaaggctgaacatcgggctggtttgtgtagttttgggttcaaaaaattttacccgaacctggtctgtgaaatgcttaggttcacaggtcacgggtttgcgttgaccgggtcaatagattgaccaggtcaactcggtcaactttttttttttttttttctaaaaaaactcaaattctatatggttttttctatatattaaattaagcatataagttataacaccataatttatatttatttgattaaaataataataaaaaagcattaatttcatgtctaaaatacaagtctatctaaaaagtttcaaattatattatataatatattatatactgttatttttaatatattatacatgtaataaaaataaaaggattagattttagggtttttatatttttaatatattatatatgtaataaaaataaaaaaaaataaaaaaaattaattttggccgggttggccgacgggttcaggtccaacccaaaactcgatgactattaaaagacaacccgcaaacctgctcgggttaaacccgacccacccgaatagaatggttttttttttttattttacgggtttaccgagtctggtctgggcgggttgactgggtctggtttgggcgggttggccatgtccaggtcaaactcggtccaaatatttagtcctagcacagatgagtttctccagttttggagtggcacagactagatatagtgtcaatgagtcaataaatggaagtttcagaatcgaacattagtcattcccagaataaaagaagttctaaggctccaaatcaaaatgaagctctgaagaaggaaaaagtcttgaatcaaggtactctaagtatactagcctagttgatactcaataaaatgtttacaaagtcacttagaacatggtccattataaaaagcacccgcccatgttcaaaggcagaagacataagagggatcaaaataaaagatatgaatatcacggtgatattgggcataccacaaatgaatgcgagtacttgaaagatgaaattgagggattagttagaaacggtcatctatgtaattgggtttgaatacctatcatatatcacagacaaggagtagcacacaaacatctctttattcctggatagcaaggagtcgtaaatgctcctcaaggagtaggttatcctcaagctccaggaatacaagctcaaaaagtaacatctttgattgctacactaagctccaagtttgccttaaaagatcttgaggtaatgaactttttccttggtattcaagctatttatacattagatggcattgttctctctcaacaaaagtatattcaagatatactatgtaaagctaaaatgcaaggagtgaaaactcaaacctctcctatgaacagtgggttaaggttgtcttactatgggagtgatccggtggaagatgctacaacctacatgtctatagttggtgctttgcgatatgcaactataaccagacctgacataggtttcagtgtcaataaagtatgtcagtttatgcatcaacccttacaatctcatcttgtagctgtcaaaaggatctcaaggtacttagtaggtacacttgattatggtttgcatctcaagtgtccttcatctctgcaacttgaagccttttgtgatgctattatagtgacatttctctcacctagaaactcgagaccagactcctatttaaaggacacgtgtattcagattttcaatgaaggctgaaatgtcaatgagagacttctcgaagtttagacctcgcccaggataaaa

SEQ ID NO: 117375 - DNA, 918 bp, Cannabis sativa
  modified_base (877)..(883): a, c, t, g, unknown or other
ttgaagaagaaggagaacaaagtaaacaatgacttgaggttatcggggaagttgtttgagaagtcgcgttcaatcatctccaatactgatattattttcaattataaatactgagaaaatgattgattataaataaagcccacttgatccccgcattatccgtttggccccatgcccacggcttaaattttctcaaaactataaatattaaatcataataacatacactaatcaagccaccttccatttataaagtaagatatattacattattacatttatatactttcatatattaaataaaaatattaatatacaaaattatatataatatacactacacatagtaaaacatattctaccacaaatagttatagtttagttaatcaaaatgtataacatattatacaatgtcatgagttcgaatctccaagaaaaaacacacacctaatgataattacctaacaaatcgaccaaaactaaacaaaataggatttttttttttcttaataaacaaattattagcattaaaaacttagaaacttaacatgaaatattaagcagttgggcaacataatgaaaatgtttaagtcaacattttttttttgagacgacgttttaaattaacattaaaaacttatgcaggacaagatcatatcataataataaacctatttgtttgtctgtatcaattaaaatatatcattgtaataggacatcaattgccaagatttattacaccgaaaaatatacaaagtgaatgaataatttgagatttttattcacatccaattcaaacaacactaaaaaaaatcattgagataaattaagggaaatttacatggtatactaatttttgtcatttttttacaaaaannnnnnnaggcggtattttttactttttactatgttttttta

SEQ ID NO: 117376 - DNA, 1638 bp, Cannabis sativa
  modified_base (1613)..(1613): a, c, t, g, unknown or other
atcaaaaataaagatacaataaaagattacacagaaaagagatgctttcattaatttacaaacgagtttaatagttgaggaggattctatatttctccatgtttcaaggacagacaagcaatttattacattgtatatgaaaatctcctaaagaaagaaattaataatttttattaaaaaaataatgtcgtcgagaaagggtaatatcatcagtttagttaattttggacccatcaataagaaaaatgactcaacttgtctacaaagcaattgtgaaggttcaatttctgttcacctcgatggagtaaattgatgaatataagatgagtgatgtggatgaagcaagtttttggacaaaacctcaagaacatatcatgcaagtttggggttttacatatcatgttttacatattgtgtgggagtcacgtacaacatcaagggatgcaataaagcaaatatatccgaaaatgttttttgttttttcttaaacatgtacacctttatcatgtttactaattgctacaaaaataaaaataaaatcacaatgtttgtttactaattaaagaatgagaaataaaaatggttttacatgtatagtgaagacaaaaaccaaatttaaagaaactaatgactcctaaaatcaattctctttataaattaagtatctagtagtaaaggattttttttattgaacaactgagtagagttcttcgtatggagaaagagaaaaatatacaaaatcccattgtttaggaaaggaccaaaacttagggtgtggtttgtgatagtagaagtagcttgattgctaaagtttcgataccaaaactttatactgaaaaaaaaaattaatatatggaatgaagaaacactagcttgtttacattaatctttaagaaatagaaagatcatagtgtttccaaacgagtggtaatagaaactactgtataatttgtatctgcacacaagaatgaattaggccaataaaagttaatagtcgaaatgtaagtttgatatttttaagtttatgtatagattattcttttaataggtgtatatttttaaaaaattctttggagaaactagatggattattatatttatactattttattaatttaagatttcaaaagtacataatatgtagcagcacatcagatttgatttttcctttgtttatttgctttctttattttatacctcaatattgatcaacatacaaaaaaaatatctgttgagtccattttgtagatctcatcaagcattttatagatagaagaagcatgcctatgagtcatgtccccaacaacaaaatcatgaataatgccatcaatgtgaattcaacttcgacctggaggctttttcacacccatctgaaccatcttttgtctcacaaaagcaacatctagccacctttcagcagctgcatacacattagacagcagaacaagataacttgtagattggtcagaattgagctccactgatagtttcttagcaatattggatgcaagctctgcatttttgtgaagtctgcaaccacctaaaagagcaccccaaataactgttgggttttgtgcccaaaataaaacccattttaatataatcaaatttantaattaataaagatcagaattcatt

SEQ ID NO: 117377 - DNA, 1742 bp, Cannabis sativa
tctttctaaactttctctctctcttgctcgggcctagacaaaccaagtaacccaacaagtttcagaccaaaattcattaatttcttgaagtgttcaagctataattgaagagaaggtgataaaaaactcaaggtaaaaccctagtgtcttttaatttgatagattttgatgaataagctaggtttttatgggtgattttgggatttcagttatgtatagctttgattgtattagaaactttttttaaagtatattttaggtttagttttagttgaatatcagtttatttgcagttggagcaagtttagatcatgtttaagttttagaactcgaacttttctcttcaatggaatttcttaattttgtgattaattgttgtatttgagttgtggaacatgtttagtatgttatacactgatgttctagaaagtttggtggtaattggggaagatttgattaggttttggggcctctaagagtgaggatttttgtgttttaacctacccaggaaccagagttgcggttgttatgaactgcaattttggatgaactagaattgcagttgacaattggacttctgtatggggcaatattgggaaggccgattttcgtattttggccataacttttcactctagtgtatgttttgaatgttctttatatcattagaaagcttgtgaaaagctctacagcttggtgcataagttagagccaaaatatgtgtttcattttatggtgtttttaccacatagtttagtagaaaatcctaaattttatacgagtattaggaagtgttttagaatagacacttactagtttgacgttattgtgacttagggccttcgattgtcgagtagattttctactctggttgattgacacattgattacagaattaaggtaagattagtatatagatgcacatatgcacatattttaaatatacatattttatgatactatttacctggtattctagagatagcagtatggattaacatagagatgtattttgatactgatatctagtgattctagtgtgtatcggatagtatatttccaattagattaacatatcaaaaatggcagtaatggtgtatataaagttgcatttggatatcaacggtatatatgtttagcaatataggaaagtgtgaattaatgttatcaatactagtgcagctagagtattgagtgcagtttgttattatatttaattctactaatagtatggattaatgatgccacatcagtacaactagagttctaactaagggctggtattatggccaattatactatagttatgaacgttcaagacttagggtacgcgttaaatgcaggtagtagacttacactaattgggtgtatgtgcgcctaattacgggtcagatatatgttgtatattttatgtttttcttacataatttgttgactcacatttatgttttatgtgaaggtaaaggcaaagctaaagctgaatgacagtgagtggagagcttagtgaggatttaacatatccagacagttaaacttgaagggttatgatctttgggactaggggtggtcatcaaactgctcaaactgcccacaccactaaaaaatgtagtttgaaattctttgtggtgcggtcgcgatttgaatttttcctaaaccgtgcggtgtggtgcagtttggagttttgaattattaatatgcgattcaaaccacaccgcactgcatattataaaaataccaatttt

SEQ ID NO: 117378 - DNA, 2024 bp, Cannabis sativa
ggatgactgttgattcacgcaccttggctggtctataaaaatccttcatttttattctttgaggtttctaccttcagatctcttaggatattcaaagccaatcaaaatttcaagcaatccagatttccttctactctttcttcgttgctgacaagcttgattgtacaagcgtttcgcatcagagtccctggctactcgattttcttctatttgtaagtttccaactttaaggacttctgctttcccttgcgttattttcataactctacttggggatatgttggcatggctgtgttgttggtactttatgtgtggttgggggaactttcccaagtcgtccttagtatttattttgaggcaacatatttccttgttaggactagtagattctgcccctttcctcttcttccccacctctgtaccattgttgcttgttatggtgcggtttgcacctaatgcaaagcatgtgaaatttctatgcttgctccggatggggcctcataggggaccctcattccattttttcttagggtctgatatgggggctaactgctgggataactcttgtcttttcagatgagtgacgtcttgagggatcttcataagtacaactttcacgctttcgattaagaaatcttaaaacttcacccatcaaccagaatgtcgaatcctgaagttgttgcttcttttacttctcaggtcgtggtcccacgataccccgtggtgcctcttgacatggtgatgcagggtcccgtcttagtcacaaactatgtacaccgtgcaattggttgggaaactaaagaattacactcatccatgggttgtgttcaccacttgtcaaccattgtaactgaaaaagagatcaagccccaggacctaggagttttccaccatttgtctcaggagactaaaacccccaattataactacagagggtttggggcatggtgccaagcacattttatggtcagcgtcatgctcccgcttcaagattactttataaacttcctagtttttgtacgacttgctccatacaaattgatacctcaaggatatcgcctgttgtcaggattatttattttttatgcttcacgtggttgggctgctcccaacgctgttaaaattataattttttacaatttattttatgtccctaagaagggggaaaatgcaaggatggcttttactccctctaagctcatctttccaatgagactcgcctcctatttaactttcaaaagaatatcaaggattatcgtcaccaatttttttctcttccagtttcaaagctttttagcatcctgaccttttgactgagtggactcagattcctccactgcttcgaacagctccgattcagctttttcatgaaccacgctgccatttttgtaactcttaccaaggaggagcttaacatgggggacttggtcacgactaccaactactggagggccaaactcattcaaggccactagttagttaacgacactaacttggcaaacgttatgtgttcgaatgctcaaaatagggaggttgagcagagtttccgaatggagatcctccaagcagagactaaatatcaaaaatactgaagtagaaaggagcatgaggatttagtagctcgtacccagagcgcagcaggtcgaaaggcgcaatagaagatagacaagcctttggttgtttagagactttcatttcctttcccagtccctaactctggtgcccccggagcgggtaccttgggtgcttgtaagtctcctctatcctttcactatgtccattttgttaagaattatgcacgtaccttaccaattggctttgataggaggttatttacagtatgtatgtgtgactcccgatggggtaatagagataaagggcaggttaccaatattggtgatttcctgggtaggtccctgatggggtctgtgttgggctttgtgccctaaataaaattttatttcaatgtaatcttttttattcaattatcagtaaagaaacagatttaatttcattacttgttt

SEQ ID NO: 117379 - DNA, 5480 bp, Cannabis sativa
  modified_base (5114)..(5114): a, c, t, g, unknown or other
agttgaaatttttttaatttcagaccaacttgaattagaaaaattttcagaatatattttattttattttaagaatcatttcccacattaatttcgaaattcatttctttgaaatgtagatagtttgaaaaatttcaattgtgaaaattagattaaagttgaaaattaattttaatgattttttttttttttttgaaaaagatgaatctttattcaaaaacaagcaaaaaaatacacaaaggcacaaggccacaccaccaaaccagcggaagctgctacagccatcaaccccacacaaaaaaactaccagctattaattacattgagtaaataattgttcttttggcaagctttaaaaggccccttactcaagattctcagccgaacctctttcctaatattcaagctcatatgactaggagcagtacaacacaaataaaaaatacatatattcctattcttccaaagattatacaatgttgctgccacaattgcattagtgattcgactttggaaattcttcaccctgtttctgcacctttccatcatatcctcaatagaattaggccattgatactctcccagccaagaattgtttgcaataaaaacctgtttagcataggaacaagtaaaaagcagatggtcatgagtttcgaactctacctcacaaacagggcataaagtgcttgagatagtcatgaactgagataggaaatctctagtaagcagttgggtattagctattttccaatataggaatctgtgtttaggcataataagcttgtcccaaactgctctagcataatcagccttgtcaacctccaccaacaagtcatagtatttttttagctctaagcttatttcctttcaccgcaagacaaagtttagcttcttccattatttcatgaaggctaagaatctttttgaaataccaactgtcatccatcttctttgggtagttccagatgtcatgttctttccgataaataaaattaatccatttaacccgaaaggaaatcctatttactggcaagagcccaaaagaatttagccaagagagccttattccatttttttcttctcggaacccaattcctccaaggtttttagggagacaaaccttttcccaagaagctcggtgaagcttactcctattcccagttgttccctaaagataatccaggtagctcttatcaatggcagtcgtaatctttgaaggaatgataaagatactcatctagaagttccttattccaagcaacaccgagtgaatcaattgagcatggcctgtaaaggataaatttctactagctcagaaattaaggttcttattcagttaccttccattttgttggccgaagattcaccccaaggtatttaagtggaaaacaaccttcttcaattcggaagagatcaaggatcttggatttgacttcctcactaacccctccaaagtaaatatgagactttgaggtgttagcagacaatcctgtagcattgcaaaacttcttgaaagcttcataattaagcctcatcgaattataattccctttccaaaaaaataactagatcatcaacaaaacacaagttagtcaatctcagatacttgcataaaggatggaagccataaccctccttatctgcataaaagcttagcaaccttgtgaggtagtccataatcaaaacaaagagtaacggggacataggatccccttgccgaagaccctttttccccttgaagctaccttgaattctaccattcatcagcagatggtaagtggttccctttagacacgtcattatccacatgataaatctaacgggaaaacaaagcatccgaagtaaatcttctacaaactcccagtcagccgtatcataagccttgctgaaatcaattttcatgatgcatcttgtagagacattcttcctagtataacccttaagcagatcctagaaaatcataatgttatgggccagcagtctattcttaatgaatgcaccttggttatcactgacaatcgagggaagcagttctgaaagtctagaacagatcatcttcaaaatgaatttgtaaacagtgttacaacaggcaataggtttgtaatcctttgctgaagaaggattttcgattttgggaaccaaataaataacaatctcattcaatgcttttggcaatttgccattagcaaagaaatccaagaccactgttgaaacatcattaccaattttactccataaatccttgtagaatccagacccgaacccatccaatcctgggctcttagtagagtgaatgttgaaaagagctttcttgacatcccccttatgaaaaggcttaatcaaattagcttgtttcttcaaatccagacatttaccccgctttaagcaagccccatcaatcaagctagacgctaaacttttactgccaataatgttttcaaagtgcttgacaaagtgtttaaccacttcctcaaaatcatcaatgatagtgtcccattccatgaaagtagtgatcctgttttcaagtcttcttttcctcataacagcttgaaagtaactagtattctcatcactaaatttaatccaattaaccttgctttgatgtctaaggttctgctcaaatctgtccttagcagcaagaaaaatctgctgcttagccgaaactgaaagttgcagctatctgtcattaggattcaaggcagcctcttcctggatttcacaataatcctcttttgccttcctgtactctaaagtagcatcccccacttcatgtctattaaaaatatttaaagcatgtttcactctaaaagtctctgcatcaaactatcaagaccacaaccaactgcctttttgttccattgttccattacaatgttaacatagacattgtaagaaggccaatgattccctaatcgaaagagtttaacccctatattacattgcacttcattttggattaggcaaagacagtgatccgagatgacctcccacttaaaacaagcatcttagttaggaaaattattcaaccagatattattaataaaaactctatccaatttagaatataatatatcccccacctcatgcttgttagtccaagtgtagaacgagcccgagcttttaaattcctcaacttgacccaaggcaagccaagattgagcatccacaatgtcattattctggataggtcttccaccacatttgtcatgaaaactaaacattgcattaaatcaccaaaaatgatccacggttcattcaacgtcccaatgctagtaagattttcccaaagacttttatgatcctccattgagttactaccatagacagccatgatcataaagccttgtttctgcccacaaaacttcactttgaaatgcaccatctgagcattttcacttattatatccacccaaacaagcttatcctgcaaaataatcaagatcctaccagaaataacattgctagaataacaattccaattcgaaaaattatctagcatcatttcattaattctctcatgtttaacgttagtctcaaacaaagcaccaaagcctattttattcaatttacaaacatcaagaataactttttatttgtccttcttattcatgcctctaacattccacccacttatattatttgcttccatcaatcactatttctgagttaggacacaatacctcttcatctatggcagcaagcaaaacaacatacccattacaagttttcttcacctttggatcatccttggtcgctttagatttcacctgtctcaaagctattcttttaggtgtaatccagctaccaccagcaatattatctgttgtccccctctccattttctccttcgaacctgcctgtaacacctgatcagcagctacggtttcatcatcagccctattttcctgctctgaatacttcctgggttgtccacagtaagatgatctttattcatagtcaccttagtctcttttccggcagttggtttcttcttccaaactactctcttctctttattgcaattagcaaccgtatggcctagattggcacaaggtgaacacttgaagggagccattcatattcaattgtttgctccaccaattgtttcatttcattaatgaaagaaatggttttaggaggagcatccgaaatctcgatttccacaaggcttttagcaaatttcaccattgaacgttcttgagtcaccttatcaatcatgattggtttaacaatagtgctaactaatgcacttagattattattgccccaatattgtaaacccaatccaagccggtacagagttaatcatcctcatcgagtcaagatcagtagtccaaggcctaagaacaactggctttttatcaaaatgaataccccagcctccagaataagatctcaggtagcctcatctctgaaattaaccaaggtacaaccagaatgcattctaaccactttctctatgccaaaattccctcaaattctcttaacaaagctctcaaacactttaaaaggagggttggctcccaataaaaagcagactattgaatttttccagaaagaggcctctacctatatctcttctaggtcaagtttagccacaatttgatctccaactgtaactagttccgtataagtaagtttagtagagggagatggtacctgattcgatttgaacctactccataaatccctagcatcagcttggaaatcagccagttcgacttcatctgcccagttacctggtttcgaagaccctcgatcagcctctgcgtcaacgagttcaatcccattctccattatcaggttttcgatagtatcgtgaaactcctcgatcatctctggttcaacttcctcttcatggattgaagggagatcaactccaatgtctgtcatggtagcaattgcaggcttccggccgaccctcttcttcttcgccatgggagaagtaggggaagactcttacgccacaccttaaatttttttttaattttttagatatatttaattaattttagatcaacttaaatcaagtaatttttttttattaatgatttattgaaaaaaatagattaaaatatattatattttaaattagaaaattagtaattagtttntgaattatctagatagatattttccaggcagacttttggtatttttctagatatatttaattaaattacaaaattaatatttaagttgattttgttctagacacttaaatatttgatatttatcttagagatttaattaaataggaaaataatatttatgttgaaaattaatttatttaattttagagcaacataagttagaataattttttcagttttattttattttatttcatagtgaatttaaaaaatgtattgcttctaaatccattggattttaaatttaattatatatattatagaaaattatatttgagttgaaaattaattatttaattaattatggaccaacttaaattaagtaat

SEQ ID NO: 117380 - DNA, 777 bp, Cannabis sativa
aaaatatgcaatgaagagagaaagaagtcaaagaatgtgcaaatttcttgtgaaattataattatacaaaatatgatttcattacaggaaacaaaagcaataaagtttaagactttatacagttagtaactattgaagaaatcaagaaaaaagtatctttttggttttttgtaatcgacattattggtatgtatattaatcaataaatggattcaagaaatacatttgtaaccaaaagaataataattaagaaagaaaaggttacaatggttgatacttacttgtcaggtgcagagtgcagtagaaaaatttcttatgtaatgaacagtaatggaagtgggagaatgaatgaggagttgtttgtttgagtacgtaataatgtaaagaagaaacatatatatatatgagtggtgtggtgtttacgttggaaatttacgaggaataatacatttcttacatttttactgccacgtggcagtttgttattttatactttctatcttattcaattatatttatgtaaactactttctagaggactggcagctctggactaagcagttgggtaacaaaagggtaaatttagtagctgcaatggttttttctgccattgtatattatgtgtggcaaaatagaaacacgtgtattttcaaaggtttttcttatagtgttcaaaaaattgtagaaatgataaggaaagatgcaaagtatatgtttagcaattttatttttaagaagttgaaagatgaggaaaggttattattgttaaaaatgacc

SEQ ID NO: 117381 - DNA, 998 bp, Cannabis sativa
atgtttgaacttttatgaaaatctgatttttttttttatatgacatagggttgtaacccaacccaacccataaaaggaaaaaatgggtcgagttagaaaaaattcaagatgtcaatgggttgaaaatttctaggccgatgttattgggttgggtcattaaaatagcctcaacccggccaatccaacccatgctcagccctagatttgatttgtttgcaaactagaaaatttcaaatggagatttcaaagataagttctaacttttcgtcatagaattatgtagattatattttataatatgaaaactatcgtaaatttattaaatatgcgatacaaattcacttttttcattattttttaacgatgtttcttttggtgggacatcaaaagatataaatgtggagttttttctttttaatattaagattttattgtcaagttttttaagggtatttctttcttgtataagtcgcaattttaacaatacggttcatagattgatctagcatgtttttaagatagaaaataaaaatttttagatgaaaaaattctctacgtattgtgtattgctgacgcaaatttttgttaactattaaatacgtctttttataatctctgaaattaattaagtaataattaaataataatagcaataaatgacaagatgatttttacgtagtttcaaagttaatttttttatagtccacgagtctatcttattctgagttgataaattgtatacaaaatatcattaattgttttacagaatgaataatagatataattctctctcttttcccaaaacagtcgtcatttgttccttgggttctatctctatttataagattctaggatgacagttattcctttgggatcttatcacctgtaaccattcatgaaacgtagacattctgtaacgttcccatttcaagcctctattgggtcctcacacccacagaatgaatggctcttatacatgagtacgccactctggctgc

SEQ ID NO: 117382 - DNA, 1570 bp, Cannabis sativa
  modified_base (40)..(40): a, c, t, g, unknown or other
  modified_base (71)..(83): a, c, t, g, unknown or other
ttaattaatcacgatttccataaaccttgttgattagcancgagctgcacaatacgtttaaaaatcacgtnnnnnnnnnnnnntagttagggtgttacatatatattgatagattattgagttgtgacccttcctttttccttgtttataatattttctagttactaatactaatattaattatgaagtaattataatctattttgttattctctttcaattaataataataaatattaattaacaaacggcaaaattagaaaattataattcttgataaatagaatgtcatgtcacctctttgtaccacttattgtatcattattatatgtaaataaataaataaattaatttaaaataataattagtaactgattaaaaatcaaattcaatagaaattataatccaaaatttaaataaaatttacttttaaaatataaatatatatagtaatatgagagtaatgttactatatttatatttacattttatatagaaatatgatttttgaaacaatatttatggacaaataataagaataagtgagatattttttaatgtatcattaataataataaaataattatatatatttatatataaaaattgttcttggcaataaatatataaatactatttcaaaatgtatagattgaaaaattaaatatcatgtgcaaagagttattataaataaaagagatgtattcatataataaaatagcaaaagaaatatcatatttctcctcccatatttatatagatagataatataaaaactaattaaaataaaaaaatttctaaaaaaaaaataaaacataaaataaaactcaccaattcaatatttgtatactaaataaagcactcgtattcacaaaattaaaaaaaaaataataataataaatgatgagaaaatatagagaccataatttttgttaataataataataataatgataagtattatgtatattatgaattatagagatgaagagacacaattaattttaatataattgtgagtattatatagtatgagtcatagaaatgaaaaggctaattaattaattttattattgagattatatatttttaagacaaattattggactttttctttcacataaggtaaacatgatccaaatgattccaatatcaattaaaaaaaagtaacatataatatagtgatatcaaagaaaaaaaaaattactatctttgagtttttattctttcaaaaaaaaaccacaatagcaaaatatgatatcaatattaattaaaaaattgtaacacatattagtatcaaaaaaaaaattaaaagagagacttgctagaaatataaatatatttattaatattcttcttaataaaatggttttatacactacatttgcaaaagaaatactgaaaacatatatgaatcaatacacataaaaatctttaaatatctaatatattgtgtattatcaataatcaaacgataatatatatattgttataaatattaataattatgtggatgtccaaattttttatttattaccattaattgtaatcaacattcctcttttcctta

SEQ ID NO: 117383 - DNA, 8085 bp, Cannabis sativa
  modified_base (2536)..(2537): a, c, t, g, unknown or other
ggccaaaaaggaagaatcctctggtcagagttcagacaaggggaaaagcattgccaaatagggaaccgccctagggagggacgaagatgtggatacccgacttggggagccaaataccaatgtttggccagtggaagaattaaaagaaattgaaattgacccaagtgttccgaccaggaaactcaaaattggaaaaggttttttgcttgaagtaaaatatgctctgataaaatttctaagagcaaacctagacatttttgcctggtcacatgaggacatgttcagtatcgatccttctataatttcacacgccctaaacatcgatccaaactttcggtctatttaacaacaaagaagattgctggataaagaatgggcccaagcactaaaataagaggtagaaaagttgcgcaacaacaacttcatcattgaggctttctacccggccatggtagctaaccccatgctgatacacaagtcgaacaaaaaatggcgtgttgtattgacttcaccgacctcaactcgacgtgcaccaaagactgttttccactgccaagaatagatcaacttgtggatgcaacgaccggacacgagatattaagcttcgttgaagcctattcagtgtataatcaaattagaatgcatccaccggaccaggaacatacaagtttctgaacagatatgggtctatactattataaggtcatgccattcggtctcaagaacgctggagctaataccaaagattggtaaaataatgttcaaagaccagatcggacgtactatggaagtatatgtggatgacatgcttgtcaaatccaagaaggccgaggacatatagatgaactggacgaatgcttcaaagtccttaagaaatataacattaaactcaatcccttaaagtgctccttcggagtcagctcgggtaattttcttggctttattgttaatgcccgaggtattgaggcaaatccataaaaattcaagccctcctgggtatgaaatcacctacaaaaactaaagaagtcaaaagtttaactggtcagattgccgcactcagtagatttgtttcaagatcaacggacaagtgtgttcctttcttcaacatcttgctaggaaacaagatttttgaatggatggaggaatgtgagaatgccttttacgagctaaaaagacaacttgcaaaacctcctgtactctcaaaaccattggacggagaagagttaaggatatacctagctatcacagaacatgctgtaagtgcggtactgatcagagaagaaaacaatatccagcattcggtctattacatcagcaaaagacttgttgaaactaaaggacgatatccactgatagaaaaactcacttattgcctaatcgtagcaacaagaaagctaaggccttactttcaagctcatcttgttcgggtatacactgactaaccattacgccaagtattacaaaaacctgacgcctctggacggttactcaaatgggcagtggagttaggccaatacgaaatcatgttccaaccccgaacagcaattaaagggcaggccttagcagatattgtagttgaatgtataggcaaagaagagagcacttcaaaaaacaatccggagccagtacaagagcctcagccaagcaacaacaaaggcaaacccacaaggaaattacttgtagatgggtcggctacagatcaattgttaggtgtagggattgcccttgtcacacatggggccaacttctacacgaggcagtcaaaattaggtttagagcatccaacaatgaagcagaatatgaagcccttattgccgacctaaaacatgctcaggaacttcatgccgaacacattgagatctgtagtgactcacagttagtagtaaatcatgtatctcgggactacaaggctcggggagaaaagatgatagcttatttaagcaaaatacatgacctgctcgcacaattccagagctatgtcctcaagtaaattccaagagatgagaatacaactgctgatgatttagcctgacttgcaagcagcaatgtagctgacaaagccaatctaatcccaatccaatttcttgaaaagccaagtgtcacccgcttagaagaaattgagatgattgacacatctccaaactggatgacgccaatagcagcctacctccacactgaggaactcccaagtgacagaaacgaagcttagaaaatgagaagaaaggttgcacggtgcatcatcgtagaaggatttatgtatagaagaggattctccatgctgttactcaggtgtttacacaagaagaagctgcacagcatttgtccgaagtacatgatggattctgtggcaaccacaaggccgggcaaagtctatcaaagaaaatactaaggcaaggatatttctagccgaccatgattgaagattcaaaatcctacgttaagaaatgtgacaaatgccaaagattttcaaagatacctcatacaccgcccaacgaactaacttagatgtagaatccttggccttttgccatttggnnaattgacctgatcggacaattgcctaaaggcaatggtggggtaccgtatgcagtggttgtagtagattatttcactaaatggaaggaagctgagccattagcaacaatcaaatcttagaaagtgcaagacttcatgtgaaaaatagaatctgtcgattcggactaccgtacaagatagactcagacaatggcaaacaatttgatagtcaatccttcaatgatttctgtgcaaaccatgggatcgtcagagtttctctggagtggcgcatccctaagcaaatgatcaaggcgaagtagtcaacaagacacttaatgacaccttaaagaaacaactttaagatgctaaaggaaactggcttgaagaactcccagtagtattatggtcttaccgcacaactaaaaaaacagcgtcgagacagagtccatttgccatggcgtatagttatgaagctatgctgcctgtagaattagaacctctgtcccacagaagattgacatatgaccaagaagttaaccatgcactccttgcagaatcacttcacaaaattgaagaaaagagaactacagcaaacctaaaattagtggcccatcaagaaaaggtagctcggtactttaacaagcaagtgaaagcacggaaattctttgtgggagatatggtccttagaaggatattcttgaacaccaaagatagcacggcaggtgtgcttggaccgaactgggagggaccatatcaagttgttgaagttctagaatcaggagcatacaaactgggtaagtacgacgaaaacatgcaactcgttctggtaccaaggtattaaaatggggaacatttaaggaaatactactagtaaaagtactaggtcgaatgaccatctcaagtacgaaatgaaagaacatttactcttaagtaaatggccttctgggcggactatgcccaaacgttgggatgaaatggcaaagtactcaggttagatgaccaccgctgaaagtacaatctttattttatgcaatttattttgtttaaattaagcttaagattggaccaaatcagtataatagcttttatgtaagttactacggtaacaagtgtgttttaagcaaaatatgaataaagatgcttgtttaaattcaaattgtgtcagcaagatataaatttaccattaagtgcgtacaaaggtctggtcgtacccgaagactcgaacagacaaaaagcacacttgtgaaatgcaagtgaccaagagtcaaaagtctactcgatcactttgggagcaactatacccgtacaaagcattggtaaaaacaaataacaagcacacaaaaaaaaaacaacaacatgaacacaattgcacaatgatcatcacaaggaacaaaattcattaatgataacaaagcatgtaaacctgggattaaaaggctacccaatcagctagttgtttgaaaatgaaaaatatattccaagtctaaagaccgcttggctggtcatcttgtctcaataaaggcctactggtcgaacagacatatataaaaaagaaaggtaaaaagaagacattcagacaataggagtcccaggctcttggtatggatcgattaggtctgaaggagctagaggctcatcggtctagacggaaggaacgtcagtgttctagtcggtaggagcagtggaagtggtcgcctcagggttttccttggctgcctgggccatgcagtaactaaaatacatatatttggaatcgccgagataatcaaagtttcctttgggattggccttccagaaatcgtagaaaacctcgagaccacctatctccaagacatccagttccctctcaagctcctccacccaggatttcttgtcctcgactcctccttaagttctctgacctccttcacaagttcctcctccttggtctgtgcacagcgctagggttgttgaaggggccataacctgttcggatctggccctgacctgctcagacccgaccctgacctactcagatccaatcctaacttgctcagacccatccaaactccctcctcaagaacttttagactttgagaccttcttggttggagggtccacaacaagtcgctcctcaaaaagatcaatgaccacgtcaacaggcactttctccttggatggagtctctccacccttggacttctttgccgaatgagacatgcccaatctatctcccactatctccttcagagcctggatcatcttctgagacatttctgcacgggtacaacaaggcaattagaagaagatataaaatatttgaaagcataaaaaatcagagaaaataaatgcaacttgaagtactctacatgcttacagggcattctcccgaacaatcaccgatggagcatcatcatctgaagagtcttcttgctccaccaggatagctttcccttttccctccacaagggtcgacgaccgagcaggcacactaggttccctaatccgaatggcatgttctattggtgcctgctcggtcgagagagttttcttcttcttgcctagcctctcctgctctgattattcttgagcctcctcctccactgaatattcttgagcatactgtttggctccagcacctcccttcaacttagcctcacgcttcagttgaatgagctctttctcctactcggcatcctcaactcggctcagcttggatttcttcttcttctctttcacgagctttggtacaacatacgcctgatagagtttgtactccacaaagttggcctcagtggtaaacaaagtgataatctgagcatccacggatagttggagaatcttctgcgccctttccctaagcccaagcgtaaaaggagggtggaaatacgcatggatctgctgaaatcgagtatagacagtctccatgccaatcacaaagtaatactcattcacaaagtgccctatgctaaccttagagtctacggtgccctttagcaacttatcgtctagctgagagaaatagaagtaccctgacctgctctgcttaggggttgacttcaaatcaaagagacagttggtgtcgtgcgaagaatgcccaccccatcattgagttgcataaaggatgaatagggcggataagtacttgattcccttgggtgtgaactgagtcaaacaaaggcggtagtagtccgtaatccttttgaagtacgagtgcaaaggcagcatcgcaccttgttttgtgtgagcacccgaccaggcacaatatccctcccttagactagttgatcggtgatttggagaagggaggaagcatttcaaacaacctaggtacccagccttctccaaatgtcgtaactggtcctcaggtttgatggacggaggacacacccaccgagcccttaaggcaatatgccccctatgagggactgcctcggcatactcttgggtgatgtaatcctctccctctaccaagacgtcatcgacctcagacaccgagttgttaacgtcattgacctcaaacaccggctccccggcctcattgtagcctccaaagcacaaaggctgagcagctccctcctcctcagcctcggatgggctatcaggatggtcgtcatcctgattttatacctcctagactttgacgtccccttcataatcgtcttcctcaatagtggctgagcttgtttggcgctaggcaacatggcatgtcgggccacgtgagggtcagctgcattaattttctgcatagtctgtttcgtgcgggccatcatcctcctcctaaacatgtgttggatggtatgtcgtgcaactaccacggtaggagcagcaatagtaatgtcaaaggcaccaggacttgggcggcccataagaagggtatcagccacgtctggccagaagatatatgtctagttggacggaaggtagcgtctccactccttcctaagttcccaaataaatcgctcgtagccttttcctgcgatctgctcagagtaaaaatgatgttgtaccttcactactcacctcccaatcctcaaaacatgagttagaaagttaatcgcttgaagagggcggactagcacgaagacgatgttggtcctcatataaaagctggagaagatcttggtcgatatagtgttttcctcccaaaaactcaccagggttcatctacaaaagacaatacacaagatgagtatttggccaaaatatcaaacaaaaactcaccagcgttcatctagttcattttgcgagactagttttcgtaaggcatcgacattagagttttgttctgttgagatttactcgattttgaaataatcaaacttttcaaagttcttccgaaccttctctaggtacttttccattagcctggtattcccctaggacttgatttacaattaattgcgactcattatggcatatgatatttttgacttttaacacttcaactatctttaaaccagtgatcaaggcctcgttgttcgaagtgttgaattgaaatattaaagcatagtgaaacttgaagccttctgacgaaattagtatcacccctgaacccaagccatgctcgttggatgctccatccacatacaatttccaagtgtctacgtctcgctaaataagagggtttttgtctagagttattccctctatcaggaagtctgccaaggcttgacccttgatggatgttcttgggtgataagttatgtcaaactgccccagttcaactgaccattttatcaattttccagaaggatctggttttaataaaacatgtctcaggggttgatcagttaacacctttatcggatgtgcctggaagtaaggccttagtttgagagatggatgaattaggcagagtgcaagtttttcaagaggggggtacctcgattttgccctcaataacctcttactaacatagtaaattggttgttggtgctttccctcttctcgcactatttctacactaatcgcattttctgagacaggaaagtagaggagtaaagtttccccagttattgatttttcaaaaactggaggtgttgaaaaatgcctctttatgctcctaaaggcctcctcccaatcttctgtccactcgaactttttgttgcctctcaatacattgaagaatggtaggcacttatcagttgattttgaaatgaatctgttgagggctgtcattctcccagttaaggcctggacttcctttagtttcgttggtgatggaatttccatgaaagccttaattttcttagggtttgctttaatgcccctcgcgttgactatgaatcccataaattttcttgaggaaacttcaaaggaacactttttcgggttaagtttcatgttgtactttttcagtatctcaaagaactccgcgaggtctgttgtgtgatctccactctttattgacttcaccaacatatcatcgacatagacttccatgtttcttcctatctctctcgaaaacatttcattcactggtcgctaatatgttgccccaacagttttcaaagaaaacggcatgactttataacaataaagtcccatgttggttacgaagcttgtatgctcttgatcagggacatgcat

SEQ ID NO: 117384 - DNA, 2450 bp, Cannabis sativa
ccacgtgtcccttcctgactggtccacgtatattgggcgattttaggagcaacaattatatatataaaagataaaggattcataaatttgtacttagtataaatcttcatccaattcaattcacatattgttttgagatgtttctaatacttaattttacttaatttaggtagtgtttaataatacttttttaatcaattttctatttttaaaattagaaaagtaattttttttttcaaaaacatattttataaaactattttcactttttaattttttaattgataattaaaattttgaaaaaaaaaaagtcacattcaatagtttttaaacagatttttttttcttaattaatattttggactccgatcaaacctgaacacgaatcccccacccatggcccggccttgaatctggcttatgactcgatctcgaatccgaccaccaacttaaataaaatcaaaaattaaaaataaagataaactttacagaacacacttttgttttctatttttaaaatttaaaaataaaactaattacataatgcatttttgtttttcgaaaacaattttttttattaaaaaattaaaaaataaaaatattattaaacgacaccttaatttgtcacgtttaaaaaataaatgaagaaatattttcaaccaaaacaataaatcaactcattatgaaaatataaccattgaaaatttattacttacagtgatgtatttatctattacatgtagcctcaccatttatctagaaacatattaattattattattattaggattgttataataatgataattttatgagtgattaataataagaaaccattatattattattatcacgttattattaaataaaaaaaaatgaaaaattaatatccatgtaaattcatggtgataagttattatttacagttttcatggaataaatataataaaataattaaaagttattacatgtcaatgggagattctagaaaataaaagacacaattaggttttcatggagtaaatataataatatataatgtaaaaaaatagaaaaaattagaaaattaaaaagcctgattagaattctagatttaccttgttaaaatcctaattaatacatgcaaattgttaagaaaaatttaaagaaaattaaaaaacctaattagaaatttacataaacaaaataatcgtatttatatgcaatttcgatctaactggagtacatgtgtagtatagtcttagtagaagaaaccttgtatacttaaaaataagaatatgtaaaactattatacaataaattgtatatttttttgaaatgtaattttaataataagaagtcttattaataatttatatgtacaatattttttattatcatcttaattaagtgctaacgtttcaccctttttttttttctctcacttcctttaattaaagaataaaaattaaatactatgatgattcctctacttttaaatttaattgtaacacattacatttaggtaatatcccttggaaccatatgagaactcttagtattattattattattattaatgcatatctatatgtaaacgaaaagacagataagatgaatatgaactaataaaaaaataagaaaaataaataaaaaattattaaaaattatatttaatacaattaaaaataaaaacaaaaagcctgatatttcatatatacaattgacaaagagaaataaaattaatgtatttgatattatttatttattttttgtgagaatattatttaaaatctttataacgtctaaggagacaaaaataaaaagtttaatttgagaaagattaatatatatataattgaatatgataattttggttctaacatattataatatggttctattaattctactatatacgatatatttatctcttgaaaaataataaaataaaaaagaaaagattatttcaatcttaaaaaaaatcacaaatataaaattaattaaatcatgaaagttcttagtttactaatttatatatagagagataccatactaccataaaaataatatactacatgctaccatactccatactctgacacacaaccatactatatctcaatctattgagccaataaaaaactcaaaataattgtgcttactggtgagaatggaaacaaggtatatgtttcattaaaattataacaaaagtgagaaagaataacttacatggaagtagggtgatcatgatggttggtgaggaaaaaaaaagagcttcaaatataaggaatcattcctagactctataaaagttgaagattgtttatagtctcatcagtatataatatttatgtatttacatacatatatatttacacggatataattttgtccgttattgtattttcacggattgtaatccgtgatgtacgacagccgccaaatgagggagttatttgatctgacgg

SEQ ID NO: 117385 - DNA, 3258 bp, Cannabis sativa
ccttaaaagtggcaaagaagcattaaatacaattaagttcatatatagagtcaaagcccacacataagattttattgtaaggcaaattaagcccccacatgaattattacatgtaatgggaaaacatgaatattaacacatatacacaatttcaaccttttttttttcaaaaaaaaaaaaatgagcattaatatatgtatgtgtgtatgaatacaacgaaaatagtaccctcaattttttcccaaaataagtaaaagtaaatatatatatatatatataaatatatactataccctaccattacatcgatcgatttatatatatatcatgtatatatgcatctcatgcacagctcatatttgtacgtgtttcatatacaatctcatgcagaccacatataactaattttcccaataataataaataattataataatacctaattaatttatctcttctctgatcagccaataaaaaaatttctctcatataacaaaattttttacttttttagtcagcaatcaaaactgtaattaaaagtaaaaaaattgtaactaataataaattattatttttatatcgtgactaaaaatttaataattaaaagtattttagtcacaaaaattataatttattgtgaccaaaattaaattagtggcaatttatatttaaatactatattttagtcacaagtaaatttttgttataattaaaaatcacatttaatcacataaaatttatgttgcatattaaaaagttgtcactaaaagttaatttttttttttttttgtagatttagaagctctcgattttttctgatcgtaacatttttgtatatactactccggttgagcttttgaataccttcgataaatattttctgaataatttgtcaaattttaagtagtgtgacatatgcttatatacaactatatatatttttatatttatattaatatttatatacattatatatgttacaacttacaagcactactaagacttggtagaagataagtaaacaatattaaggaaaatacctaacaactcatatgaatttctttcttttttttaaaaaaaaaatataaataattgaaatatatttgtgttattaattcaaataataatataaggtctacataaaaattgaaaaagtcttctctcaacaactatataaatagatgatagatcaccccataatagaaattacactactacaacataatattatttgctattatacttacacacatatacatacaaatatatatcatctcaattcaatatcatggctatgctatatgatgagaaaaatgatcatgttaagcaagtatctaaagtgggaataatcggagctgggattagcggtatagccgcagccaaacagctctccaaacacaatcctgtcgtgttggaggctacggaattcatagggggtgtttggaaacactgttcgtacagttgtacgaaactccaaacaccccgttgtgatttcgagttctcggattttccttggccggatagggataacactacttttcctacacatatccaggtcttggattacttgtattcctatgccaaacactttgatgtgctcaagtgcatcaagttcaattcaaaggtggttgagattcgttacgctggtctcgaccgcactggaacattgctcaataatgagagtaataatcagatgtgtggagagtatggtaaacttttgaatggtcatcctgtttgggaagttgccgttagggacacttctaatcaatcaaacggcgccgttcaggtatattattaattaattaatttattatatatatttttatgagtttttatatttttatattttaaattagttttttctgcaatttttataaaaattcacataataacttaatcgtaactgaaattcacgtagtaataaactacagagcaattcaaattataaatttaagaacaaagttaaaaaataatatataaaataattaccatattttttatatatagatatatattttaattttgcatgcatgattgatcatatgattaagtgtaatcatgctataaatattattttattatgatgaatatgcgaggtttatataaattaactatttgtattattatatagccttcaaaaaaaaatatttgtattatataaaattaaatatgactcaccaattttggtcaaagtataacaagttttaacaaataattaaaacaaatctaaaatgagaaatggtatatactatatattcaaattatttatttaatattgcatatagtacttattagttttttttttttttttggtaattaagtgtaattttgctattttcttttttatataaatacatttttttggagggatattagaatttaataaaggtcaaaacaatataatacatttgaactattttctttctttgaagcaacacttttttattttcttttttgataattaattcaagagtagtacttctattataaattggtagactttggagatgacaaataataaattaggtctttattttgacttgcttaaaattcaagttattttttgagaattaaaaaaaaaagatttattttgtggggacttgagattattgtttttttttatatatttaaagatatattatttaataaataaaaaaaacataggaaattttccttttaaataatttacatataaattaatgtcccgccgtactacgtacgtacatactttaattaattaattcattgatcttaatagttttagtgaaaaccacacattattatatataattattacaaatatttcagtgcataatatctatatatttatataaaactgatagataaatattaaatattatgttatatggtataaggattctttatttatttattttttttttgaacttaattaataatatggtatttttggataattaatacaacagtggtatggatttgagtttttggtgatatgtattggaaaatatggagatatgccaagaatggaaaacacatacaatggagaattttcagctttctctggaaaagtcttacactcaattgaatactcaaagctggacaaagaagctgctcattctctattgaatggtaaaaaagttgctgttattggctacaaaaaatcagccattgatttagccatggagtgtgtccaagcaaaccaaggtacatatatatatattagtaatatgcaatacatatatatttatttagagttgtattaaagtttaaagtcgg

SEQ ID NO: 117386 - DNA, 1161 bp, Cannabis sativa
atgttagttagggtgttacaccaatggtccaaacaaaccacgaaatcctgatcccccatgtccataaacatgtaagctcggtctccttcccctcgattcttccctctcatcccctttcaatttctctcttactggcattaatggagattcacgattgggcatgcttcaacgccggtcacctctccctctaaattcctccctctcgatttctctatctttggcatgaatggaggaccagacaagcttcaacggagatccgcgagtgacgaagatgatgaagtgggtaatgatgctttcagatctagtgcaaactttttttaatataaaaataatagatctgggaatgatgaaaaatgacttggagaaactggtctgtgtgaaattttttgtttatttctagttttatggagagggagtattacggtccattgggtgactttctctctttttttcatttaagtttgtctgggtgattttgaatggtttgttgatttaattgagtgacattatgctcttaaagttccattcatttgagatgcttcttggagtagtaattttgattggaacaattttaaatactattttgtgaattttattaactgtagtcgatttttttagtaaaaaatcaaaaaaaatcaatctgtcctctaattacatatgacttcgagaatttcccattcgaaaattttgtttatcatttagtcggcggtggtgcctggaagcagtagtgactgagtagaaaaagaggaagaaagaagaaactaggtttttgttctttattattatttaaaacttttaaatttaattagtttatataattttaatattatttaaaaattgataaagtagagtgaggtggtttaattaacgatgtggattagttttattaagtttgaccaataagttattgacagttggcaatctatgtggcagttaacaccaaagtacttacggttgcaacaaaagtacaatagaaggtatttttaccgccaaaaaaataacttaggtatttaagcgcaacaacatataaaacttaggtattttcgccgcaaattactcaaataaaattcataaatttccaataagtaaaatgatataaaatagtaaaatatcatttttcaaacttataatttataaataattcaatatttaacaaaataa

SEQ ID NO: 117387 - DNA, 1733 bp, Cannabis sativa
taattggtcacttaattttgtatcacactttataataacatatacattatacatatatgcccacaataagattttaatccaacaatacctgaaagagcatgttgctgtcaattattgtagcagcaatttacaacttatggaggttccaaatgtggttctttgggacaagaaactttggcatataaaacacactgtacaaatgatacaaaatgattgtaaaattagaatagctggaactataacttgtaaaacggctatagacaaatgcaaatagctcaaacttgtctgattcattttctcatatgatatagtacgtaattttaatacaaatttcaaaaaccaagtacataaaatatataaaatctaaagtacaaagcaaattaagacaccctgatttcttggggcactacttaattaattgtacgtgaaaatattaagcaaggttatctatcctatatatcttaacactactttaattaaaagaaatgcaacaccattttaatctcgtactcatgatcatcatctaatatgcaggccagtagttctcaagatccatgcaatgatctacgttcatatatgatctattgttgttagcagctccattgttgggtacgttgttcatctctgaaccataaccattattgtgatcatgatggccaaaagagccactgttactactcattatgttttgttgattcaaattcattatttgtggctgatgatgattgttattcggctgcattggtggcgcctgtggaggtggcggtcccccaagattcaaattgaggccagaaattgtgaggcatcctcctcctcctcccccggggaggatgggaacggggtagttgtattgagaaggaaggatgttcaaggggttcgttgatccacttgttgtacctcgaagaaccctagagagctcggctagttcgtgagggttattagtgatgttgttgcaattgtttctcgcaaagaggaagtggccggtgggatctccaggcagctgcatcattggtgatgaatattgaagcatagtttgagtttgatcaattagggcataagggttcatcgttcttgtttgagttgatgtcgtcgggtactttttggcacccgcgctcttttggaacacacgacaaactacccattcgtcctgttaattgattaacacattaattataaaatatacgaaaaaacatgttgtagctagagacatcacttttgttcttacctataaggacgtttttatttttaacgtttaaagaaattattcaaacacaagggcacaagacatcactttgtttatgaacatacacaatattataaactttgatttttctcttacacaataatatgttaatcatcaaacactaaaataataatttcagaccaaaaacacttacatactaattagtcacacacaaataatgcaattttctttatctttaattccttcccccaaagaaaattttcttgatttttgtttcctaaatttttactgtatttctcattttgaaattggccaaaagtgtattaattaattaagaaatactatatatataaatatatatacatagatattaccttggcgtatatgatatacacactacaaaaaattgttatttttagtgataactttttagtcatacataatttctttgtgactaaatgtgacttttagtcacaaaaaaatattacttatgactaaaacatagtatttagttacaagttgtcactaa

SEQ ID NO: 117388 - DNA, 1264 bp, Cannabis sativa
  modified_base (983)..(985): a, c, t, g, unknown or other
cacagcttagggagtttctcataccgatactgaatccatagatccttaagtttttgacgtctgagaaagaaaccagaaaatataggcttatttagatcaatcgtagccctgaaccgtagagtactcagcccaattgcatcctctatgcatgagggagttcgaaaacaggggacgctttagaagctagctctttaagattggatagattccaataaaatggggggatgctttccacattcacccaaatgggtgttttgtcgaaccgaacctcagagggtgttaaccaggagggccaaggcataatgacaataagagacccacagacaaaccatggacgtatcgcaagaacattcagagcatcatccctgttagcaaaagtgaattgtatcaatccaccatcaatctccttccatctccagcgcttaatggaatgccatgatagctttaaagagccttgaatggctgattttccaagtttgtacctgctaatgattttgccaagcagtacaaggttcgattcctggggttcatcgacttccccagggttcagactaaaggtaatatcactttgagatatttgaactgcctcttcgaaaaggttgcaaacaccggaggagtccatgagtagctgaataatgttgagttgttgttagggtgaagagcaattgtagaacaattctctatagacttcgttgaagcatactcctagagagcgaaaattcttttaatgcagttcgttatcattgtttacggttttggttttactttttggatttttttttttaaaaaaatgtatgtattatgtgggtgagtatataatttatttgaataataataaaaaaaattattaatctaatatgaggtacttcattattatcaaattaattactacaatgcattgtattgaaaatgaaaggtgtcgtttggtaacacttttttaattaattttctgttttttaaaattgaaaaagtaaaaatatttnnnaaaaacatgttctataaaactgctttcacttttcaattttttaattagaaatcaaaattttaaaaacaaaaaaaatcccttttaatattttttttaaatagttttttttaatcattattttggactccgatgagacccggacccaaatcccctccacacggccctgacgctgaacccgacttctgactcgaacccgaatccgacactagacctaggcccgacttaaataaaatcaaaaataaaaatgaaaatgaagtttacagaacacacttttgtttt

SEQ ID NO: 117389 - DNA, 1101 bp, Cannabis sativa
cactgggtcatgaactgtcttcagtaaaacagccataactcactcaatattgatctgattggtgtgattcaacttgcgtttcaaagctaattcaatgctccatcaattcatgtctccacttcaatcgtaattctgaagttatcaacctctaatttcaccctaatagagttacaaaaataagcttcgggttactccggtaacaaaagctccaactagggcgtagaccagtgcccatggggtcaactaggtagatttcgacaccttggaagccttagtgataggaatcacgactcctaagttgtcgaagttcaaacttgacaaaaagcagcactcaccgctctctgaacgaatcaaagctcttcatatccctctaaagttcaagaacccttcctgacattaatacaccaagaagaaagatccattatctaacatccactgcctcgaagtgcagcccgatttgcaaggtgtgatagacagtgccaagtgcataatcttcctttctacactaataagcctagctcagtggtggtactttaagctctcatctggatcaatcgactcatggaaagatataatggatgcttttggcaaccgattcgttctttcctgataatgccagatcgaacccgataatttggtggatgttaagcagaaggaagacagccccttgaggattacatccaacaattcttaaaggcatatgataagaccaacagtcttaacgaggactcaagggtaatggcacttgcagtcaaactcaaggagatgagttctctgtggtctgatctttgtctcaaggtggtatacactatgaatgacttcttagataaagcagatggctttatcaagttagaagaagacgtcacccaagccaagggctcaattggtggcaagaagaagtcaccagactctcaaacccctgctactaaagcacaggaaaatgggaagaaaggaggatcaaatagagggaagagatccaagatggtaagccagtaaactccctcgctggaaaaagcccaagagtaggggcagccacttacgatagtatgagccttgcttcaccaccaactccatcctcttggccccaagagaggagatcta

SEQ ID NO: 117390 - DNA, 731 bp, Cannabis sativa
acagtgtcttgtttgcacgcctcaggtgttatcatttttattattgtaattatttttctaacatttaagtatcaatccaacattacatcctggtacctaattacaatcatgctaattgaatgaagagttcataaattatgccttaagaatttggggctgatcgtttagagaccagtgcccttccttagcattcggtctttcatctgagtaagagttgttgtgagtctagacatgatttcgtccatttaaatttccctaccttattcattcactcttgctcctaggataaggcatctaagaagaaggaagagagtccagcttcttgaacagaaacccttcactgtgtggctccaccaaagtaatggaagagagtcgagctttgaaaatttgatgaatcgtccgagaagaagaaacaagcggcggctagttttctattttaggtctcgagaagaaaagacacaagtggaaaatatcaaatgaagaataattaagattagatttaacaattagactgatatgtaatcatacacatcaacgtttttttaataaaaaaaattaaaatactcaaaaacgttaggaacataagcaccaacaaatgttaaaaaaagtcccacctatacatttatatatatacttatgctaatttttttctatgttatttgaaagtgatacaataaaaaattaaagaaaaaacactattagttattaggtgagattatttgaataaagaa

SEQ ID NO: 117391 - DNA, 2189 bp, Cannabis sativa
catcagcaagaatgttgttaatatacctgatgggcttctcatacacatactctcctttcttcccgctgagaatctcgttcccacttccctcatttcaaagcgttggagattcttctggcgttcagtgcctaagctcaatttcctccaaactaagagaattggacattcagagggccagcgattgttctacaattttgtggaaactttcttgggacaccgcaagaggtatggataatgatcatcgtgattctgtcataactagttttaaactttccatggatgaatatgactggagcaatgctcaccgcatagatagatggttaggttttgtagttgaaaatagaatgatcaagaaattgatcttttgttgtgggaagagtatgatgaggatggtaccatgtactaccctagcttacctaagccactattcaatgcaagatatttgactattttggatttggctagggtagagttggattgtcgttactcaatttagttttccatacttgaaatcgttgaaattgactattgttcggcttgcagaaaaagatgtgttgggtaagctgttgttgggttccccttctcttgagagattgaaattaagttgtttaagtagtgatcataagctccacattcatagtgatagtttagccttgaagttcttggatgttgtagtggatgacaatatagtagtagagcaaattgaagtggtaaatcttgaaactgtgatgctatctggtgtttcctttgacagaataaatttctctgtatgcaattgcaagacaattagaaccctcaagttaacttgtgattattatatgacagagttatcatcattagaaaatagcatttcaaatcttcctctccttgaggatttgactttgagcaatgatcaatgctcgggattgaagcgtattaaaggttttcgtgtaaataacccttgtgattacgaaacgaatgttatagttaaatcagctccgaaattagcatcattttgttataaaggtagtttcaaatttagtataacaatggagtcatccaatttgttgaatgggacattcataattctttcgtggccgtggcgtgagaactttgatggagattggtttatcaatgtgttgaattttcttttgaatctcaattgttcatggaatagggtaagcctgcatgttgagtcagttaaggtatgtttgcttctcattttgtttgattttgtggtgttatttcaacttcatattattattctttatacctgcatttaacttttaattctatacatgaaggctctcatcatcttccccgaaaatttgaggagggcatgtcgttgttcattgcttaattgggagcatataagagtgtttgctcgacgtgaactactgagagaatcagaattgagagacgctctgttgtggatgtctccttctttaaaagcattatctataacaaaacggtagtcttctacctacttttgttgatgaagattatacttttgttggatatatacaaggctggctacttaggttactgtgttgatttgtttattctcttcttggttatgcattttatcgttgttcactgcttaggttgaagctaatctcaaggttttgacaacttgacagattccttagaccatctcgaatgaggacagtattcatagttgtcaaaatatatacattttaaaatattattttttaatttttctttcatcagatttgatacatttttttataaaaaattatcttggggataattccaaaaattgtttactatgattcatataccacatttaaattaaattttataattatatatattctctcaaaaaattagttggtgatagagattagagtaacatttttcaaaataaataaataaataatgtcacatatcattgctcattttggataatgttattcttaaagttaatttgaaatgttgactaaaatgcacatgtggcaatgaccattccatgggcaaccctcattgaaaatgctcagaacatctccaatgggagttgcccattggagtagtcttggtacatatacaatgtagtccaattatcaataccaattttatgtaggggaatcaccttatatagcatttttttatttttacagtttgggttgctctagtagttattatgtgggttgttatgtggatttgggttgcgatttaagttgcttcgttag

SEQ ID NO: 117392 - DNA, 2358 bp, Cannabis sativa
cctttatgtattttatattgctgctgcacaaatccagaaagattagcttattgtttcaatctatttttcacaccaactattttcttccaataccaactacaatcagcaggagccttttactcctaccactgtgtatcctttaaataccatattgtgcatttatttcacaaataaacaatacttcttgctagctatatcccatacatatctaccaatagctgcaatattccaattcagaatattcatgaagcctattcctccagctcctttgggcaagcaaactttttcccaagccacaagaccgggactagctccttcctaaactcctttccataggaatgacctgcatatggactcaatatctctaagcaatttctttggcaagattaggatttgagattagtaggtatgaatggataagagcattaaattaattattgttaccctccccgtataagataaatttctagagctccacattctaaccttgctaacaatcttctcaagtagcctttggcattcctctttagagattcattttgagcatgtagggattccacgatatctaaaaggcaagaagcttctagagaagttagaagcctctatgattctattaacttccatctctagcatcccaaaacagtaaatggcagtcttctgagcatttggagttagaccagatgttgaagtgaataatttcagtcctttgagcagcaccataactgatataaaatctccattgctgaaaaccagtaagtcatcacgaaaacacatatgatttatcttcaacaatgtgcatctgtcatggaatttaaatccaggccattacccaatctttttaaagatcctagtgaggtactccatgcctagaacaaagaggaggggagacatggggtccccttgcctcagccccctcttggtctcaaaaaacccacacatggagccattgaggagaagagaaaacattagagtcctgatacaacacattacaagttgtatgaacgtgtcagggaacccaaaagcaatcaacatatcctctaaaaagtctcattcaatggtatcataggccttttttagatcaatcttgatcatgcaatttttcctcccgtacaatcttaccagatcttggcataccattatattgtgtgcaatatatccccaatgaacaaaacaacttcggttttctacaattagatcaggcaacaccttccttaatctgtgtcaaatcaccttggttgctatcttgtataaaacattgcagcatgatataggtctaaaatcaaccacactttttggacatactgtcttaggaatgagtgtgatagtattggtgtttatttcctttaaaattttcccagtgttctggaaggacagtagaacatcttcaacttctgatcctactaactgccaattatcctagaaaaaggcacactcagagccatctggcccaggggccttgttaccaggttttgaaaacagagcatccttcacctctttaggagaataattagcaagaataatctttcaatgagtgtcattaaccttaagcccaaggtcaatcactgatttgtggactttccttctgttaggcattgctgtccccaaaagactctggttgtaatctaggaaggctttttggacccagtattgattgtctctccatacaccaaacccatcttcaatcgagaaaatcttattgtgaattcttctcaatttcagagaagcatggaagaatgcagatttctcatctccatatcttgcccaattaaccttggctttttttgagataaacatagaataagccttgtgcacctcagtttaatggctacatgcttcttgttcccccttcatgagttctaggttcaatggatccctcctcaatttcagttgagcatctgcaagtgtagaattagctagtagatctaccttgtgaatctcaaaaaatccttccttatttatcctcttcagtatttctttcagccttctaaatttggtaattaccttgaacattttggacccctagcatctcctctccaagaatctacaacttgttcttcatatttaggagccaatttccacatattgtagtaactaaaaggttttttgccaaaactcatatccttttatatagacaccaagatagggctatgatcaaaattcagttgaggtagaaaaacaactttagagcatgggaaggaattcatccaaagaggattgatcattgcacgataaattttggaataaatcctatcatccggcttcttctatttattgttccatgtgagaaatggcccataatatttcaggtcctccatactacatcagccatggctcattaattttctgtgctagcccctc

SEQ ID NO: 117393 - DNA, 1321 bp, Cannabis sativa
tttcttaataaaatacttattttttatttttaaattatgatcacataaacctagttttacattaaattttagagttagacaaaatttttgaataggagtaccatttctatttttacttaagataaaaaaagctattcactaaaatcttgtaaatcacaataaatattttattaatattattattataaatataatttattgatattaaaattatttaggttatatagttgttatttaaatggttttggtaagttttgtgattatgatattgagtatttaaaatgagttgaacatacccttaaatccaacttttatgttttatgtctctaagatcctctttgacctaactttcccaaaatattacattaatatacatttatatttatatatatatttgtaaaatctaggtgtataattgaagcatgattaatggcaaaatttaatgaacatggtttattccaaggcaatcttagactaatcaaattatttgttttatcattgattgagaattgtaccattaacttaatgctcactctcttcaattcatcactaaaatcaagtatcattacactagtagtataaaacaaaaacaaaaaaagaaaattgcattataaaaatacttatctttgtttaaattatataatatagtataacaacaaacaaaacaatactagtcaacactttagggcccatagtgttatttaatcatttttggcttgttcattttattaatatatttgtttttgttttcttaaatatgcaaacttgtgattggcccatttcaaataaagagagaaaaaatacaaacaaactagttattggccatgtagtagtaacaatttatgttgtggatggtatttatataaactcatatgtatttgatcattgctattagaggatctctcgtgggagtaatatttatagttgtaaaaatacatatattatcacaaaatatactaaaattaacttagatcattattatattaagggtgtacatttggtttgatccgtttatattatattttatttaatttaatgtaaagatcaggttacaagaatctaagtgtaatctatccaattaagaataatataaaatagtaaactgtctaataaaatgagtcgatttcgtcaattaactcaccaccaaccactaatatacatatatatatataatttttttattttatattcaattattgtattttaattaaagctaattatgatttttttccccccaaattttgacatgtaccaaatcataccctttgaacttttttggccattaaaattctccctgaactattgagatagttagatttaa

SEQ ID NO: 117394 - DNA, 2264 bp, Cannabis sativa
tactaataactttttttttttttttttttttttcattttcatgacaaatgtctgataattaagcactagtggtgtctaacacctctagacatgtcactttgcgattaactagtgatatttcttaaaagttattacattaaactatgggactaaccaataacgatattaacatataggagagtactaggcaccactcatattttttgacattttttaataataatctccaaatttatttagaatttctcaactgaatacgattcattcaataacctaagaaaaaagtatcaaatctctccgataagagcatatagatcctctcaaaatgcacaaacaattaaatttgttggtttttattttattttcgatattggttttatttgtttgttgtatttgtgtagctttccaagaacaaaacaaaaggtagttttcacatcattaattgatttataatatgatattcatttttcttttcttttgggtgttaatgaaagcaacaatcttaattgctcttgtcaccaatggagacatacatgttaactcttttttaggtcttttttattgtatatattgacataattccatatttgttaaatgtgttcttttttttttctttctttcttttcaattaataaccctatttataattatttctgattttctcttttattttatttgttttaatttatgcccctaaacatgaaattatttacaattaggaaagatctgaaaatatataaatttattataaaattaaatttgaaaacattttgatcaaatttggattaaagagactatttctaactactaacaaaatacgaggtgattgaattagttatgtgcgttagcaaatgacacaatttatgatcagggccgactataaaaaaatatatttttggacccttacatagaactacatgtgatatttttcaaaactagtaaaaaaaaatatgtaatttttttttaaaaaaaaaatttgggcccttaaacctaggtgggccctaggcacaggcctagcccacctagggtcggacttgcttgtgataagatgattcaacattagtgagaaaaaatagtcactatcttgccggaggatattatctaatattgtcttgcatgaattaaatgtaaaaatattgagtcgtatataagaacatgaactatttttattgttctaaacatatttttattaactatttcttgttttaataattatttttctatgaggatatatgtgtatattaaatattgtatattttaaatgaataaaatatatttaatttattaaaaaaaaaggtttttgataacgtattttaaaaattaatgtatggtataataaagtatgttgtaaaataaaaaaaaaaaattgagtgattgaaagtgctcttacgtatgagcatatttttgtttcatttttaaaggtattttctatatgagtatatggaatagtataacattatagttttatagaagacattataattgtttttgtaaaattttgaaaaatttacaatattggaaatatgattttaactattagttacactcattcttatttctttatatataattgtagttggctattttgtactttatttttaacacagcaagtattattcaaattcttcgaaaagtgatgaaatatatttggctaattaggatttttttctctccgaactttgacatttatcaaatcatgttctctgaacttttttggctattaaaaattccccctgaactattgaaattattaaatttaaggacttttgtctaatttaagtaaaaaaattctaacatagatgaaagttcaggaggcatgatttagtacatatcaaagtttgaggagtatgatttggtagatatcaaagtccggggagcatggcttagtacataaacaatcactgtaacagtaaaattgaataaaattaggattgtaatcaatttatgtgcatagaatatgtagtattgaagattgttttatacaaatgtaaacactcttattttaaaatttatttttgatattgtaaattataatttattcaaagtatcaaaaataaagacgcttctaccggtgggaccaaaagcatgcttctttattcctacatataacatttttttgacaataaaactttctacattgtatattgtaggtttagtaaatatattcgctaattaagatttttttcctccgaactttaacatgtaccaaatcatgctccctcaatttttttggcagttaaaaattctccttgaactattgagat

SEQ ID NO: 117395 - DNA, 2750 bp, Cannabis sativa
  modified_base (1376)..(1376): a, c, t, g, unknown or other
gtttgaattattttattattgataaataattttttttgttgtttagtctatatagttagtaatttatagttaataaatttagctgaaatctaattgaagcaaaaatatacatctttctagttaattaaaacttatgataaggagacataatccatctaagatttgctcctatatcatttctttaactaatataaatacatttttctttaactaatataaatacattttatctgatcaccacaatttgtatatttttgttcatatgataatctggttttgtttcccttcaaaaaaataaaataaaataatatggttttgttttataaatttagagagaaatacttagatcatctcactaaatttggtatcacactatgacactaatattaaatttagtgttcattcaaaaaaaatattaaatttagtgtcaaaaactcattctataacactaaaaattacactaaaaggaatattttttattattatattttgtttttttaataaaatagagtattcttttaaagttattgctcttcatttgatgtgtttagcatgtttaattttaatttttcaatgtatgttaaagtttgtaatgcttttattgtgtaatgtatgtgatatttagtgtgcttaattttaactttttaatgtatatttatatttataatgtttgtattgtgtaatattaaaaaaatatacaaaaatttaataatattttatttaaaattataattaaaataacaataatttatggtattcacaatttaagctccacataataaattaaattctagattttataaatataaataattaacataaatgtatacaaaatattattatatataataataaaaaaaaagatgttgttaggggtgttcataaaatacgaaatctaattcaatccacaatccaatcaatctaatccgcaaagtgtggatatccgcacttctgtagattggattagaataaaaaatttaaaattcgtacttgcgcggattggatgttgattgacatataaaagttaacgatcaaattcaatccacaaatatttatatatatttaaaatatatataattagtattttaatgataaaaaacaataatttaaaatttaatacatatgatacaaatatattttaaaatatagtagatcaaatatagattttattcttatttatcaaaaaaatataatttaaaacagaattcaacatttttttatacatatatatatattttttttctttttgctttaaatttttatgttttgttttagatattttagtttgttgttgaaatataaaacaacaataatttattttatttttttgttagtaatgtgaaaaaatatagtttttaataaatattaaataattnaatattaaaaagtaactaatctaaaataaccgatcaaattcgtacttttgtagattggatttgagtggatatgcggattgaattagatctaaaatatgaaatctgcacttagtgcgaatcgaatgcactatgagtaaaattgtacatgtcgaattagatgaacactcttaaatatcgtgtatgctatagtgtatgccatatatattgtgcacactgtagcacgcatgacaaaatggtctgatgtttgcaatgtcgttgcaacaaagtagagcgacaaaagatgaaatgcagtctcgttgaagatactcttactaagttagtattgcacaatccaatttttatattatttctcaattatgtcaatatgataatcacatatgttttttttatatattttttttttattcatagtgttttaaattgtatgcaatatactatcctcatgttttataaattctaatggctagagttatttttttatatggttagaatttatttattcaatacatattctttaatttagtttcgggttattatgaatggattaatgtgaggagaggaaagctaatctcaatgattaccctatttgttataaagttttagattttttaagtcatttaatacttttactgtagtattctaactaccctaaaaatgtgtaatgttaatcccttcataaaaaaatggaattcaaacattttatttaaacatttgatgagaatttttatcaaataaaaagtcaaataataaatttaaataaaaccaaaaaaaaattatttattttgaaagaaaaaatataacgtctataaaaaattcatataacatttatttatacttattcacgctataataattttacattaataaatataaaaatattgtatcaaaatatatgtgaactattattcattttaattaatcacaaatacaataaaattaaatttattaattaataaatctatatgttttacaaataataattttattctatctataattaacttaaaagaaatataataattattattattttattttattttactattctaaaatagtatataagatttatgtgctcaatcaaacactataatttaattaacaatagtctaattaaatattaccatgaataactaaacacagtaataagtttacagataattatattctccttcataatatttttcttaatcagattattttgaatcccttataccaaacgttttcttaaggattacatttaggaagtgtgattaaagatgcatgtattctccaagatagagtatgaagtgatttttttattatatatatatatatactagaagaaaattacgtgcatggcacgtatatttagttttatgttatgtgttctat

SEQ ID NO: 117396 - DNA, 2451 bp, Cannabis sativa
  modified_base (41)..(44): a, c, t, g, unknown or other
tttgctacaaaatcaacaaatcattagtaacaaataataannnnatatttgttaatcatcaaaacaaggagacctaaaagtttgagttaacaattttttggtcacatatataattatttgagttcaaaaattatactattacaatccaatttttaaaagtgatcattttaacacgtaggaaatatatattttttgctgccaccaaaaaataactgaaattaaaagtaacttcttaatttcttttctatttaattaacaaaaacaatcaaatttttaacttaaacaaaatttagtatatgaattaattttatgaattggtaataagtattttgttattttatatttaaaagttattaaattagattgtattctatataaacttattttgtactacaattttattaagtttatacgagaattttataagaaaaccatatagtataaattcaatacaataaccaaagttattgattattctaaaaattttgttattttttttatctaaaagttaatgaataatatacttagaacaaatttacattacagatattttgatgtgttttttaaaaatactcataaagtaaccaaacaatattttaaacatcctagaattaattatattatgaaaactattatatccactaattttagtaataaattataagataagtgcttataagtatattgcaccttattaaattcttaaatatgttttttagtaatgaaaatgttgctaaaataacatataagtattttaaacaataatataacataaagtaaaataatattttgtaataaaatgaatcatgtgatgtttaagatattatttaatttccttaataagcttttataaaaaaattatcaaaattgctcgataaactctcactaactttgaaagtaattttaaaattgatacacaaagagagctaactaataccagcgacctaaaggtgtatttatatgctttaaaaaccctttaggtcgtggtcaaaaaacctagaaacaatcacgtcaataaataaaaaagtcaaaattagtttaaacagatagtcaatccacccaaacaggtacattgaacctagacagtttttcaataaagcttctataaacaaataagacaactttgacaaattttacacacacagatatacatggtttcttggttaaaaaatgagataaaaatgaaataaatatgattaagaatttacttaaaatacaaagataacattaaatattctaaataaagaaaaattatatttattcataaataaaatcaaaagtgaatagaatctgcttttgaaagccttttcacacttaaaaaaatataattatattttcgaaaataatgaatacacaactaaaattattgttaaaaatactacaaatattatttttgtttaatttatcaaatatgctaataaatgattttacaatgagaaaatgaaagagtagagaagaagaaaaattggcatttaaattattaaaataataaataaaagatgaacactgtatcgctccatgtagcgaacagagcgttctgtaaagtaaatatagagcagctaatggagtgatcttttatcaatgtttagctattttttaaagatgtggctcttatgatgtgagtcttagtgttagatctacatttcaacatactctttaaattatgattatttacatgtaaaaaaaaataaaaaataaaaagatggtgcacgatgtaatggcatattaacaagataatggcaatggcaaatacggatttatgcttaaaaaaaaaaataaataaataatttgcggtataagtacttaaatttaattatcgattgcaaataaatacttaaattatttttctgtaattctgtaagtacttagccgttcaatgtcaaattattattcacgtgtcattttttttattggtataaataaaaatgacatggaccaatcaagaattgtcacgtggtaattacttaaaacttaacgtccactacttacagaagtttcagaattataacttatgtattatttttaattatttacaactgagagctaaatttagatatttatactgaaattactcaaaaaaaatttagaccttgacaaaattattaatgttatcaaaatttattgaaattttatttttcataaaaattaatttcaaattcttatcattaaaatttttatttcatgtattaatttcatattatttttcatttgctttattaataattatccagattatgattaattttttctccatcaataaactttaatttatttataaaaatctttcatgaaaaataaatcaatagtcataaaaattaggactgaacattttgagcgggttcgacttgaaccctagcaactagggctgtacaaaaaaatttgtaaaccgcctaaaccgaataacccgcccaaaccgaaccgaaaaaatcgataaaaattacaaaccgaaat

SEQ ID NO: 117397 - DNA, 787 bp, Cannabis sativa
atgttcacccctaatcacggattcttgtgccaacacccactctattccataccacttgtattttaggacaagtaaccaaggcatggactattatctcttcatcccctttgcaaactggacaggaagcatagatgtttactctttttgctcgaagttggcagagagtaggaagacaaattttaaaggcacgccacaccagatttttgatcttgggaggcagtttgagacgctagaaagcagtccaaaacttggctgctatgtcaaaattttcttcccatcttccatgatcaacttgcaacagtttatacgcactctttacagagtaaaaacctgaagattcttgtttccaagtcaacctgtcctctacagcagaaaaacggggcaacatattgattaattctctatctctgtcgttgaacaggtcttctaatatctcttgatcccaacttccatcatcacacaaaagactttgaactgttgcattctctagagccgggtgtgttgaagtaacaaaaggatctccttcgcaaggtagccaaggctcattcaaaacactaattgtactcccatcaccaatacaccattgaactcctttttggaccaattgttgagcttcccaaacgctcctccacacgaaactcggattatttctcagcatagccgagagataattaccatcaggaaaatatctggctttgaaaatctttgcaaccaaagaattatgtcgggctaggagtctcctgttgggttttatgccctatataaaactctttacaatctgattagt

SEQ ID NO: 117398 - DNA, 3643 bp, Cannabis sativa
actaatcagattgtaaagagttttatttagggcataaaacctaacatcttgaaggagtataacttttatttcaagaacagacgatttgcaagagatttggtcatgtacagacattcgagctttgtccaaagactagaagcagttatttcttttgaaacctccctcaagaccttgtcaccaagactcaagatgatcataatgtgagccttctccaaaatttcaatcttctctttctcagtcatgacatccttgatcttttcagcactaaccagagcatcttgaattccatattgcaccagtaaagctctcattttcaccctccataatccaaagtcgttcttcattataaacttctctaaattgaactttgcacttcccataatttccctggatgctcttcacactctatcacgcttggcttttcttgaatcaagccgaagaacttgtcgagctttaataccaaactgttagggaatgcagtctcgattcctagctacacatacctgagttctcagacagaacttccacacacaaaaacatagtatgaagaagaaagaggtattgtattgtattgatgaatctttgtattacaatatatacatatgtctaatatgaactcgataacatgactaaaatggactaaggtcctttctacagtaaaaggccttagtcagtataatgcatacatgttaactagaacctagtacatatagacagttagaaaaataactgtcaaccatcaatagtaactaacaactacttcacagctacccagcttgaagtcgataagtttagtggtgctaatgattttaatgggttattgaggatcaagatgaaagccctttttatagtttatcatggtattgcaaaagctattgatgaaaaacctctaaaggaaattagtgatgacaataagaagcggaaggatgctgagacgaaggtacataaatcctacgcaatttgagagatgaggtctttagagaagtcttgaatgaagagaaggcattgggtttgtggaacaaacttccaacgatctacatgaagaaattaatcactagcaaataaactttatctcaataaatttttgtacactttgaggatggatgatatcaaagatctgagaagacatattgatgaagtaacaagattatgctcgattattcaacattggagtgaagttagatgaagaagatcaacctataattttgttgagttctcaacttaagactatctccaatggaaggtgtaaattttgtgctaaatttagctctaaaaatgagtcaatgttttatatttagcctaaattttacaattgtgctcctatgcattaagagtaaaattaactttatttttgataaaaatgtgtaaaaaagtcaacaaaagcattaaattttgattgaaaatgtataaaaatcttattaaatatactaatataatgtaaaaacttattaattatattaatgagctgtagaagaataaatagaaaaatcacatttattgtcgtataaaatttggctcatgctatatttcatgctagatttgagataactttttgcatgtgccaaatttaaaccacattatacactaccactagagttcaattttatgaacatgggttaaaaaatacttatacactatctttatagtactccattgtagatgttccaagatgtatgaccattttggttatacaattctctatggcaaggagacattaacgatgcctgaggtgaaggcagcattgaattcaatgatgattcataagaggatagattataattgttgaccttagatttggccaaccgatagcagagttgtgtttattactgatgcttgccacatgttaaacaataagaatataaaagtaaatgagacacaagatttaatagaggttcaacccccttagttagcgggtaatgacctactcccctttttattgtattaataccaatgataatacaactcagatcacaagtgttgtggaatctgaagtggctctcttaagattacaatgagaaaatcaagttggcaaatctcaagtgagggagagagtatgcctttggcatgtgagagaaaagggagtgagagttgagtttcaaacttagagcttgagaacttagagacttagaacttaagacttagggaattagagtttaactaatgccttttatatagtagagcttacatcaagattaactagcaatatcccttaaaaattggtaaataaaactatatttacataattgaataataaactttaaatgacttaattatcccttaaaaataaggaagttgctaatattttccccctatttttatgggttgtgaaggcctaattcgcagcttagcttgctgtccacggatgaaggttgcacaccaaaggcctgctaggaaaaggctggccacccatggacttgccaagtgtaggtcgaccggacacacaatgtctacaggctagttggccttttctggccatagggctggctagaggtggccggacaacccattaagggcggctcgttcgtcatttcattatccctcctaagtactcaaacttctcatcaattgaagtattgcgtagatgacttggccttcatgttgacgagttgtactcccacgttgcataaattttatccacgttgacacggcacttcaggtgagaaaaaattgggataacatttgccctccaagtctctatgcaaatgtgcgtacggatagggactttcctacttagttgagactgatttagtcttaatcgagaaaattttacactattatttagccttcaaaatattttctcttgcttgtctgatcacattccttggcaccaaattaataaaattatatttttgtatttttttgatgtgtgctgcatggcaagtgagaaagggtcccacagaagctatataagcttctgggagtaactcacttctcattttccacactttattctctctcttcaagaaagcaagttaggaaagctcttcacttcccttgaggctgatgcccctttgtcttccaactctcaagattttcacgttatttcgacaatccaagctttcccccatcttcctcaacagtttttactagtgggcaagctttcaaatatcgttcttcacttgttcatttggattttccatggttgctttaatgctttcctttactttgaaatttttttaattatcatttagattgtagtctttttggtattttgatccatatgatagttctagaatgcataatgtgtgatttcttgatgaaatgattcgattttgaacttcgttatgattcttagctctttgagtcacgaagaacatgtttgagatttttaaaaacaaaccttttaatttcatcatcaaccctggcttgccataaggatcttgtttaagacctggccagccatagggtcttttcattggagctagccggccataagggtccaccctagagggctggctggtccatgcctaggcctaagaccctagtcgattctcgacttggtaaagggaccctagccggccctctcatagctcgggaactctggcagcctagtgggcaggcaattttttgtccttttttgacctcgacaagcatctcgttaaagccttgtaagcaagtgtaacgtccccgcttcaagcctcca

SEQ ID NO: 117399 - DNA, 1230 bp, Cannabis sativa
tgatcttctaaattttgaactcttagatttggcttaattttaaacttttatattatgttatttagttgtttaaagatactataaagttactttctttaaaagattttaccataattataaataagtttaagaaatttataaaattttacaatatagcttattggcaaaatcattatagtaatattcttcatttgatttttatgtaaatgtgattcattctataatatttaattaaaatattgtttggtttttttattataaattattttaaaaatttatgacaattgttatttgaaataaatttatgtagaatataatttagtagcttttaactattaaataataaaatattcttttaaataaccaatgaaattgattgttgtatttaattttgtttagacttaaattttgttaaaatggaaagaaacaaaaatgttacattacttagcaaaaaaaaattaaaggttacatttgattccagtcatcttttctcatgacggtgaaaaaaatatatacttttcatatatcaaaatgatcacattgaagaataaatcgtaataatataattttgaaactaaacgattattggcgtagctgaaaataattttaaaattattaaaaaaaaaaatttgttatttaaaaaaaaggaacttagaacctatatcaagaaagtgaagaagttagtatgcgattaacatattgttcaactaaaaaatgctctgtaggagctaacttcgtggaagtatacagatcctgctgttcttattcgttcttcatcgaactcttaacaacctaagctccatggaccccaagcaagttagtgatctcttccaggatgcggtccaaataaccagtgatgaaatcacattctccctcaacccaggtgaagttgatgagcctcaagaatctaaccaggtcctcatagggaaaatcctcagtcgatataagctaggcaaagcagccatacaaggctctctgcagttatcctggagtgccatcaagggatggaagtggaaagaaatcgaagatgggctcatcaaattcacgtttgccaatagaaacgatgccatgaatgtcctggcacggaggccctggttcgtttgtgggtcactcatggttttaatgccttggccatcttggctaactccctctgaaatcagatttgacaaaacaccaatgtgggtgaggatagaaagcatcccacccttttattggaatctctctaacctc

SEQ ID NO: 117400 - DNA, 1100 bp, Cannabis sativa
taaacgtcataaattgatctaatctaattataatcagttgatccaattacaaacgactgacaaaatttaaaaatttaatacattcaatatctaattaaattaattaatatttttatttaatataaatgagttattaaattttatattattatacataaaatatatatacaaatataaaagaaaattaataataatttcttaaaaaattaaatggatacaattcaatttaatatatattagacttaaaatactaaatagatcctattcaatctaaaaatacaatattaaatacaatataattagattggatacttgaaaaaatgagatagggtctaatgcacctttttaatgttaagttattttccttataatatacaatttgtaaatattatttcttaaaatataacttttaccctaatataattattctatcacaatttatttaattttattataaaataagtaacataataaatagtagttaataaatagatacaaattgaatttcttttactttttcaatgctaaaaaactacaaatatgaattattatatatataaaatatttttattttattattcattaacataaaaaataaagtatttaatttacattcattatcaactattatcactaaaatatttatttttcaacaaaattaaatagaatatggtcaaaataccacattaaatattatatttggagttatattatttacaaaatgtatattatagatgacacagtaatgtgaacattttaaaaagtaaaaatactaatcattattctttatattttcctttacatcatataaatattatatactatattaattaaaccaagtaaaaatacaaaaataaatgaaaaaattaggaaaattacctccacattattcattgaacttttttaattgattcattagtttcaaatatatataataaataaaggatttaaaaagttcaatgagtaatgaatcagcgtagtccagtccagcccgagtggtaagtcatctttacaaaaaaaatatgaatgtttactaaacaaatttaactataaatactaattttaaaaatatcaaactatcaaattttgatctaataacg

SEQ ID NO: 117401 - DNA, 1787 bp, Cannabis sativa
ggtgattgggctaagaaatacataaaaagagggaaacgaatgacgaaattaggaaaaaacataccttttgggcagtcgatgacggttggtgagccaaacaaagagagagagatggagtttcgttaaggattttagggtttatttatgaatgagaggtggctagatcttcgttaggattttataacggtcggttagagttttattatgggttaaagcccatttagaagttcggcaacccctttagctaagattatttggaaataaccgcaaccattagtggtgtacatatcggttagtttggttaggtgttaatatatttttaccaactcaatataaatgtcctgttgcaaatatttaattataacctgtccaattaaaaaataataaaaaaaaaccagcccaataattttttcaggttaatctatccaaaccgatttttattattatttttcttataattattgttaatttttagtatttacataattattaaatttgaaaaaataaatatatatttcaagattaaagtgttgtagtctaaatttaatgtaaaaaatttatacataagtcaaatataaataaaataaacattaaaatacataacaacactctttaaaaaaaacaaaaaaaatatatattaatatagtgtataatgtcaatttcaatatttaaatacatttaaaattattaattacaatgtccaaatctctaattaaatactacaaactttagatataaaattgtatagctattaaaagtaatttgtgtaatatgttataaaaaaatttagtaaaaatatattaatcaatttattcggttcattcaggctatttaggtgggttacatatataataatattcaacccaccactatatttattgagcgatttaaattttttattggcttatttaggttatgtcttttgtcgatttattctgtttgatttgaacgatttatttgagaaatttgttaatttttttgaacacccttagaagtcaaagggtgatgcctgtaatcctatgattgtggttatttctaaataactgcaactaaagaggtttcgcgctaattttttcccttttaatataatcaaatttatatgtaagaaactaatagttgtggatactagaaggttaaggcttcacttttcattttagtgattgaaaaaattcgaagctaaaatttaatagtaattgctaatgtgtagaaatatataatatcataaatagactaattgtcaattctatgaaccttcattctaaattctaacacaaagttaatctcagtgtgataacaagcaagagggaagaccccattccacttagcaattttcttacatctaaaattatcttagctaaacagtgagtgagaaagcttctaatgtaaatttgatttgatttatttttttaggccagctcaataaggatgtaacttctgttattttgagataataaggatgtaatttctattatttattaaattttccaccacaccgtataaaatgcccgcaccacaacaaaatatatagtttaaaacctttgagtgttttgataataataattataacaataatgatgatgaagaaaaaagatggtcttagaaaaaaaaaatgtagaatagcaatgatcattgatcattatcactaatatgacaaaaaataataggataattacacggcattattttttgtaaaagaattacattcttatgtttaaagaatttattttacaatattacggttttctatagaaataacaagaaaactacataaaagtaatatgaaaata

SEQ ID NO: 117402 - DNA, 3083 bp, Cannabis sativa
  modified_base (2415)..(2419): a, c, t, g, unknown or other
  modified_base (2913)..(2921): a, c, t, g, unknown or other
ttttgattctgattctgtagggtttataaaggtgttgtattgaggtaggtggtgaaggagttggtcgcagcgtcgattgcaacagtggaggcgaaggcggtggaggcggcggcggcagtggaagacgcgtcggtcgccccttatcgttggtgaaagaggatgtggaagagattattttgaaaccaactatagcactatatttagtattgacactaatagtatttaatatcaccttaaaatgacgccttgtccagaaattacttatttgaatattagtatgaaacaataggacaaggcaaatgaaactgtccgagtagcttccaatccgtacaaggtaaatgcgagtggggcaaatcattagagatactttcctttttcatttgtcaattgaatccctacttcagtggaatttccacatgatattattgtaaaatgggaaagtagtaaagtttccccttttatttcgtatttttttagaaaaccaaattgatataagttttcctataaataatggagtcattccaatgttcagggatccaaaaatcatattttcttgaagggctcttatactataaaagaattgttagtttttattgggaattcttaagaaactcgcctgaccagttctttgtgatcttattaattcttcaaagcactatgttgacctcgcttctagccaacgccagtgagtcaaaataaagtgattagataagataaataatagaaagcaaaaacaataagtaaagagaacaccaaaatttgtagaggtttggccccgtgagaatggtaatagcctactccccttttggttgtattgacttgatagagaaagaataaagtattctctctctttggctcttacaatggatctctgagtaatgctctcttaaatcgctctttctctcttgagtgttctttctgaatcaaatttcgccccctgagtagtgagatgaaaccactatttatagggccttattacatgaagaatgatttcccgtaattaataacaaataaataagaatctaagttaattccaaaattacaatacaaagaatgggaaacctaggcttattgcctttattgtctgaactaatcccacaaatgtagggattatcttattcttggaagtaacgatgtccatctctaaaattttcaactcagatatcatgttcggtgcatgcgagttaatcacacgattgagctttggaaggatgtctccttatggctatgcttatacatcttactatgtacagttgatatggttcttcctaccaatctttgggggttgccaggattgaaatcttccgcacaggtaggaaaatatgaaactcgtgtcatccggctaactgccatgtcatagtgaaaaaaatgagataacagttgcccccaagtctgcgtgggaccttcctggttgcacgtggacttcattcggtctagaatcttatccgaatggatggcgcgtgtcttgacggttgaagttgatccaatgtgactttgattgagagtctatttggtgtttgagcattaaatactttttaaaagttgtaccttgaatcacgcattgacgggtgaatgacactacagaaagatggttgtacttcttgcaagtagtactaacgttcacttttggagggaaaacccaaatattcaaattttaaatgatttatcttcctttgtttggaggcctgtaaaaggggattaaagcttttgagcattcttttatccatttttactctcaaataaccagagcaaaagattcctgtgtaaatttcctcccaaatctttgaaggaactagcccaaaaatccattgacgctatcctcccaacagatcgagaaagcttcaaacactgagtaagtcattcatccctttaaatgattgcaaatgaatatatgtgctgtttctgaatttcttgccatgaacttcaactgttcctgaattgttcttgacaaattgtagagtagatagttcaacggtgttgacctcaaaaagtgatcaatcgacagcggggtcgtatgaatccgatacttaccacgtgttacaaaaaaagaatagaaagataaagaacacaccaatttttaatagaggttcggccccctatgatagcgggtaatgacctactccccttttagttttattaatactgaaggttaatactattcaaatcagtatatgtgggatcttatatagcacccttaaggatacaaagaatgaatcgggattggcgaatcacaagtggtgagagtgcttgtatggatgtgtgagagaaagtgaagaagaacagagttatcagacttaggcttagagctttaaggcttgtattaggcttaaattaaacttaggtttttaagattagagttaaggcctttatataggaagcctaaaatcctaatttacacttgaaaccctaggatannnnnatagttaattaattaattataaaagaccaaaattcccttgaacatatatattattcagctaatctattgggcttttaaggcctaatttgcaacccaaatgatgttgttcacgtgtagaagtgcacagagaaccctgtagagcttctcttggcttgccagacccctgtagggaacaggctggtcagccatggtgtggtctaaaggttggctggccatggtgtagtttagaagctgaccggtcatagggttggccagtggtggccggccagcttctgtgaggaagctggtctgtcactcgatgcccgtttaagtgttagggtctccgtttgcttaggtactgacttggccttcttatttgcgacatgtactaccacatggaactgatttggtccacataagcactgccacgtggaactgattttgtccacgtaagcactgccacataagaaggacaaaaattaggataccatttgtgttgggattttatgccctannnnnnnnncatttcaatataatcttaattgttatcaatggaagattagaagtcatttatgattacatgtattattcatgattatgatttgatatacaatttctgttaaatttagaacacatagttattcacaattacagtgatgtcaacatagtggaaggtaattgtgat

SEQ ID NO: 117403 - DNA, 1248 bp, Cannabis sativa
aaaatatttaaaattccgcacaactgtatttttgtatttttttttttttttgtaatttttgtgtatttataaaataatcttttttttttctaaggctcatttaaactctgggccgaccctaggcgccttattaccactgtttagtgatattctataatagtcattaaattaaattatatgagatctaatacttaattttaccaataacgatattacaccatagagattacgtatcattcattgtgctttttaggatttctctatttaataataatgtatgttttttttttttgaatgaaaataaactttattagatagaaacatccgctaaaacaatggattgaagagcaaggggaatatcgctctcagtaaaaagacgacctgaccaataacaaacaccacgtgccatacagtgcgcggctttgttagtagaccgtttaacatgaccaatagaaacattacttaaagaagataaaataaattgacaatcttgaacaaaaatcttgaacaaataaacaaaaaaatgtatgttaaaaatgtatgtttttttttttttttttttgagaaaaaccaaaaatgtatgtttagttgttactaatagtgtttaattttagtattataagattgtcacgtgtacttagcgttaaacaaggcatacacgtgtatgttttatgcagccgattagagaagaaggttatattccattttttctctatcatatcttctcaatatataattatttgagtatagatatatatatataaatatatatatatcattcattaaaatggaattaggtctctctataatttcttatttgaggaagattcctgtgaaagagacacaagagtgaaatccaacaaaagtgtagttgtaattaaaaattaatgaaaggagatatacactcaattttggctaactaattaacaaaaaatataacaaatcagatggtaattatagtttaaatgacaaaaactaattattaaatgttattattaattttttatctggtgaaatagtaactagtttttaagaatgaattatatattttaatttagggatctatgattattctttttcttttccgttcagttttgacatattaagaatataatatgttgatttaagattaatataggggaggactttaagccttattgatgtaatggcatgtttactaataagtaatgggaatcaatagtaaggtaatcattcccttacatttgtttacttgcattattaaaatta

SEQ ID NO: 117404 - DNA, 1359 bp, Cannabis sativa
tttttttttttttttttttgtccaggttttacgagggctgggttcgtggttgatggggatggggatggggttcgtgggtttgtggtttgatggggatggggacggggacagcttcgcgggtttgtggttgatggggacaaggatggggtttgtgggtaatggttcgatgggtggggacaggttcgtgtggagatctcgtaggtggatagtcggggttgatctttggactggcagtagagatctcaaatctgattcaaagttgtagatctaaaatttttgtgtatattaatacgtatttgtttgttagatttaattttatttaaatttagtttgagttctgtctaattatttttatgtgtgattggaatttgaaaagtagggttgtggtggttgttggagtgatggagggttggggtggcagtggtagcaatggtggtggtgatggtatatatgaaaatgaagaagtgaaaaaaaaaatgaagaagaaaaataaaagaacagaaaaagttgtttttatttttttttgtgtttgaaaaatattctttttaatttacttcttttttattttaaaatatttttaaaatttttaattttatttaaatatttatttttgtcaaccaataatattgtatcatatgaacagtgtgttcaagtagacagtaccatgtattaaacttgaactaccaacttgatagataacacatgaaaatagatgaaaatggctggattttaggaattttgccatgaaattttgaattttaagagttaattactaacaaagtaaaagtagtaatcaagttcatttgggatctaaagcatagaggggttcaagtcgaggacgttttcttatatgcttcgataattgtggatacaatttggagggttcggaatgataaagtccataataactgcccagtggatatgaaaaaatgtgttgatgaaatttgtatttcttatgttgatttgcatgcttctttattccctagtcctgctccacatcccaaggaagcttgatcccctccccccaggattggatcaagctgaattgtgatgtaaaagtgagatttgacaatatgtgtattgcagtggttgctaggaatcatcttggcagcgtgattagagtccagacggtgcgggtggatttctctgatgctctttgtggagaagctgaggcttgttgtttggctgtgtcggttgctttggatgtcggatgcaggtttgtaatagtggagaatgactcgagggtggtaatcaatgctatcaatatggttaagtctcgttgggcacttgataactatgtctctttttgtttgaagtcttctccctcttttgttagctgtaatttttcttttattagtc

SEQ ID NO: 117405 - DNA, 805 bp, Cannabis sativa
aactataatctctagagagagagaaatggaaatttgggcaggtcaaactcatcatgctaaataccaagttagtttccacgctttgttatagtttgtacgcaattaactaaataccaaaaaaaaaaaaagcacaaaattaaagtgtagtttgatggaaaaaaaagtgcttaaggctaaatctaatcattaataatatattctgacttgtcctctcaccacacaaaatcattttctcgtatatctccaccactatcatgctttcctatttatattaattttttttttgatgaatcctatatacatttattattatataaatacactattaaattgtattaatagtcatattatattttataaaagtgttagacactataagtatcttttaacatttagacgcctacgagtggtgaactcaaaactaaaatttaggaggtaataccttttttctgtaaagaaggcaaatggtaaactaaatattaaaaatagcgataattttattagaatttaaacttttaaccattataatatgttaagataacttaacatcatatcaaagctaatattatatttatcatctttaattacaaatatgttgtaactaactacaatatatatacattttcttctcaatttttttttaaaggagatgactttctctttcgtctttatatgagtccgcccgtaatgtttcttttaggtggtattagagaatatagtgcccaacaagaatacttaataattaatagagtaatttacggcataaatacttaaatttaactcccagttacaaataaatacctaa

SEQ ID NO: 117406 - DNA, 1017 bp, Cannabis sativa
  modified_base (982)..(987): a, c, t, g, unknown or other
gacgaagacgaagacgaagatgaagataatgaagataggaagaatgagcagagctcgagcaatagcacagttgaagaaaatggatcgaagaagcagcagggagctacttctggtggatctgtaaggcaatatgttcgttccaagactccaaggcttcgctggactcccgatctgcatctttgctttgttcgagcagttgaaagattaggaggacaagatagtaagtaaacatatatatacatatataaacgatccaattaattaaccctagacatagcagtactacttttttatacataaatggctgaattaataatatgttttgttggagcaggagctacaccaaagctggttcttcaattgatgaacataaagggccttagcatagctcatgtcaagagtcatcttcaagtaattattattattatttgatttaagatttcggccatatagttttttcactctatatgatcatatatatatgtgtgtgtaagattcagggctcgtattcatatatattaattatttctttattttttggcttcgtatttttgtagatgtatagaagcaagaagatagaagacccaaatcaaggtatatatatacagtttatatatatagcattaaataatttagagcctaattaacaatacctagcttatccgatctatatacatgtattaatttgtatataaatacattgattttacttatatattttcttttttctgttatgactaatacacagttctttcagaacaaggatttttcttggaagcaggaagagaacatcatcaccacatttacaacctcagccaactcccaatgctacaaagtttcaatcaatggcctaattcaagtttaatcaggtaatataattaatatatataattgactccataataatcagttttctctccaatatagtctaattctatatatagtatgggaagaggtttcaatggttatatttttattgtannnnnnatggttacatttttttaagccattggatta

SEQ ID NO: 117407 - DNA, 3342 bp, Cannabis sativa
  modified_base (3286)..(3289): a, c, t, g, unknown or other
cataccttaaccatattattaggaaataaaagaatgatctagatttatgagatttgggagcaaattaggcctactaatagagagattgggcgagaaagcaaacaataaaggtctattcaagttgaccgcatctaatcttgttttcttcactgttatttaatttctctgtaaaccacaaccttcatgcgttgattgaattcagttaccacgagctcattatgatattgaccaattgattatattttggtcggaactggaaagggtaaatttacatattaacaacaataatcattaaaaagggaaaaaaaaggtttgaatctaaatgctggagggaaactgcattacatcacattaaagcttacaaaatggcataacctaggacattagatgatcatgcctctaattttattagtgcaggaggtagtttactatgttttttggattaacatggtgatcagtggcaatcatttcgtcacatcctaattcccataactagctgaaaaggtgggtggttgcttgaattatttgcattgtattttgaatttctgttgatcctctatcccttgagctgaataggtgggactgggacacaatccaacgaggtaaaactcgtcaacttgaaaatagcagttgtagccattccacatactgcttggacactgaattatctaaactatattctttaagaaacaaggaaaatatttacctggatactgcagtctttcaaagttcgcatgatgtcatagaggagccccttgtgatcagcacaatgaatttggagtaatgtatgagctagacttagtgaattgtccactgttacattggcattcttcaacttagtcatgtctggactcaaagcttgagaatggatttctctatctgataattcacatctaaaaggttcttcagctactacgggagaaagagaagaaattccttgatgtcgttcgtactcggggcctgccaattgaagttcacaggtgatacacgattcacccaatacaacatgcaattgttctaaagtctcatcttgccggtctttagtgtgtagaaggtccctgcaatgtgaatacaataaacatcagagacatgaaagaaatttaacctcaaaatttccctaggaaatcattgtacttcatcaaatgcatttgatatcaaacgatattttcttcaaattgttaaatttatgggactgatagaatagttcaaaagatgaattttagagcaatattttacaaaagccgtcatttctggtccatacaccactttcgtggtaagattttttattcagaaatcaacgttgatatgcaaacctagagaaaagctcaaaacatttgtttttgggtttgataaaacatgaaccgcctagaaatggcagggggcagggtaggaaaggttggccaattccttaaaataaagatgaaaccagagagctatagcacattcatgattcatccagcatcaagcatgaaaacaaaatttaccgattatctgatacaaagaataggtccaacaccctgtcatctggaattgttgttactttcaccctctggatagtaagctcaagctcacatagaacttgtgtgacatctagagaaatcataatgatattaggacttgataattgagaacgacagatatacttgaaaaaataaaaagccagcttcttttcctaatgttcttcatttgaatcaaagaaaaatgggattatattgagaaaggctatttaccattcaataatcctctccgatctatgcaaaagaacttcaatagatacaccggagaaggcaacaaagaggtggatggttgattaaaataaaaggtaggcaggcacgatgggcattttgattgcaacctgttcttcaaatttgaccatttcaccttgactgagctggaatgaggaacagcccacaatactatgtagcaccatatcccatcagttgaaatatctgaaccattcctgcaatgaaaagaaaacaagcgtcaacataggaaaaacaactagcatatacaatcttctttgcaaactctcatgaaccacgacaattatcagtcaattaccacaattcaattatatccctaattgaatcctaaggatagaagcaggcgacgaaattaaacacaaaatcatcctctagacaagctaaagcttaaaatccatcacaaagattaacacattgcattcgatatcttataaataaaaggggttgaagatgatatataaaagccttgaatcctcaaaaaactctccataaattagtgattacaatacccattgaaaagcataaagtgtgcaatgaatttcaagaaactaccataacctagaaattcttttagattaagtatgaggatattacggaatattcatgaaagtgaagcgacccttaaaataaatacataaattagaggaaatagccgcatagttagagttgacaaaaattattatatacatttcccaggtgcgtactgtaatagaatcagaatgaaaaacacataaatacctcctttagaaatataaaggccaaaatccagaataaactgcaaatatcgcatccaaggccggtcttatcggggcaattgatggtgacgatgtaaggttctccagggttcttcccttggtggatcaaaacgacgtcgtcgctcggcacacccatgccgaaccgaacaccgtcgaaatcggaatgcctttggggtttggctgaaaattgaggtaacagagagagaaatggactaatcaccaagaaaacaaaaaacgacaaagaaaaaaggataataaaaggtagagagtagagacaagtgggaggaaggggcactgctgtggttgggtcgggataagtaaaacaatacagttgaattaagctgtggtttggattggtctcttgactttgctggtaccgcaggggaagtccacttcagctattgttttgccacgtgcaccacaagagtttattcatcagtgagcatttgcaataattccgtactacttgtctctagaatttattggatttccttgcaaaaataaattattccatttaatttttttttttaaaaaaaattaatgaatatatcaatgaataaaaacataatgttaataaaaactaagggtgcatttgtttttattaagattcagaccactaaatctgaatgcacatctgaataataagatattatatctgaatctgaatactaaaatatataaacagtttattttttccacatctgaatgtatttttcgaagtttttaattatataatattaataaatttattatattatatctaatttnnnnaaaagtattcaaatattcaaatacaaaacataattaattttaagaaatttaaa

SEQ ID NO: 117408 - DNA, 1686 bp, Cannabis sativa
aaaactaattaaaattaagcaaacaaacacattttcactactcttctcacaatatttttagtttaaaagcataaaaaataactctataccatagagttatcaaaggactattgatctcgatcaaaattcgaatgaatggttaaagatcctccagatttacaatacgacgagtaaaaaacacttcttcagttgaagggatgttcatttaatgatggaatagcatttctcgagaaaaacaaaattgctaaagaaaagcactcattaccaattgggaaaagaccgatttatctagccaagatcaaataaaaagccctttcagttctaggaataactttttagggggtaattattatgtccaaattttgagcaataaatatggacatgacacgtggaaataagccccgaaaattaagggaacctataaacataaaaagtgtgatagttatctcacctcgaaatatgccacaattaatgatacatttgtctcgcgttgtattataatatggctattaaataaaatcaatataattataaatacaataattagtgagccaatgaaattataagttcatcttagacttgattgagataaacgagacatgtatagaatacgaagagatgggccactggaaaaggtagataataattattttaagagcttagagctcattaacccacatactcgtgagtatgttgaaagactaagggatatgagcaaaagacgatccatctcagattgctcataaacgactacgatgaataaagcaatagatcgttcgttacatgagaagcatttgaggaatgggatcacatatttaacaaatattatttgcgagcaaccttcaagagatgaatagaagaacagtttgataaaaacaaatgcttttagataaggaaaaaaagtagttactagcagttaattcatttatcccacatgttgtaaatatatatgaaacgtggagattgtttgcattttgtaaccaattatttagataagtctaaaaggaaataactgtataattcctaaaaatcatataatgcggacataacctacaatatgggggacgatcaattaggttctaaaagatcactctaaaagaacaagggtagaatctcattatttcattatatatcttgtatacagtaaagatttatgactcataattaatatggactcgtgcactgtgtagatttaactacaaaaactatataaaaattatcttatcttatttaattgttattatttattctactaaagtaattctttcgatctcaattaattttatttttaagaacttcattattattaacgaaattctttgttaataatgtatgtatatatattattttataaaattattatcttattttatattatttaaataatattaattagataaattattttaaaaaatagtttcgagatattttcatatctccttaaaaagtgcataatttatttcaagtttgttaaaatgatgaatttttaaaagtttgttttgttttatggtatattatatatatttgttatttttttaaaaattataaatattagatatttattttaattatttatatattggatattaatgtattatctttatctttatatattaaaagtgcctatctaacggtatttcttggtttaacagaatatacttaaatttttaaaagaatattctgtta

SEQ ID NO: 117409 - DNA, 1052 bp, Cannabis sativa
tgggccagcccaaccacattagtttggcccaaatacatgatttcaccccaatgctaggtaatatggtaagtgaaatttactccaaatatgataacgggaaattacactataccccaataagtttatttttcgctttggattcgagaaagtggcggataggagatgggtgcttgaaaaagggccttggtgcattaagggcaacactttagtaatcctagcttggtctccagtgttcgggtcgaaggaattgtctttcaataacctttgtttgtggatccgaatccactttcttcctcatgacttttttacaagagtcaatgctaacttaatcagggcacaagcggggaaagtaagatttattgagcttgatgagtcaaaacctttcacatggaacaagtggattcgggtgaaggtggagattgatgtcactaaacccctgttttgtgggtgcttcttcaagttgttgaatggtgagagcagctgggtgcaaattaaatatgagaacataggccatttttgctatttttgtggccgtttgggtcatcagagaggagagtgcacccttggatctccggttacgatcttaaatgaacagggtactaagtttccattatttggcccctggttgaactttgggtcttcctatgccagttgcttctctgggaaccttctgctctctagttcccgagctaaaccgagaaagaataagactgaactggtaagcgaggttgtccgttcgaaggagaagaccgttcctctttcctctttgccgctgaggagtaacggagttggcagcgtcggagccgtgccggctcatgactcaaggatggctctacctccgagagctgaggacggtcagagatccaaagctgtaatggcatgggttcctaagtcgacgtcgacggccaagggtggatgctcgaggagtttgcatgaggagggtaggtgcaaaagaggtcaggctctgggtggagtctcaagacctgataatttacctgttttagaggaaaattttaatttagtagtgggagaggactactgtgtaggtgcgg

SEQ ID NO: 117410 - DNA, 2148 bp, Cannabis sativa
  modified_base (2075)..(2093): a, c, t, g, unknown or other
cacgggcttgcctgattaggtaatacaaatatatgagcatatctatttctatgcatatgactagttatatacctactgttgaatgttatagtttaatcactttatcacttttcttgctgagtgtatgtgactcacaggttctttgtggtgcaggtaagggcaaggcaaagttagaatagccatgagatggcgatcttctccagcaatgtacatattgaccccaccagcctacgtgttgagttgccaggagtttctttagactggctgcatttgttgtattttgaattgttgttgtatatcgtcttttggataaatcttttataacagggatccccagaactcccttttactgtcgttataatatccgtttttagtgttttattttagtcaaatttttatcatcctcatagtttttaataattaattaatatattagcattaaattagttttataaaatcaaacacgtggtgttcctatggtttagggctttacacactgtttgagctctctacatctcggtcagccacaagctcggccacaagtgccttagcctggccaacccttgctatctgtcatgtagaggttgtgtagccttcttagcaatacatactctccttctattcgccagcctggaaatatgagggtcataagggagtgccctacgatatgtttgcttgacctttggcataatgaaccaccactaaccttgagatcacttgaggagctacgaggagaatgaactagacactagtcctcaaagggaagaccaactaaatctttgtcggcacaattgtcacctcccccaacaatcacttaggattatctgcacacaaacgacaaggggaggtgagcaacctgacaaagcaacaaaattagacaaggctttgttcaaccgtacccaaggatactttccaaataatttatcgtacaagactgggtattagcgaaatataggtttaagggtaacagcttggacaaatgttgagtcttaagttgaacattcgactataatagactcaccattaagtttcatacagaattcctaattagggaaccatgtatgagactaaacttttatatgcccacaaaggccatgacaggatcctagccgaggtcaaaagaggacaaaagactagccacccgcttaggaccaaggcatagaccaactagggtcccaaagctttgagagggacggccagggtcccatgacccatgtaggaactggccgaagtcaccataacgaggcatgacccggccaactttctaaggtggaaccctaaaacgggtcaaccctcattaaaaaatcctagggccggccaggtcttaaacaagaccccagggtcggtcagggttagttttggatcaaaatgtgtgtttttcaaaactcaaacgtgttcttcattactcaagagtcaagaatcgcaacgaaggccaaaaacgaatctttttcattaagaaatcacacattttgcattttaaaactatcatgcaaatcaaaataccaaaaagactacaatctaatgtgagaatcagagattttataaagcatggaaaagttcaaatacaacaatggcaaatctaagtaaacagaacgagatttgaaagcctacccactagtagaaacctttgaggaagacggtgaaaagcttggatcatcgaaacaaagcgataatctcaggtgttacaggactagggtgcgtcggcctcaatgggatgtgaagagctttctttagttgccttttttgaagagagaatgagaagtgtggaatgagaagtgagttacaccaataagcttatatagcttctggtgggttcgtctctcacttaccatgcagcatgcaaaaactaatatgcagaaatattatcaattttctgctaaggaatgtgatcagacaagcaagagcaaatgtttcaagactaaatatattacaaaatctctccggttaaggctctatcagtctaaactgaagctagaaagtctctatacgtacagacatctgcacatggacttaggggcaaatgttattccaattttttcctatatgatgtggcatgtgttgggttttatgccctnnnnnnnnnnnnnnnnnnnataattagatttacttattaatatagatcagaaataacatttactgttgcatggt

SEQ ID NO: 117411 - DNA, 3875 bp, Cannabis sativa
acctaccgagagtgataatttgtgagcagagcttgtgggacttgggctaggtttggctccatccattttcagttgacttaggagattggtaatgtatttggattgggacaagtgcatgccagctgaggttcttacaacttccactcccaaaaagtagtgaagggggcctaaattcctgacatcaaactcagtatttaaattagtaataagcttggagatgtgatgattgttagggccagtgatgaggatatcatcgacataaacaagcagtagtattaacgagtcaccactccctgagatgaaaagagaattatctaatttagagctgttaaaacccttgctgtagagggtgagtttgagcttttcattccaagctcgaggggcttgtttaagtccataaagagctttgtttagtcgacatacatgtgtagggtattacggatcaacaaatcctggtggctgagtcatgaaaacagtttcttttagtgtcccattgagaaaagcattcgagatgtctagctaagtgacttgccaattgctggagactgcaagtgttaataatacccgtacagtggctggctttacaactggactaaaagtgtccgtgtaatcaatcccaggagtttgagagtagccttttgctactaatctcgatttaagcttgttaattgagccatcagctttaggtttgatgcgatgaacccatttgttgctgacaagatgcgtatcggctctataaggaaccaaggtccaggtgttgtttttcttgagagcataattttcttgctgcattgagttgtaccaaagaggatcagataaggcttgtttgagagtggtgggttcctttggtaaagtggattcagggagagggtggagtgtagaagagtaggcttttggtttgtgaatacctactttggatctagtgatcatatggtgtttatttatgattgtgagaggaggtacattagcaagtatgggattagaggctggggtaggattattggtatctgatgcagcagtgttttagtcaggtgtggggatgagtaaagtttgattttcaactgctgtttgtggaatgataggggttataaggttacagttgtcattgggtgatgcagctgaattaggtgcagcaatattggtagtgtcaggtacaacgtcagcatcagatggtctagtggagggccttggattagtggcatcattcctcacagcatcagacatagtagtgcgaagatgatcagtagaagacataggagcattaaaagatgcagaaggaaaagtgggcgagaaaggatgatgtacctgatcttgtaagcttggatgaagagcgagaaagtcttcctcattaaaagcaacatttcttgctatatacatgcggcctgcttgattttcacacatgtatcccttgtgatgtagagactagccaacaaatatacatttctcagatcgcaaggagagtttgtgaaagttatatgtccgtaaatgtgggtagcaagcgcatccaaagggcttgagcattgtgtaatcgggtatgctgtgaaagagacactcatatggagaaatatctccaataaccttggtagggagcctgttaatgagataaacagcattctgaaaagcaagccaccaatagtgcatagataagccacattgagcaagcaatgtgagccctgtttctgtaatatggcgatgctttctttcagcacggctattttgctcgtgatcatgaggacaaggatgttggaaatggactccgtgatgagacaagaaagaggctaaagacctgtactcccctccccaatcagactggacagattttattggttaaccaaattgtttttcagcaaacactttgaattgaagaaacgtattgtaggcttgagacttaagggataatggaaaaatccatgtgtatcgactaaagtcgtcaataaagtgtatgtaatatctatgcccttctttcgaaggagtgtgggaaggtccccacacatcagtgtggactaactcaaggggttgggaagctctagaatcagatatggaatatggtagtttgtgacttttacctcgtttacatgcctcacagaattttagatcttttctgttggcagatatgtttaatgttgccaagattttggcaagaacattgggagctgggtgacctaacttgtaatgccacaaattaatattggatttttcagtaagacagagaacattagtagaaatatcagactgaaaagaattgtcatttttattaatgttgaaactgttacatgaagaagatgttgtagaagcatcagttttattacaagactgaggaatacaagattcaacatttatgtgactagtagggactgtgatgggagacacaacaatggactttggcttggactgagtggtggcaagattacaatcgagctggactttggatgatggaaaggaactgtgagacaatgtgtataatccatttttaagcctccccttgagcaggactctccctgtgagtttgtcctttacaaaacaacacttagagtgaaattctagaaaaatattgttatcctcagtaagcttagacacactaattaggttcttggtaatttgaggaactttgatgacatttttaagttgtaaagggacattagaggaagggagagagaggttaccaatatgactgatggggagacgttttccatttctaacaacaagagtgtctgatccagagtagggaattttagattccaaaaattccattccttgagcaatatggtttgttgctcctgtgtcagcatactaatcggggtcatctgcaaattcttgaattgcagaactagaatagacttggggctcttcttgatcatcaatttcagcaatataagcacgaggctcattgatcttgggtgtcacgaaatttttgtcgaatctatagtgacaaacgacggctgtatgtccagctttctgacacacttgacacaagaggcgtgggatagaaggattgccagggccataagttcttccctaagatcgattgtaggtaaaattgccacgaccttgaccagtataggaatgatatccaggtccagaattggaacgagaattctggacagtgagattagccatcattttggatgttgaatctgtcaaggtatagtgtctttctaaccggctttcatgggttagtaacagagattgaatggattctagagaaagattatccacaagactagtgacatgaaccacaacaagatcatactcgggtcccaaaccattcaacatatgcataatcaagccattgtcatcaagaggatgaccagcattggataaagaatcggcaagaagcttgactttatcatagtaatcagtaatagatagattacctttctgaattgttgaaagctcagacttgatttgaagtagtcttgccttggattgacttgcaaattgctattctaaggcacgccaggcatcatatgaggagttgtattgagcaagcgatccaagaatcgtttcagtcatggaggaacggagccagctaagtaataattgatcttttcttctccatgtggtaaattctgggttgatgttgccattaatgagtgtgcggactggagcaactccagcaagaagaatgtcattgaggccatggccgatgactgtagggagaacttgcgatttccacgcaagaaaattggttcgatcgagtctaacagtgagggaggaattcaaagaattcgggaatgaattccattgatgagttggaatcggagcagcaaaggctggagcagtgggttcagggtggcgaggatccatgatccacgttggtcaaaagcttcctgataccatgtagaatgtgaacttatctatgcaatctaacagga

SEQ ID NO: 117412 - DNA, 4835 bp, Cannabis sativa
ttccgatcttgtattttctaaaatggtacaaataggacccttagcttaattttcgacaatttttttaatataatcaacttgaagacaattcctcgcataaagagatgcaaaaatatattcagttttgtcataacacttctagatcaggttattattaagttttattttaataaaaaaaatcaattcagggttatttgtactatctattttatcatttaacaaaacagagagtacaatcaacaacttttacgaaattcaaggtctaaaataatatttacccaacaaatattactgtaattaaaaggagtattaaataaattctttttgcactctttttctaattgaataacatgtgtaaccttataaattatatttaatgataattacaattttactctcatttagtttttgttgatgataattaaatgactcatcttatttacttgtttattttttatttttataaactattaattatatttttttcaatgataattttacacaattttttttttcttatttcgacattgtatcattcttttaatttttttcttcatgttttttgttttgttttagttttagttttttctttattttttgtgtttacattctcataaattgttcactaacaaatcctctgtagaaaatggtgactagaattgtatattatattccataaaatagtacacacttgagactaaatgagaaactagtaaatacaaatagaaaactactaaatacaagttaccctaatttttacaactaatattctaacattcatctttaagctggagcatagatgttaatcatgcctagcttgttacaaagataatcaaactgcaccccattcaaagtatttttaaaatatctcttaattgttctttggtgttcacatattttgcggagatcagaccttgttgaattttctcatgaacaaaatgacaatcaatctcaatatgcttagttcgctcgtggtacatgggatttgaggcgatatgaagagcagcttaattatcacaccataattttgttagaatagaagtcttaaatccgaattcagttaaaaattgataaatccatattacctcacacacagactgtgtcatagctctatattctgattcaacactagatctagacacaatattttatttcttactcttctaagagatcaaattgctcccaacaaatatacaatatcttaaagtggatcgtctatctaccttggagcctacttaattttcattagagaagtactcaatctgggtatgtccatgatccttgtaaactatacctcctcctggtactcctttcaagtaacgtaaaatttgctctagtgttgtccaatgataaattgttggagaagacataaactgactaatgatactaatatttggatgagtcacagttagataattcaactttccaaccaatatgcgataattctcaaaatcttaaaatggtttcccatcacgtgtaagatgcacaacttgattcattggagcattacaagattttgttcttaattttcctatctcagttaacaaatcaagtacatactttttttgagacaaaaaaaaaaaatacctttttacacagagtaacttcaatacctaataaatacttgagctcccctaaatccttcgtgtgaaactgggtatgaatgaaagacttagggaatgagatgccttcaacatcatttccagtaataatgatgtcatcaacatgcaccacaataaaataataccagcaattgatcttttataaaacacagaatgatctgacttacttttcaacaaactaaatttctcaacaacctaactaaatttactaaaccaagcacgatgactttatttcaatccatataaagatttgtaaagacgacaaactcgccttaactctccctcagcaataaacccaggaggttgctccatatacacttcttccttaagatctccatgaagaaaaatattttttatatcaagctgatgcaaaggccaatgatgagtagctgccatggaaataaacagccgaacaaatgtgagtttagcaacaggagaaaaaacatcacaatagtccactccataggtttgagcataacccttggcaataagacagacctttaagcgagtaattgttccatcttgattgatttcaattgtaaacacccatttacaccctatggcctattttcctgaaggtaaactaaccaagatccaagtactacttgcaactaaagcattcatttcttctatcatttcagcaagctaaaagatgagacattagttcatgaacagttttaggaatagtaatagaatgaagagaagcaataaaagacagagatgattataagaaacaaaagaataattatgaaaagtacattggcgtttacctttacgtagtgaaatggggagattatctttgagttccgaatctgatgatgaagatgcaggtgcaggacatggaagggcaaagagtgtgacgggtgttgaccgtcaccgaagaagatatcggacgcgtcgatgtgtgggaatttggacagcgacaaacggcggcgcgtggggctcacgcacggtgaatctggatgctgaaatttggggttttgcagtttggcagctgggcaatccttctatgtgagcggtgagaaaaaactttcactccatatagggtttccaaaaaataagcctaaactcaagccctaatccttttttttttcttgtttatgaaccctaattttaaatttcaaataacaattctaatcttaaggcgctgatgccatgtagagaatggtgaatagaattgtatattatattttatagaatagtatatatttatatacaaagttaggagactaaatgagaaactactaaatacaaatagaaaattactaaatacaaattattctaatttttatagctaatattctaacatcctcaaactattctctaagtcatatatgtatatatgtaaaattaattttttgtttattgataaaaaaaatagtatattacttaaaacaacaaataaaaaaagtgaattcaacgtaataaatattattgacttgtataataaaagagaaatttacaccttataatattttttttttctattttctttcttttttactattacacagtaatatttaattttttatagtttttttttatttcgtatattactgtgtactgtattttgtatatttttttttttcagtttttgtaacatgtggcatctcatgtattattatgggcatccatttatattatattttaagtgtgataaagatgttatttgacttgtgttgcactttagtaatagttttttaaaattgtattatatttttagtgatataaatgtgtgatttgacttgtgttgtcactttagtgacaatcaaaattgatgatgaaaaatgtgacaccctaagtattcaatacccgttcatttcattttaatcctacttccttattattctctcttcctgttcataatcttcttcctttttttcactatcttctgcctcaagttctctatatctttctccattaacatataagttttttttttcttgttcagttcttcttcttcttcttttattttttttatttaatttttgaagttttcagtcacgtttttaggtaagataagagttagtgtagtttttctattctgattttctagaactgagcttgtaaatatagcttccattgcatccgatgttgaggttgtgcagaatatgttagtttttttaatcctttttttctttttttttttatttggtttagtgttgttttacggttattttccacgatttatttatttaatgttaatttcattgttcttgctccatctccccggaattaatggttgtttttcgggtgttctcgtgttgttgtggtggttctgtccgtgggtgttgttgtggtggttctgtccatggttcttttatatttttctatgtggttctatctgcttcattgttttacatttgtttttatgttgttttagtagtttttttattttgattttgcaggactgaacttgcaaatatagctgctattgcatctggtgttgaggttgtgcagaagattattaattttttaattcttttgtccttttattttgtttaatttattttagtgttgttttacaattgtttttctatgattatttatttgacatcgatttcattgttttgctcaatctcgctggaattaatggttatttgccgactgttctggtgttcctgtggtggttctgtctgtgagtgtgcaaggtggatgtctcattttttttttggtatttacaatataaaagaaaaaaaggaggacagtataaatataatttctaccgtgtagcagtaaaattgtaaattattatccaaaatctaatatttttataaaaactccataataatatggattccactttttgtgtgtgtgtgtgtgtattttagaaagtttaaagaataatacaatatcaagttcaggtcgtggagttctgttccttccatggcgatcccgtccatgttgttcacgtaccgcccttgtctggtcgaaccaagtagtggtggcgatggtggaaaaatttcatcccgtcccagttctcatgccccttgcgattgagagaaagagagagaagaagtttgatatttttgaagatagacgagaaagaggcggttaacgcgcgtcatggataggtagtgtgttttccacggttaacggtgaaagcaaagttggagtattgattgtgtgcggcttagtcttctgtgtcggccgggaagaattatgttgccataaatcaaagggtacttacgatcgtgttcaaagctctgttca

SEQ ID NO: 117413 - DNA, 1898 bp, Cannabis sativa
  modified_base (1833)..(1845): a, c, t, g, unknown or other
ctttatataaataagttttattttcaattcctttttatatctacttttctccattacgtatattaattccaaagataggatccttctaggaagctggtgaaagtgctcttttataagaaagataaagtttttcccattatttatttgctgcctcacacctcataatcatatccaatttttttccttcatttttcactttcctttacatattattattattgaaaagattataaattaaagtaaatataacgattgataacacaaacataccaatagatatagaatcaatgaattgatcaggttcaattaacaaaaaaaaacaaattgaactgctcaacaaatttacttttgttatataattattgttgtttcctctaaccacaaagctagatctcatgttgtaaaatgcatacattatatatttgatgatttcctatatataattatttgagcaaacgaatctatataagctataggtaaatactttaaagtacttttttgggagtttgttcgtgtgggttagtcactttaataattaagtgccccattggttcaggttttatatatgtgtgatacacacacacctatatataaatataaattaatacatacataggatcttcatgcaactagctagctagctagactttcattatatatatatgacccatgatgtttttattcgtcaaaagtatcagtcaatattgccatataatatatttcgttatgaccataataatatatatatataaatatatattggtcatgagaacgtaaaattaactaccgaactttttcctcctcaaatatatgaccatatatatctttctcttttcatcaatacatattatatatgtatatctgttacattaataactataccatatgtcatgtatataaattataataaatatatgtataaatatatttgttaatttgatgtgttttctggttcattttctgaagaaagtatagcctagctagttagcttggtcatgaatttacctccctttgaagtttttattttatatatattctccatatgtatgagtatgatgaaaaaagttctacccatattttaccttattatcgtattatttattgtagatatacgggtattacaaagtacccacaagtaaatatatcctaataaataattttttaaaagaaataacagttatattcaatagcataaaataataccaatatataacaacctaaatagtaagtattaattatattatttgtaaaattaattataaagtataattgctaacaactgaaacaataaagcattaaaaatattaaatatttattttagaattttatatttttataataattaatataaaagtaatttttttatttttcaaatatgaaataaatacaaagtattcaaatataaatatatatatatatataattgggtaatctaataggacagagtacaccttacccataccctatcttatacgtgcattgggtacatattttcatactcttatcctatcaaaaacctctattcaaggggtaatattctatctatacgggtaaggtacccacagatatgttttcgaataaaattgtattatccctatttacctaacttttggagaatcaagcatcaaaagtaaaaaaaaaaaatattaattgaagccattttaaccaaagcaaatgaatatttatggtaattttaattgatggataatgtttaatattaaggaaaacaaaaatacaataacaagagtctttaggtatatttgttgtctaaaagaaggattttgttttcctcttctgtaatccttaatataatatagggtaaatactattttnnnnnnnnnnnnntgtaaaagttacagattggaccctatgttttattaaatgacaaaataaaccct

SEQ ID NO: 117414 - DNA, 2216 bp, Cannabis sativa
catttcaggatttgtgattatcgctccttctaattaaccccagaacatgagaaacacccctcagttactttcttgattaatgttttaataatatgcaaatgttacattgtctataaccaaaaaaaaaaaaaaaaaagaaagagagaatataagaacaacattaacatttatagttcctgccttcatcaacataatgtcatatataaaaacaaaaacaaaacccaataggaagacaaagtaacaaaaaaggaagaatataaaacaaaatatattctcaagatccaccttcccatattgtgctttcaattgtcttggtattcacttgattgaattgccctgcacaataaatataagaaaacaattagaaaaacttattaatgttatccctaaagtatatatgtaattaagaaattagtataggtataaattaacaataataatataggttcaatctaattaatcaattaaggtaacaaaccctctatattcttgatcaagtagttgaaattacctgagagatagtactgttgattaaaaccacccaaggaatattgttgctggtgttgttgtagtactattggaacaacagagtcaacagtagtagtactattcttctcctgctgccttattttctcatgagtactttgaccataatttgaggaggagtaacaactaaatgggctttgatccacaacagcatttccgttatcatgaaaattataactcaaagagttactactattaactataccactaaccataccattttgaccatttatattattgtttccattattagtactaacactactagtactattccaacctaccaaaccagataaggacttgtaagctgaggcagtagttctttggtttatttcttggcttttgtatatcttaagctcatcatagacctttctatactcagcataaggccccaaaaccgggtccttttgcctacaacatgcttcccataccaaagaatccacagcttttcgtcgatcctcatcttcgactatgttttttaccatctttgtcacattacttacaccaaaaactttgtgcacggcttggaattctcggctcctttcggccgggaaataaggcgccaatgtgcagccttcatggcattttttcctttgatgtttgcaagctgcgcatgctggttgagttgatcctgatcctgctatggtcccaacactagttgtagttgttgcatttctttgcatccttataataaatattatgtttaatttagtcaagtataaaaccaaagtaactaaaagaaataaaaatgaaaagtaagtactatatatgcaagtaagtaaaaatgcatgttgatcaatcttggttaaacaagaaatgaaaagggcatatacgaaccttgtcatgttaatatgttatgtggtgttttttttttggtatgtgtctttgttttttgttcttttcttttcttttattgatgggggaaatgaaaaggtggtgtttgtataaataataacacaaactagtggactaacatgtaaagatggcatggctatatggttacaagaattaggtttttggagggttggattttgtgatttaggtagctcatgggaagagaaagagaacaaattatgatataaatatgtataaaaaataaaaaaggaaagaaaaatatattatatgcattatttaattgggatgatatagctttttataggaaaataaattcattttatattgcaaggaagaaaatttgaaagcttagcatcttacttgaagtaattttagaatttatgatcaaatgcttaaaacattgataggaggttagctgaacatatgaaatatgttttgttaactcatttctacattagtttgattttttttcaagaaattgacatcctttttcctaaaaaaaaaaaaagaagagagaaattgacatccatttggcatccttttaaacaattttcatatcatcattttgttttttttaaaaataaaataaaaaggcatgtcgttaactgaaagaatgccaaatcactgaggattattaatttactccaaggtgtcatctgaacaattagtttcatatttgatctcttgtttaatcaatcacagttaatttagacagatcatatgcaagactttgggtttagaaatgaataattaaaaatataatttaaaattaaaataatataaattaaaaattatagggattttttcatttttac

SEQ ID NO: 117415 - DNA, 1148 bp, Cannabis sativa
  modified_base (1113)..(1115): a, c, t, g, unknown or other
tgtacgatgatttccatcgcgcactttaaagctctcatcacaaaccaccatgtcacgacgaaccctagaagtagagaaaaatttccacggggaccttcaacctttatccacggtccgtacatacagacaacatccccggtagctggagtaacccatgccgtagggctggagcactctctgttacaatgggccagcctcccacagttaaagcacaaaaaaggaagcttctcgtatttgaactgaatccacgagtccgggttagcaccgactttgaggaaaaaacctacagggaaaggatgacttatccagacatcgacccagcatctgaggaacccccttgttacaatctcctccttcctcttcccatcagatataacaaaacgacccacctttttagctttgataggggcgtttgaagtttagcataacactgttcacaagtccaaggtttgaggtttagcagaacaccgttcacaagccacggtctcttattcataataaaggtgcaatcatcttcggaatcaaagaaaaagccgagtaccccttcatcaaactttttcatcttccatccttgttccaggttccagatgcctaggaagatctttttaaccacagaagcaaccatatccttgcaccccacaaccttcccaacacaagccttgataaccactatatcttccagtgagatatcctcaaacaattccatcatctccatctccagggagctgtcctgttccaagactttaccaacacttccatcgacagaatccacttgtaccacaacttcttcaccaccaacatccttcactatcaccatagctagagaactagattagcatcacgagtagtagctgtaggcacagaaccaaaagaagtccgcaaaagagagactagacccagccagattagtatcacactgagtagccgtaggcacaacgccaaaagaagtccacaaaagagagactagacccaactaggagccataaagtttaattttcaatgacacattttttttaagtaatatttaatttggtgcataatttaggtgtgtacgagtaataaatatcttacttcacaatttgttacatggacattgtttgtttatttaaattnnntattcaaaacttttttttttaacaaacctatta

SEQ ID NO: 117416 - DNA, 1043 bp, Cannabis sativa
  modified_base (987)..(990): a, c, t, g, unknown or other
aaaaaaaaaaaaaaagctacttttagtgataattttttagtcacaatataaatttaaaaattatttatgactaaattatagtatttaaatataaattgtcattaatttaatttatgtcacaataagtattgtgaccaaaaacatatttaatcacaataaattataatttttatttcacacataatataatagtgtaaaaggataattttcttatatcatcacttcaaatatttatatttatatttaaataattttgtagggaattgtaagtgaagaaaaggtggattctttcaacataccaatttatttgatgagtccccaagaatttgaaaaatcagtgaatgaaaatggaagtttttcaatagagagattagatgttttacctcatgtgaaagtaataaatggagttggtcttaattcacatcaaattacattttgtatgagatctactcttggagaactaattaaacaacactttggagaagaaatcattgacaaactctttgatttgtatcttcaaaaagtggaagagattcatccaacttctattattgaatcactcaaaactttgaacttcttagctgttcttaaacgcaataactaactcgataaattaagattacttatgttgaaattttctttcgaaatcatgcatgttgttcgtaacctgttgatgtcaaaaaattgttcgataaagaatttctattcttttcttaaaaatataagagttataaatctatgtttgaaagattgtatttggctcagtttaattaataaaaatttatttcttgattaaaaaaataatttgtgtaattggaatgaatttggtacaatgtttgtcttcacttttcatttcccatcgaaagccacttttgattgttatgtattgatgtttgttaagggtctatgagccttttaatttttctcaattttttttgtttgttaattaacaactgaaaaattgagtttttgcaaatgtcaataatnnnnacgaaaatataaaactgtatacacttgcagctactgcagaaatcagttttgca

SEQ ID NO: 117417 - DNA, 3263 bp, Cannabis sativa
  modified_base (54)..(60): a, c, t, g, unknown or other
  modified_base (1104)..(1105): a, c, t, g, unknown or other
tatgccactaaaaaaaatcattgggtttatgccgcttacaaactcaaaactttnnnnnnntatgccgctatttaccctattatatatattatttaccctattatatatatatatatatatatatatatatctataacatccttagaataatggatattgacaagttgttcttgttcttgttttttttttggttttttttttaagttttttttttactattttttaattctattttttgataaataattttttgtctttgttattgcctattggtactcttaatgtgtttaatactatatcggtgtggtactatttttctcatacatttttaaatttgttttaattctatttttttggtaaatggtttttttgtacttgctattagtactctaaatgtgcttaatgttatatttgtatggtactcaataattggtttgtaatttttttttttttgccttttgtgtttttttcttttgtatggataatatttgtactattttcactattattttttgtaaataactactaattagttagtaattttttcaaataatctttttgtactatttactattttttttatcttttatgtttttttgttttttttttaatttatttttttttacaataattttttgtacttactattggtactcttaatgtacttaatgctatatcggtgtggtaccgaataattggttggtaaactttttttgtcatttttttttaattttactttctatgaatgatctttgtactattttttcggtaaaagattttttgtactattattgctatgtgacaccttaaggtgctcaataccatactacccaataattagttagcatgtttttttaaatcatttattaaattaaaatttgtgggagatgtacatatttttagtaacttcaattagaattttaatttttttacatttaatctgctaatataattagatattttatctgtcctcatttaaatagaattaataaaattaaaaaaaatataattaatccattaattttaatgggagtgtttggcacgttctctaccattaatccacctagtatatatatagaacacttcttatatatatatatatanntatatatatatatttatatcaaaggaaggcttcaataagcataatgtcactaaccggaatggataatagagactttgaggacttcgaaccctgtagaaaagactcccaaaccatttgaccatcaggaaggttccaagctctcaagatacctcccccagatgacagggttataacatctagaaaagaaaaaaaaaatgagagaaacgtttagccattatatcaacaattaaagccaactggccatgcacttatagtcgacaggaagaaatttagcactgcatgttagaaaatacacccagatttccttcaaaaacaaactccgcttctttcatttattttcgtaaccaatttaactaatatgaaatagttttgtgtgtatgaaaactagcttagtttcagatacatagatatgcagaagaaacaatgttgtattccccattaagtttattgtattcatgttgcttgttgacataatatcatcaatgaataatcaggtattcaggagaaccattcagtgaaaacacttcctaaggtttagtactactggtaagtaaatatctctatctaaaatatacctaccttcaaaactacctcatactttgaaaacaatactcaagtgagtatacaatagatatataatacagccataggattcagagaaactagcaatttaaaatataactaaagaagaaagacaaactaggtagaggtaggcaacattacattttcccagagcaatatctattccatccacaacatcattgctgccaagaacgtgtctccaaactgcacagagcaaacaaagcattaattctcaggtaatgcataagctactaacattaaaaagaaaagaaaagaaaaagaaaaatcacttaaagcatttaacaaaacaagagaaagaccatctaattatcgattacttatttgagtttgacaaaagtcaacggaacacaaacataaacaacatgttacccattccaggtaaattaatcttacaaatctctccatgtcgaagatcaagagaagcaacaacattctcctcggtggacacaacaacacgctttcggccagctttctgagtgtggaacactgcttgtttcaccttccctatgtattgttggtgcctgcgtgtcacaagaaacatactataatacacaaataataaaacaagtgccgatacattcaactttgctgataatgaataagaaatcattcaaaatcgacgacctaagtacaaattaaattacttgatcccattgaagacaattaacatggagttcgtggatacaaaaatcaacaacccctgtgtggattcataattcaaaattttcaacgaataatcaacaaaaatcccatcttaaacaattagattgtacatactctgtgaataatataagattgattcgaactccaaatttgatcaatcagtaaattagtgtcattcggatttagagaaaaaacaaaattcataaaatttacatatactcaagtaggatttccaatacgaaaagaattttgatcgagtttccaacgggttttatagcaagaaaaattaggagtgaatatggaatctgagagcttaccaatccattagaccaacttgatctccgaaaagtgaaaagcttggcttggcgtaaaataaaaataggacacaaaacagtagcaaaaccctaatcgccatagccatggcaaatctggcagtctgtgtctcagtgacgagtcaaagacagatctcggagtgagactgccgaagagagaagggcgataagagtaagaaagagagagttcgtatcgtaataacggactatactccaaatcttgggccggttgtccaaaatcaaatggagcccggcccaattgttttgtgggctagctttaattttaagaaaaattacatcaagatacataattttgtaaataattataattataatgtatatttcttttatttacatttatacatttttttttttatattgttaaatggtcataccagaaaatagttgttattatcatttagtaacataataaaaaaaaaaaaccgttaaatattagtctgtgcttaatttataattagtttctataaattatatattggaataattacataaggcactattttttgtaaaatatctacaattttacgtttaaagaatat

SEQ ID NO: 117418 - DNA, 1021 bp, Cannabis sativa
agaaaacgacattatacaaaccaaattctaaacataaaaagaaagtataccagaaataatactcaataaacgaaactccagatcccaattataattccaaagattgaaaatcaaagcgagagatgaaaaagaaagtaccaggcagtgaagaacttgatggtctgggccatgacgaaagcaagaaaagcagaaataagagggaaattcgtcaagattgtcgaagaagacacagccgaatttcccaccgccgtaacagaggtcgccgtcatctcatccatcacttcaaaaatctcgtctttcgttctcaattcttcttagaatcgaatcaaaattctggaaaaatgaagaaaacccagctcaaaaaatgtacaatggacagtctctgactgattcaacgaaatttgtagagaaagagagttgctttgatttgtaaaagttttcccgggaaagggatggaaaattatacctatttcaattaatggcttcttctgatttttaactgtctttctttgcctttgctactctttaatgatttttattcattaaaattgattttgtttttagttttaacttttgggattttgaattttagttaattaatttaatttaataaaattgagttatttgtgagagactactccttagatcaaataatgtgatgaaaagggatatgcccaacccatgttctagaatataccttatttgtcattttacaatttggattgaaattgggtttattctattctatttgggcttatttacccaacaaatgaagttaaccaacaaagtggcaaaattccatagtcaataattctatccaaactaaaacaaaaacacactaataatttctttttctttttctttttcatggagtgtggatcgatgcatttatttaaatgttacttaaatttggaaggcttttcttaggtgtcgtttggtaacacttttgttttcttaattttttaatcataaaataaaagtaaaatttttgtttttaaaaaatttatttttaaaaaataaa

SEQ ID NO: 117419 - DNA, 2430 bp, Cannabis sativa
ggcttggtttgataaactaaaggccacacttatttcttttggtttttagtgtgcccgagctgataatttgctatttttcaaacacactgcagatcactcaacatttgtacttatatatgtggatgatatattgatcacatgtagttaaaatgaagatgtaacatccttgatagcaagtctcaacttcatgtttgctctaaaagatctcagatttattaattatttcttaggcataaaagtgactcattctactgaaggattagatctatgtcaaaagaaatatattttgggtcttttagtcagggctaaaatggaaaatgccaattcatttcctacacctatgacagggggcgaaaaacttacagcttcaggttgtgatgttaatttattctgatccctccttttacaagagtatagttagtgcacttcaatatgctactctaactagactagagatgtcctatgcagtcaataaagtctcacagtttatgcacacacctctggaatcccattggaaaactgtgaagaaaatacttcgatatctcagtggtacctctaattttggactcttgttaaagacactttctactccgtttatcactggtttttgtgatgttgatcactggacctcagatcaagatgataggcaatctacctcagggtattgcatataccttggtcctaatcctatatcttggtcctcaaagaagcaaccattagtgtcttgctcgagcactgaagcaaagtgtcgtagtttggcccttgctactgttgatttggtctggatcgagtctttactcactaaagttaaagttctttttcaacaaacacctacaatgtggtgtgataataagagtattgtactcacgtctgcaattttcggacaaggcacattgaactagatttatattttgttcgagaaagagtgatcaacaaccagttgctaatgaaatacactcctgcttatgatcaaattgcagacacttttactaaggcattttctagcaccatatttaaatttttaagggacaaactcaatttggtttctaaatcaactctgagtttaagggaaggtgttagatcattagttagttatatctgttttggttgttcatagtttgttagctttttatctctgtatattatgttagttagttacaataactaactttactcttgtatatactgagctaactactccctatcaatacaattatttaaatttatcttcttaattttctttctctctatctttgtctctctgtgtctaacagtccttgttttaaaggaatttgggcgaaaatcacctgaatgattctcttccagatgaacttggaaaaataacctcactgcgagaactgtaagtttcttagttttttttaatgaatatataaatttcttagttaacatattatgtattaacaaatatataaaacacacaaagatatgtttatataacttaattttttgcagctcgttgtattccaataattttactggtgggattccatcgaccttccgcaaacttgtaaatctagtatcgttgtgagtaactttaattctcttactagatttgttttccttaattaaatgagaaaaaattaatatgcttcttttttagttgcgtaatcatcaatattgatttaaaactatacataattatcaaggaaaatagagttacttggcagtaacgagttgatagccccaaagagtgagtaaaaatctcatgagtgatagcattttcttcatcatggtctacatgtcctctcatccttgtttgtttgtttagacaacaaaatgctaattatatatgtttggattaattaatgcagctcagtagctgggaattacttgtctggtcattttcctgatgttacggcaaaatgggcaaatatagaatatctgtaagttttttatttaatggtgtgaatcggtctaaaatttaataattaatatggtacaattttaatatttgatgttgctgacgtgacaattattggataaccagcaatgtatcattttatttttcaagttaacaaaacttgacagaaatcaagaagaaccaactacaacaatgtgaatagttaattaaggaattatttttaaagggctgaaaaatttaaaggacatatgatggataatagttctcttcaaaacaaaacaaatctcttaatatgtactttggcacttactggaagagtccaattgatattgtatcaattggtgctctcattgagagctccgcaaaatgactaacagagagctttatgaatttgtgaggggaaattgaattttctatacttaaaaaatcttaatattttattcttaaaccaatacattttaaactaaaaaaaatatgacactttcttcaaatacccctctcataactcaaatcctttctctctccttccctcaaactctctttgcatc

SEQ ID NO: 117420 - DNA, 1994 bp, Cannabis sativa
aaaaaatgtgatctttttaatcttagtttgattgtaaggaaaacaagatttttcatactaaacactaaaatttcattttttgttttgtcataataaataaaaattaaaatactcaaaaaaattaaagctttgtttgatagttgaattttagtagaaaaattgtatgaaaaataaatatttttcatactaaatataaaaaattaattattatttttttcgcgtcaaaatccaacttctaaacatattaatgtaagaatacttacacatgcgcttgaacttttctttgagctcagttttgtgttcactattggtgatcctgaagtagtaatccggatactcactctgaaggacacaattggcgggtgtagccgtgccgatcgccatgatggtggccgggccctcggcccgttgtgccttgcgaaattcctccacggtaaccatatttggtaaacttgaggaggttttttttttgtgtatgtagtttaggtaaatagtatactcaaacaatagtagtattataaaagaaaataaatgttgttgttgtagtagtagtagtagtagtagtggtggtggtacgaaatttattaagtgataagagtgttatttatagtgagataatgtaagaaaaaagggtaggtgtgatgatgggtcacgtggttgggcaatggcaaaatttgtagccctctcgtttcaactacctttttttaggggttatgtagttatgcctattaaaccaatggccggtcgtatggcacgtgaccacaagagtttggtgtacttgttcaaaaacaagatattataactttgaaaacactctctctttctctctctctaagattcaattgtatgaagaaggttgttgttgtcattataagagccattcgttggttatgtttgtggtaggaggaatggatggtcatgatctatttgattggtttctcttcttttgtcttttgtgtttctctattcatataatttgagaaatgctaaaagacaatattggtgtctagagtatcagatctcgtgtaaattaagaaaatattttttagagaatactgttaaccaatcgtaagacgctatttatagaaagtgttgtatactactggtgactgataacaatgctcatataataattaacgtaatatttggttaaatagagtgagaatgagaataggaccaggaataagaatggtctttttttttttcattttaaaattgaatagttgttttgctaaaataatggaaaagtaattccattagaatcatattttttaatactttaaaatgtaactaaataaaagaatgaaataaaaatgattttattctattttattacttccaaccaaacgtcaccttagggtaacaattttgttagagagtgtcgtattgttaatgtgtagaaagataatatcatacacccctcctaaagggttgtttctgtatactctctttttgttttagcatccagaaaagctttttaattcagtttgttttatgatcacgtacgttgcagctatatgacatgacgtcttataattggttaacggttctgtataatttttattaaattaaaagaagtgggattcaatattgaattgcactaatagcgatattacacctcataagagcatctccaatggtaaaaaattaaggcacacttgctgaggtggatagatgaagtgacaaaatgttgggatgctatatcattggaggagaaagaatgttattctaagaatatgtgtgaatgttatacagtagcattgatgctatcattatttttttaattaaaaattaaaactaaaaaattattgttgctaaaaaattaaatagtaatgtgtgagatcataattatagtatttttgaagagtgctataccattggagtgattttagaagtaagagtgttaaaaatgatatggaagatagattgaataaaatattatatttttaaataatgtggagatttttagctaagggtactaggcaccatactta

SEQ ID NO: 117421 - DNA, 1225 bp, Cannabis sativa
tccaagtttacaatgccatatattgatatctgtacaagaagaagttgcagaaaatgcagtaaaattggaagatgaagtactttctttattcattgaaagttgattacatgaatcaatagcactattattatgagaggagtgctttatatcatcagtacaataggaatggtgatcaaactgagatgtagtagttaagtgacattgtaaagctgaagtagaaatctctgagtcctcacttagcatgtataaaccagctttacgctttcctttgaggagaggtgcccctgtttgcttgtccttaacaaaacagcaatgtttgtgaaactcaagaaatatgtcattatcatcaacaagcttcgatacacttacaagattcttagttatagatggtactcgtaagacagactttaattgaagaggacatgagggattagaagatggaattgtagagtgaccaatatgagaaattaataatttcttaccatcacccacggctaaggtttctgtgccattgtaagtgttctggctgtcaaggttggtggcatcaaatgttacatgagctgtggccccagtgtcagcataccagcagctgtcatcgccaaaatcttgaaccatcgttgtggtataggcttgtgggtcatattcgaactcaacttctgcaaggtttgcccgtgcttgatagggattgttgcgaggaaccacccagtttttatcgaaccgatagtgacacacaagggctgtatgtccagatcgtaaacagacttgacagataactctttgagaattgtagcgaggatatcctcgacctcgacctgtggatgcagaagaagattcaactgagggattcttgatgttggcatatggtcgaacaccacccgatcgaccactgccaaaggtgagatttgcttgcatttttacagcaagatctgtcattgattgatggtgcacaagtctgctttcatgagtcaagagcagggcttggacctcttcaatcgttaaatcatcacttcttgatgttatgcctgagacaacagaatcaaaatctggtccaagaccatttaacatttgtaaaattaaatcttgattgctgactggggaaccagcaacacaaagcgcatcagaaatcgactgaattttatcaacatattcagaaatggagagacttcccttttgaatgttgcagaattggcctttcaattgaagtagtcgagcctttgtttggctg

SEQ ID NO: 117422 - DNA, 2075 bp, Cannabis sativa
  modified_base (257)..(264): a, c, t, g, unknown or other
agttgttattgtaataaaattaattaattgttttattttaatttaggtaaagttataaaactaatgcaggaaaaaaaagggggagaatacaatggtagaaaaatctgtatttttttctcttttttttttacattctcgacggtttaaaaccattgcctatacctgttataggcgacgattttaaaccgtcaggaagtccacattagcgacggtttttaaccgtcgactattttgcccattttgcgacggtcgtatannnnnnnnttatagaaaccgacggtaatactttaaatgactatttaaaaatgtcaggaaaaatcatttttgtagtagtgttatctattttgttaaatgacaaattgaacctcgtaatttttaaaatagtactctgagctgattttttgtcaaaataaaacttcataatcacccgatttagatgtattataacaagtttggatacagtttttacatatgttcgtgttaaatattattttcaaatttattatattaacaaaaattatcaaaaattaagcttagctattattttacactaatttaaaaaatacaaatttcaattcattatttactaaattaaaaatctattcaataatttttacaaaatacaatggccaaaataatattaacctataaacaaataatcaccattaaataatgaaactaatgatatgtagaaattaattatgggataatgatgttaggccctatgatgaccaaatttgtctcttattaatcaggtgatgggtgtggagtagttttcttgggtggaccagtctctctaaattccaaccccagcaaagcaagcagcaataataatattaatatagtaacatgaaaagaaaaccaacctacctgcctcaccattttcccaatctttccaacttccaaagttaccatcaaaacttcaatctacctcttcgcaccacatatttattatatatgtaatgtaaagcaaaaataaaacattaacattgttgtaaatttgtataatgaataatgatatgatcttggttggtttataattatattgctaagtatacttttcatgcacgaccatattcaaacataagactttgtccctctcctgagtatatagatttgtcttttagcaacaaaaatgttaatagaatgagaatatatatgaaataagcaaaagccaaatcaagtaatgtgctaattaataattcaaagttattgatataaagagatgtaaccacgttttcctcttgtgaactaataattaatagtacttggaaagacaactttccctggctaatgaatttgacgttgacttagttcatgttgatgacaagtgtactttctataatttaaggctaaatgaaaagggaagaaataaatagatcaaagttaatatggtgtttatccaatctataatacgcattattgcaatattttaatgcatctacactaaagacagtaaggctatctccaacctttaacactaatatttattttagttcgaagtacaacgctaaaaattatttaaaataatattatttattattatattattttacttataaaattatcataatatttattagggaaattactttaaatattattttttttaacttatttttcaaatttacggtttgagtttctaaaatagttgcagcgctagttgtaataagggtttctatacgattttttgttgcaatttaggttgcagggatttttatgtgaaattctgtaaaaatgcaaaaaaaaaaaaatatattttaaaatataaaaatgaaaaagtccctatttattatatcaaattaattatttaaaaaaaaactaaactattaattaacttgatgtttagacaacaataatactacaaattactggacaaactaaaataacatattacatgtctcataggcatggaattaaatattgacattttctattgatatttctcttatatatttacattttgaggataccgatttttatgaagcaatgtattattttcgaaatatccatagatattctgttagataaattaacaattaacccaagatctatttgtatataacatagaacac

SEQ ID NO: 117423 - DNA, 1230 bp, Cannabis sativa
tatttttataaatatttgtatgtggactgtataaatgtttaatgggccggcccaaagtatttttgtaattttttttccttttttgtatttttttgtttttttccctaatttttacactatattaagtttatatgaaaaatatttaagtaaaacttaatattttattattttttttgctgaatttttttttattattattttcttttcgaaataaccgaggttatatttttctaattaaatagtaaaactaagcataataactgctttttttttttttttttttaatattaagtatacccatatatatttatacaaaacaaattctattggttcaatatctactatctagaacttaattgtaacatattttgtttgtttctatatattctgtttcctttttcttcttttgtaatggcgatcaaggatgttttgcaggttgctaatgagctgaagtttagtaatttcatactggaatccgactgcagcaaagccgtagatttatcaaatggccagctaaacatgctctgatcttgacaatattgtggtagacattaaagagtttgctttctaagcatgattgtaattgcactggtatttcctttgcggttagagagactaactttgtagctcatttgttgcccaaaatagctttagagtctaaattaagcttgtgataattgggataggggcgttcccccgcctgttgtgagttctgctatcaatgtagacgatccactcttcccttgtaattttcgttggtgaattgaatcatatttcaaaaaaaaatccttgtaaaagcacgattatatgcatacaaacatgatcatctcatgcgcatgcacgtttatatgctcatattttattttttcgcaaagttatatatatgctcatatttattaatacaaatacgtacgtatatatatgtaggtcaagttttactatttatacttatttataattaagtgtaatacatatatgtaaatttagtgtctaggtttgagcttaagtttttgatgatcaacatcatgagcttgagcagcacctggcgcagcctgttccgtcgtcattggtcctacagcaaccatagtagcaacgacgaccgtcagggctgccacttccaccaccaccaccaccgccaccaggatacccaccacctccaccaccaccaggatagccaccgcctccaccgggatagccaccgcctccaccgggaaagccaccgccaccacc

SEQ ID NO: 117424 - DNA, 4697 bp, Cannabis sativa
agcaagttaagcctctcaatatttacagtatcgacatcatgaatgttcctaaattccttcacaagcttagctcccttagttgcatatcatgagtgtgttaagcacctcccattcaatgttattaacatcaacgtatctcgaagagatcgcacacgaacttcatattgcaaggaggttattaatatctcgatcttttaaattaactgagttaatttatttcctctattgtacacatgttatgtaactaaacccatacatttactgctcaaaatgtgggtataacaattgctccctaaaaagtactctttgatttggaaggaatttttactcattatcttaggaagtggaccgtcctttatgcgtattgagtatgcttttattttggtcattttatttttttgagaaaacttttgaggacaattaaagtcatcttacaattgacttgtgggttaatcaccgttgattaatcatcattgatgatcaaacggtgcttgcaaggtaggttctaagtgggcttttttcattttttttcattacttctagctttatcagcttcttccttatttttctccacttttagaaaaaatatactctggtggcccttttgacttttctctatttgtttcatgccctcactatctctcttatattttcttcgtgattctgccaccaatttttcaaaactaaggtctcgctacatactagacccctagtatcgtaggtttctagtgaggaattcatcaagattgtcgcttatcctaagaacttagtaagtatcaaaagcctctttttctggaatttttcgcatgtttttattttctgaactttttatttttatggttttatttgtactaggtagatactgaaattacttgacacttattactcccagtttagtttaaaattttacagaatcaaacgatattttaaaaacgtctttgttcaattctaaacgtgaaaacccagaatttatagtacatggaattcaatttttacctaattttccatttgaaccaaaacccaaagttttaaaaacaaaacttaatgcaatttagcttttattaatccttgcaaatttgtaataaaactactaggttttatattgtgtgattgaatgtcattatttcaattagtagcatctgattgtattagttttttaactggtatcagaactaactttttcgtgtaaacaaattgagatcctgttgctactgattgattcttgattagattctatagtgtttcaatttttcttttgttgtttattatttttggaaggctgatccactttaagattcatctcctagtgcaacgaagttgttgtttgttattttttggaaaactaatccactttgagattcatctcacaatgtaatgaatttgttgtttgtgttgtgtgtagaccaataagaaatggagatgttacatgaaggaggttccacggcttgacctcctatgcttgaaggagccaattatccatattataaaaccaagataagggcgttcttaaaggtcgttgatgaaagagtctggatggcagtagcttagggttggtcacctcccatggtatcagatgatgaagggatgaaggctaaacaaacaagtgagtggacacctgaggagatggaaaaagccaactttaactcaaagactcttcatgctctattcaatgcagtctccatcaattaattgaaggttatctcaaatttcaagatcactaaagaggcatggaagaagttgaagattaaaaatgaaggaaccaaggctgtaaagaaagccagattaagagctcaagcaaagcttttaaaaatctgttcatggaagagggtgaatctatggctgagtttcatgccaaattatgtgatatcttgaatgagacctatgctctcagaaaggtatactctaatatgaagctggtgagaaaggctcttggggtactgcccgaaaaattcatgtaaaaagtaacctccattgaggaaatccaggacattaaagctcttgatctaaatgagccaattggttccttgcaaaactatgagatgaccttgcaaaggtggaacaagggcaagaaacatatatatttagaaaaagacaagagggaaaatggggttgtctttgtccataaggggaaatcagcaaagattcagatctgtttgaatattttatagatggaaactttgctctgttggctaagaattatgcttggtttctcaacaaaagttttaagaagaataattttggaatcaaagaaaattcttctagtaaaaatatattaactaccaaaaagcctcctcacaaaatgtgaaaaagagtaaaggaattcactgttaagaatgtgaaggttttggccatatccaaccagaatgtgcaaacacattgaagaaaaagaaggctcttgttgttactttgagtgatagtgaaaaggaagaaaccagtgatgagtcaaaggaagaaaaatatgcgattgcttttatggttaaggaaaacatgtctgaagaatttgatgtagacgaatttgcctctgaatcagattctgctgtagcagaaaaaaaataaagcatatgaagagatattagcacaatggagttacatggctaaacaggtgaaggaattgcaagacataaacaaggaattggcaaccaataatgtggaactcaatgagttagaaaactagttcatgagctagattgtaaggaaagtgagattcacaagttgattgtagaatttgttagagcaaaacaatcacttgaattcatacctcctgcaaagtaatacaaatgttacttttaagcctccacattaccactcatatggattggggcaagcttccacaatatgcatcattctgggaggttgaggataaatattattcacattttcggcaagggatgcgtggattctaggtcagcctctaaagcccaccagtgagtccaaaaaaagataatttgggccaagcccaaatcagataagaccttctaggaacgtactttagctccatctctagatgagcttctgccaaggacgacccgtatctagaagttgttccagtactgcaatcttggaggccaaacaacgagttcatggaatactagtctggtttctctttgtattcaagcacactgcataaggaatttattctccttaaatctcaaatgaaagatcatatcaagctaaaaagaaaaactacataaaatgaagatcaagcaattaattcataagtaatcgtccacaatcaaagaaaatggtattgacagcttaatcatatccaattttcctagtcaacacatcaatccattcatgggctgggcctcacaaagacagacctactttgtgtattttcatgtagactccccattagaggaaaaataaaaactaagtataattcctgtaaacactataaatacccaacaatttattcgaattaagaattgaattctcttgcaatacttgctcaggcaaaaacagagaagttattgtattcccaaaggcttttctagcttaaacacataataacatcgactcgtggactaaggcttgttaatgccctattcacgtaaaaactttgtgtttttgttctatttttttcttttaattatttatttcttaaattctaattttttataaatttttttctgaaaatctcggtaaacataatgaaattgagttttatttagggtataaaatccaaacaaaatcatataaattactattccaagaccacaatataaattaagataaatactattttggatcttgtgctttgcaaaagtaattaattggaccctctattttgttaaataacaaaataaaccatatattttctaaaattgtacaaataggaccctgaattaattttttttgtcaaaataagacttattaataacccaatctagaggtgttatgacaaaactagttatatctttttgcatatgttcgtgctaggaattctcttcaagttggttatattaaaaaaattgtcaaaaattgagttcagggttttatttgcaccgtttttgaaaatacatgatctattttgttatttaacaaaataaaatgtctaattgataacgtttacaaaacataggttccaaaataatattttaccttaaaaattatataaattactatatacaatataatctaacgtggtgtaccaaataaacactttaaaaattatatctataacctttataaaagtataaatagttttggctttccactaataaattactttaataccctttaattatttatatctttctttcaacctccaatcatcatacatatatattaatattttctaataaattttgtgttcaaaccctagccgttttaacagattcattgggcatatttagggtcttgggttcgggttgtcctacggtcttgggggggccttgtttgttggagtgtggtcattaaagggttggggtaggcaattacaaattctcatggctgctagtagttcatcgtatcaggaggtggaagaacaatatgcgaatatttcacttgagggagaggatgatggggagttgggtattgattttcttgtccctgatgatcaagttttgaatgatgagttatgtattgtgggccgatttttgactggaagagccattgacttcgaagttatgcgccatgttatggcctctttgtggcagccaggtaagggggtttatgctaaggagattgacacc

SEQ ID NO: 117425 - DNA, 1106 bp, Cannabis sativa
aaaaccttgttacatttagtagctattttgactataaagaattataattattcaaagtaagaatgactcacatcagccatccagacatccacagcagggtcttctcccatacgcataagagtccactggtcactaagttcctgagttgcctgcaaaaaatagcgtccatctgtccacaaccgagctccatccatggttataagtgccaaacctttcaaataacaaaaatacccaattcagtattcccataattatttgaacaaacagaccactaaagattaacatcgaaaacaacagacctgcacttccagagaacccagaaacgaacgcccgtctcttatctcgtgcagatacatactcgctctgataaaaaatcatcaataaaattgaattatgaaaaaaaaaatcaatcgagaaaatttcttatcccaaatcagagattgaacacaatatctacgacaaaagctgataataagcagagtttcgattgaaataagtcaattcagaagaaagagagaaacctgatggtaatcctcagaaggaacaactaaagcatcaagaggcggagagtgagaagccattaaagccctcaacgaagcaagaatgtctgccatttttggttatcttccgaatcttctgagtagcgagtcgtgagtttacaactccacaatgtaaagtttcttagaatgagaattcccttttataaacccttctaaaattcgtaccatgctatttttgttgtgtacagtttttttgttatttttgtttttactgtattgaccttcactcaacagtcaaatcacttttctagtggaaagaaatttgtttttactgtttgggtaaaatcgtaaatttacagagactgacctatcgtatctatcctcggagtggacgataggatgtgctgtcaataatttgttaactgcaaatatacactattttttttttaatttaaatgttttcaaaaatatcgcttgtagcctttttaattattaattaagtcttgccaggtggcatgtgtgaaagtttctctcaaggtttcgttcgtttctgcgtttgtcgatcgactggtttgttgcgatttctctggttcctgcgtttgtcga

SEQ ID NO: 117426 - DNA, 4920 bp, Cannabis sativa
  modified_base (26)..(41): a, c, t, g, unknown or other
  modified_base (86)..(87): a, c, t, g, unknown or other
ccaaacccgaaggagagaaagagatnnnnnnnnnnnnnnnnataatgctctgctacagaaaggatcaagggctagagatcttgaanngaaggagtcattatattcagctgcgttgcctttgatttttcccaaactacgtggacacggataaaggtgacacgtggacctggaagaaccaccactcatgaaaatcaactaagtcttagacaaaaaaggaacacctcagggaaggtgcctcccggaggagagcataaggcacatctttactctctggaggctagagccatgctaaggcagttctgggaggtatagagattacttgaacaatcactttgcatttaatgccgcatgggggaagacgtattgaaacctccataaacgacatgacagatggcgtaagcccctttttacgacaattacactacaatcgatgagtctagtggcgactacattatgaggaatcacatcagtcaagaggggataaaagattatatccacctaactcctaagatacttacggtataggtcatgtatttcctatttcgtatcggttgggaatatgtgcccctatgaaggtaacatagaaggactcctagggatcgccccagaaaaacactataaataccccacacacaaattgaaaaggagtcgaacagtttcgtttaaggaatcgaagagagaaaataggagagaaatccaccaagaacattctctgtaataaatactctcattaatacaaaagactcgtggactaaggctcatgaatgccccaaccacgtaaaaatctcatgcattaaactttctacatctcttcttatacattatttaattggttgccgaaaacctcgatcaacattttggtgctttcattgagagctgaagaaagcatctttaacaaataacaatctgaaaagttaaatcagcaatggtggaaactcgtaacaatacatgtcagccctgtcctcctcaggatgctcaaatcccagagaacgaggaagtggcctctagagtgaacgtggactccgaggagtgagataaggctaacggcgaggagtacgaagaaaactttgacgagtatgatgcttacgacaaaggtagctaaacagagttgctgatcttgaggcaaaaggctgctgatcatgaagccgagattgcagcccaaaaagagcaaaatagaaaaatgcaagaggtgatggtcgccatgtagaaagccatggagacggcagaggtattgtcattacgaatttctagttatgtctttcggactaaccaatgctctgacaacttttatggatatgatgaatagagtgttcaaggatttcctcaatatttgtgttatattatttatcgacgacatccttgtgtactctcaatcaaaagtagaatatgaacaacatctttgaatttttttacatcaattacgagaacacaagctttatgctaagttaaaaatatgtgagttttggttatcacaagtgtcctttctaggccacattgtcaataaggatgagattaaggtggatccgggaaagatcgagtcaatcggagactgccctagaccaaagatgattatagaagttaaaagttttatggggctggttgggtattattgtcattttgtggaggcatttttcgagatttccatgtctttaacagagttaacgaagaagaatcaacggttcttatggacaaacaaatatgaaactagtttttaagagctgaagcaacagttgattacagctccagtgttggctttgtcgtcagatcgagagaaatttgtggtttattgtgatacctctagacaggatctgcagtgcattctgatgcaagctgacatggtcattgcttatgcttcttgttagttgaaggagtatgatcaacattacccaactcatgacttagaacttgctgttgttgtgttttccctgaggatttggcgacattatctttacaaagagaaatgtgagatttacacagaccacaaaagtctcaagtacttctttacccaaaagatttgaatatgagatagagacgatggttagaattagttaaagattatgattgtgagattctttatcatcctagaaaagccaatatggtggtcgatgccctgagtaggaaaggtcctaggaaggtttcccaaaccatcttcttaatcttgactttttttttgaatttgagcataacgatatgggtgaactgagatgggcccagtatccgattttaatgtgatcaaatgtcccaagagcttcgaaggccaggtggcatctccaacacctgaccgtactggtttaacagttgactgataggggctgatatcaatggctatttgtggtgctctacgactgttaaggcctcaagctggacccattaagttccagcgtccttctcgactgtcaatatcatggcctttaaagaaataggagatctacataagaagggtttccattgtaaagtgacccaagtttctgccatctcaaacttcgtaaccatatttttccaattaacttgtatattacccagagtttccaaccatttaatgcctaatattacatcgactcctcttaattccaacgaaaggaaataggtgataactcgcatggcatccaaatctaactccaccatggtacaaattccctcaatcatgactttacatttagtgccgagaagtattttgtaacaagtggttactgaaatcataattcctgctgatgtgacaacctccctcgaaacacaattatgggtggcctcactatcgattaacaagtcactgatcgagtcctaatatgcctaactaacttcatagtttttgtagatgagatgttattaagagagttaagtgaaagagtggcaagcgtctcttcataagccattgtctctttaaatcgggtgatagcagcgagtcctcttctagcgaatatgactcttcctcattagtggtaagcacaatctacaataacctcttgtaaggtgttgttgtcattgaacgattactcccagctttggaagtcattgacgcaatggatcctgacaagttcatataaggtctattttgtggagctatttggctacttctcgaaatcatggaagtgagctacatgatgtgaagatgatgacttgaaattgggtcttctgaatgggcccaggttcattgagtgtcggcgttcttctatcctttgggcagtctccatgatttgggccaactctttgcattacgagatgtacaatgaggcgttaatctcatttttgaggccctttaagaacccaccctccaagatgtgatcaggcacatcaggtacccatgaaacaaggatcgcccattaaacacggtactctcggaccgtccctgtctgagtaacagactacagttcctccaccaacgacccaacagggactgccccgaatcaggagcaaaaatttgtgcatttcccaagacataatctacctttgctaattttcccattggaaccacgatattgcatctccctcaagtttgatgatagtcatgtctaaaatcatcaattctaaaatctttgaaagtaagaactatcactcaactctataaatctaaccatctggattgtcgccattgaacagtagaatttctatctagggtgaacagacttcgtgcccatacatctagccagagtgaaatgaaccgagttgaattggtggtcccgttagaatggatacgggcggcattgccatctcaactggaagcttgggcgataactaggcaccaattgaactgggttcaccaattgaagacatgtttccttcaatagttctttgttggcactctgccattgtcgctaatgcatctagcgtggtcttcccccaaggtaggataagttgagagatttgactaactacgaagtccatctatctggctatgatttgcgcaatggtcgtctgaatctcaccctgaaatttttccaatccctggttcactctctacacgtcttggcgaagttccaagacctcttcctcaatcttttcttcgataatgttagtcgttgtgtctttcttcgatcccatgaatgaatgttctgataccaaataataagaatttcctatttatatacttttcaccccttttacaacaacttaaagcattatttataccacactccataggaactacagaaggactcacccacacccaattagttcccacaaaacagaattacaatgccaattaattccttgtggcatttccatctttagctttcgtatccctctttcttgcataaacataagtgataggtggcctatcattatgcttagcaatactttttggaatagtgcaagaaaacttatttttttatgtcataaaaccatgatgctacgaaagcattcccaaaacgatgcttggctatattaaaattttgttgatgcataacttagaatgtatagaactttaaatttggaatgtagaataataaattttgagattgttgtttgggtaatgaagtttgagatttaattttaaacaattaggccacgtttggttggaaaatatattttttttctttttcattttattttattacctcaaactaaacaccaccttcaagttttgtattataagaataaaaatgagaataaaaaaaataaatagaatcaaaattaaaatgcacaaaaagagttattaaattttttctcattttgtattagaatgatcttttcttccgtattaaaatgaaatagtcattctattaaaatgataaaaaattcattctattaaaataatattctaaagagtaaaataaaaattacttccaacaaaacacacctaatagctaatactaagggtgtgattggtttaggatttgaaaactattttatgtttttgaaaattaaaatggtgggggtccacctaagaattcttgattggttgagtgttttcaaaaataaaat

SEQ ID NO: 117427 - DNA, 977 bp, Cannabis sativa
  modified_base (209)..(219): a, c, t, g, unknown or other
accatcagcgcagcaatgggtgctgacccggtgagctcatcagaaaccgagtcctctactacttccttactcaatgaggatcggggcaaaatacccgacccgaatcagaaacgggccaagagagcaagggaaagttgtagtcatagtaatactaataataataatagcagtagcaataataacagcaatagtaataataataataatannnnnnnnnnnaataataataataataatagtaagcacccggtttacagaggggtccgaatgagaacatggggaaaatgggtatccgaaattagggagccccggaagaagaatcggatctggctaggaactttctcaacaccagaaatggcggcgcgtgcacacgacgtggcggccttaagcatcaagggtaactctgcaatactcaacttccccgagctagccggatcattaccccggccggaatctaactcaccccgagacgttcaagcggcggctacaaaagcggctttaatggagtttccgaacccatctccttcaccttccacgtcatcatcgacaacaacgagtacttcatcgacaatgtcgcagacttcgtcttcgtcttcttcgtcgttggtggcaacttcgtcatcgagctacgacgtgtcgtcttcgccggaagagctgagcgagatagttgagctgccgagtttggatacgagtttcgagtcggggaacgagttcgttttcgaagactcggtagaggggtggctgtatcctcctccgccgtggtaccatcatcagagcttgtttgaagaaaattatgggtactttagggaagatcagatagcaatgtcagagccagagtctgctattctatcatcttttgagcctttattatggcaacattaatgaatcatcaaccaaccatggatattggaattgccttcttttttagcttagttgtcttgtgtgcttcatctccttcttttcttttcttttctttt

SEQ ID NO: 117428 - DNA, 2564 bp, Cannabis sativa
gtgactattttattttacactcgtgtataaaatcgactgtttgaacattgtttttctatattgtaaattattccgaatttctcaaaattttgtatcaatacatccctttgaagggggtgcattgtagaatcaccctaaaacattaaccactagtcttgtttctgactgtaatttgccaccatgacggaataaaatcaagtttaacttatttttaagatgtaattaataaaatgcagtgtgagtaattgtattataatcacatgaattgattacatgtaaggttgttcatccgatttaatccatatttttttgtcaaacaaaatttaatccgcactaagtgagaattttatattttgaattcaattcaatctgtatagcattatttaatatttcattgaaatagaaaaaaattaaagaaaaattattgtttcttaatctctaataataatttttttccattcccgtttacatacaaatcaaaccaaaatacatatatagataaaaaaacataactatcgttacaatatatatttggatttacactaatatttatatctatatatatcattactaaaataaataagctaatttatatatatatatatatatttaaatttatttgtgtacttatgtgaataagaatgattttttctctgtcttttatataaaataaataaaatacattaacttaatatattactagaaaagattaaaaaattagaagtttgtgtattttttttaatattactggtaaattaatatatataatatattatattttttagaaatatatataattaagtacgaattaaattgtgttagattgagttagctgagagctaatgttagttaaagttagttagtagttagttggttagtttgtgcaactgtcagtttctaactaacttgcaagtgatttttgttagtctttagttgtataatgatgtatataggtcatgccttatgactttgataatcaatgaataacttcagcttctttctctcttttttttttctctctctttgattgtttttctagtttgtctttgtttgcttcaccatgtcgagaagatctaatatggtattagagcactcctttccgccattgatggccaatgttgtcactaactccaaaaatagattccaagctcagcctggcaatagatctaatgctcaagctcaagctggcaacacctcaaacccaaatccatggaattcaaaacagttgaatccaaaaaattgggtggtgataatcaaggtcctgtgttcttcaatcatactctgtctatcaattgtgatcacaattacttactatggagacaacaagtccttgctgccattcgagggaatcgattgatgacttacatccaagaaaactttgatccacctcagttcttgactgatgttgattgtgaagctcagaatgtcaatcttgcctattccacttgggaagtttaagatcaactattagcttcttggttactgtcttcgatatcagagagtcatataacacgaatggttggttgtaacaaatcgagaatactctgcagaagtattccactctccatgtttctgctaagatccttgaattttgaactaagcttcaaaatctgaagaaatgatctctcagtttgaatgattacttgctttgagtcaaacaaacttttgatttacttgcttcagttggcgaagttcttagcacttgtgatcatgttgcaaccattttcgaaggtcttcccagtgagtatgaaacctttgtcatctctaccaatacacgaattgaaagttactctattgcagagattaaggctctacttcttgcatctaaatcaggaattgagaaaaatgataaataaataaaccttaatgtcaacatggcctatatggatcctgagtttactgaggcaaattacaccaatactaatcaaaattttagaactccttattcaaggttcaatggacctcaatctccttacaatagttctaacactcagaacatcaataaattaggatcatattttcccccatacaactcaggccaacctagagcaactcaaactcattttggtaactcaggtcatggttctcaaccaccatctggattcagtaatcagagaggatgattcactgggaatcgaggaggacgattccctagtggtaacgacaatcgacttcaatgtcaaatttgcttcaaagctagtcatgctgctcttgatttcttctacaagtttgacaaagcttatacaagcaacacacaaccttaaggaaacactggccacacagctcaaatccaggcacaccttgctagttcaagtgctggatgggacacaaattggtatcttgattttggagctaccaatttgactcccaaaacatcatgacacccactggaaagattatacagttcaagacatacatccaaagagatggtatggcatcgtactggtcgtgtaaaagaaaatggtgttatgcatcatcctgttaattttgtcgcgtggaaagattttgatagtagacatcccgaatttgcaagagatcctcggaatgttcgcttaggcttagct

SEQ ID NO: 117429 - DNA, 2135 bp, Cannabis sativa
tctctctctctctctctcctgtacacgccgatcagggctcttcctctcttcttttcatctctcgcacacacctacaataggctggtcaacaccataggctgtctaacacttgagatctgcttactaatttatactttgtaatcgtaaaggtgctatagtagatcccacctatagtgatctagatagtatttccctcggtataaatacaacccaaaaaggagtaattcattaatcgctatcacaagggggtcgaacgtctataacaaatctttgtgtttattgcttttttattctatttgtgtaacacgtggcaaggatcagatctacacgaccgagctgtcagttgatcattttttgaggtaaatagtttggttctttcattgagagtgtggatatcgtatctgattaaacaccatggttaagacaagaagaatttctagtgcaccatctgcatctttaggtctcgctcaacaccaatagactgtaggtcaaaacactcaagttccagtcacaactggaatcccgatgaacactgtagaagtgatgaatcttgtcaccgcaaccagcaccacgactctggttttctctagacaaagctatagtgagctacctggtcctgcagcccttcacctgctaggtccagcaccccttgatctaccaggtcctacaacctttgaccgaccaggtcgtgcagcgcttgacatgccaggtcgtgcagcccttatcctgccagaccctacacaccttgtcttgccaaatcctgcacaccatggtcggccaaacctcccttgtaggtctatgggtggccaagattacttagcaagactcaataattgtcagactgatacaagcatcccagtgggtccgagtggcaggcccctacctccatgggaggaccctccacatgcacctgcaactgcaggaagagtccttagggggcacctcctaagaacaacaattgggtttaatccctggtactatgtaggacagatgagatagggaatcaaagcttactattggcaagccccgcgtgaacttggaagaagaccttgagttggccagactcagagaagttataggtcgtgcaggcccatttgaagaactacgtgctgctaactgcgatgtatttgctcagtagagacgtgaattccttgaagaacaacacattgttgatcttgatgtactcacttagcagagataagaatgcttaagattgatgggtgattaacaatacatcctttgatctcaccaagtagagttagatcaacgcaacagagaggccatcgatctaataaggcggttcaaccagagaaccgatggaataggctaggatctcattagagatcaacttcaagaaagacttgttaagagatgagggagggtctatcaatatgctgatcaatccagttccccacaaactaggacagatcttccctcgccaaagggaagatagacctttcctcaaaggtcaaacagcgaaaactgccaaatcccagcaaccagcgacatggatgccacctagggatctaaagctcaacaacaaccccctctatctatcctatggctagctaaccaccagcaagagctgtatggccagccagacttctccagcatcacccatggtcggccagaatcctgcaacaatacccatggccagacagactcctctagaagtccctatggccaacaagagaagagcattccctctccaaggggagctagtcgccaaaaggtgaatttttaaccgacgagggtagagagcaggtggaaacatcaaaaacaacaatttgagaagtgaagttcatcactttagatagttagatctaccaaactctagcaattggtgtgatctaccctatgtcaatgcacaagttccaccagctaggcagagattcgtggacggccaggccttgcccaacttagggttgactgaccatgtacaagcactagactcagggttggctggccttgactataccctctcccaaggtatgggtggccaggctctatccaatatgaggctacaacttaattaaagaaggtcgatcaaccaagcccctaaagcagcagatccttctcacaatcggatcaaatacgagacgtgctcaagggcctagtgttgggttttgtgccct

SEQ ID NO: 117430 - DNA, 857 bp, Cannabis sativa
aaaatagtaatttcaaaatctaatgtatatgatacaaatatattttaaaacttaataaattaaatgtataatgtatattccattcttatttataagaaaaatataatctaaaacaaaagtaaatattttatacgtacaatttttttctttcttcgaatttgttattttttattttatttgttttaatttgttgttgatgacataaaataataatcgtttattttattttgttgttacttgcgtaaagataaaaaaaaaaaaaaaagtatatattggaatgttgttcaactcgacccagagaatactggttacagacatgtttaactctttctttaattaattaaagatgagtaaaaatgaatatcctttattaatagaggcatgtgtgttctcccctttcctatcccatggcaaagaagaaaagggtgattcgaaagccagtggtggcagtttctaacgtacctacggtggcagaggatctccctcttatccaagatgaaggttcagtgctaaatccaacagaggaattccatgatccttgtcaagacttggagaacaaacaaggagccacaaaggtttgtgataacgagaatgtgatttgaagttcacgacgacgagaatgtgattcaaagctctcttaagttagtgagttggacggaggaggtcgagaagacgaattatcaatccaacgcaaaggatgtttggagtaaattcaaaaggaattaggttatgactccttctacttgtctgaatttttttgaacctttaaaagttggggatcagattgtagctaggttagatatggaagaaatggagatagaggctgtgttttggaaaaatgctattgtttgtattat

SEQ ID NO: 117431 - DNA, 4533 bp, Cannabis sativa
tagcagtcagggaactcccctacatggagactcttttcatgaggtcgatgccttctcctttccgcatcaatttagagattagggtagctaatgactcttcggtcttcctcaattagaatccacgtgtgatgcttatgaaaatgcagataacactttgaggatatgcaactgctgaaaaggtcttttggatcgccaaatcatcgcatagtttttgcatttccttacgataattttttttttcaattattagaaattatcctataacgaatgccaaacctacagataatttctcaatagaaaaactcgcatagttttgccagtgttatcgttgttaaggcttcagccttagcccacttggtgaagtaatctactacaaccactgcgtatttaactccttcttattcctttggtaactcgcctattaaatctatgccccacaccatgaatggccacgggttggtaataaaatttaaatggcttggtggcctattcacatacgtagtaatttgctggcatttgtcgtattttttggcgaaactgatcgcatctgctcgtaaagtttgccagtaataaccttgtcgcataatctttagagctaagtaatttagacaacaactcataggtgtaagagagatatttggccaaacgtcctccttaagccaaatattttcgattgacctaataaagcatgatttgagaatcgctaaaaaagcttcgagatattcaactttcatctctagggcaagttttaattcagtgattagggattcatattcaacttcattattggaggtgctgaattcaaaccttagagctacgtggactttaaactttttgggacttgtcaatataattctgcccccttggccttcattgtttgatgctccatctacgtataaggtccaacctggacgcggtggtacttccagatcaacttgatcttttgtgatgaaagctacctattaaattggaaacttgagaataaaattagacaaggccttggcctttgatagctgatcgtagtttgtattttatgtcaaatttaatcaattcaatcgaccatttgagtagtttccctaatgcattgggcttggcctacacttggcgtaaaggataatttatcagtactttaatgttgtgtgcttaaatatagggtcgcaactttcgagaagttaccactaatgcaaatgcaagttgctccatttgtgggtaacgtgtctcagcattgagtaagcattttcttacatagtataccagatgttgcctaccttggtcttcccaaaataacatcgagctaatcgtgtattgggaccgtgctaggtagattgagagtacctctccaagtatcagcttggaaagtatcgaaggttgccctaggtacatttttaatgcctaatatgcttcttcacatttgtaagtccattggaactttttatttccttttaatatctaaaagcattctttacatttatcggaagaacatgatacaaaatggtttaaagctgtgaccttacctataaggctttgaacctctttggcttggaaggagatcacatctccaccaaggcttttatttttgctgggtttgccttgtttccttgctggtttaccataaaaccaagaaactttcttgatcccactccaaaaacacactttaatagattaagttgcattttgtaatggcgcaggattctaaacatggaatctaagtgagcgacatggtatttcacatgttgagattttacgagcatatcgttaacacatttccattgtcttccctagaaaatctacaaacatcatgttaaccaatatttgttacgtcgcacctgtattatcaatgcagaaggcattactttataacagtacaaacctcaatctgtgatgaaggaggtattttcctggtctggctcgtacatcaagatttgattatatctcgagtatgcatccataaagttaaggacttcatgacctgcagtggcatcaacaagttggtcaatgctaggtaaaggaaagctgtccttgggacatgctttattaaaatctgtaaaatcgatgtatgtgcgccatgagccatttagctttggtacgagaataggattagctaactagtttggataaaatgactcattaatgaagtcgcgtaccagtaagcgatctacttcttccttaagcgtttggtacctcgcgaggtccattttatggcgctattgtcgtactcctcacgcatcaaggtcaatgttcaagcggtgacacatgacctcgggcggtattttgaccatgtctgaatgtttccaagaaaaaaacatctagattttgtttaagaaatgtaacaagcctttcttgctgctaaaaagttagtttagagaaaatttttaataccttagaattatcaaaagaatcaataggtaccttttgtctcttttgcagcctgtacagtgttggtgtggtgtagttgaggaatatgggagccagatctggtttctctgtatgcattatttcttcaattctaaaaaattcatgtcgagggggaggagccttgaacaagtaaatgacatttgctgaattcttctttctcgattttcaatgcagtattgtagcattccttgaatttatgtggattcctcgcaccgatcccacacccgtgggggtgaggaatttcatggtgagataatagatcaaaatagctatcttcatctctttcaaaataggctgacctattatttcattatacgcggagttctagtcaatcacggaaaagtcggccatcgatttggtagtatgggttttgttcctaaagttattgataactttatcattccctttaattcaattgtatctccagtgaaaccatagatgctcgaagtcactggtcgtaagtcattttcatgcaaccccatctaattgaaagcctgtaaatttaagaggttgacagaactcccattattgaccagaattcagtgtacattatgccctccaatattagtgactaccactagggcatcgacatttgggtggtgcacccacctcgcattgctttccatgaaggtaatgtcgttgcatcttttttaaacaacatttcatgtctttcactcaagttatttacatttgttagggattttctttggcatcctttacatagcgctcctacgcttttctagaatctctatcgacatgcggtcctcctatgatagttagaatattttgaggggctctagaaccactcaaatcacttgtattattggtatcatctgcttggggatgattttctctattcttcatatactagctgaacttccctcgtctaatcaattccttaatcttgtcttggaggaatcaacattccagagttgtatggtaaatatttttgtggtacttgcaaaatttcatggggtccctcttgtcacgattacctcggattagaggcagttttttcaaaatgtcgttatgttcctcgattgcataaacattgtcatagggaatggacaattcaatgtagttgacaaaatgtgggccccctttcctctttggggatgtttctttttttggtgggggacttggcgagctttggacttcgtttcttagaaggactacatcttttagggctttgtcccctagaattctttgcttttaggcttcaagaacgcgttcttagtactagagactcatgcttctcctttccactttccaacttggccagagaattctcgattctcttatgcactgatggcaaagaattccaccaacgactcgagtcgttacgcctgtaattccttccaaaatttggttcttcgtaggacatctttgatcaacatatagaccaacaaagactcaagggccttctcaacctttgttatctaagtattaaaatgcttaaaataatcttgtaaagactcaccgacttcctatttaatattggccaatgttatgtatggcagtttgtatgttatcatggcctacaaaggtctcccaagttgatatcgatgcctcaagtaattggcgaaaccaatcatgagcattatcctctagagtcgcggtgagtattcgacattttcccaattgtggtaactggtctagttccataattgtattaaatttatttaaataatcgattgggttagtagtacctttataattgagtgattctcatagtctaaagcctttaaggagccttgcttgttgtacttcttctgtaaagggtgacgtaaaatgaagtttgtaaatgggctttctctgctgctagattagccttaacgctcataagaggctctcttggtaaatacctcctggtaatgtgtggttggtctgagtcactattggtatagcagtgactgctactatattggtagggatcacaacttttgtgatcgcagctcgtacaatcagtgggttgattggattagtcgcattgtttacattctgagtgcattgattccctacatggggatcacggggctcttcattatcattgcagttccttggagtctgaggtcatgctctaaaaatctcattaagatgattggaaaaatcacctct

SEQ ID NO: 117432 - DNA, 918 bp, Cannabis sativa
acacacacacacacacacacacacacacacgcatggctcgcatacgagccccctactcacaccaatgcacacacactcgacacaatactcacacatgcacgacttgtatgcgagccccctactcgcgccaacacaccctcgcacaccctttcatgtagccctcatccatacatgtacaacctctccttatgctcgtgctttcgtcattgaatcaccacggggtgaatcatcgaatcgcatgggtgcatcccatgaattgcgagtatcgatggcggtgttgcgaaatacataccaagtaggtaagcttattaaatgcgcttccgttaattgctccaaaattagttaactaacctcaaaagttaacagtgctaattttcatggttaacacttgccccccagtctacaaattctttcaaatgttcttatcgattgagtgtgttggggaatttgccccaccaaagcatgaggccctcttagttttctttgaggaggttctcgctttgcattggggcttcccttgcttggatcttacatcgtgccaatatgttggtgtagagatggattctcttcaccttggcttatcctcttttctctttttttaggaagtgactttagcctccgtgcggttcagtgacatttttacttaacattggctgaacgactctgagggtcgctctttggccaaaaaaacaaacaatagtttaaataaaaaatagttttaatttctgaagaaaaaaaacagcatctacagtcgagatttttatgtggcattccctcgtaactttttcccatatttgtaagtttttttaaaaaaactgtgaaaatttagtataattaagtatttatgccatatatataggtgcactcttaatgggtattacccatgaatgggtaatattaaaaaaattgagtttttat

SEQ ID NO: 117433 - DNA, 1470 bp, Cannabis sativa
tttgagtgtcttttcaataagcaaccaaactatgaacatctcaagactataggatgtcttgcttttgcttcaacactctctgcccacagaacaaagttctcacctcgcgctcgaacttgtgtcttcatgggatatccccacggagtcaaaggatataagctgtttgatcttaatacaaatcaaatttttatttccagaaatgtggtatttcatgaaaatatttttccttttcacaagctgaatactgacaattctaacttggatcctttttctaatattgtcttacctagcaatgtgattaacgatactgctgtctgtgactatcccccagacaacaaacatttgactcagatgcaacatattcattcagatcatgttcattcagatcaggaaacacctgactcagatgcaactaatgcacctgatacaacaaacaacacagcaaccgaacaagatacaccagataacagacctgcttccagtacacaaacaaatgatactgcctcaaattcaaatcctacaagaagatcaacccgcaccactaaacttccatcttatctcagagatttcgagtgctattcttcaattcaggataaatcatccacaccacacaatctctctaattttatttcatattccaacatctctgatccttataaagcctttatttttgcagttgccaccatgagagagcctcaaacatatcaagaagcaattcgatttgaaaaatgggtgcatgccatgaatcatgaactaaaagctctcattggcaacaaaacttggagtgttgtgcctctcccagccaacaaacgcgccattggatgtagatgggtatacaaaataaaattcaatagtgatggaagcgtggaacgacttaaagctagacttgttgcacaagggtacacgcaacaagaagggcttgatttttttgacaccttctcccccgtcgccaagatggttacattgaaacttctccttgctatatctaccattaaacaatggcccatccttcaacttgatattgacaatgcctttttaaacggtgatctcaacgaagaagtgtatatgactctccctaaaggactcacactctcttcctcctttactgcagacaccaatttagtatgcaagctacataaatcaatttatggcctcaaacaatcttcgcgacagtggtacaagaagctctctgatgcacttcttgatgaaggtttccagcagtctcaagcggactacactttattcacaagaggcacaaaggataccttcattgctctcttagtttacgtcgacgacattgtcattacagggcccaacctttcccttctccatcaacttcagaacagcctgcatcagaaatttaagctcaaggcacttgggaatctcaaatattttctcggttttgagattgcccgtgccaaacaaggtctattcatatctcaaaggcaatacacacttcagcttctcgat

SEQ ID NO: 117434 - DNA, 3524 bp, Cannabis sativa
agggcacaaaacccaacacaaagaaggtgagaaaattttgttgcaccaagagcttttgtaataatatcagctagttatacaccagtccatatatgagatatgttgaaattgttccatctttcaatgcatcatgaataaagtgacaatccatctctatatgtttccttctttcatgaaaaatgggagtagctgctatgtaaaaggcaacttgactgtcagaaaacaatcacatggaatgtatgttggctgttggatcccaaaataagccaaaagagatttcaaccattttaactcacatgtagtagtttccatagaccgataatcagctttcgccgaagattgggaaattgttacctattttttcattttcgaagagactggagaagaacttaataaaataaagtatccaatcaatggctcatgggtcagagggaaacttgaccaattgttgtcacagaaggtatatagtaatcattatccttgcacagcagaattccttgtccaggacaacctttacagcaaaactctcaaagatgcgtcccgatgctcaacatgaaaatctcccataaattgagctaaaatatgcacataataacaaaattcaagtcgtgtaattgttgagtatattagacgcccaacaagtcattaatacttctctaaatccctaaagacaacaacattgatagtggtaagatggtagttttgttccatgggtgtagaaactggttgagctccaagtaagccagcctcacttataatgtcaagaatgtatatgcgttgtaaaagaaacaaactatcctccctatgtgccactcaaatgcgaataaaatacttgtaaagcattagaattgaaactaggaggtaattgcatgtatacttcttcattaaggactccatgaagaaaggcatcatgcacaatcatctgatgtaggtcccatttttatgctaatgttatagctaaacatgtacgaacaatgacaattttaactataggggcaaatgtttcattgaagttaatactggcaacttgtcgattcccatacactactagtcatgccatttattattcaaccctaccataagatcaatacttctttttatagacccacttacatgctatcaccttcttcccttggggtaggtactctaaagtctaggttttgttaccctcaagtgcatctatttcttcatgcattgatttttgctaattgggatccttaacatcttctttaaaggaggtgggttcggtgtctgcagtaattactaccaagaaactggtgtgtctcatagaaaacttatcacaatttacataataagaattataaaatggagtacctatggactttgacagagcattggtaggtgatgtgacagggcttattacttgaactattttggtgatgaagtccttgagtgtactagaaggtctattgatttgctttccacgacaaaatctctgtggaacaatatcttcattaatcacaacctccctataggcaaagtggtatcaatcacatcctcactatccacatctataagtggtggggttagttgttcattactagggtcaatatcgtcgaccccaattaaatgttcctcacaccccattggaagggaagtatcctcatacggagtgacatggtcataatactcctactttgaaatacatcatcattggtattatgtaaagagatgtcactagaaaaaggaaattgttgttcacaaaaaaataatatcacgagagataaaaaaaataccttttgttctaagtcatacaaacaccacccctttttaccgagtgtgttgacctcgcttttagccaacaacagtgagtcaattaataagcgataagaaatgtaattaagatagaacaaaaatcagtaagcaataaggaacacaaggtttaaagaggtttgacccctttagtttggtaatagcctaatccccttagattttattaactcgagaacaaagaatacaatgtttcctctctcaaagctctcacaatgaaatttctgagttttctcttagatctctctgaagtaattccttcaacccctttcacagtgaggatgtttcactatttatagggctaaatgaatgagggaaggtttcccttttgcttaaaatatctataataggtaagaacatatattacatatttagaatacatagattgagggattcggacagcttgccatatccctttgatacgatccttggattatagagatttcatgtgtgcttgagcttcacgatataaatcttgaaataactaagtcttgatacatttctcggagaaatgacttcgtttattgtccagaccatctacccttgccctgctcggttaggcagaatctgtccgtacaaatgcttggctgagctctgttcagaatatctctccagccaaatgtagagaataacagacatgtgtcaccaatatacgttgccacctcacagtgtgaaaaatgggataacattttccccccaagtctgcacaagacttctgaagttgcacatagacttcactcaactaaagttcgtgtctgaatgagtggcacgtgttcaatgcgcctgttggtgatccgatgtgattctgagcaagagtcccttcaatatttggctaattaatgctctgattaatttgtagctcgagacactccaatcaatttgcatgctttgacagttacccttctctaggtacttgattacttttgatttcccaagatctaatatatggacgttcattagcaatttaatgtcgtagaatatcgaaagataaatattattgtaagtcttttattcttggtaatgtccatccgaacagtggctgctaaaagtagggcttacaaagtatgaaacaatagtagaagctcatgtaataggaatgaccttgactctcgcctaaaacgggacaacattgaattttcttttcaatcaaataaaaggttgcaagaatggtttccgttttaggtgagctaactactctattcaatatatgatatctttgactctcgcttaatacgggacagtgtatcagtttgttgaaatcttagaaaataattgaatatgttttattttggtatttttgcaaacatgtttccttacttgttattttctgaatctgtctatgaatttatttgaaccaagtaatttatttatgtttattgataattgtagtgtcaaaatgaataacccacaccccaatcctcatcttttatatgcctttgaaaataaattctatagtgaaaatgtctcctggtaagagcatcaattcacacttactcatgatgaactcgaagttccagaaagcaaatttgttgagaatcgatttatcaaaagagcaatgggttctattcattctcaacagccttccacctaagtataatggatttgttgtatcatacatgatcaacaattttaactcatccgacatagacaagctggatgctaaactgcgtgcttatgaacagactttgcgacttgcaaggaggactctgtaacgtccccgcttcaagcctcca

SEQ ID NO: 117435 - DNA, 2356 bp, Cannabis sativa
  modified_base (2302)..(2317): a, c, t, g, unknown or other
atgtgtaatattttaatttttatagtttaatatttttgtatattataaattttatttttctattaggggattctccgccccgttcccgctaccattagagaatttcgtgtctcattctcaatagggaataagcggggatgaagattaaaatttttaacggggatgggatggggagcactccctgccaatttcccgcctcgtgtgcatccctaaattcaagttgaatatttgaattttgattgtaatttatttttttggtttattgatttttaattctaaatttgttgaattcatcatctatcgtggcagtaagggaatgaagatggacttcaataccactactcttgagcagaagaaatctaaacaatgtgccttttttcgtcctgtattcaagttcactcttaacgattattttggaccatatctagtgttattggtatatgggaataatttggttcataagaacaccttgccaagtgcaccagtatttatgaaataagttcatgttatcttttgctgatttcaaaggtgtcatagctagtggactttcatggagtctcaacccaaaaatcctggcttcttgcttcttatgagagatggagaagagtgaattttggagaccatattagtggtgcgatggggtttactgtgagcacatattgttgtgatgtctcagctcctattgtactagtggaggaggcaaaggcaacccttaattcttgctttgtcttaagccatatttaaagaacataagttcatcatcatttaagggtatgtctgaaatgtaatcaaatgacctaatttagtcgtgggagttaaatagtttcttgagtcagtgaatgtgctgagatgaaacaaaaagtccacgcaagaaaatccacgatttaatagtgttactttttataagaaaacatgtaaaataagttacttctaaatcttctttctataaattcaaaaattaaatttggttacaaattttaagacactaagaacattgcaccatccccaaaattagtagcgtgtggaattttcacactattccactataagaatatatcaaattttacaatttacactataattttaacgttataccaaattggtgtataagtttttctttacattttacctctttctctaatttgctataaaaatcctcataaattatttgttgagactatttataattatagtataaattaattattaatgtaaatagcataaaatacaaaattatttaagcaaaatatatttatttagtatcatatttgatatgaatgattggagtttctactgaaagtaatagattatatacaaaattggtgaaaaaaatattttaaaatggtgtaactattggacacagtctaagaaagcccatagtgaccgagcaagataaaattacagttttataaatattacgtactttatttcctaaaaataattattgagtctatgtcagttacaaacttaaaatttaaatacttaaagcatttctaatatggacaacacttagagttgtcaaaagtgcatacatcattctaaaatatatatatttttttcattcacataagattcgacaatacaaaaatcaccctgatagttgacaactctaaaaattactcaccatggtcccacatgccactatttaaatgattaaaatttattaaatactataaaataatacttttaaaaaaaaaataaaaagataaagtaatgttacatgactgttgctaaatatagacaatagtgttgataaaattgtattaaaaaatgataatcacattgtatatgtggcaaaataactccatgggcaacccccattggagatgctcttatattgcaaatatccattttattttttaagctaattaggattttttatttctcaaattttgatatatactaaactgtgcacccggaactttttagatggatacaaataccctatcaactgttaatattgttagatttaagaacttccgtctaattccgttcaattttacaaacaggagcctgacgtggacagaagttcgggagatacaattttgtatatgtcaaatttttggagcataattcgatacatgtcaaagtttggaggacacaatttggtacatagacaatcaaaaccttaaacatccgttaatataattgaaaaatattagatgtgttgaataaaactatataaaagtaacaagaaaataacatccaaacaatatcaaaacaacaataaaaataattacatacaataaacaaaaaattaacaaaattacaacatacaagaccgtattttttgtaaataaannnnnnnnnnnnnnnnaaatatttaaaatttcgtacaacagtatttttataattt

SEQ ID NO: 117436 - DNA, 1137 bp, Cannabis sativa
cgtaccaaacgagccctaaataaacaaatgaacaccaaaaaattatagtgattcagtttaaagtcgatctgtttaatcaacttttaaaagagatttgtaattagtttcattcggattggataaaacaggaccgttacaatattaattatatttaattaagataaaaaaatatctataaaataattgatagaacaattttgatcattcttatttaatattcaaatgggtgcgactaataaagtcgcatattagtcgttcacattcttgagtaatacatgaactcacggactctctagtgctactcgcatataaggtctttgaacccttcaaaatgcataaaaatctcttggaatttttattgatacatgaacttttcgaggtttataaaatagaatgcatggaactatgtcgatcgcatttatgtaccaacaatgtagagctcacaggttctagacaaattgtcgcacacattagtcattcagacataacgcttatacagatacaatctttacgcatgggagaaatatttggttatggcatataattgatatgtccgcgcgactattcaaacttgttattgtgtcttgtttttattctactatattatgcataatgtgcgattagacatgtctcagttgcacattcttgtaaattttgattaagcaaggatagtcctattaagattgttattgacatgtcatctttttttcaactgaaaactaagtctacctattgtatatactcttattatttctaagtgaaaattttaacactaaaataataataataataataataatatctgttgtcaaatcttagttacaccataacaaaacaaattaatacagggactattattccttggtttgactagtaatgttacttgacgtgacgaatacaggtcaagggcacgatatgcaaattttgtgggaagtgtatgtaaaatatcttaattcacagcctataatagcaaatatagtagcaaaatctatctatttatatctatatatatataaaggaaagcacaaatataatgatgcggaggtctatatgagttctccttcatcatttttattttcttagtttttcaatttttttcaaacttaatttagttttataactcctattattaataat

SEQ ID NO: 117437 - DNA, 2382 bp, Cannabis sativa
  modified_base (2338)..(2343): a, c, t, g, unknown or other
cacagcaacggctgccacagtcgtcggcgccatcttttgtctccccgccggtttctttcgtacagtttggatcttccctccttacatagctgccatcgttgcagccagcaccatccccgcagcttaccacacccgtcaccttggcatcatggtccgtggtttcacaggtacaaaccttcgcagaccccagttccctcttcgccgcgcggctgcagggtggctctccctcgcttccaccgcggctggatcactaggcgccgctgccatatcctctttcactttccacatgctacgagagaacgaagagttcatgagcctttcgatcgtctccatcttcagtggccttaaatggctactcggaatgttccacttcgtaacctcaaacagagacacccacgccataactcccaaatcttacgctcgccacaccttttccattctaaaattccctcacgctataggatccctcgcagctgttttcctttcctcagcctcaaccatgaccatcttcactggagtcgtgcttttcctcgtgggagatctctgtctcccgccaaaatctttgctctatttctggctagcctacttcctcttccccttaatctcactcccgattctccacccgattcaacatttggtcaaagcaaacgcggtgaaaatgcaagtcctcggatttttcttgacggcggctatgtcaggattaggatttgcattccgaagaaagcactggaagacgcatcacgctctagtttttgcagcgattcaggggacctcaactgggattttgcacgctttctctagagtcttgataatggactgttcgcctcctgggaaagaaggagtcttctctacttggttcgtgtgggtcaaagttttgggttccttggcaggttttacggcggcgtccaccaatcctggaaacgttggcatttcgtttgggctcgggttctggacagcaatattcgcagttatcgttttgatatttggaaacgttagcgatttaggaggggctcgtagggcagggcatgtgaaagagaatcctgtcgtcgtttatggtggtgttgagggaggctcccctgttagtggcgttgacgaggatgttgaagtaagtcaacaacattcagtgcatgttatgacgtaagaaaatataagatgaacataagatgagtttttccttttctttttcttttaattgaaataattgttcatgtttttctttttatatttttcttattctttgaagataatcaatttcatcaaaattatgtaccaatggggagcgtgtataattggaaattttatcgactatgtattattctatgtatttttatgagaattgctaaaaggcattattattgtctagcatctttctcggtgtcatacatctattagtgtaattaaatattgagttttttttatataatttaaagaaaataatttttagggaatatagctaaccaattgtaatgagccacctataaaaaatgatggacaccacaggtgttcaatagcaatgctatatttttatttattaagttaatattctgagcatagctatttactatttagtacattaaagtgctcaatactttaatcacctggctctctgtaattagtttgtaattcctattttatttattgaatcaaaatgtacattttgtattgcttaacaccttaagattttcgatctctatgtaattagttgatcataactaataaattttagttaatatagttagagtaagaaaaaagaaatactcataagctaaatgacattttaatctctctctttatatatatatatatatttatatatataaatatttctcttaccaatgtaagaaatattagaaaaattattaccccaaaagcgaaattcatcacaaaaagttttatacaacatactaattatatgatctattttaaaatataagatgtgttatgaactcttcctttgaggcgattgctatgcccatcaatgagtgatttgggcccacaagaaccatagcagcgcgtaacaaccatgtacatggtgggtgagagagaatcagaaagggagatgttttggcacccaaagtcttgatttataactcaaagtcaggtgtaatttacattggttgcgtcgatgggtgggtgagccgagtcaagtttgttatgaaaaatacctcaacaagaacaacaacaatgcaaaatcgattgaaaaattaaaatgaaatagtaaaagaattgattacaaagtaataacaaaaggagacgatattacgtggttcgaacaaagataacaatgtgttatcttgcttactccatggccagaaattgttggaaattattttatcannnnnntagatctactcacaagtatgttcattaacaccctaaata

SEQ ID NO: 117438 - DNA, 798 bp, Cannabis sativa
ttaaaaaatcatttttgattaaaataaatataaaaaatgttagaaaattaatatttcatttttgaacttaaatatcaaatctaaattcatatatttaattttttgaataaattattatcaattttaaattttaatgaagcttagaaacttatttttatttattctaaatgcatttgaattgtggtatgaatttaaatttcattagtttatcatttaattcataagatcaattatcaaaatattagatagattttaattaattggcaattttaatcttttatttaaaatattatatttttatattccaattaaatactaataatattgaaaactagtctaaatatttcataaatatcctaattataattgttcaatttttaaattttgtatatttattattatttttatgatttgagttacaagaaaaataatattggcaatatcttgaatttttattacttttaaattttagatatcaattttgcttattagttgtttaaaccattaaaatataataaaatagcctagataatttgtagaataattgacagaaagtatttagaatttataaagattttacatttagcctcttcttgtccacctctacggactaaagcaagcctccgcaatccatagcattttggaagcttggagggtgaatgttatcttcatttccggcaatagacgtgtgcattctaaatagggaaacttacaaaaatactgtttttttactaaatattttcaaaaatactgggacacggcaaactttacatttttactgtccaagcccatttttat

SEQ ID NO: 117439 - DNA, 1943 bp, Cannabis sativa
tcgttacatgcgaaattccttttggtccattgtgtgatctagggttttcttgctatccttcagtatcagtgggtatacgctctgggaattgctgcaaaaaggaaggttttttctcgatttctttgctttctcgctcctctctttgttgtctaaggggtgtttttgcttttctctggttatctgtttcctgtctgtgtttcctttgtttttttttttggtgagcctttctctaacgatggagaacaacttcgaggagagacaggtggaacaagtggagctctgtggattggaggatttcaagatctctttagaagcagatcctgagcttggggtggaggctattgagaaatcagtcgttgcaaaacagtatacaaacaagactgtctttatcggtctgctacgttcgattctgggaaggaaatggaaacttgccaaggggtggaagcttcaagaagtggagccaaaaaccttcattataaggttaacaaagaagcaggaggcgctgcaaatttctagaaatggtccgtggcctatatgtgatggttttctagtggttaaacccatgcctgatgatggtaaatggtcgtcagctgatttaaactcttctccggtctgggtgcgggtgtatgaaatgccacccagatattggacgattaaaaatgctaacgcgcttgcgcagaaaattgggtcggttatctctatagacagactatggaggaacggttttcctacaaatgaatatgtcagattccaggtgaatatccaactgaacaaaccgattatggtaggtgtgtttctccctatggaagaaggggtgtgtttatggtgctatttcaagtatgaaaatttgccatgtgtctgctacaaatgtggggttgttggtcataaggaatctagatgcagacgtaaaagaagaatgattgctgacgatttcaatagaacggtcccaatgtatggcccttggatccgactgggttcctgaaaaaaagattgcttctcggactatgaactgtatgaacaggaaaggctagaacgggagttgagggatgtccgcttccaagccgaggctagagacaatcttattccagggggagaaaatttcgagccagcgctgataggcactgatttgcacatggaagcggtgatagaggtggctagaaggcaaaaagaggcggaatcggagattggtggtagctcaaaatctccggtggagggttctgtggtggaaggtagtccgtcgtcattggaaatttgatcgatggaggaagggcaaaatggtccagtggttgttaccaacgtgcatgggaaagatttcagtacaggaggggaggtggtggcgctcaagcatacggatggggtcagtggtcccagcatttcccactcttcgaatggaaaaggaaaagaattagctgaggtggaaaaacaacatgtggatcatctggctatggttttcaaagcttctttgggccctaattcaaagccggcccacaaactttccaggccctcaagatccaggaaaaatttggacttatctgctaagagtggttcaaggaaggaattaaggcctctacaggttggaaaaaagaggagaattgtttcttgtgatgaagacttttctcttttgggctccattcttcctggggtggactcttctaataaaaaaatttgtccagaaggtagtcttacgtcattgaagtctcaagagtttcttactgggagtcaaggaatttttgaagacggagagggtattgggacggcaactcattctgtagaagtttgcattgggactgaggaaaatccagctgcgcttaatgctccgctggccaatatacaaacaccaatgtcaccgacggaagggaagaagaaggaggattttatcttggccgaggaggcgggcctttacatgccccccaaatccccatgttagttgttgcttggaactg

SEQ ID NO: 117440 - DNA, 676 bp, Cannabis sativa
ggtctagtggtatgtgattctcgcttagggggtgcgagagaggggtcccgagttcaattctcggaatgccccctattaaacacagtttttcatcttttttttccaacttgcaaggaatctaccaattagtatagttttcagtattgagctaaacaggaagaccacaaacagcctccaaattcatatttgaaaaactataagtaacttgatcttgactaagcaaaggatgtatttctatcttatgtaattataaacacatcaacctaattattagaaatctgaaaatgaagatactttaagttttcatgtactttgtcatctaatctaaccacccacaatcttatatagtggtgaatcacacattttattccaacaagacattggtaaacaaaagacataaacaaacaatagatactgaagttactaaattagcctagaactgacctaaccagtaaaagataaaatctttctaacatttcaacagcacaaataggaagaaactcttcaacagagtccagtcaaataaggaaactgcaacaggaaaatagaccaattttatgttaagcatatcaaatgccaaataaacataataaaagtcaccagtgggcatttggtctagtggtatgattctcgctttgggtgcgagaggtcccgagttcgattctcggaatgcccc

SEQ ID NO: 117441 - DNA, 891 bp, Cannabis sativa
attattattattattatagaattcagacaaaaaaggaggtagttaagctaagcttcgccatgcacgtctgtcttaccccgaaacttaagcacccttattcccctttgacccaaacaaatttaatcctcaaccatacaattactactacaccataacaaaataaaacttataattaaataaaacaaaacattctaaattcaataaaaaaaaattaataataatttttctaaaatttaatcactcttaacccacctcaatttctttcattatgcaccccacgtttagccaacccaacttaaaaaaaaaaaaaaaacattactcaatgacctctccaaatattttctcaaaactcactaataataataaaaaaaacataaccatttggaaaagttaaggcaaacttgttcttcaatctccttcctttccttctcctctggtcttatatctctctctcaaactttgttgtgtcaaaacgacttagaagagaatggtgttagaccaagaggagcatgaacaagatatgaggccaccatttatgattaacgacgactacgacgaagaagaagaagaagcctcaactgctaccgccgggttgagacatgccaagagtcttggaattgagagctctgggtgtttggatgatgaaacagaggaggagtttgaagacccacgtgtaatgggtacaaggagttatggaggaaaacccttaaacgacatggaaagacagagaataaggtctgcctttattaaaaaagacaaagggtctaagctctctcgtaattctcgtattggtaaagattatcatgaggctactgggtctagagatgttgttaatgttgttgttaaagaagctcagacctcaggtaattagtattatataataataataat

SEQ ID NO: 117442 - DNA, 2178 bp, Cannabis sativa
aatccatttaagccctcttcaactgtgtagtctcatacctacacagtctcagagtcattacacttaacctttctcaggcgatgtgggattatatagctcccaatcttttcccttacggatcatgggactctgactgtcacaatcacccccatttgggggtccgatgtcctcatcgaccacacttctgtttgggtcaaggctctgatattggtggccagaaatgtcaaaacagtattagttgggaatttcgatgagtttgattagtatttgttttattggggtaattggttgtgaccaaattacccctatgttggaaattctttaagtttataagtaaagggtagttttgtcattttgggggttttatttttggtaagatttttcctaagttattactaagattatttgtgctgactgcaaatttagccaaccaacacagaattgaactaagatcgtagcttatggctgccacgtgttgaatgataataaatgtaaagagacaaacacattttatagaggtttgacccattttgtttaggtaatgacctactcccattttagttgtatttactatagagaggctcttcaacattataatgaagttttcaggtgagaagtgtgaaaagagagagaacttctagttatgaataggattgcatgtgcagtctagacttagaatttagattgtgttataaagatcttgtgtttggataagaagatatcgtcagaggggatccctttcacatatgactaatgccttttatatagtagtagagcttacaaagctgcacttaaagatttcccaaaatagtagggaggttacaacaaatatttgaattacagagagaatatctcctataaacttgggttgttatttgctgatggagagtcctatcttcatgagcagtttgaactggtctggagttgtaggcatgttgaaggcaaggttgaaggcttggagaaaacacaagtgctggtgcattctcgtagctttggccggccagccttgttgaaagctgtccagtgcatggaagttgtccctcttggccagccaattataggtctggctaggaccttgctggcaggtaagggtatttagcaatccatggatacctcggcctgtgtcatttcgacctattactagtctcactggcgaacccaatgaaggaccagtgtgggcttaagcccatgctgaaaaaaaatatttcttttacttcttaactaaaaaaaaaaatcttttaattattttaattgcccacaagaaatgcgcaacaaaatgggagatcaacagttgaatgatagtttgacagtttatctcaaaaaggatgtattcaatgctattgacaacgagcttattattcatcgttttcaaaacatgaaaactcgccgaggacaactctaaagatatgaaaatttaaataaatatggcatgaaaatttaatgacacaaaatatggcattttctaacaaaacaaactaaaaatataggtttataaatagaaaatgtggtacaaaacattaaaaaaaacataatcattttttgaaacagctctctctctctctcatgcgataccacgatccttttttttctctgttcttctcttttactattattcttctcctgcgattccaaattcttcaaggaccacgtccatctttggcaacaacaaagcccggcaaggacaacgtccattcttggtagcaacaaactctacagcttaaaattctaattattcaaccttataacctatgattatataatctcaatcctgcgataatacttataacctacgattatataatctcaatcttgcgataataccatcagcaaacacaacctcctaaaagcttccaatcaccatatacaaaaacgacctctaatcatcggaattattattggagaagaaaaaaaacaattaaatttatatatatatataaagagaaatagaatatatcataataatataaatatgtatataataaaatataataataaataatatcatgagtacaaaatttatataattgagtgaaaaaaaaattgtcaattcaataaataatacaaattatattaaaaaattgagtttttgcaaatgccaataattattacagaaatatactaaatataaaattgtatacgtctgcagcagcagactgtaattctgttactgcagaaacc

SEQ ID NO: 117443 - DNA, 2702 bp, Cannabis sativa
aaattgaaaaacaaaagtggttacagaatgcatttttatttttcaaaaacaaaatttttaaaaacaaaagtgttaccaaacggcaccgtaatttaaggttaattttagtttgagttagaattaggctaatctttgcttcttcactgttcaccatgttgaccattcattgtatatacatcagatacatttagtgctcctgtgaactgtggctgcctcagcacatccatggagtttctatcccaccatttccgtatgaatttccacaattcactttaagagataacttattaagcacttaagaaggaagttgagaggttaaagattgccacaagagagatgaagaaccattctgagtcatttaacatgggaatgcaccagatgtcatgcaattcctcaaattattttccagttccacaacaagctggccaccaaaacatgcaatttccattcagtcattcccaggctaccatgtcagctcaccatcttcaacaatcaaattctcataataatacctccgaatttttgcagaattatcctgttggtcggttacagggacttgacatcagtaacaaaggttcatctattgtgaagtctgaaggtccctcactctctgcaagtgaaagtagcgccacattatgaggcaaactctctgctgacctgctgacttgtccatgacacaccatccgatcatttgttcatagattgacatccatccatttagagggggtactcttgttcctttcctttatctaatttatttgtgtcacggtttagttcttgatatattttttcctcaaggggcaaaagaaaaaaaaaatgaagaagaagaagaaaaatcacttttagttgttgcaatgttatcttcagtctttgttagatatttgtgttcttaaaagggtaaaatcatgtgggtatggaaggtcattccccattaggaatgtagcattatgctatcccttcctttctttgtaccttaaattattgtttatgacttgtaaacttatgtatccattatgaagtgttgttctagtttccatttcatggattggctgaagtgagctggttctgttaacaaaaaaacaaaacaaaatgatgttattttttttcttggtattgctctttgcattgtataattctgaacagagtgatgtggtttcttgatattatttgattatttgaaaggcctagacttcttctcattactatttttgtgtattgattctccatgttaggacaagaacataaactcaagatttattttatagccatacctgttgtatctattctagatgaactctgattttattattttatttaacttttttcaagaaaagctaataatttccaatagcaagtgctgattgcagatctagaatgtctactgtggtcctcctaaaaagtccacctttacagtcatctatctagtactactgaactagtagcttttatttgtctaaattaccttggcccacgtcatgtgctttctattattatctatattattatcatgggcatggaaaggacttgatcttgaccctttttgtctaatagtaaacttaattgaaattccacatattctattttacatcccaacatatatcagtttctcataaatgttcatacttagtgatagatacacccaatcaattcttaataactcaccagttcaatccctttctatggtttctctagctcttgggagaagataaatgttgcacatataattagtttgatgtaaactaaattcacatatcaatgcaggaatctgaggtggcctttgaaatttgttaaatagggtgatctagaaaatcagtgtgtatatacaatttgaataaatgaaatagaagaagataattaagagaaacttattcacttaccatataatgtatatacagagttggttactatttcatatataatataattttggttagtgtggactgactctgaagcacattgcattattgcatattagtaacattggaacttggaagcactttaatcttttgagttgtatagatgaaggttagttttttggttggcagcttaaaatccaacaagaaagataataaaaggaagaacttttcactgtcataacataatttaaagctgtttcattaacaattaagttttataaatatgaaataaaaatagttgtacctaaaatactaaatagctgcttaattttttatagatacaaattgatataagtgcaatgataaatgtgaaatttttcttatgattcgtcatttaagtaatgtataaatctattagattatatttaaatagtatgtggataaaattaaaaatgattaaaatatccgtataaagagaagaagaaaattgtacttatttaagttgaaacaatttaaattattgtaatttttttacttttcccactaaatagcggtgtagaaggtttgagaagaggttttgtgtgacaacatgggactagagatgaggtctagcgatgttggaagtgtggagtggaggtggctgccgcctcagatgggtttgtgcgagtataggagtaagaaggagaaagagtgaatggtgtaattgtaattaagaaattttaataaggaagttttatttgcactacataaacttataaatacactctattattaaaaaaaatataaacttaaataatttttagaaagtattcttaatattttttaaaatttttttcacattatttt

SEQ ID NO: 117444 - DNA, 769 bp, Cannabis sativa
taataatactaatataataagagatatatatgttaaggtgggttgttaagaaaaaaaaaatattggattaatgatagaaaaacctctctctcttttcttgctactacccgaacccttagggctgctctagggttgaatttcttttctaaattcttcagtcattggatcaattggaaggggaaggatcttgtttaagcatcaaggtatgatcatgagactaattttcctttgagttgctttaatttaaagatgggttttggtttaattttcatggttgttgtggctgtgaagttggtttaggattagaatatgtttttgagtaatttatgactttgtttaagcttatgtggttagatttaagggctggttggattgaatatgttaagtgaggtattttaagcttaatttttcaatttgagaattgtaattttgagttgggtttgggttagaattttgtattcttggaagctgtgggtttaaactgggttgaagttgtgttcttagatttgttttgagtgtgttggggtttgaattaattggtttctatggctgttggatataattttagtaagatgaagttaaaaatgagttttcttcacttggatatgaaattttagctcaatggtggaattgttgttagtggatgggttcaatacattaatttatgctaaatatactgttctggagcagtgtagcaggtttggtgaagatttggttcgagtttgggggaaaggaaccctagatttcctggtctgccagaaccggtcga

SEQ ID NO: 117445 - DNA, 998 bp, Cannabis sativa
accctttgtattgtagggtttataactttatagtatggtactatgtcccttccctatgatttagtttagcatatttgtattgcactacaaattcatttattaaacaattaaataaatagcatcaaaaataagattagtgggtaacacctaaaccaatttaatttcactaaaataatttattctattcttgctataaaagattaaaaaacttaaatttgaataattacattgaattagatggttgataagtggatatgcacatttttttaatggggatgggcctcgttgggagactcactataggagtggcaattcgtgtttgttggtcgtgttcgtgtcatatcgatacacatgtattacaggtatatgtttgacctaaacataacccatttaataatcgtgtcaaaaagtaaaacacaaatatagcttgtttataaatgggttaacacgacacaacctgtataacacgtttataaatagattttgtttaaacatgtcaacctactaatatattagtgacatgtttaatacatttatgatatttttaacacgtttatgacccatttatgacctgttaaagtactaagataactttaaataagtcattaacgggtcagtttcgtattagtcgtgtcaactcaaatacgacctaaatccatttatggcaaacccaaactcatattttttgtgcaagtttcgagtcgtgttatcttatagttatttataattatgtattgtcaacatagtgaaaaataatcatgattatatgcttcaaactatttagtcccacgatttatcagtgtaatgatttacattgacgtaataatcagtgatgtggtttgcttacacttagataagtggaatgtctttttgagggcattcgcaaagtaaacttgtatcgaaaatatcggctatacatcgaactagaccgatattgacaatagaaaagatatcataaatttatagttatatcttttctaagtcaatatcatttagtt

SEQ ID NO: 117446 - DNA, 1141 bp, Cannabis sativa
tataactcttttctatctcattcctaaacaagtgttcctttattgtaggaagtttattattttttttactttccatatttcatagaaggatagaatacaaaatttaggtttttaatacttctttcaaaaaaaaaattactctaggaattttcttacacttttcctatacattagtgataatcgattcaataaaatcctatctctatccatttaaatttgctacaagaaatgatattataagaatggtactaactaaaatccaaatgcatataattaattaattttcattttagtctatatacataattttgaaccatgttattgaatatatataaataaaaatattaagtgtaaccaatccaacaaaaagataacaaatttaaacctatatttatgtatatattaattcaatagtcaattgatatacattgtataaaaaagaaaaatacgtataatgttactgaatagaaaatacaagagaaaaaacttacaaaccaataatgcgaagaaaatacagtgaagaaaagatgttgggtcgaatgtaaaatttaaaatgtttttcgtttgctctggtttcacgaacagaaagacaaatgatgaatgattgtaaataaagaaaaaattaagtgtatacgtctaattttcgtaagagaatcactgcctctaatataagacataaccaatattattgttttatcatcattggttacacaccaacacagacatcttacggtaaaattgtaaaaattaagtgaactcaatatcatcaaaaaaaaccaactatatatagtgacagtcgttgttgataatatcatagaatctaatttccacagatataaatactaagggaaactcaaaagtgttagttccaagagagaactaatgttgaaaagtgacgctagagcgcccgttttttatttagtgttaggaggtgtttagtttcataactaaaaaactatttttattttttaaagcacctagatgaagtgtacttggcaatcatggaagggtgccacgttagattatgaatggttagtatataccctctgcccctcggcgtcacggaaggtgttatatactagaagctacccggaggctctttcctgatagtaaaggcagaaagtgttagaaattattttac

SEQ ID NO: 117447 - DNA, 731 bp, Cannabis sativa
tatgaaataaaattagactaaaaaaattttctggatgccgaaacaagtagagagtgcatcagtacattccttttaagagggtgtattgtaaaatcaccctacaattttttatagtatttcgcgtcccataatatttctctatcctataatagaacatacttaataacggcatatactttgatggtaatattcgtctaatcaatcaaatattttaacttgttctttaatccaataatttgttttgcatcattgttgttacctgttagtaggaataattcgttttgtttattcttttcacaattttagtgattagatgacgccgtttgtatagaattataatatgataatgtatcgagtattgatattgtcattttaaggtagttatatgtgacattctataattaattattatttattaaattaaaatgtataatgacattaaaatgccttcacctttttattgggacatgataatcacattttctctaatacacatgcattgataaaagtttttttctagctcgatctatatataaatttataggggcggctatacatatcttatcttactatataagaagaatggaaaacgacttattcttgtcgttttctatttttttttttatcttctatgtatttttattattttttatttgtttataaaacgacttgttcttgtggttttccattttttttttttatcttctatgtatttttattattttttattt

SEQ ID NO: 117448 - DNA, 2127 bp, Cannabis sativa
tagggtaagtttctttactaacacatcattttggttaccaaatttagttggtttttttcctttcatttgaatggtaaccgtaataggttagaaaaaaaaaaaaaatcatattgaaaggcaaaatctaaaaaatttcatcgtctgtcttaagggatgccaaccaaagaaaatcccctaagttgtgtttttcagttacaaattttttatgggtaaatagtagtataagtaaccaaaattttaagtttgtaaatgacataaatttaatatttattttgagtggtataagtactaaatatttgtaaaactgtaatttttctctaatttcatcagtacagattctgttattgtattaaacaaagtacatgtatggtccagattctaaatcattgagtctagacatgtagaatcaattatttttaaaatgttcttctaataaattcaaaacggaatctgtactgacgaaattggaagaaaattacagttttacaaatattagatacttatactgctaaaaataaatattgagtttatgtcacttacaaacttaaaactttgagtacttataccactatttacctattttttttatgggtaacagaattcagcaggatcttagggtaagtttctttactaagagatcattttggttaccaaatttagctgtttttttcatttgaatggtagccgtactaggttagaaaaaaaaataatgggatgccttcgaaagaaaatcccccgagttgtgctttttttagttactgattttagttactatttttaaatgggtaacaaaattcagaagtttctttactaaaagatcattttggttacaaaatttagttgttttttctttcatttgaatggtaaccgtaacaggttaaaaaagtagagagatttcttccatctaaaaaaattcattctgtctcgagggatgccttcaaaagaaaatcccccgagttatgtttttttagttactagttactaatttttcctttttggtaacagaattcagcagaatcagatagaaacaaagtaaatggaagatggagatattggttagaacaatgggtagatacccaactcaccaaaagcaaagagcttgaagatttggacacaaatttggtatcaaacacaaaaaaactaaggataaaaaatcttcaaaatagtgaaggaatattaggagaaggaggaggaggaggaaaattcatggactcaccaccaatgtttgtaccaagaaaatcaattcataaaaaacaatattcattaggtgatgaaaactcattcacaagctcatcatcaccaattgttccaacatacatggctgcaaccgaatcggctagagccaaatcaagatctttaagctcaccaaaactaaggccagaaagcttagatggtaactcaccatgcaaaaataaactctcactcatatcttctatcaatagtaataatggtgttggtgttggtgttggtggtgatcatcattattactttcatcaaagatctccaagcatgaaaggggttagagggcctgtgaaatcaagcagaaagatgatgatggtgaatatgaataatgatttgagctttgattctgagtgttctttgtctcattggcaccatgctagaggatgattgagtgagtgagtgagtgagtgaatttttagtcacttaattgtttattagtctttatttttgtgaggttttatttgaaaatttcaaattatttttaagggctttgttttttttttttttttttcaaatgtttatatgttaacataactttatacatatatatttagtatagtatatcatatggaaatatttaaagaatgttttattttattttaataatgctattttaattagtagcctataacagaatttgtcactgtttaagatttggaagtttggtgatgatggagcaatttttttttttatcttatttacttataaaatatatcaatttggaagttttgtgtatatttatgttaatattattattattattatattattatgaaatattatttatgaatatccaaatcgctaaattaattaacacaagtaatgtttggttgtattttcctttattatattaatttagttttccattctttccattctcattca

SEQ ID NO: 117449 - DNA, 1256 bp, Cannabis sativa
ttttttataacaaattagaaattattcttgaatagagtattcttgaatagaggttctactgtatttaaaatattttgtaaaaaataatttaacatattgaaagtaacatttaaagagtttgttgttttaaaattatatacatgtgaaataaattatttgaacaccgtttttttatattataaattactttaaatttttcacacaaaaatatgaaaaaaaaaaaaaaaaagactacaaaattctccaaattattaaaataagtagaagatacattgatacactatttatataagggtacattgtaaaaaatacaataattatatatattggagcaaaggagggaactcaaacttggaagcaagcctttatgataagactgcatcttcaaccacaatattatatttttttcattccaatcataattttttttttttttgaatatattccaatcataaattcataatactaaaattcacaccaatgaaattataaaatactagtataataaataaaagaaagaaaaaaaaaagatgcacttgctatagcatacatgcagtgcactgtagttacaactgcatacatggtgatgaaacgattctacattgaagaagtttttttactgcaaccccaaatttaaatttaagttggagttgctctaaaaagtccattattatgtctatgcattattgtgcccttattccttattttttagtgtgtcaaaaataatgatcattattatcaaatgttatcaccataaatatcattattatattttttagtgtatataaataggatatcattccattaaaataaggaatttttatatcacatacttaaatttttaattttttttttcttttttttattgtgaggtagattttttttcaaaaatactccatttttttttttcaaaaaattctgtgtggcattcaaattataaacttttgtccaaaattcaatacttttgtaaaaatctttaaaataaaacactgaaaattctctcgttcaccttatcttttctcttctcctatttctttttatattctatattattttttatcacttttaatcatatactttagtcattaagttttcgaacacatatgctaatagtgtcacataatttttttatatataaaattattagctctaaatatatctattctatataaagtgtgcttatataattgaattcttacgtttatgagaaattcatggataactttttttttaaaaataattttctattcaaaaat

SEQ ID NO: 117450 - DNA, 823 bp, Cannabis sativa
ctctctctctctctctctttaaggatgaaaggtgatataggattaataatataattgatgagcgtggaggaagagtgatatacatatacttgtacccacttagttgacataccatgttatttccaactcctctacaattggctctattaggtatatgtctttggaaatatatatatacacacgtatatatgatttgaaacctagctatatatatccatgtatacaaatataaatatatatatatataaatacatcagagtactgctgtatataccaatttgaatctttgatggtgagtcacgtactcactttacgtacaggccagcttcaagaatattattacttgttgcttggaaagaatatatttttttttcttgaaataactcgtggggttcgtcatactctacacactgtcactacattaatttgttatttagtgggaccaattgtcaaataaaaactaggacgttaatacaattggaatccatgtatacttgcaaatctttttaattaaccaattcaaaaaaattaaactatttttaagaacagactaattaaatattcagtgttaattactattgttagtcaatccggaccattactattgttagattgctaatgttaataagttaaaggacattatttgagttatatataaataatacattttcggtaattagaagaaaaaaaattagtcgcaatttatgttaattataaataaaaataatttttaaattgtaattagttatgtattttttaaatttaaatagaatatatagtttgtaaatttatttatgtaaaattaataattttattttaaatt

SEQ ID NO: 117451 - DNA, 1561 bp, Cannabis sativa
  modified_base (1511)..(1526): a, c, t, g, unknown or other
agtttaaagtgtaataatgtatttgaagatgcatcatttgaatacatttttagacttaagatttgctgaatctaacctataatttgaccactacaaaattatgacattaattatctttttttataaatatcatatgattggttggtagacactgcaaaagccaagagtttaaattcacaaaggcatagaatcaataagcacacagcatacagaatctgtttttcataaccatacttttatttgacataaacaagcacacaccaaactcccctaaacaacaatgtaggcctaatttccaacctcaacaggctcaaaacctttgtcaaccgacgccttaactgcgtcgattaccagctgtgttttcctactaattgttggccagtgtttctcaggcttagacccctttttaatagctcttaccaaattggaaaactcacacaccatccttgtctcctgaggtaaatcagcagcaataatgtgtttgcttggctttggaacccaaccggtgactaactcattgaaccaactttctgtggctgcagaaaaatgggcctcatgctcttggtaagggatcacaaaatcattaacatgtaatgtacctttagacccaacagcagtgatgtccattgccatgtttgataagaaagagcattgaaaggttgctactttaccatcttcccaatgtaaagaggcgccacaagcaatgattacgccatgatcattaaacacggcgccaggcatagctactgctttctttggtagctcataatttgcagtccataggattgaccggatgcaataccaccctgcgtccccaagagcaccgagagcatctaggtcgggcttcacacgaatatcgttctttagaaaatcaggatcggctgcaaatgtaaagattgtatgtacctgaaaaacaccaatgctctctctacttagtccaaaatgaccacttgtttgtagttactactgatgatggtgttttgtaaggataaatcagatcacaaaaatgtgatatgtgcggagtagtcttgtgatcaaagtgttggattcatcattttaaacttacaatgtaaaaccagtatcatgtaatggggtttgtatagcaataaaagaagcaaaagttctagctcaaaactttaatttctaagagcaaataaagacaaaggagaaaaggtttaagagtatctccaatgctactttctatttttttaagctaaaaagttcaaatagaaagtcttttctattgttgttgctccaataaagcactgtattttagttattatttaattattttaataatattttataatttgaatttattaaatatatattaattttataaaataataaaaaaataatagtacttttcattaaaatactgttaaaatagtttagcaaaaaaataagaagctctttatccattctttatgatagagagccatttatttgaatagttagagctcattttttttggtaagttgaaaaatactctttttattaatcaattaatnnnnnnnnnnnnnnnntttatatttatttgaaacatacctcttcttatatg

SEQ ID NO: 117452 - DNA, 765 bp, Cannabis sativa
  modified_base (720)..(725): a, c, t, g, unknown or other
ccctcaaccacaccaaggataacacttcgaagaaccgaacaaggaccaccgacgatcttgccgtcgtattgtcccacaaaaattgagatcaggtcgtgctcttattccttcaatatctgtctcattttttgtttgtaaagattgtttgtagtgctacaagttttagttttccattcatgaaaaattgttgttgtttgcaggtataatagttgcctcagtactttcaagtttacagattttgtatataaaataaattgagaggaagagaaccgatgcaatgatatattgtatttgtatacatttttttgttgttgtttctgtatttttacagatctgaagagttttctttttttttttgtatttgaattattttttaattgttcatcgtcatataagttgtgtatttttacaaatctgaattttttttattatgagattaaaacaaacaaacttgtaattattctaattttttttgggtattaaaaataaatttataaattctgtatataatcatttcttttctttgtttctattttaaattttagaccaaacaaataaataattatttatgtatctattcaaaagaaaataattatttatatatatatttgtattactaaaataattatattaattgtaatttaaattgataattatactcatttaaattcttaatacagtattaaattaaattaaatattattttttttagaaaaatannnnnnatagtggcactttttgtgtgtcactatatctccaaaaata

SEQ ID NO: 117453 - DNA, 1817 bp, Cannabis sativa
taaattgattttttgtcaaaataaaccttaataataattcgatctagagatgttatggcaaaactggttacattttatgtatttgtttgtgttaaaattgtccttaatttgattatattaaaaaataaaattatcaaaaattgagcttagggtcttatttttactattttgaaaaatatagagcctattttgttatataacaaaacaaatgatctaattagtaacttttgcaaaatacaatatctaaaatagtatttacccttattttttttaatattttttcagtgttctataaaaataagacaaaaataattataaaaaaaaaactatatgaacttaacgagaaaacaacataaaaataatatgaaaatagtatctctaatgggggagaatatttatagttgtcaaaatatacacatctcctaaaatatatatttttttttaattttctctcatcccaagatttgtcacattttcttaaaaaaatactccaaatggttgacaacactaaaagttgcctaccatgatctctaaattaatgacttttaggtaaaaaaaataattttttctattaaaaaaaagtatcatgtggttattgtctacgttgagacacactttacataaaattagtcttgaaaattagattacattaaacatgtggcaagacaactccaattggcatccctcattggagatgtctagtaaaaaaccaataacaagagtttaatataaaaataacatcaaaatatcaaaagattcctattttaagtaaataaaattttaaaatttgtacaaatatttataactttattttgtaatttttttattatttttgtgtatttttgaaataatctttaaaataaacctaatacatataggctcgtttggcacttggcacgcataattaaactcaattagattatataatatggtcaaatcttatgtttggacatagtgaaggtctaaataactaatccaattaaccctaaccaccattttcacaatcattggctgagatcttcttagcactaataagtatccctaagtaacaaaagggaagagctcctttctgaaaccaaagactaataagactcaatgaacttcttgctcattcataccactacaaacaatctcaaatttgtcattattagcttgcaatcttaagatttgagcaaagaggataaaggccctttacatctggtaaataaactcagtcactatgagcaaacatgatgacatcagttgcaacaagtgcgtcatttgaagcttcgcacaacgctcgtgaaatttgaaatctttatttcttgcaaccttttttagagtgcgagacaaatattccatttcaagcacaaagagtgtaggcgacattggatctttttatctcaaccttcccttggatttgaaaaatccatagagtcacattgatcatcagagaaaactgagaagtggagatacaaatcattaccaatttgatgaagtgagctgggaatcaaaaactaaaaaatctcaatcaactgtatcgtaagctttgcaatatccattttaataaggcaatttaatttaactaaagttcactcataaaatctcacaagatcttggccgatcgaccatgatgttgtgagctatataatgtcctttggtgaagccttcttagtttttagcaataacatctttcaaaacatacttcaaccgagcacaaatggctattgcagtgatttaataaatgatattaaaataagaaatcggtctccaatcaaatattttataatttttttttgaattttttcaataaaataactattttcaaaacaaataat

SEQ ID NO: 117454 - DNA, 4804 bp, Cannabis sativa
aagcaattaatatagagagcctataaatatatgtatatacatttaaaaatcaaaatgtgaggaggggccatggcccctgcagccagcaacatagttccgccattgggtgttgctatgtcttcgggagcataaactttatgctaaatataagaaatgtgagttctagctaccacaagtaatcttcttagggaatgtggtgaataaagatggtattttggtgtatccgataaagattaaagcggttcgggattggcctcaattcaaatctgcaactgaggttagaagtttcttgggattagcaggttactatagaaggtttgttgaagggtttcctaagatttctacgcccttaatagaattgactcgaaagaactgtaagtttatttggactgacaagtgcaagagtagcttccaggaattgaagtagagattaattactacaccgatgttaacttttccggtcagtgatgagaaattcatgatttattatgatgcttctaaacaagggttaggttgcgtattgatgtagtccgaaaaagttcatacttatgcatctaggcaacaaaatgagtatgaacagcggtatcccacccatgatattgagttagcagcagtggtttttgccttgaaagtttggcgccattatctgtatggcaaaaggtgcaaaatttatacagatcacaaaagcatcaaatactttttcacttagaaggatttaaatatgaggcaacgacgatgaatagaattggttaaagactatgattgtgaaattctctatgaccctagaaaagcaaatgtggtagcagatgctctaagtcaaaaaggtccagagtaagtctatgaattgaagaagatctcatcgaagttggctgaggatatgaccagagcggggatcgagtttgcagttggaaaacttgctaatatcacttacagtttgatttgttagaaagaatcaaggtaacccagcagagtgatcccgaaatacaaaagtataaagaaaggcttgaagccgggtcgagaaagaacttttcaatttcatcagacggattattatggtataagggtaggatttgtgtaccatccaacaaaggtgtcagataggagattctagatgagtctcacaccacaccatactccttacatctgggaacaactaagatgtaccatgatgtgaaagccctgtattagtggacaggtatgaaaggtgacactatagagtacgtgttaaaatgtctaattgttagtaagtcaaggcagagcatcagagaccagcgggtttacttcaacccatgaagattcctgagttgaagtgggaagatataaccatggacttcgtggttggattttttaaaccagtagggttcttatattctatttgggtaattatggatagatatacaaagtcggcacactttttaccagtacaaactatgtatacggtggatcagtatgttaatctttatgttaaggagatatttcgactttatggtgcttcaaagtcgatcgtctcagatggagatccaaagtttacatccaagttttgggagagtttgcgataattaacgggtaccaaattaaagttcagtacaacctttcatcgtcagatcgatggttagtctaagaagactattcagatacttgaggatatgctacaggcgtgtgtaataaactttaagggttactggaataagtatctccttctgatcgagttttcgtaaaacaatagttatcaaagtactattggcatggcaccatacagaatgctctatggaagaaagtgttgttcacccattcattgggatgaaaccgaggtacagaggtaccttagacctgatgcagtccaaagaatgattgaggccattgagaagattcacgctcgtatgcttgcctcacagagtagacagaagaattacgctgatccaaagcatagagatattgaattctaggttggggatttcgtcttccttcgaatgtccccaatgaagggaattcaaaggtttggaaagaaggaaaagttgagtcccagatttattggcccgtttgagattctagaaagggttggtagggtagcctatcagctagccttagcccctgctttatttgaagatcataatgtgtttcacatctcgatgctttggaagtatgtggctgatgcgacccatatcctaagctatgaggatattgaacttcaaactgatctatcatacgaagaacaaccagtccagattctggataggaaagagaagatgctatggaacaagactataaggtgctatggagaaacaacaagattgatgaagtgacctgggagctagagtcgcagacgcgggagaagtatcccaagttatttaggtaaattgcaacgacaaaatttcaaaaggagagaatagttgtaatatctcgaaaaatataatgatatttgtttaggcatattttattaaatatgtgactgtatgaatattggagtaagattataatcttacttaagctaattgtgggttgattagtgtaagattagtaagtgattaaataaagcgtaatttatgaattatagagattttatcgggttatgtgggtatagtaataccatttttgaaataaaatattttcgtgttcggcggccgtgaaaacttgatgaagcggttagaaatgtcacgataaaagatgaattgaattttaattagattggattagtttagaattttaagttgtcggtttggcgggattagttggaaattaccaaaatactcctaagtctaatttaacctaagtatttaattatgggtaaaatagtcaatctaccttagtttgttttatttgatttatatatatatattagtggactgagttaggaaattataattgatgtatacttattagttaaataaattaagttagaaaaatcaataattaagaaaaataacaaaatcaaataggataactccattctcctcttctcctcttctcctcttcaaaacctagggttagtagctgcaaggggaaattattcatcaaattcttcaagttttagcaaaatttaacttagtctaaggatttcttaagctttaggtaagtttcccatatatttttccttcaattttaaggttctaagttaggtgttgttagggtttctttagattttggggttgtggtataaattggagcttagaacatatctttagatctgatttaaggttggtttgtttatgaatagataattgctttgactttttaagcttgtattgagagaaatttaggtttagaacctaatttaattcaagcatggtaaattggttaatttgagtttttttgggttttgaatgattatgtgttttgattttatgttattagtgtgttctggaaagtttaagtaggattggaagagctcatgattggttttggggtgtaaaactagaattaccccaaatctaccaaaaccggtcgaccagttggccaacagggagaattttagggtttttccttaaatttgattttggctcggggtgtttcctagaacctagtttagggtattttagtgatgtttaagttatattagaatcagtagggatttagagttatccggttatggaattagggtatattctagagtttggacaagttgtttatcaaattttgttatcgtgacataggatccgagatcgtcgagcataattccactcaggtcggcccgcacacctaatatttgattgaggtaagaaaagctttgtgcactgctaagcatgttgggtgagaaacgattcttatcgtttgtgactcgattgtgatcgaggtaacagttattattattgtgacttgattatgatcgagggaaagatacggtcattaccgttactatgaatgagtaattacttgcttaaaactgcatataagtttcttacttatcgtttgctttattgggtaatgatagtgacatatgtagctcgtggataacgagtggtaagggtactttatgaggcatcaagatcggtacgtcttataagatgtataattggttatgcattggttgattgtccattaaatgatgaatttgtttaatatgctatattgtgattacttgctatattgtttgtgttgttatagcttttcttgctgagtctctgtgactcatggtatcttcgtggtgcatgtaaaggaaagaagaaaatgggccagccacgagttagaggtctcccaacgatgtacatatcaatttgcggtgacctggcttttagtggacaggatttttcctttgatcataattttaaaaaggaactttattttgtaaagctaattttgaaccaagctgtaaaaattcataaacaggggttccccatttttagtaatcttttgtataagagttatattttagtataaacgttttaaatcaaccacacttttcttaaaattaatctcttaataagtaacgactaatttataaaagcacacacgtggcgtccctgtgagacatggcgttacaacatggtatcagagcgaccaaggttaaagatcctgaagaatagtttgatatgaacatcgactgcaaagactcgttcgacttatagtttagtaagtattaattgttatattatttgttaattacctgattacctacttatctgaaatatgctagttattagaaacacatagtaatggctgatgtgtatttgtatacatggaaatacttattagtgttggtcacgatttgagatatattaaacaatagaagttatggtcgtaggtgtattagaatatgcacccgaggcaacgataggttttttacttatcgtttgctttatcgggcaac

SEQ ID NO: 117455 - DNA, 1652 bp, Cannabis sativa
gtaaaggttcataatgcaatcttactcagtcttggggttgaagttctttgaaaagtgtcaaatgaagaaacaacaattggtttgtgggcactaatagaaaaataggcattcctgtcggttaaaataacggggttttttttttttgaaccgacactattaaaatggagtgtgaattataaaccgacgatatcgacgttgagcattaacatcgattataaacgaacgctaacatagttatattaaggagagagagggagagagaaaatgggacgctcttataaaataaatccttaaaagaatttaaccctaactataatactatcagtcttcacatcagcctccctcttatgttatcttgctcttcccctccttttgactctcaatctcacttaaactcacttctcctaattctcagctcaactccaaattcaacctcaatgtgacttctcacagtgaccacctcctaagcaaaagctcaagagacgacgataggtacgtatctctctctctctctctctctcttcactcttctcactgttgtttcccttttctcgcaagaggcttttcgatgatctgctttcattggtggcgattcttgggcatagtagatatgacggtttcgactccctttgtcgtcgatggttccgtcttcaacaatccaagctctctcccatctctctttttgtatatatatttataaatatatatctatattttaaatttatatatttatgaatatatacatgtatattctagatctaatatatatggtgagggagaggaagagatttgtatgtgttgtttgatttttgtcattttctggtgttgcagcaagggaactagatctgtaactagtcttttttttgcatgtcgattcaaaattgacaggtaaaggtgtagcgactgtttaaaacagttgcctatttcttagagaccctttaaaatgttcgcttattcctcattagcgattttttggaaccgatgcctattccaccactttttgcgttggtagcataggcgtcaatcttacgaattgacagtaatacaatatccgactattaataacgaccgcctaaacttcttttcttagtagtggggaaaaacatgttgtaatgttgtaatctccttgaagaattcttggcaaacaaattatatttgaagatgaagatgtatactctacggatggatgatcgatgctaattaaagaactcaggaagcatcttgatgatttcaacataatcatcttaaaattaaacaacataggagtaattaaagcttgaagaagaggaccatggtgtatataatcttactcagttcttcgcctacatcttatgaacattttgtagacacaatcttttatggaaaagatactttcccaatggcagaagtaaaagcacttctaattttttgaggtagaactaatcatagagatcaaagatatggaaaaggaaacaatggcaacaagggtcacaacaaccatgaaccaaagtctaagttcaaaccagggaagttttgcaataactgtaaaagagagcgacattgcaagtccaaatgctactacttaaagaacaagtaaaccctaggaatgtcaatggggcgggtcggatctgatccgactctgatccaacctgatccaggtcatatacggatct

SEQ ID NO: 117456 - DNA, 2849 bp, Cannabis sativa
tttaattaaaggagaatgttatcccatggacgccaggtgaggtgatcgagagggtgaggctcggggctgggacatttgggagtcggaaaaaatggaagtggcctccgtttgggttgtcggtggcctgagagagccctgggctagtcagaagttgggcgagagggaagtcgagaaggagaaaattgaagagacggacaagagagagaagaaagaaaaaatattttattttatttatttttcattttaaaattattttaataatttttaataataatataccaattgaaaatcaacatgtggcattcttggaggacttaacagaactgttaaaataggtactaacggaaataatagaaattgaggatttgagtacttttgccgctatttttagattttaggtatttatagtaacaaattgaacaaaataggtatttatgctgcaaataaccgttataattacaaagagtctccaaaaaggactttgtatttaattaattaaacaaattaaccatgatcactcaatgactcatgaaagtgattgacatcttcaatcaaatttatgtatgtggcttctcaaaacgcatgcaactctttttttatgaatagaacccgaaaaagggggaaagctctctattcctagttatatatcttgtagctagatcttttggaaccactaaaaatcttagtagaatgagattccaaacttagaaaattaatcaaacccgaaaataaaaatacttagctcatctaaatatgaggctggctaattgtatttataagccaatcattacactagaaaatcatgtacaatcattacacaatcaatcacaccttttacacaataaagaatattctaacggtacaaaaaacgaacaaagtttgttatacaaaattaggaccaccacgtgttgaaatgccacctcatactgcctaaccaaaacagagtgaaattcatttcttcacagcctctctcaaacttggtggtgtctcaactgcaccaagtttgtccactaagaaatgaaatatgtgattgcttaggcttttggttagacagtcagcaacttgatcactcgaagaaacacatctgatttcaagcattttgttaatgaccttatctctcacaaaatgaatgtccaattcaatatgcttcgtgtgtgcatgatagacaggattcatggcaagagcacttgccctcatattgtcacaccatgttactagtgtgtgactaagaggaaacttgaactcctttaacaaactctaaatccacgagatttcagcagcaacttgtgcaagagagcgatactcggattctgtactcgatcttgataccatggtttgttttttggaggaccacgacaccaaagtatctccaagataaacacagtaaccaccaacactctgtctgtcatcagggcaacaagcccgatcggagttggagtaacctatgatatcaagtctgtctgagtgcttaatgtgaagctcatggtaggaaatactctttagataccttagaactctctttgctgcactccaatgtgttgttgtgggagcttgaagaaactggctcagtttttcgataagaacgataggtcaggccttgtgtaagtaaggtattgtaatccccttatgttactcctatagtcagtgtgattggcaagaagttcaccatctgttttggacagctttttcccaatttccataggagtacaacacgattttaaatgcatcatgcctattcgagtgagtaattatttcacatatttcccttggtttaggaagagtcctgtgtcatcacgatgcacttcaatacctaagaagaagtgcaggggtcccaagtcttttaatgcaaacatggtgttgagtttgtggatgaaatgattcagtttggcagtatggttccctgtaattattatgtcatccacatatattaacactaaaataattagatcagcagacttgtaaaagaagagagaagagtctgccttagagttcacaaaatcctagttgattaaggttgtcttgagtctgtcaaaccaggctcgaggtgcctgctttaggccatatagagactttgttaacttgcatacaacattgggttgatttggatcttcaaacccttgaggttgatacatgtagacatcctcttccaagtgcccattgagaaaggcattattgatgtcgagttgtcgaatttcccatgacttagttacaacaattatgagaataatacgaactgtagaagcctttatgacaggtgttaacgcagattttcgttaactatatttgagcctcaattgtgatagatttgcatagaaaacaaaagcagtaaagaaaaaataagaacactgaggtttttatgtggttttgcagttaaaactctacatagtccacgagtcaatcttattagatttttggtacatttctagggctttttctctaatgattttttcatccctttttcagtatgaactgctcctatttataattacataggagggcaattaattacagatttgactaatattttacaacaataatttcttgaaatcgtgggattagattacatcccacgtaaaataaatgcggttaatatttgaaaatcacacagctgtgattggtccgctcttaccgggtcaatgtaaacgtgtattaaatacgttgtaacacatattgttctgggacgtctcgctgggaacatagcaataataacccttgtagcgagctagaacttttcctatgtctttcctgttcggtttttgtgctctaaataaaactcatttcaatataatcagattatctaattaataaagatcagaaatcgcttctatgttgcatggttcacataattt

SEQ ID NO: 117457 - DNA, 3024 bp, Cannabis sativa
tatatatagtattattttttcacacattaccaatatgggactttttaacgtccccgatagctatcttttgttcaccaattttggacggtcgatcacaatcagcacttttggctcactatcaccgaatcacaagcgactctttgctcgttttttaactcaccaatatgagactctctaacaaactatgatgatacccactgggattttttaatgtaccttgcaaaaattggtttgagttaaacagttgaaagaactctagtgaaccacattgttgagaattaaataatatagtagagcatcgagttcaaagtataatcaaagttcctagttgtaggaccaaatttatgatcttgactttgcatgtgtaatttgagattttcttgttatccagccattttcttcagtttgcaatgtaattgtagcctggaagtgtaagcttatatggttattgcatgtttattctttcagggtgggctacccatgtatgttgcaagccgtggtttgtacagcttgaaacctccaacaatagttgtgcctccttgtatcaaagaggacgtggagaaattatttgacatccacaggtccatgggccaagtggagctgaactttgatttggttccactggatattggtatgcagctttagttagcttgttgtgttgcaaatctttggtctggaattaacgtgtttgcatttaggtgaaacatttgaaatgcggagcaaccttgttgtccggcctttcaaaactcaacacgtgatacctagccaggttggcttcattgaattattttgtttgagcatttatgaaattaaataaaggattggttatcagactgctataagtagtaaacttagcttccacttaaaagatttcctacttcggtggtagttactggtttcgggcattagaaagagattataatgctatgaatcacttttctgcatacaagtttcatcttggggagatggaaatatgtatctgaaggcttaaagttttaggcagctgaaaaatgcataagttaggacaatggttacttatgaaacctgtgaactttgggacttgattgtaaatgaatgttgtatacttaagtgcattgtcttgcaacttagctgtgtatgtaggccattcatatgtaagttaatctgtaatgtgcagggttatgtaatctattcagttagaaaaaagttgaaaaagcagtacattcatcttaaaggcaaacaaattgagaaaataaagaagtctggtgttgaggtttgtaatatctttcagatgattttccttacttcctttgccaatgccaagtgatatctttttcacattctagcttctgtttcagattaccgatactatactgtctcctgaggtggcatttacaggagatacaacatcagaatatatgcgtgatccactcaatgctgatgctttgagggcaaagatacttataactgaggtaatataatttagtgttcttgaaaaggctttgtgttggatttattggtcattatctgatatttatatgaagaaaaaagagtttattccttgagtccttgcaaaggaaagttttctgactttaattgggagaattacctgacacaagtaacaaagggagatgggccagatggctatactatctaaataaagagttatttatctaattatatatttatatatatacatatataaatagttactgggtatgcatactttcaccgcacaacactcaaacaagtcttttacatgtttttttgtatgtattatatcaacctgtttggtgaaaattcattctgaaagtgtgaaaattgctcacaggcaactttcctggatgaaaactacagcattgatcatgcacgccaacatggacacactcatatatttgaggtatgttgacacttaggctataggttaggctcatttactgtcaacattgcttttaatttttaattttttgaattttttttttataagattaagggggtggggacatgataagatgagggaacaaaacatttaaaagcttaccagcatagatgatgtgagaaatggtaattgttactcctgtgatcgttcatgggcatgagtctttccaggatttctgttggggtggttgtaatagatacaatttatcatgatatatagggtcattttaattaacattgggcttttgtaaccaaattttttaacttgtaactacgctgtctcttctcatacttatttgttttattttgtaacctccttcaaaatgagatagattataagaaatgctgagtggattcggaataagtcaattctgctgacacatttctcttcacgttaccatttagaggtaattaatctcttctatgaacaagttcacctctcatctttaattttacactggttgacaattgttttcagcttcaactttaccagaaaaggtgaagtaagccattcaatgaagctaaacttttaagacccttttctcattttgttttctctttcttcattttccatgtaccgtgttaatttgtagattggttcttcctttcaattgcaggacattcgacaggctgtatcaaagttgcagtcgaaagtttcagcaaaagtggttcctcttacagaaggtttcagatcaatgcatacttagtttagattgtagagctcttgtttctcccctattagaaactatagcgagtagaggagagaacgagagatgtaatgtatgtaatcagtttactgtacaataatattttctgaaaagtgtgtcattataatttgtctatgtagtaaattgttttgcaaaatagggtagcaggcattattaaattatgagtaaaacatacattactgttcaagggccatatgagttggttattggaaaaactagaaacacattctccaaacaaatcagctttctatgctcgttaattgaataacctaataaccataataacagttttctatgctgcctcatattggtcaatattggttagcttccatgattgacaagaatgtacaatcttgaaggatttcacatgaagcaagag

SEQ ID NO: 117458 - DNA, 900 bp, Cannabis sativa
gtccaagaagtgttccatatacatataaatatttattaatgtatatgcatatgcattaatttgctataataactactatatatatatagctatgttactctctttaattagctttcagcaaattattaaataatttttttaatattaatttgatcactcactgattgattcgttgctttttgtgatgcggccgggtgtgtttagtgtttatgtttaatcaatcaataataatctcgatcgatcacttgaaaaattcttaaagcatcttcattattcatgagggtagtttggtcattttagtattagctggtaaaaagaaaccctaattatgtcattaattttgtaaaagttctatcctaggaagcgtaaagatcactatcacaatatttataaatttttctacatataatcaattgtctaatatttaaataaatatatatttaaaatgtgccttatatataaagtttgcctggtgtgcaaatttatgtaatgtataaatatttattatcaactttatgcgtaatcatttttggtggagagaaaatgatgtgatttaaaagataaactaacgtacttaggagaattttcgcttgcataagaaagagggggtatggattttcgagacttctatttgtttaaccaagctctcttagcaaaataagcttctcgcatttacaatgtcccaaactctatggattgccaccgtgttttaaaaggtttatacttcaggaagaggtagtttgttgaaatcactatgtccaagcgaggctcttttgcttggaaaaatattctctgaggaaggaaactcactacaagaaaaatgagcattactgaggacaaattttgttggtaaaaacccctgttttcgtcagtattgcgcatcaatgaggacatttcgtt

SEQ ID NO: 117459 - DNA, 4052 bp, Cannabis sativa
  modified_base (3993)..(4021): a, c, t, g, unknown or other
actattttaaagtgtaaaaatgaaaaagcccctttaatataatagcttttaggaagtatcgtgagtcaatcgcaacacaacatgcatgcatgtcgaaaagatactagacaccactagtgcttaattgcaatgctctttttttaatcattatatcgactttaataataaaacactgcacgcacagacaaaattgatccataagacaaaatatatttttttgattggtgcacattgactgaggtggatcgcgaattctttggattaaacttacttaatttgtcaaaataagtagattcatcttttcactcattagatgaatttggagaaagttgttgttataaatagaagcatctctactctctcaaataatctctaatgctcatactttcagagtcaaatttagagagagatagtctaagatcacagtgagtgtgtgtggaggggtgtaatgagagcatcactcttgaagtaatttccctcattgtgagacatttctttgtaattattcaatgtgttgagttataatcttggacatatctaattgtttactattgactattcaatcaataaagattcatgattcattcatttttgagctaagtttatttttgtctaatttcatctaagttctagtttttgattttatgattggttttagtttgaattgtgttttcttgaatactgttgttgctgtaacaatcaggttttgagggtgatcattcaccacacgaatttttagaaagcaagggttaaaaatcttctaatttcaaattcggaccacttgcatgttgtcctactgacatggagaatgaggaggttaagcctcctttcaggttcattgatgctggcctcagacccttcatgcaagaaagtgattgaagacgcttgggcccttactgtaaatggtgttagaagttttttttttaaactgtaaacttaaaaatacgagtaattccctgaaggtctagaacatggaagtttttttagtgtttgccatcataaaaaagaagatgttggagaaagttttggtcgagattcaaaatcgcccaaactctcaaaagagtctgaaattggaagaagttgttcttttagagattgataaggtggaatctagacatgataaaatttataagcaataaaaatcttgtgagaattggctcaaaaataagaacaaaaactccaaattcttccatgcctcactcacaatccgtagaaaaagaaaccatatatgggcgatctttgaggatgaaattttgtggattgagggcagggaaaatattggagttttttttttcacaaataagtttggggacttaatttcttcttcacatcctcagagtttagagatatatttaactagataaaagagctagtttaagaggttgagaatagcttgttgatggccatgtattgtattaattattatgaaaaaagtgtttagtataatgtaagttgtataatttaatacataacaaatggtgcatattagcttatattataatatttacaaaggatctgggatcaaccccaatcttcgacccggatctaggaacccaaactgagaccttgacccgcaacccaaactcgtacccaaactcagacttgcgacccgaaacccgaaacacagaccataactgaagacccaaacccaaactcggacctagcaccctggaccaaaactcaaacccgaaccaagattaaggacccggactcgaactcagaccccaaacctaaccaaagaccctgacccggaaccaggacccaagctagacctggaccacttgagactcggacctggactgggttgtaggacccgggacctagacccaagacccagaccttggacctgggacctagacccagacccgagactcgcgacccagacccaaacttgggacctagaccaagaccgagacccaaacctggacccaaacccaaaacacaggactcaaacatagacgctggactggacctagacctgatgcgtagtcgatgttggggttgagtttattgaaaatatattataaagttatacaacttatttatatcgtctgactagactaggcacgttatcgtgttttctaattaccgtgcatgcctttgctaatcaaaaggtttattgaaaaatgtggatagttaaaattttcttaaataactccactttaataaataaacataataatttacataatctaggatcccattttaaaagtttcataagtttacataatatttgttcttcagaagttattgtcttgtgattattaaaagtgagcctaaaacgttcttgaagaccctgaacactccatgtctaactgtcttgatatgtacaatcttcatccttagctttagacttatctcggtttggttctatcttttacctacacatacacgtaatgactgtgagtcgacaaacttagtaagaaaagcataatcataatcataaacttatcgttttatcttttataagtcaatatcacttagttgaccatagatcatttgatcttaatcctgagatggttaggttctagctcaattgtattgcacgtgttctttgacttattcgttacaacttactagtaggattttcccaatagttacatcttgggaacacgatagttcaattgagtgggagtgttaatcatagatatggaatctatagcttctataactatttagaagtgaaatgatagttttcttagagcttggtttaacgccataaatgatagagcactcattttggtaattatattagttttttgaaatctcaattaagtagctaagtgttttatggataaaatacatttaagggtaaaatggtaattatgcccttactcaaggtaaaccgtcaatagaggatcaatgattgttgtgattgaaataatagatagttcatagtgtatctatatttggtatatagtgtgttctatgtaatcaggagtgtaattccgtatctatagtagagccagaagaaattaatacgatatgaaatttactcgataaattttagatctacttattaggagcttggttacataggaccatggtctccatattgtttgagataacatcatcttatagaatcaattaattgatttaatatgttaattagaatttgaaaatagaatatgtcttatttgaaaattttcaccaagtttgggtaattttgagaagatagagaaataggagtttattttttaatcagtacacttcgtgggtctaattaataaataaatttaaattgtattttatttgataataatttataattattaaaataaatttagtatttaaataattagatgagataaatggtaaaattagaaaagacactttagtttcataagtcgaaataaagtgccaaaaaaagcccattatattatttcagccctaagagctagattcaacccaagtccttattttaagtccaatctcatctaacctaaccttaagtgaatgcctatataaagaaaataatgagaagagagatctattctaacctaaggtttcaatgtcagataactctcttatcttctttcttctatattttgaaattcactatgtgattcactctcaaaatattgttgtgtttgagtatcatcccacactatttaaggtgatactcaagcttttgtggaagactgtgatgaacacattcaaagtaggagaagatccaagttcaaatcataataatgctctatcacgagcatgaatcaagggctagagatttaattggaagaagacaatatattctgttacaatcactgtaaggatttcttaatccctttatgtgttatttattatgttaggaatttccatgtttaattaggatattagattactcataatccaacatacatgaatagtaaattaagatcctgcaaaaaaaaaattctaatagcaaaatgggggcaaagctcatcaaagtaagtctataagaacgcttaaaagaattctcatagactaggggttaatgttggaaattattttacnnnnnnnnnnnnnnnnnnnnnnnnnnnnnttattaacatcctaaataagaactttctaaa

SEQ ID NO: 117460 - DNA, 1645 bp, Cannabis sativa
tcaattataaagtataaataaaaaagtccatataatattttatacatgtattataatttagaataaaattattaattttacataaataaattttaaaccatatattttttatttagatataattattcttatataaatacatactttcttaattcacaatttgatttaaaaaatgtataactaattacaatttaaaaattatttataataaataattgttctcaaacttaattttttttataatattcttaattaaataaaatattattaaagattttttgtctggtctgttgacctgtgttttttctctctgttttgctgttagtcgtttatggtgtaaagtggtatcttggctttttgcgcctctttgtttcttggcctgatttgatcatgacagatacagagaggatggatatagaaaatgatagggactttgtcatccttacaagtggagacgatgatgatggaggtttgctgtatgatacgaacgacaaggagttgtcggattttgatgatcgatggtgcattgtcggacgatttctcactgaaagatccttggattttatggctatgcaacacaagatggcgtctttgtggagaccaggaaaaggtatgtttgtgaaagaattggaagacaatttatatttatttcaattttatcatcaaatagatgtggataaagtggtagaaggcagcccctggacgtttgacagggttcctttaatcttttcaaaactcaaatcgggggagaatccacgatcattggttcttgataaactagatttttggattcaattacatggattatcaaccggttttatgtcagcgaaagtggttaaggatgttggaaactacattggcatgttcattgaagccgataagaacaatttcatgggaatatggcgtgactaccttcgggtacgggtttctgttcgaattgatcttcctctgaaacgaagaatgaagctagagaagaaaggaggagagatatgctatgctaactttaaatatgaggatctcccaaccttttgtttcatatgtgggatcctgggacattctgaaaaattctgcccaagattatttgacacaccacctcacctgttgaaaaaaccttatagcctagaactgaaagctatgccgaaaaggagacagcacacaattgggaccaaatggcttcgacaaggattattgattagaggggagagctccggtgaaggatctggaaaaaactcaaccgagagaggcactacgacagggagagaaattgatggcgagattcaagggagattgcaatcagttccacaatctgggggattggatagaggaattaaagatattggattggctatcaatggaaataaatcccatgctactcattcggatttgccagcaggaagtatagacagaatcaatgctacaagtgaggatttagctgatgacgtggatggggacttgttggttcttgaatcaaaaaggaaaagagttgctgaaacacagcttgttgggccgaatatgggtactgaggactgtatgactatttcagaaatgacaaaaaactttgttggggcgggttctgtgtcacaggcccgccaagcattatgaatgtgttaagctggaattgtcgtgggcttgggaaccaacgggc

SEQ ID NO: 117461 - DNA, 1991 bp, Cannabis sativa
caattccttgagaacattgttgttcaaaagaaacccaactttatctttttatgtgaaacttttgtgtaaaagtgatattattgaaagacttaggatcaaattgggctttgagggagcccaccgtgttgaggtccaaggtcacaaaggtgggcttgcacttttgtggagatgcaatgatggtgtgcggcttctaggatactctcacagccatattgatattgagatatcaataccaaacctccctgtttggcggttaactagtttataccgggagcctaatcctagtcttcgtttcaaaacatggcacctcatcaccactctctctactgaatctcagcttccatggtgtataataggtgatattaataatattggcaataaaaatgagaaaaagggaggtagaccttacccatcttctctgatcgaaggcttccaggatgtcctctatagctgcaatttgactgatatggaactccatggccatccttacacctgggaacgtggtaaaggaataagcaattgggttgaaatccgtctcgacaaggctctcgtctcctcactctggctcaatcatttccctctacaactctctccaatggtgatttctcttcgtctgaccacacgcccatcttcctcgagtcttctcctgtagttctcactggttcagtgtatcagtttcggttcgagaatgcttggaccagagagcctctttgtgctcaaattatccaaacttgctgggaccataatgctcatttgtcacttcatgataaaatttctctctgcagtaagcaacttgatgattgggggagaagtttaacttgcaactttaagaaaaggataagacaaagcaaagcaaaacttgcttctcttaaaggtaatcctgacccttcttctattgatagtttcggttatgagcaaaataattattttgagattttagcccaacaagagttatattggaagcaacggtcaaagcaattttggcttcattgtggggataaaaattcaaaaaaaattcatgcaatggccagcaaccggaaacacagcaacaatattcaatatcttcaaaacgcctccggtatttggactgcttggaacaatggacttgaagagttaatcgttgattattttaccaacatttattctgctgggaatgttaattggaatcaggttgtgaatggtgttaattgctcagttaccactgaccaaaatactgagttgttgaagccggttactagtgatgaagttcggctggctctctttcaaatgcatccttacaaggccccaggacctgatggtatggggcctggtttttttttcagaaacactggcatattgttggttcagatttggttaatgctacctgtaatttctttgattcgggcacctttccttgtcatttgaatgatacaaatttggtgttggttcctaaaaagaagtctccaagtactatgagtgatctccgtcctattgctttgtgtaatgtctcttataaggtgattgcaaaagtccttaataaccgtatgaagctctttattgatcacatcatctctcccactcagagtgcattcattcctggtcgtttgatttaagataatattatgattgctttcgaaataatggactaccttaaaagaaaggttcatggtaagaaaggctacatggctctcaagcttgacatgagtaaagcctatgatcgtgtcgaatggggatacttaagagttgttatgcttcaaatgggctttgatcaacgatgggttaacttgattatggcttgtattactagtgtgcgatactctatttttcataatgttcatgtcatgggaccgatcacgccatctcgtggtatccgacaaggtgatccgctttccacttacttgtttataatctgtgctgaaggtttctcaacacttatatctcggtttgaaagggagtgattactccaaggttgtcgtgttgctcaaggtgcaccatgttggaaattattttac

SEQ ID NO: 117462 - DNA, 1452 bp, Cannabis sativa
  modified_base (1377)..(1381): a, c, t, g, unknown or other
gagaaggaagaggccacggcagcggcggcggcggtggcggtggcggtggctgcagccatgttttgattattttggtgagtttaataatttggggatataataataatggttcatggtggtatagaagagaaaaagggagtatgggtttatgggtgttgaagctgacgtggccacttttttgtccaatcaaaattcgaggagatatgttatgggataaggtacctaaatttaattattacatagtaagatgacgtagtaatttatgaattccttttagtttttttttttattattattcttacgaaatttaacacaaaaactcttatagcagttaaagaagcaactaaaatttatatagcaatttacatagaaactatcgaaacaacctaaactgtaattgaaaaaaaaaaattaaaaataatatatagagtcattctctttttttttttggtgaaaagaataatttatagtacttactactcactcctaaatgtatgtattttttggtggagaatttttaaaaggtgctattaatagctaatatttttctagatgttatattgttattggtgtaattaagtaataaatctcgtataatttaatgtaataattttctaaagaatatcaataactaattgtagggtgttacttctaaaagatgttggacactactaatgttcaattgcaatgttctttttagccatgaattttaataatagtatataatataatctaaattttacatgtactaaaaattatattaaattttacacaaaatataatatgaactaaatttttacaccataataaatataattttttatttatttttttctattaataattttttatatttttatttatatattataattttttttatatttttaataaaaatttaatatttttgttaatctttttatacatttctattaaaataatatttattgaacttttaatattaaagcataattataaaatttgggtttaacctattttttaactaaatttagcacaaaatttatattatctattagagatggtctaaaatcattttaataaatattgtaaaatttatgttgaatttaattcaaaaaaaagtgaaccttggtcaaattttacaatgaagtttcaatgcttaggtatataaaatttagattatatgtagtatataccatataatttttaatttttattttacagtatataaaatttaaatttttttcctttttaaaaaaagagttcatcagataaacccgctaacctgaacccgccaacaaacaacatgtgaataggctggtacgggttcacatttttttttcacccgaaacccgatcaaactacccgaaaaggataggaaaatttacatggtatacnnnnntttgctattttttttacaaaaatactgtcaggcgttattttttacttttttacagtgtttttttataagtt

SEQ ID NO: 117463 - DNA, 1179 bp, Cannabis sativa
gatacaaattacaattgtaaagataaattcttctacaaagcagcctcctgatctaggcctaaagtttttttagctagataatgggtagcttcatttgcccctcttgggatgtaactaataaaagctttagggaaatataatctactaaaaccttacaatccgaaacaatggcatctggataaatagaatggttatgacaccaagaaagagcaaagtaatgcatgtgcttccattagtaaatgagggtgagttccacgccaaggcattgccaaatttaagggtacatctccttggtttgtttggatagtcataccgaatcccattttatttaatcgtgcatcttgggcagcatctactgaaagtcggagattatagcttggaatggtggttctttttccttggacagcaaagaaacatcctgggtgtgactagtagaagaagccttgtcgttacaactttgatactggtctagaagtctgtaacccagagcagcacctgggcaggtgttgtagataaaccagtatgtaaccatctattcctccaattccaaagcttccacaacaaacacacaaagtaatgatagtttttagcagtaaaagtggtggcagcaagatgtaataagtccaaacaagttaaaaaaaatatatttttagcaataaaatcatgaaaactagttacttcccatacctcctggacagttgggcacctgaaaaagagcatgctctagggtctcatcataataaaaacaccggcaacaacgtgaagaaggtagacctttccgtttaaaaaggttgtgactggtgggtagaatatcatggcaagcacgccaaagaaagtgtttcggtttgggaggaaaagggagtgtccacatctgtttccaccaaatttgggaggctgtgatatccgaaggtgctgggtcatttcggtgtatctgactatgggcttgatgatagcctgaactgactgtgcaggtgccatggggtgtaagggaccagtaatatgtgtcaggtgtggtggttaggatggcttggcaaatttccgcaggaaaggtggtttggagacaggtgaggttccattggtaggtgttaaaagatctgccacagtcatatgtacatctgagcggtgtctaagataatgaagtttaccatatcctgggatccaggcatcattgaaaatgga

SEQ ID NO: 117464 - DNA, 617 bp, Cannabis sativa
aagtaagcaaaaacaagtggaacaggagcaagtgtcatcaactttgccaacacaaccttgttcaaaagagcctacactatcagcctcaatacctcatcgcgaattgaaagcactaattatggaaagtatttgagaatgctacaatataacaaacatgcatattatggatgtgtgacacgtggcataagatacaatctcaagatctcgctaattaattaaattccctcaattaaattgagtcatggagaagcttcacgtatctgggaataggtcaagatagagggatataaggagatccatattgtattgtttcaactttcgagaaacggacttaccaccactccaggaacttgagtggccctagctcaaaacttatccaattgatacccagatcagtaagcgaatggcctatcacggatgttgaccttccaaaaagaatgcggacatctaccttggatataaacacggatcgcccagcgacgattatactttttcaaacacaagaatagatcttgtctcttgtgccaaaacatagtagtgcgcgaaccccatacacccttttaccagacaactattctaggcatttacttttcaagattaagtcttttggtgacacg

SEQ ID NO: 117465 - DNA, 2084 bp, Cannabis sativa
ctgttcagttttgctgtagcagaattactttctgctgctgcaaacgtttacagtttttatattttcctatatataactgacatttgcaaaaacacagtttttcagatactcatgaccaataacaatatgacattgagaagggtgttaggcaccaataatactttttaataattttcatatacaaaatattatgaataaagaatatcatatcaattgacacacttaaaatactaatatttttacataaagtaattatatgtaattaattataatcctacaactaaaagtgaaattaatattcgtactcagtttataatttataattgaaattaaacctacattattatgtatgtattctaacttgagttcacaatgcaaatcaaagagattaatacaaaattagaataaaaattaattaaaatgacaaaataacagggcagaatagagtaaaaaaatcaaacacaaaattttagtaaggttcaccttaatttttgggctacgtccttgtgagctatccttaggaattttagctctttccactataatccaaacttgaacaattacaatgtcgttcgagacttcatgtcacattctttgacatataatctcgataatctctctttttttaaaaattgtttctcctcactttcttgtagacaacacaaaaaactaatgttatttcttttttctctttctctctaacactcttgagcttctcactctaacttgaggagaattcttgctctactgaagagtactttttcgcttctttaagccttgtgctcttgggttattcatgttcatgagggtatttataaatgctggagatgaaaaccttaagtcagtggttctaattgaattttagttaagtttgttacgccttaacaaactcctttaacagagatctccacgtcagcacttacgaagatactctccaaatgtggaacacactttctagactaagtgaggcgtgttcctaaaaggatgaggttacatctgggaacagctagccttcaaagagtctcgttcctggaggacgactagctttcttgaagcttcctttttcgaatagctagccttccaagacttcctttttgggaggacgactagctttcttgaagcttccttccgagaatatatagctagccttccaaggactctctttcctggaggacgactagattccttgaagtttccatccatagcagaaaaaattgaccttactggaacatccttccggatagcatccagcttccacgaagcaccttttgggaaacttaagtttaagagattctaagtataatgactttgcttatggtggagttcaaaccaacaatgtacaaaaattgtgtaatttaaatgtgtatctaacatttattgtgcactttatttaccttctacaaaaagtcgggaatcataatttttttcaaattaattataaataaaaacaagtaactactaaaatataattaatattaaaattataactaaactaacttcttctctttttttcttcttctaaaatatggaacattaaaaaatataatagctttagaattttaatgaaaaaagtcataaaacaaaaaataaaaaaccatatttttgaacatcttttaaaacaaagctatacaatttgtaatttcctttatgaaagaggtaggaatgaatttttttttttttatgaggatagactttgcgaggacccgatcctaatgggtgggttgcattccttacctaaacggggtatgggcgagaactgacacaactttttttccaaatgttaaacgagatatgactgaaacaacactctccaagctgactaacctcatcaattgacttttttttgttctttatgttaagttatcatcatccatgtgttataatttcaataacatattagtaattgttgtagatttttattgtattttaaacaatattctattatcatatttttggctttttaataaatgactctttatatgtgttattgagataaatttctcattgtcgtgaaaaggactacactaaagagaacttgcagtgttaaaagtgttgggttttgtgccctaaataaaacccattac

SEQ ID NO: 117466 - DNA, 1541 bp, Cannabis sativa
ccagcctataggctccccttggccggcctataggctcctcctggccaatcgcatccatctgaaatataaaataaaacatttccaagttgtaggtatgtatatctgccaatcttttgattgttacaaagctagcttgtataattgaaaacttttctatcaggtaaggttatcgttgctggttttctaggcttttcatggtttattgtatttgggtttgtggtacagtcgtagtgtagaatttgatgttattgaggaacggttcttctactttcattttagatctgttgaagattagtactggagctagtattgtgaataacaaaattacacctaggctatatcataacattgtctttataagtcaagattttgaggtggtgttagttaattggatagttgctcagtgttgaattttgtataatgatgtaattcttccattcatgttatgttttttcttaatgaaaaatgagcttggggcctctgcattgttcttctggttgcaatatttgtcaagttatgaacaataatttattacaattctctagtttagtttcatttctcacacgcataaattgttgcttatggccaattgctggatggctcatcgcatcaaggtactgttatgtctatggaaccaaacgagggaacctttgtgctacattctaagaaaacaaatgtagcatattttagcttattttcactatatgttgcatatgttcataactaacacaagggaatatagtgtattctattaagacatctttatcactttccgttgaatgttccatatgtgttgcataattgaactttgaataaaatggtttgactatacaatttttcttttttatttatctcttggtcttgttttgatctttacaggtgatgcttaagaatcactgtgatgagcctatcttgatctttcttatgacaatggaaactactacaactcttatgtggtgacacttactatagctcgaattttattacatttgaggtatatttcatataattgctatattacatagaattcaacaggaaagcttgaatatcttatattttcatccatagagaagtaggttcaaagactttgtgtgttgcggtgataatggaaggttgataacttacctgttttagtgaagtaggatttgtgaaatttgtgtgttgcgatgagataaggatccaaacttgagtattatctgattgtttgcggttgaaattgacagattgttaggttaataaaataggaagaatgttgtccgacttttttaaatatatttattatattttctaagtagttgcgtgcattgataggcatgagaatatggtattattgtaggttaattaaagaataatgtctgctcaaatcagttctaattctgagaatgatgttaattttgtgccttcaactaataatgaagaaatacagtctgttagtaatacattagatgaaaatatgaatagaggtagaaaattgagtttttgcaaatgtcaatgatatatacaaaaatataaaactatatacgcttgcagaagcagaatgt

SEQ ID NO: 117467 - DNA, 2012 bp, Cannabis sativa
  modified_base (1738)..(1749): a, c, t, g, unknown or other
tgtgaaccatacaacataaaatgcgattttcgatctttattaattagtaaatttgatatattaaaatgagttttatttagggcacaaaacccaacattatctagataattactcatgaaacgtggacaatctacacgtttcatatttacatcatggggaataaatgaattaattgttggtaactacctttatccttatccaaaacggttgtttcatcaagctattcttctattcatgactttagggctgctcacaattgactttgttaaatacgtacgtattcatattcctcaaattctttcttgaggaatggatgatttattcatttttccttccgttgattatctagaatgagattttgaataatttttgtatacaatctttgaaataagattcttaagatagtatcttttatgctagctccttaggttaggaacctttatattatcttgcttaactcacatatcatctcgttttaatcattttgtattcggtatttttcgagatggacatttcctgttaatgatttaatctcactggtttagcagttggcactttttactcacccttaattaattaaggaaagatttaaacacgtctgtaactaatattttccaaggcgagctaaccaatattccacattctttgaactgcaaacaggttactatccatctctttttacatgtatagtgtttatattactcgaaatatgggcatatatataacagttgttatattgtgtaattaagtattaggtgttggaataaagtttatgacttaagggcatgattgtcatgattttaatatgtggatgccataaggacaatttctagtttgatgaggggctaaattagaaacagtcaaaaagaattaattactgttttttcaggtattaataaacaggtattggtccctatttttgcatcgcttcaaatatcgtatcttattcttgaatccccatcatcaagaaaactcaagttccagagagaactttgatgcaaatattggaaaatcataccatttaaagatcgattctatagactccggtacgcttccgctactttctaatttattgtttgattctcatgaattaattagggctaaattcagattttacaatgttattaacattaggtcctatataatttaatataatagtttttgaaaagtactagtaatcaattgcaaggttacacgtctagaaattataaattgtaagacaatctccaatcatgatccatagcattaaatttggtgttacactaacactataaatatagtgttatatttatttttcattctaattacaatactaaaaattatattaaattattatactttataataaaataaaatattctttatattatattataacatcaacatattcagcattttagtttctattattaagtttgattggatattaatgtagcagcatatttaataaaaaggacgtttttaataatattacaaacaatttgctatcaaagaattgaacacaacacacctcatagaatgcatataagattttttttttttggagtaatttgcggcataaatacttaaatttaatttctagttgtaaataaatatctaaatttaatttttggaggtaataataactaagttataattctagaacttttgtagttacctaggtattaaatgttaagtaaattgttatatgaaaattcctgattggttaaagtcattaaattttttattttttttaaannnnnnnnnnnntaaatatactaataaaaaaaaaacatgcataatgacttaatatttaatggtcaagtaccaacaaagttctaaaaatataacttaggtattattaacgctaaaaattaaacttaggtatttatttataattaacaattaaacttaggtatttaaaaaaaaaaatttttttgaaataaagattgtaactttattaaagcaaatcagctattaaaatagcatccaaaccagtagggacaaaccccctacgggaaagacggtcagga

SEQ ID NO: 117468 - DNA, 966 bp, Cannabis sativa
gcacagcatatatgccgtgcactggagcacacacggcaatttaatgtaatatttgcagctacgttggaggattaattgcacaacatcaccaaatttgaagcctcgttggtgatgctctaagagaattatctaacagctaactaattctaattggcctctcaagatagagtgtacagattggtttggatttgatctctgtaaatgatgaaggaaacagtgctttagtgaagacattagcgaggttgttttttgaagagacatggatcaatttgaggatgctttgagtgactttctctcgaacaaattggcagtcaattaatttctcgtgctttgttcactcatgatatactagattctcactgatgtggatggaagtagcgttgccacagtagaggtaagcaaatggtatatgattgatggcaaaatctttgagaagagcaaagatccaagttactttacatgttgcatttgccatcgccctatattcaacttcagcagataatgataggttgattttttaatttttaagagatgagtgaggagccaaggaacacacaattgccagatatagattggcatgtgtcttgacagccaccctagtcagcatttgcaaaaaaagagatcggtttgttgttgggggataaattggtttatgcatatggagagatattgaggaaagtctcaaatgaaaaaatagaccttgaccaagagtggctttaagatattggaagattcgttgagtagtctgcagatgaggtacttaaggagatgctaagaactgactaaaccgattggtggcgtatgatatgtcaggttgtgtgattatgaggtaaattaatttaccaataaggcttctattctaaataagactatgtcttgtttgtgaattttcactaagtaagggcttatttgagaagaaagagagcatttagggtttgtttattaattaagatactttgtacggtc

SEQ ID NO: 117469 - DNA, 1741 bp, Cannabis sativa
gaaatggttatattacctggtccccgctgtgcgcatttgctatgttctcatcaagaagagtcaataaggatctattaagtgcattctgctcgaccatctccagtaactgaattattttaagaaccaaagtaataaggaaatcttcttaagcaaataaagcaagaacaagaaagtaatcaaatttcatggaacagaagtgaaaacaaggagagcatacagttgcttttacatcccttgatgtcaaaatttttgttaggttttccctagcttttacaatgtcagtttgcattttatcatatgcctctgcacaaaaatagtattagctcatcagcaaaaatatacaagaatccaatcctaaaatgatttaagtttgttacttttaacaaacctgttccttcctgcagagctttctgcaaagcttccagctcgattaatctatcttccatagcctgccaagcccatgaacatattatcatactacaaaatgaaattaacccatatttatatggggtgtataacaatatataaatacatatatataaatatatacctcagttttaggaactgcaaaccgaagttgacccaactctagttgtacatgtgaaaaaaattccttcgtcaatctgcagccatcgaattttagttggttcaacacagatttttgaaccacataacaatccatatcataattcatcgaaggaagtgaaataggtgtaaaagctactatgaaatttgtactccttttttctgaaaaattgaaaagcactgaccttggcctcaaccttgcgatctcgaattcgatgtcttgtgcttcagtatcaagaaagtactcaataagcccagcggcagaatcaggggccacacgagactgaaaaaaaagaaagagaaaacgatattcattcaaatttcaaaaccacaaacacacaaatgaaaagtaaactagaaaggggaaaaaaaaaagtattgaattacttgacggagagctgcacggcgatttttctcttcaagaacttgttgttcaaaagcttcccgagcttcggcatccttctcaagccgtctcttgaactccaccctagcgaggtggcccgtttgtggaggccctaaaatgccctctgggtccttcaattccaataaaaaaagttcaaattgacaaagtagaggaaattagagaagggtggtggaagtgaaaagcaacaaaaaggaaagtacctacccatgcaacgcaggaaattctggtgggtctgaagcgagtaggattgagagatgtagtacggaggaatgggatagaagtggcgaggccgattgaatttgagagagcggccatggcttgagtgagttgaagctatcatcactgtgtgctcggcgattttatctttccgttatccatttgagtggcaataatggtaaatagatggtttgttcgtggcgggaagaaaacgactgtccgtacgtggggagtccaaagcccaagcccacgtttctgaacatggactcagcccttttttctttgcatggggtgggatttatttagaggaaattacggatgttaaagctttttatcataaatatggtagatttaagttcgaccaatttatataatattttttattttatagtttttttatggtatttaatatgccacatacatgtaattaggtttttaaaatccatatttaatgtttttatttgtttaagaagttttatttgtcattgatatcggaaaagtcaccggaatttgttg

SEQ ID NO: 117470 - DNA, 1427 bp, Cannabis sativa
  modified_base (27)..(27): a, c, t, g, unknown or other
aatcttattatattgaaatgggttttntttagggcacaaaacctaacactgctcccattgcatcacacaccaactttacatattacattcacttcttagatgactacagtaggtatacatggttgtatccattgaaaaacaaaaatgatgcattagaagcattcacacgaaagcaatggttgagacacaatttgataggaaaattaagagacttagaatcgattgggaaggagaatttcaatcattttctgatcttgttcgcagtagtggcataatatttgatcactcatgtcctcatacttcggggcataacggaagagctgagcgcaaacatcgacacatagtcgaaatgggtctcactcttcttgcacaatctgccatgccaccgaagtactggacagatgcctttatcacagctgtctaccttatcaattgacttcctacgactatcctagaccaccaggcaccatacatagttctttttaacaaaatacctgattaaaacttcctcaaaatatttggagtagctgcttttcgtgtcttagaacatatcaaacccacaagtttcgatttcactcagtcaagtgcatcaacttaggctatagtgaatttcacaaaggaaataagtgtgtaagctctcatggtcaaatttatatatccaaacatgtagttttgaacaaaaatgagtttctctgtcatcacagtttcttcaacaattattcaccagaaacacaggtcactcttaccattccacactcatggctcaacctgccctttgttgcatctgagtctgttgcagaagcatctccccaagctcctgcaacatctgatcagacatcatcttctcactttgatgctgcctcccatgtttcagttatgcctcatgatattagtactaccagtgtctcttctgagagtgttgcagctccctcgaatacaccagatcagcctcgtgcatctcccattgcaccagactcgcctttggcttcacaaggccctgctgtttccactcatccaatgatcactcatggcaagtcagggatcttcaaaccacgggtgttcactggccagtccacattcacctttaattttcatgagccactttctgtcgaggaagctcttcaacatgaggggtggaatgctgcgatgggtgatgaaatctcagccttgaaacgcaacaaaacatggatccttgttcctccttctccttcatacaatgttgtttgaaataaatgggtgcttaaacccaagtttaatgctgatggttccttgcaaccccttaaggctcggttggtggccaaaggctttcatcaacgtccaggtgtggatgttaaatgccaaaatattacatattttatagtgtaaaaatacaaaataaaattaattctttataatattttcaagaaattaatgcaatatattattat

SEQ ID NO: 117471 - DNA, 1299 bp, Cannabis sativa
aaaaaaaaaaaaaaagatgccgtgactacagtgcacgacatatatgccgtgcactgtagaaaaacctacaaaatgctgcatgatatgcagcctctttggatcaaatatatacaccataccattactttgcattctccttggagctgtccttaggttgttagtttgtactatctttcttattagttatttttcaaatacttttaagttttgtgagataatttttgtttttgtgtgaagaacttgagttgagttgagaaaattcttcatggttattgtaatgtatttgtgtattgtttttcttatcataattgttcatgttgaatacactttcacactgttcatcatgttttgagagaaatcttgctcatgaatcatttctttgggaaaaagaatgcaagggttatgatttgagggagttcaagatcttaatattgtacttcaaaagtttggtaaaacttttatacttttgtgttcaaatatttctttatacttttacggtgttctataaaataatactaaaataataagaatatcacatgaaaataataagaaataacatccaaataatgtaaaaaaaaaaaaaactaacaacaaaataacaagagcacaatataaaaattttaaaagtctgtattttctgtaaagaaaatcttaaaaagtataaaaatatttaaaatttcgcacaactaaatattttaattttttttttattatttttgtgtatttttaaaataattcctaattaatttttgttttgggtctagacttaactatcaatattaaagtgataacttacaaataaggacaagctttacttataaaaatttatataaattttgttctttcttatacaacccaaaattgaaaaatgaatatagaagaacaaaattaggaaaagaaacaagtctaatgtaacctttgttgggcatgtactaatagatgagatttttctccactcctttggcaaaaacaaatcttgctacacttcttgcctattacttctagccttattgggtgtgaaatagaaatgtgccacaaataagagaaaattatattgtatatctattttattttatttattttaattattactttcatttttatgctctttaagatatactcactttctcattagaagcttaagttaatgtaaattatatgttaaatttaactagaaaattaaagtatattgggcaacttaatcataaaagtaatatgttttaataaaatataatatgagtattttttattaatgaattaaaaaaaagagcaatttgcggcgaaacccccttatgtttt

SEQ ID NO: 117472 - DNA, 2047 bp, Cannabis sativa
attacctcaaaccaaacgccacttcagtgactgaaagtcaaagttttgacttttggcaaaaaagccatatcaatccggcactgagggataaccaaactagaaactagacaactaaataccaaacattgatgcagaaaacagatttcagatcttatttactgttatgaaagtgattaaaaaaccagtaactagactcactgtcctaggtgtcctaactaattctgttatgttagttgcctaggtttacaaagaaagttaaatacagttaggactaagggactctcttactcgagccattagctatataaccttagattagctcaattcagggggtccagtttatgcttttgagttcggttttgcaaaaccagataagagagaggaatagattgagagagaaggagggttgtaaaatagaaggcatatgtgtctgatcatgctcttcagcgtgagttattttgtaaggagttaaactccatttctataattgatcaagcttcaatctatttctattgtacagattcttttggtgaataaaagttaagttttcttctcacaattctgttgtattgaatttgtttattcttgttcattattttgcctttgaattcgagtcttgattaagtttagttcttgaattatggtgattgattcacaacatttactaatccataatgaaaagaatcaatgagaaaaaaaaacttggcaagggatcaaatgatcatacatacgattatatgactacattttcatttgaggcctagcaaaactaattataatcgtgtaagtaaagacacgaacatattttatacacttcacttattcccttaccatcacacattagtaaagtaaacacgaacaaaattttcaagtacctgatatatgacttcacaaggaagacgattctttatcacttcactgcaaaaattagtaataaaattatataaatatacataattcaaattgaagaaaagatacataatgttcttacaatgctgaagcagtagtagtggtcatcaagatattcaattcaggtttctttcgaatacactctttgattactggaatcgcagctactccttcacctgaaatgaaatccagttttctcgaaatccagacaggaagtaaaaatatattttaataaagagagagaacggaaacctaaggagacggcatggaaccagaggagttggcctgggggacgaggaagggaggcgcggccgagacgctccggccaccggagctgatgttcgagacctaagatcttacgccaacgaaggtgaaggtataacaatggagatagaccgtagctgagagctctgtaaatagtgtagaccaacgaggctttcgttgccgccatttctgtatcttctgaggtttgattttgctgtctagtttttacgcagacgaaacgaaacggaacgacgatgcttctggactggaaagcccatgggcctgtacgacataatagggacaaacgaaggctcattgggtctttcttggtgggcctcacgtgtaatacggaagaacgaaggttcatcagctgtctagttttaattgtttttgtttttttgtttttttaataaatttcaatcaaactcgtatcgcttcaagtttttgttactttcttttagagaaaattatatattttataagtttttaatttgtgcaaaaatatgaaaaaaaaaggagagttttcaatattatacttaaaatttattttatttacaaaaatacctttaagaaaattatttgtacaaatattgttgtgccacgtcaacatatataccgaaatttagaataattaccgaaaatagaaaaactgaaaaaaatctcgtttctaaattttttttcgctttttaagagttttgtaaaaagcaaccatttagttacttttgatgtgaatacgatatcaattagttacttttctattaaaaatttattttagaattttacactttacacatataattaataaaataattattttaatatgtgagaaatatatattttttttatctccaaaaaagacgactaatattaaaag

SEQ ID NO: 117473 - DNA, 1866 bp, Cannabis sativa
  modified_base (1787)..(1821): a, c, t, g, unknown or other
aatcatcctcgtaaaataattccaacatatgcatccatgaaacttaagagttcgtaactggatgtggcatccaccatctgattgatccgaggaagtgagacgtagtcttttgggaaggctttatttaagtcgttgaagtcaatacatgtcctccaagttccattaggcttttgaaataatacaggattggcaagcctaattggatgcaaggcttcctagaggaattctatggttgttaatttatcaacttctatttcacttcttctgatcgaactagatttagtggtcttctcttttaacgtactagatatacattttcttcaatgttcaaagcatggcagatcacatggggactgatcacgatcatgttagaataactccatgccaattcatcactattctaattaactacggatacaatcttttctttgatgttcagacgtagatttcctcctaccttgataactttagtgggatcttcttcattgacgaacacttcttctacctcctccatgggttaaataactctttctacccctaccctagggtctaacttgtcttcttcctagattacccccagtcttcgctggatgggtgcttcgggatattcttggatctcttcccaagccttgaagactatcttggacgacaaattataacattttctcgtgctttttagatctcctttcactattctaatgctctcattattgtttggaaacatcatacatatgtgttggatagaagttacaactctaaaatctactaagattggttgtcctagtgtgacattgttggcagtggggcaatctactactacaaatgtgcaatatttgaaggcaaatgttgtattgctttcggatactcctccatttagtgtgactggaagttgaatattttccattggaattaaggaatctccattaaagcattgatgttaataaaacttttattatccactagacttcttgacactattttatttgtaatttgggcttcaattactatggatcgctatggggaaaatgcacgtgcttagcatcctcttatgtgaaattaattgtaagattcatcattcacgggcattaaggagttgtttgtaggagattacacgtcttttaatgattgagctcactaagatatctcttctgagcatttgtattgcctccagtaatctgtgggtctctagatatagttaccaagtttgcatctaatgttggcaaagtaattatgggtggatacagatttttgggtctgggagcaacaataggttttggcacttgagcctgtacaccagagcttgaggataacctactcgctgaggaggatttacaactccttattgtccatgaataaagagttatcttgtctgggatatatgacaagtattctgatccagttggctagatgatcctttttaactattccttctatttcatctttcaagtagttgcattcattaatggtatgcccaacatctccgtgatattcacatttcttattctgatccctcttatgtcttgcacctttgaacattgctagaggctttttttactgaaccatgttacaattggcattgtaaacattttctcgagtatcaactaggctagtatactcagagtatcttaattcatgacttttcctcttctttgttgctttattttgacttgaagcgttataacttcttttgttccggaaatgacttatatttgattctaaaacttttgcttgttaactcgtcttcgtgggagtagcactgtatcaagtctatgttgggttttatgccnnnnnnnnnnnnnnnnnnnnnnnnnnnnnnnnnnnttattaataaagatcagaaataccattttatgttgcatggttcac

SEQ ID NO: 117474 - DNA, 1414 bp, Cannabis sativa
gcattgtcttccttctctgctgtaatattcttcctcacagtagcaccaatcggaccaatacccttattgatcttgcttcttttagggaccacctttcgcctttttgaaggtccttcaatgtttttcaaagattcactaccattatcataagttataggaacatccataaggttgttgaggccattgaatatggtattaatcaaaagctccttatctgtagagtttgacaaacaagcctttgatgtagaaacatcaccagagaaaaccactccctcatctctccaagaaccactcctttttgctttgcttatccctttgctcatcctttccttcatagaccctcctccagaagtcaaagtaccatgagatagcaaattctcagtagtattcgaaccaagattatcagccgtgacaacttccttgcctttgcccgtggaacctagtttggaaaaactggagtaagaatatgaccctgcacccgcactatgtatctgtccaggattcgccaatgtaggaggacaatttgctatttctttcacagagttagggggaagcaaatttgaatttggaattcttttctctagaaaaccaggaggggtggagatgttggcattcatagtagggtatccatacacagccgaggcagaggagactcttttatcatccactttcaaccaagatccatagcccgactttacattccccataccatcctcaaagcgtttaactggttctgcacaaacccgagtatcatgtcccacaaaaccacaattaaaacacataaagggtagacggtcatacctgaaggggagccaaatttttcgaccctcgctcggaaataggaaccctgggcatatcagctttgataactcgcactagaccgtgaatgtgaagaagcctttggttacgatcttggcggtatcaactttttgaacttcaattacttcgcccgcgaaactagccaatcgctccatattgccctgcgtgatcgatcgagggggcagctgaagaattcgcccactgagagggaatcgagtgagaaccttgttccaatcttgtggaaatccatcaaatctctccacaattagaaagccattattgaggaaccaagggttcttggttagaattctattcaaatcttgagaagatttgaatgagaagaccaggaaacttgattctttggtagagagtttgatttccatgccccaatctttctcagaaactccccaaactctttctagaattgttttgagaagtggatgattcaaaggccgattggaacacaactgccccatagcacaaagggaggccactaatccaatttttaataaacacatatatatatatgcattgtttataaaatataaataaaatttaaaaatgtgtttgtatattctttttttttttttaattt

SEQ ID NO: 117475 - DNA, 1125 bp, Cannabis sativa
  modified_base (26)..(34): a, c, t, g, unknown or other
attaaataataaaatatttttgtcannnnnnnnngccaaaaatggaattaacaatctttatttttagaagtaaaaatacccaatgttacaatactactacttccgttaactcataaatatggacatgtggagggtctagatgcattatatttatttatttcattttaaaatgtaatattcttaatatcaaaaactaaatgctacttgtttaaaaaaaaataataataagagagatgcaaaactaaattaccataactgagtaaaccggtcgagtatatgtgaaaattactatgagaactttttgttttttttttaaaaaaaagtagcatttagtttctaatattaagaatattaagttttaaaataaaagaaataaatgtaatacatctggactttctacgtgtccatatttatgagttaacggaagttgtagtaacaggtgtaagagaattgtaacattgagtatttttgccactaaaaataaagataaggtttttaagtatataaaacgtgaaacattaggtatttatgctgcaatttactattttttttttataaatatgcatttagtaaccattatctttcaaaatattagaataatatacaaacttggtattctacttttctcaataatcttcatctagtctagtatttataatttaaaatcatatatgttagtactcttgactgaaatttaataaataaaatagctttaatataccaaaattgtcctaatttatttatgtagattctaaattaaaatttaagtactaattaaattgatcgaatttgtcgataattgtgttaagaatcatgaggttctatttcaaaattaattaatgatgagtggactagcacatgttcttatatacgatttaatattctataatttattttatgtgaaacaatgtctataataaattgtataaatgctatgtgtgattggaatataggggccttgggttatagtttcaaagaatcgggtactaaggtaaaagcaaagggaaatttatataaattactaattttttccaatttattacatttatactgtcaggctgcattattatcttttttactgtgtatgcttttttttatacggcagtatagacttttttttttttt

SEQ ID NO: 117476 - DNA, 2747 bp, Cannabis sativa
taatcttcaaatacctgttttaacacaaaacaatacccttattatattattaactctatgataatcttgcaaactttttggtcattttgctgatgtctaattctggtagtcgtcgtttttcagttttcatgccgttttaaaaatgctaccgtcaccagcctttaacttttgaatgttttgttaggccaaaaatattaacataatctaaatctttgagggaaaggaaaaagaaaagaaagacagcctaaaaataaaataatctggattccctaataaatgtacgagaacttccaaaacgctgctcccaaggatactgtactagaacgaaacaaaaaaaatagtgtctttgaaatgaactcatatagttaactaaaaaaatagtaacaaggccctaaaatgaaaaatacctaagatcggttattattattattgttccaattaagtattcagtctcatataaattaatgtaataatttttaaagagtatcgctaactaattacaagacgacatgtcaagaagtactaggtactaccgatgctcaataacaatacttgccctaaaataagtaccaaatcatgagatatcaaaattgtagtttatttggtaaaaaaaataattttgtaatatatttacatcaatttttttttagtatttgtgcctaatattacaaaatttgatattaaatctaataataaaatatttaaaataatgtatttattatgaagtaaactttatcacatattttgaatcaatttttattataggacaaatttaaattaacttttaacacaccattaaaacaactttttacgattatattttagcaatagatcaccaatttaatgtcaattactcaatttatttttgaataaatgagattcattttaataaaattattattttctttttaagaaaatcactaatatttcaatatataaattagaagaaatatcaacaaaaatatttaataatttgtacaggtgaacaattctatttaatttttgaaatatcgtacttttatatcatatctaaaatactttagaagattaaatctgtagtaattttaaaagaagggtggagtacctgaacaagtggactggttgagtaattgggtgaagatggtttggttattgaaaccagcataagaacacgttgtgcaagtggaatcggttgtagaagtaatccccaaagctaaattagattccgaacactgcatggaggggcacgtggaccacggtttcttgttggtcagcttaacttgggctgcctcacattgtaatcttcaaaagacaattaattagatcagacttgtctttaattaaaaagggaaaaagtaaaaaaaattatgaaaaatacactcacgtccaattgtttgaggaatcgcaactgcatttgacacagtcataagcagtgacaacataagtcccattgggcaaaagtatagggttatccaacgagccattcctcattgatgatgcacaaactgcatccaaaaatgaaacccattattagtatagtaataaataaatttcataccattatgtgatataaactcacaataaagatgattaattaatttattaagtaattaaataaatagataaataaagtttagtaatcattcccaatggcaatatctagggaagaccaataaagtgcacacaaatgacgagaaatgctagagccactctaattaaattaagtattgagtcctgtataatttaacgtaataattttttaagaatatcgctaactaatcacaaaacaacacgtctataaagtgctataatagcaatgctttacaaatgaccgggctctaatcagtcaaatataagtaataaactaaattaagtacaattccaaacgcaataagttaatgcaaacatagtatcagtaagattatggagatttaaaaaagaaatgacttaaaataatgatcttgtgatatgaaccaactattttattattcatgtgtgtccaccgactagaagataaaaccatggaaaatcgagtccgtgtatgtggggtagtgaaatgtaatggcgtaatgaatcatgtatacaaagactagcaacaccatcccactatctttgtaggcctggtaactcaatggaaaagtaatattaatgctttattaattaaagaataataatgtcataagcattaagcacacccacaccaaatcaaagaaaactatcaaatgttaaaaagggttttcacttttcatccaaactatcaaaaatggttaatgccattaattaaattttagccttttctttgaaaaaagcaaagataataaaagatgaagaaaagcaaacctttaagaggaacatcgaggacttgaccagccatgagctcactagagttagcaatcccattcagtttcagtaacgcctcttccgtagtaccaaaatcttgagcaatcccctccatcgagttcccagcttgcaccacgtgtccgtaatggaccacctgggttccgttaaagtcatcacagctacacggtaacggaatccacaacttctgacccacctcaattaaattcacatccttaatgccgttaacggcggcgatctgctggtacgacaccagagtcgagaaaatgtctctcgctatatggtccagtccgtctcctttcttaacggtataagttggaacccggttcgagacgcccgttccgttattacaaatacaacggaacgggatcttaatcgtctccttcgcggccactggtgcggttcgtgga

SEQ ID NO: 117477 - DNA, 4115 bp, Cannabis sativa
  modified_base (78)..(100): a, c, t, g, unknown or other
taaggtttactaaactttatatttgtttatttcatcgttttagaaagttcatagttagggtgttaatcaacatacttnnnnnnnnnnnnnnnnnnnnnnnaaaataatttccaacagaaaccagcaccacaactcgtcccccaaggccaccaacggctactggaatgagaccagtgaatagattccacctagggaaccactttgtgaactagaagaacccgaggaggccgatccttgggttgagcagcttagccaaatagttgctgacctgcaacaacaattatgtgattctctcaataagcaagatgaattgttctaaaaatggctcatggagaattggaggaatgttgagaatcatcgtgctaagcaggagcaacgaagggctaatccgtcccgacgaatttgggaagcttatcgctctagtcgtggaacaacttccctaaggcgagcttttaagctagaaagagagatacctcgtcggtcaactgtccatgtgggaaataacactcaaggggaaactctcaatgcatgcaacacttctaccatgcttggtagttgtgcaaacactctttacactacaggttcttaggctcctcggagggaagcaaactttgagtgagagtttgaaagagctaaaactcgggtgcgacaaccaatgcgtcctccacttgatgttgagcgaccacgtgctcctccttcgtaatgttctcctttccggtcgaatgacaccaagcctcgtgacgctacaaagggaaaagacttgcgactgatactgaaggatgaagaccaagactatactttgaaattagaggttatgaatttcaaagagtaaagactaacgacccacttcacactcataagtactttcgagatgataggggtgagttatgtcggtactttgctcgcgaccccgacaaccagtagtacgagtatttcgctcatgtgcatggagaagaattgaacctaagcaatcaattcaactctcttcacacttgcgatcctattggagactattttgaattaaatagccagtacaatgttccagacgaccgctcctgcaatgctttgtcccaagacgatttggcctttatgcccgagaagtctctggtgtcgccttcacgaccccgtggtcaggagacaacaaccagacccaaatggactggtgcctttgatcgacttggaagacaaagagacttgcgtgacaccctaaccaaaagacggttggtggaagcgagagcttctaaaggtgacacttatcagtcaatagaagttctaaatgggacgcaaaccaccacccacgatgttaataggaaagactttgatgatctagtggccttggtaaaaggaatcatggctacaaagttgttagaatcagaactaaatagagagtgatgctcggatctcgcaaaccgaatcaaaactttgtcaaccgtctaaatatcaagaatctttcctggcatcagtacaccgaataaaaaggcccattgtcccacattcattactttgaagtggaaactgatctacaaggagtaaggaataatgtttggtgtagaattttccctgccaagctgacgggcttagcttagcaatgatacctcaagcttccccctagatctattaactcatggaaagatctagttgacgcattcgacaatcaatttgttccttcacgacaacaccaaattgaacccaataatttggtaaatgtgaagcaactagaagatgaatcccttaaggactacattcaacagttcttagaggcaacatttaagactaaaatgcttagtgaggatgcaagggtaatggcagctgtagctggactcaaggagattagtcctctgtggtttgacctttgtctaaagtcagtttataccatgaacattttccttcatacggcagatggctttatcaagcttgaggaagttgttactcgagccaagagctaaaataacaagaagaagaaatcgttagactcctcaacctctgacactgtaacgtgggccaatggggaaaaaagaggatcgaatgggggtaagagagctaacaatagagggaaacaaggtaactcccctggcggaaagaaagccaaaactaggcacagctgatttgagagtaagaactttgtttcacaacctactcaattctcaaagccctaagagaggaaatatatatcgcaactcagtcaatagtgtcataccacaaacctcttcccttcaaagagttagggaaaagagacatgaataaattatgttacttacacaactattacagtcatcacatgaatgaatgtaattagttgcgagatgagatagaatttttgtttaggcaaaagcacactgctcttcagtggtatatgcaacctgaagctccagttggggcaatgcacatttgcagcctgctattaggatttataccctaaaagcaagtagttgatggataatatattctatgaaatataattataagataaatgatacaataattataatagtataattaataaatgtttaaaaaatccttattcatatggagaaggtataatcttgtaaggatgtacaagagaattaagattatacgatatgaattaaacaagtcggtagtgattaaagtaatgtgaatctttaatatggaactgctaagtataatttactatacactagacttctagtgtgtgtgattttgattcaaatcacatatgtagatagacatgtagtaaaggtgttgtgtataatttgatcatgcatgactgaactgatatgtaataaacatcttttattaacatgtcgtttaccatgaaagagtaattcatatcacaatgatgatcattagtagataagcctgaatcttgagtatatatgaactcatgtttgtattcattgagttctttgatgcactcattaaagtttctcagggaaaatgattcttacaacctttgttttgggagctcaataacatgagtggctgggaacatgttatacaatagtggaatccaagcttttctaatagatcgaatattagttttcttatagttttaattctcagagtgctaataatattggatctcagagtgctaataatattggatccaaatctataataagttatagattaactgttcacattgaattaatggtacacaaagaatcaagagataattagatgggtaaaatggtaatttttaccaactctaataatgaactaataattggaggacaaactacttagattgattatatcaataactacaagtaagaattctgtaaacataattctacatagtggagtaataatggaattaataaatttaattattttattaatgagatcgataataatcaagtttattggagcttcaaaatataggtccatggtccccgagtcacctctatacaacactgtacacgagaaagttttatttaatgagtaaatttcaagtgacaattaatttttatgataaataaaccttaagggaaaaatagtaatttggaaaattattattttgattaattatgataattataaattgtataattaatagtatttaactatttaattttatttgatgacactatataaattagttaaatataatattattcttaaataataaagagataaatatattatttttgaaaaataataatttattttaatctttatgaaaaaagagattaatgagaattaatcaattattatttattgacaaaattaataataagtcttattgatggtaaaattgagaaattatttttggaccttaaaatatggcacacagatgtagagtgacgtatataggcccatattaattttatttgattattttattggttaaaataattcaaattaaattaattaatcatcttttaaatatggaattctatgtataattggataatatattaagataataataaaataaaggtttaactgatatttgtaaatcagttattagatgtttacatttgaatttaaattaaattagatattttttttattttaataaatgattaaatggcttcagttataacactatgctgaccacagatttggtcaaataatagtggggccttatttatgattggcaataccacatgtaatgtaaagcccgcttagtt

SEQ ID NO: 117478 - DNA, 4965 bp, Cannabis sativa
  modified_base (4929)..(4929): a, c, t, g, unknown or other
taacgacataaaaagcgtgttctggggattcctgttataaaattttttacaaaagaactatatacgatgatacctcaaaaatataaaacaaaaatacactatagatacagcccaaaacaactcctggcaacccggtatgcaggcctacaaggtcaatatgtacattgctggagaagattgtcacctcatggttggtctagcttttctttacctttacctgtaccacatagcacccgtgagtcacaaggactcagcaagaaaagtaataataaaaatcatatagtttattattcgaatattgtcatttacatacaataagaatcaaaccattacaaattattcataagatgaaatccaaatcactactcgcatctgccacgaataaacgtcaatatacagatatttaataatacaaaattattataccaataatagaattcatattcatttaatcatataaattatatatattacctcacaaagtaaccatcttcattacatcatgttgcctaatcaggcaagtcgatgctttaatctattaatcttgtattgcattgcctaattaggcaagcccgtgccatagtctggcacccatatatcgtataactgtatcacctaatcaggtgagcctatgccaaagatctgcacccatatatcatataattgcatcaactaattaagatacacctccatgtttcaccctatctagttttcaaacataccattcacgaggcgttggtatgttgctctagcattcttcaacccaaatggcatgaatttataacaataaagtcttatattttttacgaagcttgtatgttcttgatctggaatatgcatcttaatctggttatatccagaatatgcatccatgaaagtcattaattcatgtcctattattgcgtccaccaattggtcaatcctcggtagtagaaagtaatcttagggcatgctttatttatgttggagaagtttatgcatgttctccacattccattttgttttggaacaagtactggattagatattcatgagggataaaatgcttctcgtatgaagttataagttaataacttatcaacttcttcttttagtccattttatctctcaggatcaagtggttaccgtttttgacattttgaagggtgatttggatcaatattgaggtgatggcatatcacatttgggtttatcctgatcatatatgaatggctctaagctaactggtcttggtttgccttcaaaaaggtgattaattgctattttagttcctctctcaaatttttcccaatactaacacacttaatggattgtttgggtcgaaatccacctcttctaactcctcaattggcttgagttggttgctttcatcatggatcctaggatccaaatcttctatttctttctcactttcttctgccaaaatcaccatcaactgatgattagaccttctatttttgagttccacaatgtagcattctcgagctagcagttggtcacctctaatagttcctaccccagagtgagtgggaaattttaggaaaaaatgtttgattgagcttattgcccccatccccattaaagttggatgacccatcagtacgttgtaaatagaagggatgtcgacaactaaaattcttgcatttgagtagtgaataatggtggttcttccatggttaatggaagtttgattatgcccaaacttgcaacactatcaccggtgaacccacatatatttaccatgcagagtctcaaacttgcttcctctaattccatcttctttaaagtttccttataaggaatgttgacaggactcccattgtccacgagaaccctttttaccctcttattagcaagttgaactattattaccagaggatctacataagggtatcatacatgtaatgcatgttcatcagtaaaggcaatgggcggttcatctggttttgctctctttagagaatctggagcaaatgctgatgtctcatttttcacctcattaatgaaccttttcgttgcactattattgtttcctggatggtgaggccctccaaaaatcactaagacatcctcaccctctaaaggaggaggttgtatccttggattattcgggttattgggttgattatgcttgtttccttatgtcctcacatgctgccttaatatcctcgcaagattacgctttcgatttcatctttcaactaatggcactctttagttgtatgcccaatatctctatggaaacaacaatacttattaggatctcacttatttcttgcatgtctcattggatttggtctgcgcaatgtggcccgatttttgttggcgaggtagatatttttacgagtttcatttaattcagtgcaaactgaataaataggaacataattttcatgtttctgctacttccttttgtccttggatgagtctcttgactcatctttcatcttggtgttcgaaccactctaattttctgctctagtggtcacgatgcttgctattgttgtattcagactttaattgtttaattttattccaagcctcttctttctgcataaaaatctgtcctctttcattgaactcgttgatgcttctaacaaggcatccttgcatgtcgtcccataattctccccctgcagttgacaagtcagttgtaattccagcctgaagggatattatttgaatgttgtcattcaaattcttgactttggctgcatccatactaaaatgacttaagtacgccttaagggattttcccagttctgcttgacattagttaataaagatgcttctggtctacaatctctcacagcttggaactgctttttgaaatcttttgacaatttctcccaagatgttatggaatggttggtgaatttgtcaaaccaactacttgctgctcctattaatgaagttggaaaaatatgcatcgcaagttgtttaaaacgttacttgctcgcattattgtattgaaattgttcaggtgggccataagatttgttgtaccatcatattgtatgacatgagggtttttaaatccttgagaatattatgaattcaaaatatcagggtggaatggttatgtctttttgtctgagtcatacctagtaattttcaacattctccatcctggtattttctgaacttgtcttctagttttatcactcgcaactgtattggatccataggttgttgatctgcattttgatatagttggttacataaatttggtgcattacagtttaaatgctcacgtaggtctggcttccttcgatttaattgttcactgagattaggtttgcgacatatctgatcgtaattactcataaatctagtacttgagtaactttaggatttgtaactacacgagttactcatactttcttgatcactaaaataatattgtgacctatccccgtcttgcattttccatgagctccagttgacctactgtgcctgtgagtccttgatcttgactctcctgaattcatacttgagctagtttcacgtgactcatcttgcatcgacctacttctttgaaagatttttgacacacgatctctactcaagtatgtgtgtgtgttttctctgtctttgcaagaaggcctttgtggatgccttggggtcgacctatcccaggttagtttccagcatttcttccatcatgttgaggtatttcctagtttccttgtcgtaactgccttgcatttgcattcatgcaagatgatttcggtatattaggttgttcattcccctagtttgaatatccatgggaagtccttaaatgtcacgctgatgctcttgaattcttgtatttctagtatttggtggattttctctatccattggaatattccttatattcccaggttgttcttcctgagtattttgggattcccttgattattttcttatctcctggtcgtggaccctcaaggccatccctgtagtcgcctcatagatggatcaggttgagtttgaggagtagtttcctatgcagccttggctgccatagcttctcgttctaactcggtatttctctagtttgactcagccaggcattgtcaaagttgcctattttctagttccactagtgggacatatctggttggatcataggcgtcttcactttgcctctctgggattttttcaccaattggattgaaatttccatcatttcttccagaacgaggagttttagttgtgttgattctctgtgatccctgaggttcctttctagggtgatgggttgtcttctcggatgactttcttcatcgcgatgggtattgtgcgccataaatatagatttttagttgtgtctatgaggagggtattttctgagtttttattacaaaggctctcaatgaaagcaccaaactgttaacgcagattttcgttaaccaaaaatattagactgtttgtaataaatgcaccacaatattaactactgtaataaatgaacaacagaaagtttttaatgtggttttgaaattatttcttcatagtccacgagtccatcttattagggataataatagtaatacagaaaaataatagtagtaaggatatctttttttttctctctcaaattggccatcccttttaccatggattctatccctatttataggtgtatagggtgacagttattcccttgggatttaatcattcataattgttcattaaatgtggacattgcccatgtttcatttttgtgcacatgggataatattgaataactggccaaccattcttttgttattatccttaaacggttatgctgaccatactggttgttcctcactagatttgagttgtccttcttttactacctttataggaaaaatgctaagtgtagtgatacaatgctcctcatagttctctaccatgatggtattagcgaagtggttactgttgggttttatgccntaaataaaactccatttcaatataatccattttatt

SEQ ID NO: 117479 - DNA, 1715 bp, Cannabis sativa
tttcattgttttagagatattcatatttaggatgttaaatcaacatacttgttagtaaatctagatcctggtaagatattcccaacacacacaccccatacacctttttgccagaaagttactttaagcatttactttgcaaggtgaaaccttttggcaacacacatcctgtacaaattatgttcccctattgtctagctgcttctacgcacgagcacaaaactttctttggggcccaatagttagttcatttatatatattttatcccattagtggctttattgcaaaagccctaggcgggtcatgaacatgtccatacccgcccattagcctataaataccctttaatcttcatacaatggggggatcagaaaaaaaatagtcgaatctctgctaaaattactctaagctttcttcttcttcaaaagaaacgaagagggcagagttaggatttcttgcacaaactattgtaagaacattatacaagcctcttaaggttaatagagtgactcatggattaaggctcattaacgcttgaaccacgtaaaaactcatatcttctttattattgcattttattatttcttaagctcttattttatcagcttttaaaattttcggtaaatattttggtactttcattgagagttgacaaaagatctaaacccacagtgttactgcaaccatggtgtataaaaaaaaaaatagttactaagaagactcctcaaggcggcctcgacactatcatggaggatgtaaaccctctctcgctcatctgagaaatgtgagagagggtacgttagaagctgacaactgagaggatgacctaagcaagcattgtaagcatgttgacgaaaaccaaaatgttgaagaggaggaaggagatgatgatggagaatacgttaaagacaggtactacaaagatgggtctcattatgagcaagacctagagatggctcgagtgtctatggagttgcgtgagacccaagagaagctagcccgtcaggagaagctttctcaacaaatggagagaataatggctcatctccaagacaaatttaaagatctagaaaaggagattctgaaaatgaccatttagtacagtgtgtcaacagaaacatcagggaaaccctgtcgatgttggaacctttgctctagtacaggagaaggggaaggtaaaggtgggtgaccctcacaaccctacaactcccgtacctcctaagaaaagcaagaatccaaccagcaaacctacataggcatagaaggccactgatgcctccgggcttcgatgcccttctgctatgaaaggtcctgctgtgcagaaagggactggtgttaaagtacctaagctcaagggaaggaaaaaattccccactaattccgttagccaggacggtgggaccaggggacaatattctgatgacagtttgtccactgtacatcttcgaaggtgtcttgacgccaagtacaaaaaagccaagggagagaaggcaaggccacgtgggaatgacctaacaaaccacttgaatgataaagctcgtagacgtgacctccctggtagtgatacaaagaggctagaagagcaaattgctgctttgaaaaagcttgtttgaaagcagagtggggccctcactaattctaaagatgaggacctagagccgtgtgttagaaggatcatagtgttgggttttgtgccctaaataaaacccattac

SEQ ID NO: 117480 - DNA, 2033 bp, Cannabis sativa
tttttttaaaaaaaaaaaaaaaaaaaaatctgtattagtacactttactaaaaaaaataataatacatgtgaataaataatttatcagcattataaatggtagaaagtatataaaattatacttgacaacatatatttcttttattattacactttgtcttattctaaataaaatgaaagtaaatatttttaatattcaaactacaaacacactgccttaattataactgcaattgggaaatggtaacctgcaataaataaaataaaagttactttcaaccattatttgtgagtgaaatcgaatttaatatataaatatatatagatacttcaataaaaaaaaaccgaataataatatatatacacttaaaatataatatatgtaataaatattttttaatgaattatatttataaagattaaatttaccataaacaaatatatttttttagagatattaacaaacataaatacttttgaatttctaattactataaactcaataatattttttttagtgatataagtatcaaatattaataaattgtaatttttatttagtttcgtcaatataaatttcattagtatatgacacatataaaactcaaagttctaagttattgaatctgaataaaagcgtgtaatattaattacttttaaatgaattttcttttaacaaattcaaaagttaagtttgattataaatttacgatactaacaaagataaaaattacagtttcactaatattaaatacttatatcgctataaaaattagtagatttatattgtttacgaatttaaaattttaggtacttatggcacaactgcttatatatatgtataaaaattgaaataaataagcaacaatgtttgtacaaaaagaatgttttggattcagctttttattttggtagaagctcttaagagaacttagatcatatgggatataattccaatctttaaaaatattagacctaaactaaaaacacattaaattaaatcttctaaactcttttattttaaagtttctttaaaatttattatttatcctctacatttacaaaatactaatattcattatccttaacatattttattaattatttgagatttaattttatttttatataagaatatatgtaaatattaatattttatatttgaaatgaataaaatatattaaaataaaaaaatagatgcatattgtaaagtaaaaatttgaagtaaaatagagaaattaaaatcttggtgagataatattctaaaaaaagaatttacataatagaccaaaaaaaattttaaaaaaattagaaaaatacgttaacacgaaaaaattttatttttatgcgctttgagtttttttatttacaaaaacatatcttttgtaaaactaataaactgtctttttggttttattatagtttatctatagttgtatcaaaattgtcatgagattatatttttaattattttataatttatttatagttgatttatagttgttgtaagggtaatttcttattattttttttgaggagatttatgtatttgtttgtaaaaaagtacaatacctcttgctcttgtggtccaaaatataagctatgagtaacctaattaaccaaaccaaccaaccaggctgttaaacttaacaacttttaataatatgtactaccttgcttgctagttttgaaaagtaaatatagtactttctttttttgaatgaagtatatattatatagtacttttatcatacatacttatacatacttatatataatacattataaaggaagtaataattattagctaatatattttgcaaattatattattgtattctagtttttgtgaagtacaaaagagtaatcttatttcaactgccaccaactctttacttttctttatttctatgttcctcttatggattttgtataaagaaatagtaaaattatttttcagaattttcgacaatattaattttgttccctaaaatatacggcttttttagaattttttttatatttttactttt

SEQ ID NO: 117481 - DNA, 1251 bp, Cannabis sativa
tcgtagcattcttgaggataatgttctggctgaccttcatgccatcttgtattcagaatgctagttttaatgaagttgatatttcatttttttcaaaaaatcccacttttttgacttgtaactataataaaccgttggggatgccctacgaccgtctacaaaatcatcagaaatactcaactataatcgagaaatttaaacagtcacttttattaatgacgacccaaaaaaaatcattttgaggaccggcaagaaatttgctttttatagtagtgtttaataaacagattagctgtgtcaacttgaaaatgacttaaatttattttagaaaaattgaaacccatttattttatgcaattttcaaattgtgtcattgtgtatgatcaaagttgtaaatacgtgcgtgtcgtgttagcacatcccatattttttgggttttttaaaatagagattgtgttgtgccggaccataaaaaatatgagtcatgtcgtgccataaaaaaataggtcgttccatgtcgtaaaataattttatagggtaggcccaacataaaccgtcgaatttgtgtcgtgctttattcgaatcgactgtttttcttagtagaccaacttgtttttttatatagccctaaattcgtgtactatatttttatatttttattacaattgataaataaattactaaaatatatatttattttatagttttaattacattctaaaaaatattataattatttgaatttgaatatttatattattttaattgataaataaattattattgttactatttttaaattattagactttttaatttgtcgtgtttttgaactaattaatttgtatttagaagcagtatttttaggtttattgtgttctatcgtgcatgtgtcatgccaatttgcaacaattcttatgtatcgtgtttaaactcatattttttatctcgtattatattaaagtatatatacttttttgcattagatcgtacccgaactcataccatgtccaaaaaccctatccatatttactattctgaacaccctatattaaaaaaagatgttaaaatcgtaaagtttcccaaaaatcaaaagaatacaaaaagtgatagaatacgtgaagctgttaaccgtacaccacattgatttacggggtatattgagaaatacctcttttatttatcaattaaccaaaactacctctaattttatatttaattataacatacctatttttatatgtattgtac

SEQ ID NO: 117482 - DNA, 1261 bp, Cannabis sativa
gtctcctcacagtcacaggatcatactcatatcgaagtagatccaatacatccacaactgggaattgtgccctccattctagtatctaaaaactttatctaactatacctcataaacataacaccaaatgttaaagcatatcaactcaaacacagtaaacaacaaacaataacaatcatctaagattctaaataaatcataccatggtaaagggcatgtctgtacaaaaaccttttcaaacaacgtatacccattaagcaaattattccaaaaacagcgtgattgggcagtacaattttcttaacacttcctcaattggatattaaaagcaacagacgaaaattcaacacatgctactaacaaaatagggctacaattaaaataataacaataataataaaaatacataccgaagtagatatcgtcttcttcccgtctgttgcgcgaataaggcatcgaaattcgaggatttctccagaagatttcatcttattcttttgcacatgagatttcaaaggtgctaaaaacaaaaacccacatacgtaaatgcaaattacaaagggggaagaaaaaaaaaacaactgatatatgaatttggctataaccacaaacacacatggataaagagtatatacatcgtttaagggtgacccaaacagaaccaatgtcggtgcttcgctcgaacatgctagtaagctcattgagaaaaggatctaacagcaatagaaccttgaacgaaacgaaacaacaattgtaaacagtttcagaaaaacttattataattttttgatcgaccataaagaaaaacttatataaagaagaagaacagaaaaacgattatgctatatgagtagagaaggataccatggcgttgttcagttcaatgcgattgggatctgtaattctcaatcagatctcttgagctactcttcttcttcaccaagtttcggagttagccaagcctacatgaacgaatttagagaaacgtattagtacggccctcaaaagaaaccctttgggtttgggccctattatttctttctgggtttgggccctattatttgttggtttaatagttgatggaaaatttacatggtatactaacttttgttaattttttacaaaaatactgtcaggcggtatttttgacttttttaatgtgtgttttataagtttcatactgttgtatactgtgttaagttttcactggtgttttttagttgttctactattgttttgagttgttctgctttgtgtttta

SEQ ID NO: 117483 - DNA, 1325 bp, Cannabis sativa
  modified_base (1261)..(1263): a, c, t, g, unknown or other
cctcaagggtagttatattactaagagaataacattccaaggttaaacactccaaacaaacaaagtaatgtttcacattatcattcccttactatgattaacctattccaaacagcccttaaatattaacaaatgaacaactttttatttaaaaaaaaaaaaaaacaatttttgttaaaaaaaatgaaagtggaaaaagtttatagaattgccggcaatgtaaatcgatcttgtgtcatgatctttatcatgttaattagattttatttaaagtgtgacattatttgttttagaaaatagattttgaaatatttttttaatataattaagatagagatactaagcacaaatatttagataaaaaattatgatgaatgagataatttaaattatatgtagtgctcatgaatttattcatttttccaatacatctgaccaatttttatttgtgttttaacaaaaaaaaaatcacatattttcactaaatttattttcaacgtttcttttattaatcatttaaactataattttgatatttaatttagttggtataacaaatattgtgtgaatagccaattaagtcaaaacacatatagatttatttcattttattaaaattattaactagggtttactaactaatacaaatctttttttgtcattactctcttgtattattattattatagtctataaagatagaattttaggatgtgtttgaacattttttttctttttcttcgtaaagaaaatgtcttatataaattagttgatatatatgtttttgttattattgtaagagcaaaatttgatattgaacctaggcacaaacccaataatatttccataaattttataacgtacaagataaaccctaattgtatgtacaaacaatttaatcattcgacatagagaatcaagagcccaataaggttctcaatagaactcaaatgactaactataatcgattccatttaattacgggatatatatatatatatatatataattttaattcacatcactttcttaatcaatcatggttactttcttaatccttgttaatggagtaacccatatttttatatttaatccatgcaaaataatctttaattaatgagtactgattatgcatacaatgcatgcatgctaatgggtggtgaacccaaaggcttgagtgctgatcttttgagtctatattgagtattgacccatgtagttaagtcaggcccggctgtgggcataggcgggctaggcctgnnnctagggcccacccagcccaggggcccaaattttttttttcctcttttaaaattatacatttt

SEQ ID NO: 117484 - DNA, 1142 bp, Cannabis sativa
  modified_base (1095)..(1106): a, c, t, g, unknown or other
aatcagattagattgaaatgggttttatttagggcataaaagcccaacagaccaaccttatgatttccatggttgcctcttagtcttgggcgtttattacacgaatcaagagtttgacaaggtcgagcaatctgaacatcaggagcctgagggcccaatgtggatttctcccctgtccgagcttactaaaaggcaccttcagaacttggacaaagacgatcttcttagggatgtgcatgtctttctcccttttgagggacaacttgctaacaacccaggcgaaggtatgtgtgcgtggtctggcctacatgcaaaacatggtgcccttctaccacttcacccgtactttttgaaattggcgaactattataaaatctctccagtgcaattaacaccacaggggatcaagtacttagctgacacattcatcttatacgcgcagcaagggtagggggaatcttttgtgcacgacattaactagttttttgaattaaagtctcctccgcacagtgaccgctcggggtacttctacttctcacagtatgaatactcgtggctaattagcgctaatgagaaatgtgtcacgaagattggtggttttcaacaagactactatatggtcacaaagttttcgaccaacttcactactttccaacgagcaaagatgtatatctagcctgctttcacgctgggtcttagggatagggcccaagtcattttagtcttgtctacgtttactcagcacattgtcttactaaaaagtgccaagaatctgactaagtatatgctttatccaaaacctgagcgtttgttccctgagaagccttctgattcgaccaacccatttgctacaaagaagaagaagaagactaaggccaatagggtcagattttttcctactgaggaacccatccgcatcaaggaccttgaagaggtacctactcatagagtcgtgtagcctgtcgagaggaaggggaaagccattgttaaggaatcttctaatgatgatgctccttcaatccttgtccgggaggatgctgttggaaatattttaccaggatctagattttataacaagtatgtttcattaacatnnnnnnnnnnnnttctaaaacaatgaaataaacaagatcggaagagcg

SEQ ID NO: 117485 - DNA, 1383 bp, Cannabis sativa
attgtatcactttttaataacgtagaaaaaaactagcataaaatttaatatacgtgtctcgcatgtaactttttactagtatatatattggctaaattatctaatgaaaatccagtcaagacttatttgtatagaaaatagttaattcagatgggatttgtcaagtaataaattacttggctggtcgaactttcaacccttaggagtaagggccaactgtttcttaatagataaataaataaataaatgaatatgtaaaaaggcagtttctttctttcatgtgatttacaattcaagttttgtttttatcactgaaactttcttcttcttgtgctttgtagttccccaaggtggtgatgttcctgaatgggtctgtaatgcctatggtggtagctggaattgatatctcatcatcatgctctgcaccctttgtttcatcccaaaaatagaaagtaggaaagttacaccccaaaaagaaaattaaaaaacaaaaataaaaaataggctttcaaacacagttttacatacatagttgaataaatatagattttagggcagcagaaattttggttagtgtagtgtgccagaatagcaacttaaattatattcctcccattttggtttctattgaaatgtttcattgattgagacattatttattaaccaaaggaaagaaagcatttctgagactcctcatcatcatcatcatcaatgtcttgtcaaaggccataactacagctgttgtagttttcaaacttcattgctgttttctttctcagacatgatttggatcaaatcatttaacacagagatagacagaacgatagatttgcttataaagatttagacaggaagacaatccttggttgattctcatgtagatattttaggtagctgctgtgaatatcttataccatgtgggttgttagaaatataagtgataaattataattgattagtgaaattttttaaaattattatattaaattatatagaatctaatcaacaacaatatagtacttaaaaaagtgttagccactaataatatattttaacattttttaagaaaatatccttgcaattttaaattgaacgccattttaacaacaaattatgggggtacataattaatagccttgtttttacgacaaacttatatatgaatatgggtgttactattggatatatattgatggttttttaaaaaataaaaactaaagcacttcaaaatccagagcctagccaactatattggatatgaagtgggggaaaatagtcttagatagatcattagttacatatatatatgggtatgcttttaatgggtattgcccatgtatgggtattttattcttgaccattggatcaaatatctaatggttg

SEQ ID NO: 117486 - DNA, 2241 bp, Cannabis sativa
  modified_base (2188)..(2199): a, c, t, g, unknown or other
aaaacagagcaattagctcataacagaaaacagttgataaccactaactaactaactaacagaaataactaactaacagacttgaagtgtgttaacagaggtaattaaaatgaaaagaaaacaatttttattttatttttttgtttggttgcattttaaagtataggaataacactctaataaaatgtttttttcactattttggtagaatgactattctattttaaaagaaaaggaaagaccattctgatgtaagatgaagaaaattaatgatttttttaagaatattttttatacattttaaattttattccattctattcctactcttattcttattcttatgttttcattcctcaaccaaacactacttttatagtatttgggcggcttagagatatatataggggaagctgtttctaagcataacaactcttcattgatcgggaacgcagcttgttaagtaagaaattacaacactttattattattgaatagtactaatacaagctttgaacgcaacttttacactcggactctatttctcaaatttgccctttgggtacacaccatacttctatgtataggctgcataggagatttctaaatctttctagaattctctaacttccaaagttataaaaaggtttctaccactatctaaataattctagaactatctatagctagtttaactaaattatatatttcttctaaaactttacagaatgttctaggttctctcctagtattttcttagagcattattattctgaaaattttagaatcggcaacgacttttaacacagctagccttcaagcaaataatgttcactattttgataatcaactaaaaagttttcgcacgaattaaatcctttatttatttaattttttgaaaaatacaaaggattacattaaactgaaaactcaccactctttccatttcttcttcatactcttcttgcatccgtcgattgtattttttccaagcttcctcctgaaaagatgatcggaatgatttgcctgatcctcctttccatgtctgtgatctgctcaacttttttttttgtggtgcaatgcaatgatcaacatcaacagtaaattagctcgtgcattgtgcatttcagacataataaaatcacaagaaatgatgaaaatagattttcattgcaaactgacaaacaagaaaaactcattcaatgaatcgtaagtgctgtttccttgctataacatccacaaattcattataggcataaaatagcgctaaagagaagccaaagtattgcaaggcttgccaactcgaactaagtaaacactacttatggggtcttaagtattagtttatataaagcatgcagcaaaattaaaaagatttaagtatcaaattaacgattgaaaatatccttactagaaagaatagatgatgccatttatacagtgtccaaactccaacgaaaatattaaagttcatttatataatcagattaatgagaactagaaagtacattatgttatgcctaccactacctgagagtaaaaccaatcaacagttcttcgcaactgaccaacctgccaaacgggtataaaaatctaagaacgcaaacttatcgcaagttttcaagaagcaaagataaaagctttgttcatttccccaccatattacaaatgaaaattaaattctgtctttttctccttagcttaaacgaataaatacacaaattgagccgataaaagtgtcaaagtgtttataattatatacacacttaccgcgaacgtggtgacggtggcgccaattaatccgaagaggaaaactccccaaagtttcatgtcctctttttgggacgggttgtttggagacgacggccaaggattatcgtttctatctttaccatccccctccttcatcttccccgatcgaaatttgaagtatcaattaaaatattacagttgggagatggtaaagtatcactagggtttatcttgtcccactgatttgggatttctttttcctgaaaccgacttatggagctggctggaagagacagagattatcgtaatgtagatggggtgtttcagcttaatttcatcgtacacctgcggtcttacatttaaaaacgatttatgggaaaattttatttacacaccaaaatttttcgaaagacacctcattttaataatttttatnnnnnnnnnnnnttatatctttaattgtactaaatttttttaaccttttttttt

SEQ ID NO: 117487 - DNA, 2226 bp, Cannabis sativa
tttacgaaattttatatagaaactaaaatcgtatagaaaagaaactaaaatcgtatagaaacctctataatcgtatagaaacctctattgcaactagcgctgcaaccactttagtaaaattatttaaaaataaaagattataatttattttgtttattttattagaaaatgtaattggaatattgattaaattacacattttaattaaactatagtatatggtagttattttgtaagaaatattttaaaaaataaaattgtcattataaatttaatgttgaaaaataaaataaaaataaataaaagtcattacaaatagatgaggaagtaatttctttcttttatctcttatttaatcaagtttcatcttttctaattttaataaagtaaataaacaaatataagggaataactattactatcttaccattaattctcattacttattagtttatattaaattattatacgggaaagggcattccgaccatgtatacatttattaactttataaaatagaattatttttcatcgttaatcttttggatttgtgttagtttagagtgtttaaggtttattttactgtattttcattgtttaattcattcttgcttaggtttaatattaatttgttattttggtatttttggtaggaaaaactttggaagaaaaataaagtttgaacttcaagtctaaatttgactatgttctgatcagattttaaaaaaagttaaaatataaaagttttggatctctttctcaactttctaacgcatcttgaatcaggtcatttggagctcgtatgtaaaagtatgtgtgtttgctgagatagatcagagcaggaaaaatacttggacagtagcaatccgcgagtgcatgtgtagacgaattgggtcttgtaattgcaaattttaaagttaattagggtttttaaacttaaatttccagccaagtaatcataaggaatgatgggatttaacattagaacagtaaaaacacccataagggatggagatgaaagattgatcaagattaatggatgtttctaccatgattatgaactaaatacttttttgtagggttttaatagtctcttgaaactggattaatgcaatttcattgattttttctttcattattatgatttgtgcaatttatatttaatacttgtgaatgcttgatcaatatttacatgatttaaattttttattcaaaatctgaaaagtgagaattgaatatgctataatttaattatttggacataaatttcgatattagaccagagtatctgtatggtctgtgtagcatttaaaattttcatgcttaatgtcttctatatatttaattttatcacataaatgtagaaagtttgcatatagaatgcgatttatatgtcttaacccgaatgtaattttttttaataaatctactagcataatagaaagaaaaaaatattaaaattatattatgaaatgttagaatggatagataataaaattagaagtagttttcatccattgaattatttgtctattttcttagctcttttaggttgtgaatttttattatgtaacttcttgtttctcttttcttgaaatcaattaattgttaactaaatagaattttaaaattaatttttagtaattagtaatcaatctccgtacgaacgatcattatttattattgtattacttgatttaactatatatacttgcgtactgaatatatccaaccatccttaattataaatcatttaaaataaatcaattgtaacaaatcattaactgtaaaaaaattgctatcaaatattttacaaaataaaaattttgagacaaaagggtcatcacaaaatttgtgtatgaagaacatattacaacttaggaacacctttcataaagtaaagcataaacaaatacactgaattattcataaccaaatattaaagtagagaaacatttatctttattaattaaaagatacaagtaaaattataatctaattgataaatatgaatgtggagtgagtagtaccctttagtgcttcaactaccaaacttttgaaacttcaaaactactagttgaacaaactcatcatctatggagttatgaaaaaaagaagaaaggaaacaaaattaggaacaacaaagaaaagaatcgataaatttacattagttataagaaacatatgaaaaactaaattaagttggcattttattacttactaatt

SEQ ID NO: 117488 - DNA, 1883 bp, Cannabis sativa
  modified_base (1833)..(1848): a, c, t, g, unknown or other
tcacaatcgcatcaacaaactgctatttataataatttagcttgagttctaaatcgacactatgtagatttttatttttatttcattttatgatcatgtcattacccttttcacttacaaaaaaaaaaatcgtgagttttccaaaaaaaagaaatgttgaaaaatattattagtgtttataattatttgaaaatatcatattagtattagtattgatgtaatttgatatcaattaagattttacattaccgaccataagtattaatattgctaataatttaattattattattaaaataataattgttgtattttagtgtagtggtaaaatattttaaagttataaaaagttccaaaacaatcctccataagcacatatttaattaatcccttgaccacttactttaaaatgagactctagtttttactatgctaaaacactattttgattttttttttattatttaatatttaatctatatactaatattatttttttcgtataatttcaaagctttgagcgctcaagccgcacgctttactcttttcatcttagagctgaccctgataccaaaaaacaataacactttattcaaaaatgtttatagcatatgtataaatatgactttaatcaagagtatttttataacttaaaataatctattccgattttaatattgtaatgtaataaacatgtcaattcgattccaattcatcatgtcaattaaaatggtaatcaatccaatttcttagtcattataattataaaagaaattcataaaatatatgtaggaagtaagtaataatagatgataggttaagattggaagtaaaactcatacactacgtaaagtaataaagtaacttcatttacgtatgttatgttgttattattatgtgtagctgatcagttcagtacttttctgttcattttataagtgttcacttattctgtttgtccgtacaaactatacatatacacctaattatatatttaaaaccacaattaatgtcccatcatctcatactatttatttatttatttattacatatatattctcaccttcacgtgggctgattaaattattctcatttttcctttttatttttttataatcactatataatttttttttataattaaatgtgaattttaattacaataaaaaattatttataatttaaatataaattattaataattaattttatttacaataaatattgtaactaaaaatatatttatttacaataaattataatttttataattaatatatttagttacatattttttttgacatgagctatagactttttacttattatataagaatgataatttataattagttataatttttttttttatttttaatcataaattttattttgagtaatggtaaaatttgttgtggtgtatctatgattttttagagttttgttttttgattaacaaaaaatccatttaggattaattactttgccatttggtgatgtttgtataagtctcaaacagtgtcggcctcacttgtattgtgcgttagaaaaaataagttttttaggctctaattataaaaatagatattatttttaaaacctattaaaagaatatgtgtaattaaaagattttttttcatcatatgggtttctgaattgggtggactttaggtgtgggattggatgggccttagcttaaggccgatcttgatcccaaataagcccacgaccacactcgtaggtgtgaaaatttaggaaattacattgtatactcattttatgtttacttttaggactcgtttggtatgtcgtataagggtcgtattgtattnnnnnnnnnnnnnnnntatgtttggattaaacaatgtattgtattaattat

SEQ ID NO: 117489 - DNA, 795 bp, Cannabis sativa
atcttaaataattacaatacacacttttatatacaaaattagatatcaaacaagcgaaatagaaatatcggtacacctatatgcatggtggtgcaccttaatagcaccctataatgcattatgcatatcccacttgttgataatattaaggcaaacaatcttttgtcgaatcagcatcacaaatagaataactatcaatttgccttataatatcgtgaatatatgtgtgttgattagcacggagcagtctatggaacctgatgacttacctctagttttgacaaaaaaaaaaaataaataaataataaaatcattagtgctttagcacgtagataatagccgacgatatatattccatacatgttaaagagttcataattattttgaataattttttctcatttcaatctttctttttgttttaatatatgtttgagtgacataattttatgttctcttgatttaactaatcaagctagtataggatatgcacaataatttttatacagttgaataattttcgattgatatgactaattaaaactcaagtggtcaaaattattactcttagtagaacctctatttaagaatactctatttaagaataatttctaatttgttataaaaaaatcaaatcataatttgagctagttataaataaaaataacctctaaattataattagttatatattttctaagtcccgtattaacaaagtatactactatataagaataattatatcgcaataaaatatatacatatatattttgtaaatttatttatgtaaaatta

SEQ ID NO: 117490 - DNA, 2974 bp, Cannabis sativa
gatagttgtcaaagtttagggagcaaagttgttaatttacaaagacgtgtcagcatttaaatggaataacggacggaacctaacagaaggactaaatttctgcaaatgtaaaagttcaaggggattcttaacaattcgtatattttaagaggcaaaatcagtattgtcgaaaattcagggagaaaaattgctaattattcatttttttatgcattttaaattttattccatttcattcctattcatattctcataatttctattcttatgttttcattcttcacaaccaatcgccaccttagttcttttctatttttttaattttttgaaaaaagaggagagatcattgtcttcccaaatttattgagtcctcgcttacaaaggaaatgcagctagctacttatagaagttcggctctactaacaaagccttgactaatcttaggcattaaaaatattataaatataaagtttgacatatcggctagcatagttaaactaaagcagataaactaagattattggcctcttaaaacagttaaactaagaccattggccttttttccttcttataggtagtctaacaatggatttcttactttaaaagaagcataaacacgacatcccaacaataacaacaaaacaaacactttaattttcaggagagctaaggttttgcaaagaatctttgcagaggaaaatcttgaattaattcagcggctattaagctagaaaatgctgacaaagaagagaactatgaatggataactcggccaaattcttcaatcataaatagtgctacagctgcacactttattcaaagaaaatcccatgcttactaccaataagaaatcctcgccactagaaagaatgtagctcccaaggattcttttccaacctaaacttcgcttcctatttcccaccttgaactttaataggtagcaaaattcatcataaagagaacgcattcattttgaaggacatcttcgcttcctatttcccaccttgaactttaataggtagcaaaattcatcataaagagaaggcattcattttgaaggacaccttgaatcattctatatcgcaaatcaacatttcatagagtatcttagatgaccataatgacttcctcttactgtgtaccagagtgaactactggggaaatgaccacaatgccatgtatttattggggatcccagtttcaaaaaaaaaaatgacttgctctcactgtgtactagagtgaatttagtaccaaaggaaatcaccacaatgccatttcaattattagagcttttatttctagctgtaaagtttcaatttccagaccaccttcttcctttagcctacaaaccaactcccacaacaccaaatggttgcactttccacccactaaatcacccgtttcccagaggaaataattccagaatgaacaaagataaagggatataaaacatacataatatgcttcaaaaaggaagcaaaatttcactacatttttatagttacctatactttgtaaggagaggatcatccatcatttccctaagtaacaccccatctgtgagaaacttgatcatagttacaccctgttctgccaaaacaggaaaacgccattagtaattacactcatttactgattggtaagtcatgtcattttactgtcaaatgattttagttttccatgcgattgtaagatatgccaacacaagcatcaaaaacttttttcttctctttaagaaaatagataatccaactacagaattgctgagagcttaaagaaatataaaagtgtcttacatttttggtaaaatcttcaaatcttattgtgtagccaacttcctctccaagcttcacccccatttcttctgctaccctcgaagaaacagcctgcaaaggatccactcttaatatttgcaaaatacatatacatatatatcatttgaatgcagcttaaacaaaacaatcaataataggacaccacattgtacgtcattcatcagaccatagtaaaaataactgatatatgccaactgaattattccaagtattatacagagctccagaagtcactatttaacagtaaatatattatgtgttgtacaaacaattcaaggaggcaaagatatgacctgaaccgccagccgtcttggttgtgtacatgctattacacgcccaccatcagcccaacccgcttctttaaggaactaattacacaatacaataagaaacacatttgaatatctatatttataatattacatttttaattaaaaaaaagggggggggcaagagaataagagagtacaaacctgaggtatctgggtggttttgccgctacccgtttccccgacaataatggtagtagcatgtgtctccaccagataaagaatagcagtacggtacttgtaaaccggaagcctctgcttctgcctctcgatattcgaatacccaaatctatgagcacaaatttaatttatcaaaaatacacaaacaaaaataaaaatggaaggggtagaagaagaaaaagaaagataccctgaagaagaagaagaagaagaagcaccaaagaaaaggactccaccctcttcgtcgtctagaaggctaggcctctccgtccctggtttccagaactgcgacattgatgttcacgttgaaaagttcaccgagtggtttgggtacaacttcaggtttcggggtgctacactggttttaatttattttttttctttttttgaaatcaaagtccttcattttaagaaaaaaaatgcatagggtgagtcttgttgtgttgcattccacataacactcactttgtttaacaaaggtgattggctaatacatgagcgactagggctgtccatcaaatcgctcaaactatctacaccgcaccgtaccgcaaaaaaagtgcagtttaaaattctttacggtgcggtcgcggtttgaatttttcctaaaccgcactgtgcggtgcggtt

SEQ ID NO: 117491 - DNA, 614 bp, Cannabis sativa
taaaataatccttaacgaggtcaattaaagtgaaagagatcaaagatggagaagatctttatttataggcttagtacaatacaaaagaatgaatttgcctcagaacaatactaaagaatcatatagcattgttcagtgaggatatctttattaatatgcttagtataatataagagaatgacttctgttatacagaatttgttacagcaatcaagtggacaagtaactaaattgctaagccaaaaaccaattaaacaaaatttaactaattggttggttatcatctcccctcaaacgattgttgtattgacaaatttgagtttggttttaaggtaatgaaacctactcttaagcaaaaacttagtaagaacatctgcaacttggtccacagatagtacataacaacctaaaagttcattgttcagaatatgaacatggacaaaatattgatccatctcctaaaagcaagtaattatgaacaatatattattgtgttaatctgaaaattttctctgatggctggcgtggacattaatgtttgacacgtggtaagaagaatggcatcacgaagttgattagacccgaatcatagcagtcgacctgggaggggaccc

SEQ ID NO: 117492 - DNA, 1244 bp, Cannabis sativa
ttggtacaactgaaaatcaaaagccaagaggaacaaacgtatccagccattgtgtaaaccaattatcctttggcatgaaggttaagtgctacgtaaaacaaaattttcctattattctttaaaatgtgatttcatgataaacttttaagtgattttgcagaaatagtctttggatcttagaaaatgaaagaacacattgttaaaatattcttgtttatagtgttattccaatttgttggaaagattttcaaattatgctgcttcgagtttaaaagtgttgcctgagttcttacaagtaaaagcttttttccaatttgagtaatgcaagaggtaaaaccttgtgtagcatttaagtttaaaattaaatgtagggtacaaaataggtgagcccgggtaggatcttgtgtagcctcaaagtgacagattaaaagttgctatcaaatatgtaaaattaaaccttatcaaggaagggtttggtgtggtttcattttaacaaaattcattttgcttcccttcattaatagctacttacatgtaatattaacaaatatttttctttgcctattttgattggggatcatgtgataaaaaactttgtggcaaaaggaagaattaagataataaggtaacaaaaaaaattttttcattttgaagttctcccactcgagaaatatttaatgatattgtcaatatcttatggggtgtttggtacgaggtttagacttgatgagaatgatcagaatgtgaaatttaaattaaatttgaatgacaagggggtttgtgtttccaagtaggtctcacttttaaaattaaaatagtggtaatgttaatcccctcaaacgcatgagtttcatattccctagaactctactctctctaactcaagcttacataacaaataactcattaggtggcatttggttggaagaaatgaaaacatagttagaataaaaaataatatatatttcaatactttaaaatcaaatcaaataaaggaatagaacaaaagttatttctttccatttcatttccttcagccaaacgcagccttaaagctgtcaaattatcctcgtgtcatggactatatatttcttgataatttcaagtgttgtgaaaaataagactcatctatcaattgttaacgaggtatgtaattgtaggattttacttggtgaaattccaagtttaacctacaccactcaagaacacagttaaaaacgacaaggacagaattgtcctttaaa

SEQ ID NO: 117493 - DNA, 935 bp, Cannabis sativa
tttacattattttacagtgaatattaataataataataagtcaagagaagggtagttttttcttttggtctccaataggataggattagtcactcgtgtacatatgttataatatagtacactatggagtttacataagccacaaaatagttgtgaagttttgatgaattattattaattttggggaatgagttaaagtttgactgagaagctcaatgaattgccacttggtccatgcagcaatcaaattggccccatcatttacgaccccaccatatccaatacaagagtttctttcttttttttttttgaattggaagacttaattcatacatattttgatgtatattgtatagaatggaaaagggttgctttaatttcaaaagtagctttatgaagatcttttcaaatctctctcgtctgcactctgcatggggtgactgagtgagtgatagcgatactgatacccataccaccatacccgtgagagagttttttttttttttttaaattttttttattttaatatttattaaaattattctcttttgtgggaatttgtgatgaagtctagggtttaagcctgaaataattaattagaagagttaattagacttaacagctttttattttgagcacagtctcccactttaaagccagttgtagactagtagttgtactacattgcacgcttttaatagattctgttttcaagtcaagaattgattagtgttgagctttacgttttgtttttggctctaaatttgagaagaaaatactttatttttgttttaatagaagaaaatacctttaattacaattaatgaatatggaacggtgtacaaaaatgctaaatagaagaaaatccgggaagaacaccacctttgcaatatgatctaaagaaaggggttccgaagaataaatttattcattaa

SEQ ID NO: 117494 - DNA, 1837 bp, Cannabis sativa
cccccccccctaagctcgaaggagagtactcgagagagagcttgtgacaaaggaagttaaatttcggcagactaatggctttgtgagaagatcagctggttgttcttttgttggaatgtaggagacagtaactttgttttgagccaccagatcacgaacataatggacatccacttcaatgtgctttgtccgagagtgaaaaacaggattggaagttagttgctgggcactttgattgtcacaccagattactggagtgacaggaatggtgatgctgagttcttgtagaactgaggaaatccaaactacctcagcagcagtggaagacagcgatcgatactcggactcagtgctgaaacgtgcaacagcggtttgtttcttggagccccaagtgatcaagtttgagccaagcattacacaataaccagttgtggattttctatcatcaagattgcaagcccaatcggtattggagtacccctataatgtgagaatgtgtgctggttggaagactaaaccaaggtttattgtgcctttgttgtaccgtagaacacgtttgcaagcaatccaatgtgcattggttggtttttgcataaactgactcaacttattaatggcgtagctgagatcaggccttgtcaaagttagatattgcagggaaccgattgtacttcgataaagcgtgggatcattaaatggctcactgtccatggtgtacaatttgtgacctggtgtcatgggagtggtgcaagtttttgcatcttccatgttggtttttttgagaatttctttagcataatgagcttggttgagatatagagcagaattgtgtcttattgcttgaaaacccagaaaaaagatgactgaacccatggcttttaaagcgaattgtgagttgagaaaagagattagttgctgaatggcagcagagtcttccccaattatcagcatatcatcaacatagatgagtacaagcaagagctttccattatggttggagaaaaacagagagttatcggacacagaattcttgaattcccatgagagaagagcagccttgtgcttgtcataccaagcccgtggggcttgctttagcccatacaaggctttttgtaatttgcaaacatgtgtagggtataaggtgtcttcaaaacctttgggttgctgcatgtagattgtctcattgagatccccattcaaaaaagcattgtttatatcaacctgttgtatgtcccagttatatgtgacaaccattgtgaacatgattcgaagagtagagggtttagccaaaggactaaaggtgtcaaagtaatctactccaggtgtttgttggaacccctttgtaacaaggcgagctttcaatctttccacatatccatcagctctatattttattcaaagcacccatttgttgtcaagcacattcatttctggatggtaaggcacaagaacccaagtcttgttcttgagaagagctctaactttagttgacatggtattattccaatgaggatctacaagagcctttttgacagattttggcacaataaaaaactggttagaactagttatagtagcagctagagccttgggtttatgaatacctgacttggaccttgtttgcattggatgaagagaggttataatagtggggggctgctgtatatgagtgggggcagaggagagagagttgttttcaggtataggctgatgggaagatgcagcaggggctggtgtagtggtgttatttcgttgtattgaagttgggacaggggctggagagtgggagagttggatgcctgtgttgggttttgtgccctaaataaaaccctttaca

SEQ ID NO: 117495 - DNA, 1805 bp, Cannabis sativa
  modified_base (1685)..(1686): a, c, t, g, unknown or other
agcttgcaggatgggagaagaaaactgatatggttattagtgggagaagaaagagatgtagtgggagaaagagaaaaatgtggaaaataataaagactcttcaaatttgaatgataatatacgtgtattgcagttagtttactttaatatatttttatttattttatttataataattacagaaaatactctataacaacacttttttaaaaaatgttgttttttttttttatatgaggagtaagagacaatcacacttttttaaaagcgttgttatatcatatttaaatttattatttaaataaataatgtaaaataaaatgaatcaataacaacacttatttattaagtgtttctaatttaaatatcaaatgatgttgcaacactttttttttttaatgttactaaataattgttgcaaaatatacttttttctagtagtgctagtgttaggtggtcctgggctgtaggggtagtggctgcagagtacccttggtcaggtcttcagatttggtgcctccactcctagtacctccttgctttcagaacttacaaaaggtgtggttgtactctcctagcatgcttacattgtccttcagtctgtattcttgtcgcttcattctcttcttgcttggtaagattccaccaaattctaaactgtcatgactgaatggctttgtggaaggccaaaccgagtgacttcttgagaaccttggctgagtgactttttaagaatgttggtcgcgtgacatctcaagaacattggctgagtgacttctcaagagccttggccgagtgacttctcgagaaccttggctgagttacttctcaagaacctgggccaagtaacttcacacaaaccttggccgagtgacttctcgagaaccttgaccacgtgacttctcaagaatgttagttgcgtgacttcttgagaatcttggccatgtcacttcttgagaacgttggccgagtgatttcttgagaacgttggccgagtgaattctcgagaaccttcgctaagtgacttctcaagaaccttggctgcgtgacttctcaagaacgctggctgagtgacttcatgagaaccttggcagagtgacttctcgagaatattggctgagtgacttcttgagaaaattggttgcatgacttctcgagaaccttggttgtgtaacttcttgagaaccttggtcgcgtgacatctcgagaacattggccgcgtgacttctcaagaaccttagtcgagtgacatctcgagaaccttggtcgcgtgacttcccgataacgttggctgcgtgacttctcgaatacgttggttgtgtgacttctaaagaacattggtcacatgacttcttgggaacgttggctgagtgacttctcgagaaccttggttgagtgacttctcaggaatgttggttgagtgacttctcgaaaacattggtcgtgtgacttctcaagaaccttagccaagtgacttcttaagaaccttggccatgtgacttctcgagaacgttggccgcgtgtgacctctcaaggacgttggctgagtgactgcttgagaaccttggccaggtgacttctcaagaaccttggagtgacttctcgagaaccttggccgagtgacttctcgagaaccttggctgagtgacttcttgagaaccttgtgttgggattttatgccctanntaaaatctatttcaatataatcttttctattatcaatagaaaattagaaattatttatgtttacatgtattattcatgtttaaggtttaatatataatttctattaaatccagaacata

SEQ ID NO: 117496 - DNA, 1225 bp, Cannabis sativa
aaaaaaataaattatttagtttaataattcttttttgtccaacctaaacttagccaatgtttctttagaaaaccacaaaaagacaaaagccaaaacactaaaatatcacctaataaaatgagcataatacccttttcttagatcctaagtaacctgtaaggttaggggtagtttggtcataaccaatcaccctaaaacaccccgacaacacaaataaccactaaaacattttagtataactaaatctcacactattatcgtcttgaaatctttaggcaatccaccgggttttcacggttgtcgaactcgaaaatgtttaatttcagaaatactatttattttaccaacatagtctaattgaatcttcatagttaataaattatgcttatttatttatttctattaaaatatgtaattattacataataaacttactcagattataatcttatcaatttatgtacaatctatatacattatttcatatttaatataatatgcttaattaaacataactagattttcaagatattatagatacgatcttctatttaaaattattggaggcaagccatgatcttgtgtgatctcgcagtgaatggaaaactaaactaggcttcttaatatacgttgaaggcttcttttagatacggtgttacatgtccaccagatattgaccatacaggatgggatctcatttgggctagttgctcattcttcatccgaaaggaatgatgatttatggatctgacgcagttatctcaagtgggcccactattgaccttaagtatttgtgttgtatttattatggaaattccatgtgtcctttatcggaaacaagaataatagaaagaattagaagtgttcaaacgaaagattcggaattggttaagcctgaaaaggaagctttacctagtcgggctaaagacttctcaatatcagatattagaattgtaatgccctaaacaattaggcacgctgccgacaaccgataatgaaaccctaatcccgcttattcaaaattactataagggtaagagcggaaaaatttaaactttaagtgtaacaaagtaaaaatataacttgtaataatgtttaactttatagacaaatcaaaaaattacatgattcgggatcccacaaatattttcacaaaatatacaagtctatttcacgtgccgacctaagcggcaaaatcagagttacaaaatacatcactggtaga

SEQ ID NO: 117497 - DNA, 730 bp, Cannabis sativa
  modified_base (38)..(39): a, c, t, g, unknown or other
  modified_base (443)..(484): a, c, t, g, unknown or other
  modified_base (694)..(704): a, c, t, g, unknown or other
ttaaaccaagaattgccgttaaataggcacttttaatnnataaagatatatttatatatattatatacacacaccatattcaagattgcttataaaaacctcccacaactcaataaatacatgctaatcttcaacctaaatgataattaacatgtgatactaaaaaaaataagactatatccaatcttccattttaaatacaagcataaaaagaaaacaaattatatgtctcaagaagcaattttccaataatattaatttaaaaaagaaagtgagaaattaacatgatcatcaagaaaatgtttccacccatagaacaaaacaagctttcttataccatttatatttattaaacctaggataatactaatagttgtaaaactaaccaaatgttgactagaaaaattatgagatttgaatagtttatttatttatttattatnnnnnnnnnnnnnnnnnnnnnnnnnnnnnnnnnnnnnnnnnntattattattattattttatattgcataatccttggctgatggttcttgggccactacgtactgtggtccttaaaatgacaaatcaaattataaatgtaacatttcatagggatttttttgtattaattaagtttgttggaatcatttaattgaatttggaaaagaaatatattgaagaaaataaattttacaaatatatatatatatannnnnnnnnnnggtttcaatggttacatttttattgt

SEQ ID NO: 117498 - DNA, 1566 bp, Cannabis sativa
taacttggcaacaggagcaatagtgtttgtgtaatcaactccttctggctgattataccctttagccacaagtttggctttatacctttcaacaatgccagcattgtatttcactttgtaagcccatctacatccaatgacatgttgctgaagacgtaaagtaacagtaatccaagtcttgttagcttcaagagcaagaatttccaaagccatagtattgtcccaaactagaatacccttagcttgatgatataactcaggctcatatatgctggaaatagttggcaaacaggcacgaaaatttgaggacaacctattgtaatcaagaacctaagataaaggatattcagtaatgtgaggaaaaaattgagaatgtacactgttagtggacaaaaaacaatgataatcatgcaaataagatggctttgtgatgtttctagtaggtctattaacagatggtaatgctggtgtttgtgattcatgttcatcatgcattacaaactcggatggaagagtaacaggaatatcaggtggtattgctgattttggtaatgcatgattatcatgactatctgcattatgatgaggtgtagaaacaggaagtaaattaagtgagtcaggtgacatagttccagcagagacaaaacggaaaatttgttcatgaaaaaccacatctcgagaacaaaaaaaatcctatttgtgtttaagtcaagcaatttgtaagccttcattcccgtagggtaccctaacaaaacacaagcaatagctcaaggagcaaatttagttctatcagcccctaaagaagagacataggccaaacaaccaaaggctctaaggtgagtataattaaggactttagaatttagtatttcaaagggagacttgtgtttgaggttaggggtaggtgtccttttaatgaggtaggtggtagtgttaacacactctccccaataaggtaaatgaatatgagattgaaatagaagtgctctagccacattcaacaagtgttgatgtttcctctcaacaacagagttttgttatggtgttcggacacatgaatgatgatgtatgataccaagtgaagtgaatatctcaatgaattgaagttctttggcattatcatatctaattcctttaatgttggtattgtattgggttttaacaagttggataaaatctagtatgacatgttgggcatcagatttattttaatgagatgaatctaagtgtacctaaagcaatcatccacaatagtgataaaatttcttaaaccctcaataatagacacatgatatagaccacaaatgtctatatgaatcatgtcaaaataggctttggcaatattatgattagacacaaagggtaattttctttgcttagcaaaatggcgaattgaactatggaaatcaaaacagccagaatattgaaaatgtagatttttattcaataaatgaataaacatgaccaagtctataatgccatatagtatcatcacttattttggaacctaaaatggaaaaatagtaggtaaaacattatgtttcaagaagtagagttgcccaactc

SEQ ID NO: 117499 - DNA, 1560 bp, Cannabis sativa
tttgcctcttcaagttccttgatctttttctgggtcgaggtctgtcttgagagtcttttgttgctccttggcctctttcttaattttagagatctccaactacaaatcagaccattacttagccaaaacttcacaatgttccctggaattgtagagtttagcattaagcatctcgatgttttggacacctctttgttgagccaaaaaagataggagagatgcctgtgagaagtaaagttagaggaagatgtgtaggagaaaagggaaataaaaagaaaagaaaagagagagaagaagagaaatcaaaactatctgactgcatgaggtcataactccttgtcacaagactttggaagctacccttattgattagatcccagtcaccttgttcaaaggtcttataatgacaccatttgttgttagcatgcagcaagaaaatgtgcgaggcttctgtgccagcataaataggcagggggcaagaaggttctagcagcgccatctcgggatgagaaccagagaatttaacttgatgaacagacccaagggcctgttcaccggtgctcgcagtagctggcgcagttgaattatttggagacttttctagtttgatgttgagttgggtcgaggctaattttttgttggcagtagtcttggtccttttaaaaggttccttagttgatcctgaggtatctcttattaaagttatgcgcttcttggatttcttgatggggccagaaggactgcgcaacatatcttcgaggtctagatccatatctgtgagacaaagaaataggtcaacacttgttcaaaataaacaacaaaaatgtgcagagataatgtcccactcacgaaaattaccatagtcatcagtcgaggatgatgaactaaaataattactaaactccctagaacaagtaatcatcaaaaggtcaaggtgtttagaggagacatgtcccaatctggatggctcgccctatcgaagctagtgccatattgttcggctattctaaagtaagaactattaccttaactgtacatcatgcttggggtaccaactgtcaaacctgtgagcaatgcgatctacacagttccaaatatagaagttgtattgactatccctaaactcaactaaggttgtatgctcaactctaagtagagtaggggaccatctacaagtaccaaagttattaccttgggtggcatcttcttcagcttccaaaggggctatatattcaaataatgggtgcgagcagtataatccctgtcttccttgtcagcaagaatggtaacttgttaccagtctgaatactttaggactttgaagtctccagtagattgtttgctgctgagaagagcgcaggccttcaagttgttctcgtgcaaccagaagtcagttgcttgcaaacccaaaaggaagaccaagaagaatcttatgcctcctttcaatttctagagctggaacaagcctccttggaatcgctatcaatacaacacaaacaaatgagtaagataaagcctacatttattaaaattaaaactcaaaaccaagtttttgagaaa

SEQ ID NO: 117500 - DNA, 1039 bp, Cannabis sativa
aaataagattatattgaaatgtattttatttagggcataaaatctaacactatattcatgggtaattaatgatatattaattacctgatttccaatcatctactttccttttttaacaagatattattctctgtccaaaagtttagaaaagtaattcttgatcttgtgcgaattggtagaaaacatgtaactatgatagtcttctagatacacgttgaggacctcttccagatatacggagatggatcttctagatgctgactaggcttgacaggacctttcctaggcgagttatgttattattttcttagaaggcacaatgaatcatgggcttggcccagtttatgtcatttgttttaaactaatatttagaatccacatatccattaccagaaacacgaataacagattatttttcagaaatggtcaaatttttacaagtgcatatacaaaaatagtcgcaaatcattgaaaaaaaaaataatcaacttgtatataaagacaaaaaaagatagagattatggaaatccaatcgcaaacctatcgaaatgtcatcaagaatgattggcaatatagaaacaaaaagattaaaaacatatgagtgagagagggggtacgatctgttgggatgtgggtctcgacggggtggattcatgcaaaaaacaaagtgtgggggcgacagtagggctgggtctcaacaggagagacggagagagagggtaacaacagggttgggttttgacacgagaaagagggatagagggtgacaacggggttgggtctgacaacaagaaggagggcgacgacagactgagtctcgacgaggctgggagggtgcgtgtaaaaaagaaagagagtgaaaaaggaggagagatttagagagaataggaggatatttgggtaatttggggaactaggtgaatacttgcataaaggggagttcattttgcatcccatacaatgataaatacatctctattattaaaaaaaaatataaacttaataatttttaaaaattactcttaatatttttagatcg

SEQ ID NO: 117501 - DNA, 1736 bp, Cannabis sativa
  modified_base (27)..(47): a, c, t, g, unknown or other
gcacttagtgcggattggatgttgttnnnnnnnnnnnnnnnnnnnnngatcggatgaacacccctaagtggggggagaggtagatagatacccactaaattaataataatcctcaaaagaaaaagaagtaattttggaagtaaggaagtggaaacaaaaagctaattcgttttttatgtattttatttttcatttcttttttgatactatgcgtttatatatataagatgtaaatcaatatttgtaatttcatcccattctatagtatagtaagaattagtggtggccagaggcatggaagtagcggagaaaagcaataataaagagcaggtggttttaaccatcgacccaccaccaccaccactaccagatcataatattatcagtaataatcacaaaatcttgagacgtctcaactattcaaaaccaaggtctcgattcgaggagttcactcatcccttaatccctcccaacagagtccccgaattctcccatgaactccacccaaccacaacttcatcctccgatgatgatgatgatgatgatgatgatgagaacgacgacgccgagtggtacggtgaagtctacaacgacgaagaccacgaccgctacagaaaacaacaacgaagacgccagaaaaagatgaacaaaagagcagtgatggaatgttctctgtttctcatcataatgacttgcttaatctgttccctcactcttcaaccactcaaacacaagaggcaatggagtttggagatctggaaatggtgcctgatgatcatggtcgtcttctgcggccgcctactctcgggctgggtcgtcggtttctccgtcttcctaatagagaagaatttcatgctcaaagagaaagtagtctatttcgttcacggtctccggaaaagcttccagaactgcgcgtggttagcactcgtcctaattgcgtggatgatcatgttcccggacgttcacaaacaccacaaattcctcaaaaagatcttccgattcctaatcgcaatcttagtcggcgcaacgatttggctactgaagatcgtgttcgtcaaagttcttgcatcctcgttccacgtggccaccttcttcgatcggatgaaggagagcgttttccaccattacattttggacgcgctctcgggtccgcccgcggatgaagaagaggatcagatcgaggagacgcggcttcggcggcttaaggcttctaagtcgatgccggctcggctgatgaggcagcaagatgggtctgggaggaggaggattgatatggatatgctgaggaagctgagcaggcagcgtcgtgccacggcttggagcgtgaggaggcttgtgactcacgtgatgtcttcggggctttccactatatcgaccatggttgatgattttgggaccactgagtccgaaattaccagtgagtgggaggctcgtaactcggccaagaggatttttaagcatgttgccaagactggtgccaagttagtttatcatctatactctactctcacttattatttattatacacactaattttgccacataaattaacttcccctataataaataaataaattctatccttataaataaatatttaaattaatttttcactacaataatattaattggtctaaataatgaatttttttttttttatataaaaaattaatttaaatatactaataaaaaataatatctatatacatatatactaggaaaattctacaatgca

SEQ ID NO: 117502 - DNA, 795 bp, Cannabis sativa
tttttttttttttttttgtcgtgtttaccttttatattactctaagcaactcaactaatttttaagttcctagtacatataaatctaataattacaagttgatcatgaatattctaagagaaatgataaaggggactttatgtgtcaaccacaacaagtggtatattattattgatgcaaatgagtttgatacaatttaatttaataaataatataataaattgttaatcaattataaagccctatcaccaagttgttaggcataatattttaataatatatatatactacatatattaagttttattattgggagaaatattcagatatatcctgtaatctttgtagagagagagtagtgtagtggcaatcgttgctaatggaaatgatgtcgatagtcactctttttatatatttatatatatatatatgctcttctcaattaattcatatatatatattatagtatatatgagtgtatgtgtatgtatatatatattaatatatggtacagttaatattaattacttttatcaagttatttataaaatatattccctattagtgggacgggcaagtgcccagatcattggttaagaatattctttaatatttattaaattaaactatccaatatttaattgtaccaataataatataacacttaaggtaatactaatcaccagggccggccctaggcataggcgggctaggcccgcgcctagggcccacactttccgggggcccgaaataaaaaaaataaaaaaatttatttaggcttttatttaagtaaaa

SEQ ID NO: 117503 - DNA, 2135 bp, Cannabis sativa
agttcagggagcatgatttggtacatgtcaaagtttgggggaaaaaatcctaattagcctcacaattaatcttaagaacatctatattcaatttcatctaccgctctgaagacctaaaagtagaaactgttgtaacaggttcattcaacctcatagcttaaacacttaactattgtgcaagatacgtaactgcactactaacaaccctttcattcacaaagaacttgttattctcaaccacactaacaacaattggatggtaagctatcaaagaacaagaagacaacgaaacaaaactaaactaaacgatattacagaaacaagattaaaacactcaaaactaagtgacagagacaaaactaaaacactcaaaattatgtcacagaagtaagactaaaatactcaaaaccatgtcacagagacaaaactaatcgcaatagcaaaaattgaatcgctataataaaatacaatcccgaccaagtcgctcttatgcctaaggaaggccggtgagaaaaaaaaaaaacacattgtagttataaagggatggaaaatcctattttagatagatttaatcacttagcaattatcaaagttttatcttcaatatggttattaaagttttatcttcaataataatagtaataaggtgtttttcatttttaaattttaaaataattttttgtatttttataaaaatttacataatagctaatagagcaacttaaattacaatctaaacccatataacaatttacataaaaattatcggaacaactcaaattgtaaaaataaaaataattaaaaaataatatagaaaataattcccaatattatttaggagtgtctgagttgatgaaatcaaatcccaactgtgtaattttgaaaatgtaatataagacacttctatctaaaaagaaaaagaagaaataatataaactagatgcccttatttataaagacaaaagtgacccttttactaaattatttgtctcatatatatatatttattttaattttaattttgtcaattattcttttgttggctcattgctaccacctacttaaaattaagaacctagaagaagtatagacacaccggccattactcctctctctttctctctctacattcatatataaatatatatatagtttgagctttgttgctatatataataaattcatgataaattctttagtaaaaggctttcttgtttcaatactatatatattcatcaagaaggaatattaagtagacaaattatttattatatatatatatagtaaatgatggaattggttatggtggaatcatcatcttcatcttcttcttctttagagaaaaatattaataataatgttataataaaatcatcatcatgtgaagaagaacattttcatgtattggctgtggatgataatctcattgacagaaagcttttggaaaggcttcttaaagtttcttcatacaaaggtactcaatattaattaattttcttagaattaattaagtatatatatatatttaatttgctttttaataaatatatatggaaatatttaaaaagatatatagtctcttcatttatattattgtttggtaactatatattgattgttatccttacaaaaaaaaaaaagtatattaatttgttatgagatttggaattaattaatttgagttcatatatatatatttatatatatagtgacatgtgttgattctggagatgaagcactgaaatatttgggtttggttgatcataataattcagacaaaaattccattgataatgcttcttcttcttcatcatcatcaacccccaactcaccaccacaagaggtacatataaataaatatatatatataaatattataaactgtattaattttcttttgatgatcaattttcatgccagtttctattatttgttataataagttaatttctagttgttaatttttatattattgtacatatatatatatgcaccttatagtaaagataaaacttttaaaattcttttatatatgaattaagaaaagggtagatagtggcataagtacttaaagttttgagtttgtaagcggcataaatctaatgatttttttagtggcataagtacccaatgtt

SEQ ID NO: 117504 - DNA, 1079 bp, Cannabis sativa
tacataaataaatttacaaaatacatgtatatattttattaagatgtaattactaattacaatttaaagtttgttcttatttataattggcccaaatccagacttgatttttttataataaattaaagattattcttaaatagagtattcttaaataaaaattctactatactaataatttcttgcacaaaacctaatttcttcaatcattatcataagattttggacaacaatggcggaattttgtaacttaatttatccaaacatttctttaaaaaaaagataaataacaattatcaaacattttaaattaccacaatctccttcgtcatccaatggcaaaatggcaccattttttgaattactccgctcgggtccaccaagacacaacaaacgaatacaaccgttataagggtatcatcgtaattaaatccaacttccaatggccataataaccagcgccgaaatttcagagtcgtccgacgacacagtctcgttccccgaaaaaccaagctcggaaaacgataacactttgctcctcacttaaacgacactcgaatccttcattaccctttgaatttacatttctacccttctcgcccgttcaaattcatgacccaaaaacctccgctctctcttcgcgattctacccaaactgtatgggtattttcgtaatatagaatataataatatattttcaaaattttcattgctccgataaaaaaaagaagaaaaaataaactctttctttggatactacaaaacgaaaaagggtagtggtgtggttgggttgtatcgttactttcgtatcgcagtgataggacttgtactgtgtgctgtgcatagttgtaccttcggttttgagttgtttctattaagcttcggttgctgtacattgcagcgttctaggcctctgttaaccggagctctggttttccgatttagggttattcgcctccgatttgatgctcattctctgtgtgattggtcgagattcatggtagtgtttcgttcacgtgacgctttggcattgtagagagagaaagccgaggagcgtgatttagagagagagagagaga

SEQ ID NO: 117505 - DNA, 1717 bp, Cannabis sativa
gttctacccccatcatcaaaggctaaccaagcctatttaatggttgtctgtcataatcatacgagactagacggttgtttgaaaaaatagtagaagtcctatacgtcctccttctagcaagtgcaacctccttcacctcaaactcattattcgaactctaagcaccatggtccgccacaagcatctctgcctgaccaacctctagatctctaccatcaaggggttttgtggcctcctccactataccaaccctgcacattgttgccaacttggcaatgtgcgtgtcaaatggtgttgcactacggtactactgcttagttctggccatagtgtatcaatgtcatcccggtgacaactcaaaaggttgctagggaatagactggatggtagctcacagaagcattactactggacctacgacaatactgttgtcacctcccaagaccaatactcgaaatcaccttcatagaaaagacaaggggaggtgagcaagctgacaaagttacaaggtacaaataaaactttggccaattgtacgcaagggtacttgctagataaactacattatacaaggctaggtatcagcgaagtactgtcttaagtatatacctacttagaaaaatggcgagtcttaagttgtgtatttgactataacagactcatcaccatgtcatatacagagttcccaagggaaccacgtataagattacagttgtatatgcctacatggacgtcacaaaacccttgtcgaggttaaaagaggacaaaaacttggctcccgcttggaaccttagccttggccagctaaggttcttaatctcagagagggcagaccaagtcccatgatccagctaagggccggtcagggactctattcctaggcattggctggctagcttttagtgtaccccctatggacggccagttcccatgagaaagaccaatggccaaccaagtcttgaacaagacccctatgggcgtccagggtgtgcttcaaatataaatgtgtgattttcaagaactcgaacacgttctttatgtcctttgtgactcaaagagtcaagattaacaacgaaggtcaaaatcatatcttttttgtcagtaaatcacactttatacatcctaagactatgatgcggatcaaaatatcaaaaagattacaatccaatgtgggaatcaaaaaatgttcaaagcgaaaaaaaaccttcatacagccatggcaaaatcaactaaaacaaatggataactggattagaaagcttacccactactagaaaccattagtgaagagggtgggaaacttgaatcattaaaatggcacaaaaatctcaatagtggaagcacaatgggcgtcagcctctagagacaaggaagagctttcaagagttactttcatagagagagattgaaatgtgaaaagttaaaagtggtttcccacccataagtttatatagcttctacaagacctcttttttttttttacttacgatgcatagtgtaaataaagagcatgcagaagagtactgccatcaacttattgcaaagagtgtgaatagacaattgagaacagttatttcaaaggcaaaatatgctgcatgatttgtatagttaaggctacatcagtctcaactacgctggaaagtccctatccacacatacgtttgaacagggacttggggggaaaatattatctcaaaattggcactctgatgtggca

SEQ ID NO: 117506 - DNA, 1002 bp, Cannabis sativa
acatgcatatgctaagaaggagggtatataagtccaactttacgcaaaaatcactcctttgggttccgtcgtcaaagatgtacgaacactcttcggagtttccaaagtcccaatatataaaaaccaacgtaaacacgaaaaggaacagttcaatttcttatctgggttttctaaaaactctgcctttttctttgtacaaagcccacaacaatcttcggaactatatatcccatggctgccattgctggatcaaacgttgtagtttccaaatcaaccagaatttccagctcattctttgaccggaaagccccacattttcggcagtggtcccccatttccggtggccaatcactccgccactccatctcccttcagtgcaaatccaagagttcctccggtggtacgattacttgtttttcttaatgggtttgggatttcgatgatggtagttcctcttcttcttcttcttcttcaggtgttgttaaagctcagggagcaagtcttgaagaaacaagcgccggagtaggccaaaatgtggaggctccggtggtcattgtgactggtgcctctagaggtattggaaaagctactgcattggctttgggaaaagctggttgtaaggtttgtggttttccccttttaccaattcattgagatgatatttgtttttttttttattagcaatattgatgatctttgttgtgtgtaatttgttttttctttttctgatatagtgctatactattactataggtccttgttaattatgctagatcatcaaaggaggctgaggaagtttccaaagaggtgagttccatcaagttctattcatgtttgtgttatccctttcaatataaaatataaatatatatatactgtgcttcgcggttcgcggcgggcggatgtataaagtattttaaattatatataaaaaataaattgtatattttacttaaaaataattacttattaaaattatattaaaattttgaatttactatt

SEQ ID NO: 117507 - DNA, 1429 bp, Cannabis sativa
tgtcttagattcatcatgacctctaaaatggtatgcttgacatgtaagccatcaaattccttcaattgaagttttcaaacgaagtatattttctgtaatttcttgtgatgtgaagttctaaaattttcttacaacatgtgttggttggttgataagatcatcaacttcattctcagcatctctgtgaggagaattaatatcttttgcaatatgtgctacaagtgcataattttttttcctctcaccattttccatgatcgaaattcattaataataaatgcatcaaatccatatggtccatctgtatgcatgaaaatagaaagagtagaagaaaaaatacaggatttactttaggatcagaacattctagccatgatagaaatagtttaaactaagattacttaaaactatgtgaatgtgcttcctatgaatttcgatagctaggatatataatataatatgaaccaaatttaatataagttctacgaacttcatcatgcttctgaggtggatagtcccatattggttgctgtattccaggattacgctctaacaaattcatatcaaatccttctttaatgtcagctttaaagattttctaaagcaatttttaaaattttcatgagcaatatatcaagaggtggaattgatgacatgttagaagttaaagcttcattttttttttctcttaaaaaatatctcgattgtagcatgttttatcatctacaaataaaaaatcatataatgatacaaattaatcaaattataaaccaaacccataatagataaataacatcttaacaataagacaaacatgttaaaaataaattttagactcattttaaatcaaaattaaaaaaatatagacaattaaaattctatcataacaaaaaaaagagttcgaatatgaatattaagaaatatattataatttatagatcataaaaattcaattatataattgagaaataagaagaaaaaaaaataaacattttatactataatagtctactttatatataaattttatcaataaaacattaaaatattataggaaatgtaacttttgtcagtgcatttaacaaaataccctaacaaaagtttccaacaaaagattaaaaaatcaagtcccaaattgttcaaccaaaactttttttgacgcatatatgcacatgtaaaaagtttagtttgtactgccttttggtgcaaacaaatgacagtaattcattaacatttttgaatggcgtaagggagttgatataagtaattttttgtatatgaaaaattatagcgacgaatataaacttttgctgatgcaactgtgcgtcggcaaaagtctcaaaaaaataggtgaggattttcccacgtgtatttatgagttttacagccgacaccgcctccactacccttcctctctctctctctctct

SEQ ID NO: 117508 - DNA, 1174 bp, Cannabis sativa
gggggccatggccaccccataccataacatagttccgccactgcaattcaatattaaatatcacatataataatatgtattatcctattcctatatcctatataacatattaatttaacattgtatgctaaatcataataataaaacaaaatggaaactttaagttcaaaggaaaattgtaaagataaattaacaaacattataaatagattattaagtaatactagagtagtggtacatattaaaaagaaaattaaaatgaagcatactaaatatactgtaataaatatgataatttattatattacagtatataacaattattaatttctcaaataaaccttagatgttactaaaatgtatatcttaactaattaacactaagatacgtataataatataacttaaaataactaattgataattgatatctatactaataagttatgtggtcaattattttattttattgtaacgtattaatttgttaaacaggtttaaggtaacataaaaatattttaaacaaaaacataatataatataaccaaaaaataaattcataaattcaaagataactaatcgaaaaatgtaataaatgtatatgagataattttgattttaaagtattagttttttgaaaattaagcaattaattagtatcttatataatatatatatatgggcatcatatataacctactatatatatagttaaaggttgtctttttatacctagaaaaatacaaaatttgaggagatttctgtattttttttgtttcgaattctagtatagttattttggagtttatgttattttatactaagggtgttaacagtgtaagtatatatagtgtgtgagtgatggttatctatttaaattttttagactaaacatatgttttgcaattattctcaaacctcgctatggcacctcaagactccaaaattaataagcaaaaatatattattagtttatatatatattatttatttaaaaaaaatatggacaacataatctgcaaaaaaattcagacatgaacatatcatatatcaaatatatttcctatatgtagtaatatatatgagtttaattaatattcaattatatatagtactactgaaagcatggtataaaaaggccatctatggaagcacagaatacacatacaaaata

SEQ ID NO: 117509 - DNA, 4761 bp, Cannabis sativa
  modified_base (404)..(408): a, c, t, g, unknown or other
  modified_base (551)..(560): a, c, t, g, unknown or other
tggtcctgatgacccaacagcctcgataaaccaacatagactcgcatgtcttggttctatcagctcgttatacgatgtccgtaaatgcgactatacaagagcacaaacatcttagacccaactaagtgttaggtgtattctaagtccgcgagcttacgcaagaatatgaatagccaactcgcatattagaagtcgcatgcgttgttgtatttagtgaatagaaattgttcttcatttattaatgtctacgttttttagcttaattatcgtaaatcaatgtacaaacggattgacaatgaatgcaatccttgtgtaaatgatcggacacttgctttgtatataaaggagtgatcaactgtgaaatgggacacctacaaactccttgcaacagtggactaagcagnnnnngatctgactgaaccactatatttcgtttgttttcttgatatttccagttttcattaagcattcatgttcccaatttgagtattcgccgttctaggttgaatactcgcacttgttcatcatattgttattattattattattannnnnnnnnnatttttggtgttgcaaaatttgctagacaatagtactcttgggctgacactgtagatttgctgtcacgaatcacaatcgtttctagttcagcgacttactgaaccatcctatctatctcatctatagatagtgagccttgacgcacaaccctggcattagaaacctcctcctcagagatcgaggtgggtataaagttatagctcttctccagttcatcaggaagaggcctcgcctccagagtcgagcatttggctatctgacaggtcgctgatctaaaagatagaagatcttttcagtgtggtgaaagtccaagaaaaacacaagtgacctcacccgcataaaagaaattcataaaatatgaaggatgaactagacatctcaagaaatggttgggtctatctcaataacataatgatcatgtcgctacatgagaattaaggaactgagacacacccaccatttcgagaactcagccaatccttcgatggtataagtcacacatgtgcaactaaaaacatgtctcaaagaaatgactgggagtttcccaatgacccaaggggcatgagtttttagtatgaccatagagatactgggacaacccaaccacttcgagaaatgtggtcggttcaaacatgccacttaaaagcgagaaaagtaaaaactggtcgcatgtctcaaatggctgggtgtatacagtgacccaaggaacatgcatacactcgcatgaaagcatatgtaaatcaaaaggctaaaattaaatcctaagtcctaactgggattaaaatagctaaactttagattagctaaattatttattgtatatgtaagtagtcaaggtgttcatcctaaaattcgcgagtattcaaaatactcaacaagaaagatgcgaacactgaaggttctctttctaaaacccgtgattattcaagttccaggtccatatttcccagagaaatgcctagttttgtcagaaagcaaataaagttctacatgtacttcctattatctcatgcattttctaaagcgcagaatataaattgatttgcaaagcaaacggaaaaatggttgcaaaaaattttccactaaccttgaaagtgtcgatattcttcagtcaattctgtgaatcagaagcctccaagtacttttctagaaaagaaaagaagaaatgtgaaagaggtttctgaggtttcgaaaatgagagagaaacaaaaatgagagggaaaaaatgaaggatcatttcgtatcatgatggataaataccattatccctcattaattgggatcgacacaagtggcaagagaatgcctaaggtctcacaatccaacgattatccatataatgattacagcggtcttttcaaaacactcgattggacaaccaaaggtcaccatctcgtgacaccctttcacctgcctctcgcttatagtttccctcatgacataagctgctagtcgcgaaactaggggcatgtgttataatgagaatttctcacctagaaactagagaccaaactcctataaaaactatacgtggactcactcttcttgaggagggttgagatgtcagtgagagacctcttgagtgtaagcctcgtctgaaccagactcaaagggatgatgtgaccttgatagtgtttaatcgcattcgactagctcgcatggagcaggatcgaagatcgagttaagactcgcatatcccaagatatttgtgaggactataaaggtctttctgcgaagaggaaaagatcgcttctctactcagcgagttggtctggatgacccaacaacctcgataacccgataagcactcgcatgtcttaagttatcgacctattacaggatgtccgtataagcaacttgaataggacacagacatcccaaactccattagtgtcgtacgcatcttaagcctacgagcttatgcaagaatatgaacagacagctcgtactatagaagtcgcatacgttgctatatttagtgaattgggccgaaattattcttcatttattgtatttacatttttatttatttaattgttatattcaatgtacaaacggattgataatgaattcaatctctgtgtaatcaaaggacacttgatttgtatataaaggagtgatccaacgtgaaatagaacaagacagaaaaccctttcaacagtggactaaggagaccgtgatctgactgaaccactttatttccttgtgttttttatatttcctgtaggtctgtctattcataccttgaatacccgccattctaggttgagtactaccatattttctgtttatatctttattatattatttattttggtgttgtctaaattcctccaacaacaatgggctctataggcctttgttgcttggagcgccagtcattgacagctaggatatcgcttttgggctcgtgatggagtttccgagcatagagcttcctagccttgctggtctcgccttcaatgtgggttctggcaatgatgacccctaggtgtcctgccacaggtggtggcattggatctccattctaggcatcttgcgcctaagtttggtcatcttgcacataacgacacatgtggcgattgttacgccttatttggtattcaatctccctcttcagattttgacactcattggtgtcatggccgaagtcattgtgatatgagcagaactttgacatgtccctcttgcccatctcctttttgataggaaagggctttcagtatggaaatgttccatgagtggccatgaagatggccttaggcttctccattaggagggtgaagcaggtgtacttctcctccttatttttttggggtgtgggagaagtgtggaacttcttcttttttcccctgttcctcccagagtttttggtgttgcacttgtttctagattttttgacactagaagtctaggaaaaattaacggtatctacctatgcgtcgagtgggtcatgaggctgctggatgccttgtggctggctattcttgacatgccccaccagtgcttctcgtgtggcttcttcaagtttgaaaaattcgttagctctatcaaggaactccttcatgttgttggtagagattcttcggatatctttccagaagtcactcaatgggagtgtgccccccagtatggccatatattggcctcttctatatggcctttgattttgatagcgttagccataaacactaaatgtaatcctttaaagattccccttgtcgttgtttgacttcgacaaggtcttctagctgtgatagtacaagtgtcaaggacgagaattgtgtatagactttttgtgaaaactcatcccaagagttgaattttcctggggtgagtttaaagtaccattattgtgctatcttcgacaatgtgtcagggaatatgcaccatcgcacatcactattaaccttctgttgatcgtgttgcatctcgaagtatttgatgtgagccagtgagtcttctcacctagtatacatattccatacccgcatttctaatttaggcaagggcatgccatttatgtatgccgagaatggtggtcgccttgatcgattaagttcaatgtgtgaaggcttcagactagctatgccttggatcatgtccctgagttggtgcaattgtgtttgcccagaaggatctattgatgtggggacttgacagactgaatctccttggggaggctgtagattctacagagataggggttggttggccataccttgggagagtgtatggtgaaggtcagccagacccgtgttgaacagtaggccctagctggccattctcatgtatgggagctagccttggtcgaccaggcctacaccatgctgatatgcttggctggtcagacctgcagtaggtagggtcgggttgcctagtgctcctccatggctggtcggacctgcaaagtgtagggtctaaccgcttgtgatgcttccatggccggccagacctgcaaagggcagggtttgccacttgtgactccactgtagactgatgctggatgtgtgttgactgggggtaaatcacacaattcctggagtttggtggatcaaatgtctgaagtaatcgatttcactccttgaatcaccatatttggtgtgtccacctgctatgtgtccttgtctattgaagatcaacgtctcggcaccacactccccttggagaggaagtgttgtactgttgggttttatgccc

SEQ ID NO: 117510 - DNA, 2036 bp, Cannabis sativa
ggtatacatattatatgtcaataaaaaaatgaatattaataatggagagaatatatatagacaagaagagtatcgacatcacatttcaattgtcagatttatattatagaagatgtttttcaattaaaataataataaacataaaccatcaatatatgcatcatacatgcatcatcaaaaagtatatatatatatataatgaatgataaagaattaaaactcaccttgatgttgatatgtgtttgttcctctctcagaaaaaaagaagaagaagaaaatagctgctgcaaaaaaagaaacgaaagagagaatagaaaagtagtttgtttagggtttagggtatataatatatatatatataatagggtatataatatttggtggcaaaagtgtctttttgtttttaataataaaaaataaataaaaaactaaaaaatagcattacccgtaatggtttatacctgaagaaattgggaggaaaacttctcccattcttttctcctaattttatgcctttcccttagagcattcaaaccattaaataaagtaaacaaatgaaaaggagtgattaccatacctatcactcccaatcctgattagtaaacatgccataatttcataataaaatgaaataaaatgggatggaaagactataccactgtaaaaactaactttcaaggggtattattaacaagtaaaaaattataggggcataatttagtagtataaaaaattaatagggtaaaattaccaattatttattatagtttaccacgcgtattaaaaaagtttcaatcttattttcgacaatgtataaattatttgaactttttaaaaatttatagagatgatgttgtatatataacaaaggttaatatgaaaaaaaattagaaaaaaaatattttaacatgtattattagacataaaaatttaaattaaaagattgtagtaagagattgagtttgaatgtagatatatttactcaaaacattaattagtaaatggtcccccacttgaaaattttattttatttcctttctttttttctttttttaattttatttcctttcaataaatagttgttggtcctttgagatgaagcataagtatgattagggcgtgaaccttttgggctctacttttgggccctgcattttcatgtataacatgaagatgctttctctcttttttataatttcatttaataaatgttttttttttttttttgaaaaaaaaaaaagaaaatatttgaaattactaaaccaaaagattatttggatcccacttcatcaatgtttcttgagttttctactctggccaccttcatgtaattaagtctaataaagtttttgtttttgctaattattctcatttttttaagcttgattgcaagtcattagaaatttaaatcttgcacgtgccaaaaagtattataaggaaatttattagagaaattatgagaagtacacttttcacaatctcaatttgcaaaaagactgtattttcaaaataaacatttaggtcatgtttactgtttagtgtggtacaaatgttgtcttgtattaatgtcataaatatgatatattgagcaattgttaaggaaaaaaaaagtactaaaaaaatggtttattttgtaaaagaacatatttgcaaaaattatgagaaattaattagcgggaagcaatagcaataaggtacttaatttaatctttatacctgtttttactttattcagaataataataataaaatctttacacctattaattaattctaataaacagtatatatttgtgagtaatttgaacaaaatgtatgaagatttcaagttttagaacattaaaaaaatattgtgtcaaattgtggaagtgatgttgctaactcattgcttctctttaatctctttctattattttattcattatgtgctcgtttggtacgccgtattaggtcgtatcgtattgtattatattatattaaattgtattttatgcaatatttttacataaaactatagggattttttcaaaactata

SEQ ID NO: 117511 - DNA, 520 bp, Cannabis sativa
taaatctagatcttggtaaaatcttcccaatatagtatacgggacaagtcccaagatttcttgggattgtgtgagaggtgtgacacataagcagctcacgataccatagactgtcttggaaacctttctaactcccatttctggatgacctcttgatgacattcccgtccagttcaagactcttataagtctcattaatctttcaaagtgtgtaactctcgtacctaggaatcagagtgtcagacatgatccaaacatgttgtccgaatttgccatcacatgtaaggaaaattgccacgttagtgttcttgagttagatgatgggcctgatgtcctttgggcctctgtgagaggccatgtgtcacctatcgaaaaacgccaataagattaattctctatgtgctcaaaattgataggagtatatgtagggccgaccctgagttgaaatgggccataggcaaaaataaattttttgggcccttactataaagataaatagtatttttaaaaaattattaaa

SEQ ID NO: 117512 - DNA, 1752 bp, Cannabis sativa
  modified_base (1697)..(1707): a, c, t, g, unknown or other
cctggtaaaataaattccatcaggaggaacatccataactgataaaggcaaaggcttgccacacacaggagagaaactttcgccaagagtaagaacaggtaaaatcttgtcgtgctcaaacaccaaaggaaaccccatctttaccacacgattaatcaaactaggataaggaaacgtgtgtttcacccctttagcagtagtagagttcattatccaatcatacatgagtgaagaaagatcaatactgacaccagtacccaatgcaaatagaaacattgctatgctatagttgatagtagagatgtgtaaatttgcccactaatttgacagtgtaattttgtgaagaactctataaaactctgttacaactgtgacaggtgactcctttccattctagacagactcagagttgcttgtgatctcagaccctacttctttaaaagaaggcttataatcctcaatgaagacatgattagaaatggttttgatctccacgacacatataataattgaatgggccaaacaaaatcgatttccccgaatataagcaaggtataaaaatttgcttttcttgttcaaaatgctctcattaaggttagcatagaactccctaactagattctcatttggcggctgcaaatgagtgacagacaacaaccaccctctttgttcaatcaactcacaaattttaggaaaatatttcagtttaactcaatattcaagccataaagaatgaaaacaaacattatcctaaaacttaagcaacttatcattcgaatagaaaggcctagtcaattcgtttggcacagacacactagggtttgaggatgaacctggttgagaacttttggctttcttaggaacaaagatgtgaggagaaccaaatgaaactcttttccttgacttagggctatgaggcttggatgggaacactcagtatggttcatggatggttcagtgggggaaatagtggtggaacgtggtgcagcaaaaggaatagacatagaacgtgtaaaacgcctgggtatgctagaagaagaagagaccttaccttggcctggtgtgtaaggggacgagtcagactcagctggtgaggaatagggactcacagccttcaacaatgacgatgaagcatcaccaaaaagagacgagggtttgactttacggcacacttttttccccatagttgaaccttaaaaaaaacacctaagaagacacacaaagaagatgaacagtaccacaaaatggttgagtgtttgacttaacgaggaagaaatgaaataaataaagtgaaaacgcaatggtaacttcagatatttattaaccacaagagaatctaatgacaaaaataccctttggcccatttaaagaaaatagcccaagcctattagcactttaaaaaataacaacctcaagaccaaagaacaagaacactattggataaaaaattggcaatggtgaagtcaaatgagataaactatcatgtaataaaaataacacaaagtgaacaacttgaaaacattgaaagaaaaaaaaaaacagaacactagagtcaagacactaaagctcagttgaacccaaagaaagacacatagaaaccaaacacaacaaaaagcaaaagatcagggaaggtcagtcaatggaagttggactaaaatactctaaagatcacatatatgttggaaatattttaccannnnnnnnnnntactaccatgtatgttttattaacatcctaatataaattctaaaa

SEQ ID NO: 117513 - DNA, 1704 bp, Cannabis sativa
taacacaatttaaataagaaaaataataaagggcaccacaaaaagtggcatgtattggtacattttaagattgaatctctcatattaatttaataaataatatacggaagtatgatgttggacaccttaccaaataacaatcctctgaaaataaatgtataaaaagtagggtaaataacattttaaattattttgtaaaaattattgattggacccaaaataacaaattgtactataaattttccaaaataatactaaatagtaccctcataattttttttttgaaataaaacttaataataatacgatatagagatgttatgataaaattagttacgttttttatatttattcgtgttaaaaattattttaagatggttaaataaaaaaaaaatatcaaaagttgagttcataattatgtactattttaaaaaatacaaaaagttttttgtcattcaataaaggatcaatctaaaatagtattagcaataaaagattaaaaggtattgtagtttgtaacacttctaattatttctattggacattatttttgtgatcttttcattaaaaagaaaaaaatgtctaaaccaaagtaatgcagagacaaaaaaacaattacaagaataatttttgtgtaattacttattaatttgacccacattaattcgttgagcattgatactagtattagttgtgcctaatacttttagacgtgttaccttacaatttattagtgattagggatgcacacgaggtagaaaatttgtggggagtactactcccgtctacattcccgtcaatgattttaatcccaataaaaattattttaaaaaatttaatgtataaaattattaaattacataaaaattaaaatattacatattatttatcattcaatatataaattatacaaaaacataacttaaaatattataaaaataatactaatatactaaaaaaaaatacaatcacatattataaaatataaaatattaataaaaagataattaataaattaagcgggtccccgtcgacaccgtccccgccccatttaaaattcgggaacaaaaaataattgccatccccgccctatgctccatttagacagagaattttcgttccattaatccttccaatttattatatattatatgggaccacatatttaattataccaataataatattggaatatttattaaatttctctaattcttttggaaaaaaaaatcccacattaaaatgatgtaaatcccactttaaatgatgggaactaatgggtaaattaatgacctatataattgtaggtggattttaatttcttcgtattttattttatttttatggccgttgggtgtgaattttgatttctttacttttgtggcagtagtgtgtgagtatttgtgtttatcaattttctttttaaaatgaatttctgattaaaaaaaattaaatgaaaaatttgtgtatttagcaatagcctatattaaatatctatagtgtcacactcttagacataatatttacactcaaaattacatccatacatatttttaagcaaatataaattaggttatttgagctttattgttttttattatctcagttgcttagtcgtatcaatgtttttttttttttttgaaggaaaataataaactttattagaatgaactttcaactattacaatagataaaagatcagca

SEQ ID NO: 117514 - DNA, 1945 bp, Cannabis sativa
gcagtttcaatacgtcttctcccatgcggtattaaatgcgaggtgactgttcaaatgagatctggtgcctcctggaggtgctttaccatagctctatctttcgggagtacgtggacccctcatatcttctccgagaggtattttcttgttgatacacttgatctaaaaagacttagtcaaattatcccagaaccatatttctcaactccacgtgtcgcagtcgcattggtcaacgtattttgggcaaaattaagggcaacacatctatacaacactgtacaaataaaaatttaatttaatgaacgaattggagaagaatcaatttctatgagaaataattcttaacaacaaaatagtaattttatgaaaattatcattttgaataattatatcaattataaatgttataattaaaatagtatttaactatttagttttatttgataaaactatattaattaaatgtaatattattcttaaataatattgacgagaaaaatatattattttattgaaaataatatttattttaatactagtcaaataagagattaatgagaatcaattaatttttatttattagtaaaataaataataaattttatttgtggtaaaattgagaaatcaattttcgaccttaaaacatggcccgcacgtgtagggtgacatgtaaaggcccatgaaaattttgtttgattattttattattaaaataaatcaaattaaattaataattatcttttaattattatatttaatatattattaaataatttatttaaaattaagaagataatattaaacaaaagattataactgatttttgttaattagttatataatatttatatttaaatttgaattcaaaataaatattatcttttattttatagaattaaataaagagtttatttataacattatatatatgatatacaacaagagatacaaaacaatatatacactgaaaaactgaaagagagaacagaaaattgaaaactaactttcaaaatctttctctctctcctactcgtatctctctctctctaagctctctcacacacacctctctatcttgtaggtattgtgtgagtgattcttccctatctctattacagtatgagttgagaatacactgtgattactaaattactttcatctaaattgaatataatagcccactttatttatggagtgttgagggtgacttggaagaccctggtgtgaactcttcaacaaatctcaaaggattggatgatcgtttctttaatacgaaaaagataaagaggaaaccttgataggcaacaagaagtaaaaaatctctaaactaatagttaggtttttgtttgtataattttgttgatatctggagtttatggttcatattggattcaattttttttttttaaattaaatcttatttttattctcttccactgcgactctgatatgaaccctaaaactaacatttgtttctaaggtttatgaaattttgtgagatgtttgatggggtttaaaaaagggaactatggatcgcatattaagacttaggacagactatgctttcctaaatctcttggtgggttgggtttctgcaaaatcaaagaaatgaatcatgctttcttggcaaagtggggctggaatttattaaccggtagcctgtctctgtgatgtaagattttggaagtactagtgaaataatacgtgctccgcatgtgagttactcacaaaaaaaagggtaaatgccattttggaccctatattttttaaaattatacaaacagcaccctgaattaattttttgtcaaaataaaacttaacaataatttgaactagatgttatgacaaaactggttatattttctatatgtgttcgtattaaaaattgtcttaaagttggttatattaaaaaaaattgttgaaaatcaagctcagtgtcttattt

SEQ ID NO: 117515 - DNA, 633 bp, Cannabis sativa
aaaatttatttttttaattaactaataaagcatttttaaaaaaaaaaaattatttataaatattattactaaaatagatctgttaaatattttaattacagatttttaagtattttattaattataattaatctaaaattttacaaattaataacatgctgtgttacagtaaaaatcaatcatcatgaataataactctatataaaatatataaattaatgttcaaaaatatatacctaaatagttaagtaatgattttgccaagtaatattaaaagttgtaaccacaaacaaataaaagatatgcaaattcataaatattccttgtttattttaatttttacgaatattttgctgaaaagtttttcagtaattgagcattttatattttgtaattttttgataatttgttgaaaatggagaaaagaatgtttggaaagctgtatctgaataattagttactgaattgaatatgatcaatgcttaatttgcggtatgttcctcttctaaagtatctagtttattattttagtatggaaaatgacgtgatctgatccaaaaatgtttttttaaaaaaatatatattcaaaacggatcgggtcagatccgatccgtaaaaaaattaagcggggcg

SEQ ID NO: 117516 - DNA, 1787 bp, Cannabis sativa
gtttgagcctcagattagagatttctacattttcagacaataccaaaaacatgacaacaactctctccctctcactcactgctttcgtaccattccacgtggcactgaaagaacaccccagacctcctctgccatggctatcaacgcaagctcctcttctgcttatcttctccaaaatatcgaccatcacaccaacaaaaacttattcctctcttccaaaactcgccatggttatggctacgctacctattcctcaagaacatctacaatcgtcgctatggcacccaaacagaaggtaagaagaatacatattaattacactacggattctgtttggtagctacaagaaaatccgagaaaattaattttatttatttatttatttgattcaggtgaacaagtacgatgataactggaagaagcagtggttcggagctggaatcttctacgaaggatcggagcaggtggacgtagatgtgtttaagaagctggagaagaggaaggttctgagcaacgtggaaaaggctgggttactttccaaggcagaagatcttggtttaacgctttcttccattgaaaaattgggggttttctctaaggcggaggagctaggactgctcagtttgttggaaaaagttgccagctcctcgccctctgctttggcctcggcggcgctgccaattctggtggcggcgatagtgacgattgttttgattcccgatgactccgccggattagttgcgcttcaggcagtgattgccggctcgcttggtgttggcgccgctggtttgtttgtcggttcagttgtcttgggtggcttgcaggaagccaggaagccgattgatttttattttttattttaattttttgtaaaaaaaataaataaaattagagagagggaccataattgtgtatgaaattgaaattcgcttatattagatttttcacggagaattaaattttataacttaacaatgcatgcacaataaacttataataactattgatacaatattataatctattattattagtgttattttgttttttttttttgagctatatttgactccaacttggctattgatgaatttttaagttttctcatcaaagagtattacttgtaacaaattgaagtgtcactttatgaatgcaacttaattcgctggagagaaccaattcagtaatagataactttcaagaaagaggaagaaaattttttcgtttcaagatttttcagaaaatgtaaaaattaaatttaaaacagtggacaccccacagtggttggggttaacaacttgattctctcagatgcaaattcagcaggcttgggatcaatgtctcaatagctccttttcttagtagtggctgtgggggtgaggttcctggtgtcctgctggttttgttgctctcttcatggatgctgcttgtagagggtaaaatgggctgttggtccgattgtagccaaagatagtgcatgtgtgatgtcaagctttcaaatactaattcttgcaggttgaaaccattgcgttgcttttttgcggcttccctttcaaatactaatccctgctacatacggattgtaaggtgttggttgatagtatctcttgcaacaaagcccaatgttggcaagacaagcactggtttgttgtctggggagtgctcaagttgtttggattaataggccctttaatactcaagctcatgtttgggctacttgggcctgctttctaattcacattttggcttttttttttttttttggaataataacataaggcaccatt

SEQ ID NO: 117517 - DNA, 2193 bp, Cannabis sativa
aaaatatgagactagaagagataaattcatttagctgctctctaagtcctatttatagaacatagcaatcctataaacaaccacaaaaacgattttccagctgtacaaaacttccttaaaaaatttcatgatttgtagcatcggaatcaggctctgcagcagcaaaccaagactagaaaggaaactttccaaaatcgaccaagatcacgaaattggacttcaaacctgtcaaataaagtttgtttgatatgttctaataaagacaaaccgaaatcatcaattggaaaaagggaaaatcaagtttcccaaatttagacaatttttcataaaagaattctttctcttgcaagaagtttcctaaaccaaaaaaaggacagctgaaaaggaatctttccttagaagaaaagagtaattagaggcacaaaattaatgtaaaaaaacaatttaaatgctcaatataaatgtacattaattaaaaaaatatatataaaatattgacaattaaattgccaaaaaaaaacctaacaaaagtggtggtggtcttgttggactagtgtggtgcgatcatagttgttctttcatcgtggttcgtggtggagagatcagagtgtgtgtagagtgagccacgatggctggagatgagaataagtgaggggtgaatgttcatatttaagggtcagcccgagatcacatagctgtgatcttcaaagggttgccaagtgaatatgatacattcattatctcatcgaacactcaacttgatgggtacttagtagcaaaaattgaagctttatttcttgcttctgaattaagaattgaaaagaccgataagaagattgatctaaatgttaaccttgctgctattgacactggactagatctagagaatcaatggtcttatgaagcttttcttgctcacttcaatcacaatttcagaggttcaaacacacctcgaggtcagtttccctttaattctccacaatatttgtcatataattcctctggttattataataatagaggatctaattcaagatttactcctcgagggggatcaaaccatgctaacaatgtaagaggaagtcaagctactcaacatggaagaaggtttccaacaactcaaaataaaccttagtgccaactttgtcacaaatttagtcacttggctcttgagtgtttacaaattcgacaagagttttactggtgtctttcctgctccaaatggctcaaaatcaatgcaagctcatgtagctcgatcagtcttcccaaggtggagacactaactggtaccctaattcaggtaccacaaatcagtgcacatatgatgtgaataatatggtgcagagtgtttagtacaatggtcaatagagactctatgtgggaaatggattaggtttggaaattcaacacactagttgtactttccttaagtctaaagcttcaaataagaccttgattcttaaaaacttgatgcatataccaaaaatcaccaaaaatcttctaagtgtttctaaatttgctcttaataataatgttttctttgagtttcaccctcttgtttctcatgttaaggatcagaagaccaaagccataatcatgactggaactccccacaatggcctatatacttttgatccaggataattttaggtgctgtctccatctccttcatcttgtcctactcccaacttcttagttcaaaatcatgcttgccttgtcacctctggctctagcacttttaattcaaataacaatacttgtaatcagtgtaataagtcatctctgtctacctttgatttgtcaaccccgataccccaagcgagatcccaaattgcgagaaccccaagtttgacttcttcgagcgtcaaccatctctgccattatcaaatcttagtggattttttttaaaaaaaatatgaatgtagggtggattttatttggtgaaagagctggatctaatatttaatgtgaattttatttgtgattttaatttatgattttttttttataatttaggatattaatattactggggggataattttatttttgtgattttaggtttagtgaaaatgttgcagtggctatgatggtatggtggaaataataatggtggtgataatggtattgtggtagtgataagggtggtggtaatggtgtgacaatgatggtgataatggtggtagaggtgtg

SEQ ID NO: 117518 - DNA, 1753 bp, Cannabis sativa
  modified_base (39)..(61): a, c, t, g, unknown or other
acagtatttttgaaaaaatttccgtgtgacagtattttnnnnnnnnnnnnnnnnnnnnnnngtatttttgtaagtttccctatacttatttatatagtttcgtccagatcaaatcatagcagtaaagcctaaaccttccacatttaccatctgggcaagccccaagcttcacattactccaagtagataaggcaagtcctcaacatccaatgaagttgagtactccacacaaggtgatgtgacattttcttgggtaacgtgcatacttttatcggtatgtcgtccagagtagattatctatcaaatactgctgatttaaagaataaaataaaaattttgcacaaggtatataaacggcaccatccgactagcatcaatttcacggttactttacatagtaaatgcgacaaagagaacctcaaagatactttcttccttttgtcaattaaattcctattttcatcgaatttccagcgtaaatattgtaatttaggaagtaactatttccttttctatcctttttttttttgagaaaatcaaaaaattgtattgcttcaatcaatttacatcctaagaataacaaaatctatacaactataatttaaaatgttcaaaccattctatatctttttcccatcttttttggcaaaattgcttcaatcctcatcttgattttatgttgaataatgaatacaattaaacctcagttgaaatcgaactgagatttttgcaccaaaggacctcattaattcctacactttcagatctaaaataacattaaaagaataaatgggaaatattcacatcttctttatcacaaagaaagcatctgccataagatattgaacttcaacaacctattctttgtttgtaaacgatttagaaaaggttctccaacagtagatcgccgtacgtattacaaaacaaaaataagtgttccatagtttcatcattatcccaacacaaagggtaagaactatcatcaatgttcatacagtggccaataaaaagtgggtaaatagttgaaaaatgtgtttcacaaaaagctagagggaagaaatacattttccaattgagaaatactaaaaggtactagtggtgtcaaacaccctcctacgtgtaaatatcgctattgatctaattaagtatcaggtctcatatagtttaatataatagattttaggaagtatcgctagccaatcacaaggcgacacgtcttaagggtgctagctaggcaccactggtgcccaatagcaattccaatcatttcatcacattttgtcatcttgaaaaataaatagttgagcttcaagaaaagtaattttttttccaactatttaaatcattacacttagagcatctccattcaaataagctaaaatataactcacatccctcaatagagtgtcaatattgctatattttaacacattttaaaaaaaattactactctaatgcatgatattctaaaaagtatgataaatttagcccattctaaaaattgtgataaatttgacacaagatataacattatactaaatttagctcacaataaatgttatttttgtatttactttaatgtcggtaattattataatttattgacttttactaaactttacattctttagttattatatttttattatttaaataataaaagaataattattattattattatttttgcaaccatgaaaagccaagtttggtcatatagattttgattgtaattagtataattttatttttt

SEQ ID NO: 117519 - DNA, 1361 bp, Cannabis sativa
cgattacaaaaatatggaagaataagaggggttaacttttttttaatataataaactgagagtcaaataatatactagttattaaatatagaagaatttctttctaccacaaaatctcgttttctatctatagtgcatatctaactcatgtgttgcaaccgtattatcatttcgcattatatgtagaaaatatacacctgaaaagacagataataaggatctaatatagatcttaaaaaacaatcccaatcagagacaccctaagagaagttaaagtatagtatagtattagagacttccaaaagacgtgtaaatttttttcttatcacttgaaccgaattaagattccctattaaaacttaataagtggtgtctcatattgtatatattaaaatattgtatatattaaagatgttaattatttttgttgactcaattaaaaatttaattttttattaaataaaaaattaattaacgtgttaaatttaaattggtttaacacagtatgagacacacctttttaaccaaaatcttatttcacttgaaccatggcacttgtagaatcgctccttagattttacaaacaatttattgatgtggtttgatgatatgaaaattgagagaaaaaaaagttatattaattaatttattcttgaaacaataccatttcaaaaagatcattttgcaaaataagataattgcctatattactcatatttgtttttttttttttcaaataataataattgaatagcattaaagtatcgaacaacttccaactaataatagtgaccctcactcatctccctctctaggcaccactcctataaaaggagtagagacctaagagattttataacaaaattataagagctataatattcttttaagtatagagagatattaatattcttattaactataacaatggcaatgaagaatttggcatgtgtgatgataatggtagtggtggtggtggttgctaattccccaagtgcgatggctgccctaacttgtggacaagtagtagggagcctttcgccgtgcataacatatgctaagggtaacggtgctggtaaaccaccgggagggtgttgtagcgggattagcgccgtcaacaatatggccaagaccacacccgatcgccagactgcttgtaggtgcctcaaaagcgctgcaagccaaatcccgggcatcaactacaaccttgttgctagccttccttcaaagtgcaatgttaacattccttacaagattagcccttccaccaactgtgacaggtataattaattcatcatgatttttatttattatatgttttttctttgctatttggcactgtataaggtgtccaatatcat

SEQ ID NO: 117520 - DNA, 893 bp, Cannabis sativa
aaaaataataagaaaaataacgatgagaaatagaatacccagaaaaggaaacactgtttacgagtgataagaaacccaaaaatataaaaacaaccagaaacaaagttcatcaaactcggtaatagaaaaaatgggtatgtaaagttccaaaaatggcaaatacacaaaaaagagagacagagagactgacccagatgaagcaaaagcaatctgataacgaaactaaagattttcagaaacatcgacagccaaaaaaaacggtgtaaaatgcaaaggagaaagtaaaaggtgaagagagtttgaagttgtacgtaccagagcgtgaaaacagagaacgatgtctgagctccaagcactagggcttcaacttcaaagtccatacttgaggaaagaagaagataagaccatctgggttgataagctatcaagggtttttcaggtttgaattcggctacgacgacggccaccaccaccacctgataacagcgaatgaataataatgggttgtattggcctcggagattgagaaccaaaaagttctaaaaggaaaaaaagagttattttttatggaaatgaccgcttaagtgcttgactaagttactgaaattactattttgaccctaaactgaagaaaaaaattataggcattaactggataaaatggtcattctagttttataaagggacctactctactgagctttgaaccatttggaagggtagtttgtggactttcgtaaataaaaatgactttttttttcattttagaaaaaacaacaaaatttttactggtggttatgtttttttttttttttttttgaaaaaatactggggggtttgtttttaaaatataataatttttttttttaaaaatttaatttttcaattaaaaa

SEQ ID NO: 117521 - DNA, 1166 bp, Cannabis sativa
  modified_base (1115)..(1116): a, c, t, g, unknown or other
caatgacattgttatcatggatgtaattaatttaatcacaatatgccatacatatattaacctcacatatatatacatcaaatattttacattcagctatattatattatttaatcataaataatataacatagtagctagactatacattgtggtattcttgacgatattaaatattgctgctaagtgctaacacatgaacttatattgtcgtatattattatgaaacaaactcataattaacattgtaaaatatgtaaagaaaaatataatataatatatataattagaagaagaggaagcaaagtcttaatatatttatttgtacgtactaagaaacaaaggaaataatttttactgtataagagcagtcgccatgcctgttgtgtgactgtaatagcagcagtgtttagaataaaaccaactaaggttgttcacgcgttatcgatggccctattcccacctcacagcactattactttaggatcaatgtacgtacgtactactacaattagtactgtgctacaacctactcacattccattatatatttctatcaatcttatctacttttgttctctaaataaaaattaaaaaaaaatcttatctacttggtttctttagattaaataaaattagataaaatttatagtacatactttaacaaaattgttttaaacatctaccggatttttttttctttaaccacttgaggttttgagattttgagttcgaatttcaaatcatgtattgtaatgtataaatgtttaaattaaaaaaaaaaaaatacaaaatcgtttcggacatctatgagaattttttagtaattttcatataattattgtatatgtcctaattacttaggattacttatacattttataaaattataaaaaaaattgtaatataaaaaataatattcaaatattacaaatagatcttaaaaaactacaaccactcaactaaaaaaaatttactagagtcaaaacaactttttcagaaatattgtagtataaatttttccaaaaaataatatacatctagataatgacacacaattacataataaattctttaagggctcgtttgaaacgtcgtattaggtcgtattgtanngtattgtattgtattatatttaattagattatatattatatttttatata

SEQ ID NO: 117522 - DNA, 2243 bp, Cannabis sativa
ctaattcccatttctaataatgggatccactgataattaaattcataaataattataaaaatagcagaaattagtgctaattgcctttgctaatccaaattactaaagcatccattacaggtgtggtaagttttgtattggatgataagtgtgagaatatggatgtccattattatggatatgaggttagagtagacattgatcgtcctataagtgatagtgagtcaggtgatatgctcttgtgtattaattctacgtcagtaataaccttgaacgtcttgttaaaaattcatcgtcgttacaatattcccacacattagtttgtacgccttgtctagcaggaaacaaactgactggaagatactgggttggacgtgtttgtatgagcttccattcaagtatgtttttagattttctctctctaggttaatgtttgaactccagtcagctaatgcccaattcttggcgtgctcttatggctatacaagtgttgattgaaaagcataatattacatttacggttgttgaagtcttgcacgtctactacttgaaagaacatccacatgataagggtaggtatcaacttactattagaacaggtagtgaccatctaattcttggtgttaaagaggctaagcgatggaaggaggattttttctttgttccctttgatgtgctaggattaccagttgatcatgggattcccccatttatagttttgatagtgaattatgcccttatttattatagtttattgatacacatttatctagttgatttgtcttctttgtagggaggattgaccttccgtttagttgggtgtgtggtcaagcaccagggagagttgatcaagttcttcaaattttgaaggaggagcgcattggatggttttagtgtctgattcttctcttcgagacaacactttgtggggccacgttccacatcaacctaaaggtatatctcctcctaagaatcgtgctaagtctcaagttgctataatccaaagaagttttgagatttttgggtgtgacctctatttctgcctgaattgacttcagacaaatgagattttgtaaactgattcatggcccaattttctttcactcttcctctggctagtgatggtgctatggaccatttatactcatgcagacagaagactaggccaactgctagtgctgagaatgaggttgttaatacggatgctccttcttgtccttttgtgagagctcagaagcataataacaaaagaccatctcaggttgagtcgatcaactagttgagtaatatagttgatctcactttcccatcttcagtggccgcgtattctgagtttagcctacactttggtgaggccaataagctattattcccaaaggatcgagctcgatttgagaggatcagggaaatagcttctattgcggtgtccatctctcgctcctttcaagtttgcatgaaattctatgttatggttatgtatggataaacttacaatattattgtgtatgatcattatggtactctatattgtatggtagggtatgcaagggcttatgtacgctttggataagatcaagaacatgaaggatcaaatgaaagttatgaggtatgagcatgatgatttatgcggagagattaaggagctaaatggctgctaaaaagagcttgatcgtgtcaagggagagttgcaaactcagctcgaggctaaggagaaagattctaatcgtttgaagtctaccttggctgaacttgctactgcccaagcttgtatggatatgttggaaggtcgattgattggcattggactagaggctgagatctagtgttgtggaaaatggcgatggagtatcgagacaacaaggccaagtcttgggacatacctaagtacattgctggatatgaagaattactacagatgagggccgaggaagaagcttgaactagccaactggctaactcatttgaagggatgactacgaacgatcttccagcggatgactaactttgtgccccacgtctgtcttgagttaattatttgttggatgttttatgtttttaagattgtaatatgaacttttgtctagttggctgacttgcaatggtttggtaccccattttccccctagtctaaatgtaggtcagtcaagttggacttagacttagtgtaacaccccgatttcccgagatgtcacataggatagtccgtataaaataatttaataagataaagacaatcaaatact

SEQ ID NO: 117523 - DNA, 2569 bp, Cannabis sativa
aggggggcctagcccgccgagattagtgaaattagcccgtcgtgattggtcttcttagtggtgatttttaacactttaggtaccaatctcaacaggcttagcccgccgagataggttaaaataaaagaaaaaaatatataaattatcattaattttatttttccctgccattatatatttgttgtaaaaatatacataaaaaaaattacaatacattacaaataatatatctaatagcattccataatattaagccaaaacttctcaaaacaccattacaaaatctgagccataaataataaaaaaagaattcaaatatttaaaagttacaaaaatatattgttggcctactttataaaacatcagcaaatctcatttgagtcgttacatgaagacaatcaagtagacctcactattcctttgactaccctcttcaatagctcactgaaaaatgacatataatcaaagttaaaactaatgtatatttgcaggcttgaagaccctaaataaatgcattgtataaatcacctaatttgcaaatattgcaaataggtgggcactttagcacatataatttttcaaaacaaatttccataccttctttaattcaaagcaactttagcacatataatttttttttaaaagaatagaaggtcatattattgttattattatagcatagtaagaccttggaaaatcaaggtcattgtctcaagatctttagcacatataattctatacacaaacaattatatacatatatatattatagatttatacatatgttcttaactttttgacaatctattgaaaaacttttcattatctctacgtaccaagtgtctaaaaagaaatttaacatacaaaaaaggtgcacaagagaaattatatcaccttttatccccttttattttctaaacatacaaaatgctttcttttaagttcattatacatataaacacatacatatataaatacttatgtgctatacaaacaaatatcaatttattcatgagcagtggtaagataaaagtataaattcattctttgctttttcattgaactaattacatagctatcaaagaggtacttgatcatcccccagaacataacttcacaataaaaatcagaacttgataagaaaccataaagaatgatatatgaaatccaaccacatcaaatatatgccacaacgaaattcccagaacaccaataaaagaaaaaaggggaaaaaactaaatttgagaacagtacaaattatatacaaataaacctacaattttgaaaataaatattgagcaatgatcaaacccaaattaattgcaactaattttagcttgaaattttgatacccatagaaatcacgccaatattttaatatataaacataaaatgaatacccaattccaaaactcaactacaacgtaccagtatgattcttaactatttcgcatgtacacctccttgctgcaatttctatcagcattcgaaaaaaaaatagaaatgagtaaattaataacaaatagagatattactattgaaactaatatgaaataatacaactaaaaaatgtattccaaatcttatgacaaagtaacttcaagtattaagtctcacaacagatttttttttacaactagagcaagggaaaattctagaaaaatactgaagaaaaagaagatgctttacttaaataagaaaataataaattattacatataagggtcttcacttttgttgttgaccactttcgccacctgcatgactgagtccaaaagagggtttgagaagcagatcctataacacgaagtgaaaccgctcaatacctattcgccattagtatgacaaaaatttgaaccaaaaaaaatcaacaaccgtaacccaaatagagatgaaaaaagtatcaataatggacaatgaaaaatgtcctataaaagaatagagattaaaatacaaaaattcctccataaaaataaagaacctaaaccctaaatagagtccttaccttgtctgcttcatgaacgacattccactccagattgacgaagacgaagactccacgctataagagagaccctgccaatataagagagagccatcaacttttggggttggattgagtcaacactgtcgttggggttaggtgagagccgtcaacgacgagagagcaacaagaacgttcatttgtttgtgagtcttcgacaatgagagagaacctttgagccccgccgtccatgcgagaaagaagaagagaaggaatggttgagagaaaggaatagggtggcagctgagttttgtgggtaagactagggtttcgagagagagatatagatgatttgggtctgaatttttttcctttaaattcgtggcctatttcggcaggcccaactaggaccgccgagattgggtacacaattttggcagttttacttcagcccgtcgagattgagtccaaatttataattctttttttgaaaaaaaaaatcagtcaccattcttgacggtttacaatgagcctgccgttatagagaccaatattgacggacacacgcgggccccccgatattgg

SEQ ID NO: 117524 - DNA, 1466 bp, Cannabis sativa
  modified_base (38)..(45): a, c, t, g, unknown or other
  modified_base (1342)..(1385): a, c, t, g, unknown or other
  modified_base (1435)..(1440): a, c, t, g, unknown or other
cgctcttccgatctcatacttgtgagtagatctaagannnnnnnnaaataatttccaacagtaatatccatgtttcatcaacggttacgaatgagtaaatctcaagagaataactcaccccatacatcaataaatagggacagcacccagggtaatatccacgtttcatcaacggttacttattgctaaagacatcattgttttatgtatccaaatatatttatccttaataaggtagactcgtggactatgagtattagataattaattgctatataatcaaatctgtagttaatttattacaaaaagctaatatttttagttaacaaaaatctatgttaacaagaaattttttacatggttggggcattaatgagtattagtccacgagtcactattattaacgagtactttcttacaaatattttttaagagtcccctcttccatacatcattggggtatttataagctcataatggtggtaaaaagaccaccattatcgtgtttgtatgagtcatgccttgcacagttttctatttgatcatagagcatgatcgcctacttttttgtgatgtacataggcttgttataggcgtttggtgagactagacttgtctctagcttgctaatgatttcatagctcataatgtagccgtcaaataatatatggggcatcatgaaatcaagaaattatagatttaaacccttgagcacatcttttaagagtaatgtgtatgatgttcttccccatggcattaaatgcacgtatagtaacttaacatcaagcagtgcaccatgctctgtctgtctctccatctcttctctaggttgagttcactcatagagaaggagagacaaaattgttatcctcctggtggaccctctcggagatgaccaataatatgcaattctcgcaaattatcactccgaaagtggtctaatatggcatgtcccgtagtgtgggtctcattgccacttgactcactcctaatcagccatgaattttgggagaaattctataggcaacaacgctcttaattacgtagaacgttttatgtgccaaatatagatgcattatgaattatttattgttttatttaaaataatcaatgatcctctacagatggtcaacgagtaggaacaaatttatcatttgaccttttgatgatttttatccttaaaacgcttagctcatatgacttttttttatatgaacaactcatatgtttataaagactaaattatatcattaaatttaaagaagcatctatataaattatttttattttttactttattcttacttctcatattggtaacacattattattattattattnnnnnnnnnnnnnnnnnnnnnnnnnnnnnnnnnnnnnnnnnnnntattattattattattgttatatataatattatatctttatatattaaannnnnntatctaacggcatttcttggtttaac

SEQ ID NO: 117525 - DNA, 2941 bp, Cannabis sativa
aaaaaaaaaaaattaaaaaatcgacataactttaaaataaaaaatataacaaaactaatataagtataccataatctttaagtagctagtttgcttttaattctaaaaaatatgaaaaaaaattattgactttttttatgtagcaaaagacaaaaaatgttatttctctacaagttttgaaatgaggatatttacttacatagtattatgatttggggaccacttactataattttccaaattggaatgcgtgtgagtgattaaggacacgtttgacacaatttttgaaaaagtagttgtgataaaaaaaagtatttattaaatagttccaaaacaacttattaaagaatttagggagaagtagttaaaagctaaagttgctacaacctaacttttaaaaactgttattttgattaaaagactctacaataaatttatttatactgagaatatatttacttgtttattatatattaaaaatatttttaaataaataaattataataaaataaatattatttaaatttcttattttttttattttgtcttaaaaaatatcttatatttttaatattaacactctatatagttttttatatgtttgagttttttatttaatttaaaaatactataatttatttttatcaaacgcatataactttatacttttaagaaaaaataattagaaatatattaaaaaatcgaatttttagataacataagctcttatatatttgtgattataatgagttagattctaacattatcattataatagaatcttaacaactcacattactttaaaaaatgttatttaccaaatactctacttatctttttcctaccgttatgttgtagttgctttttttcatcgcacgattacaactatttttttatagcacaattgtgccaaactggccctgaattgacatccattcacgcttgattcattttttttttttgtcttttagactcacgtctagcaaagccaaacatggtgcacgtgttgcattcaacaatgctgggcgtgaatcatgcattgagataaaaaaaatattatttaattgaacttctaaacatataacgtctcctttattgtattttgtcaaacattgttgaacgtgattacatttttttttatgtccaacaatattagacatgaaaactctctaaaactctttaatctccaacattgattatgctggacatgaaaaagggtcaccaaaggggtaaattgtaatagtggttgtagccccaatttaagccttctagagagactaagagactaatccaaatgaatcaaaagcaatcagataatgatgacggacaccgacgacgacgccgatactaacgaacaatgggtgactgtggacacagagggagatcatagagtcgaagattaagacagagagaggataagcatttcaaattgggaattttacagagagcacaaaaaaaagataaattgaagatttgttgtttctttttttttttttttttctagctttatttgaaaaaaaacaagatgggtcacaacacgttccgtagttatcggtactgcttaagtcgaagatttgaagctcagttcgatatttcgaagcaccactgacccaccatgagtgaggcgtatacaaaggtgactgtggtagctatagaggccgacgtgaagtggtagccaagaagaagatggagggttccccttcaaaaactctcatcaatttctttactttatcagttaaagtatatccctaaaatccttttattttttttatttttttattttacttcaaaattttactttacaccatacatcttaatatacattaccaaaatattttattttttaaaaactttaatacattttattcatttgaaaaatataatattaatacgcatacatgtccacaaataagaagaaatattaaaatttaaaataattattaaaatatattattagaacaattaacagtattctttaaatataaaacatgaaaagtaaatttgaaaaaaaaaattaaaataaagaagatatttagaacatttcatatatagtgtatttttagtttgactttgtaaataatttaaagcttctctatttagagcatgtgttgtgagtactgttctctaataaagaagtgaaatgattgagttccactcttatttaacaaataatataaaaaattatgaaataattataagaggtagcccctgaagatgtcaataacaatgtggaaagggatgaatgtatatccatatattatctaaaaataatctatttcctcaattatgaactattatatcaaattagatgatccgatcatctacaaaatcaataacaagatatggagatatatatttaaattgtgagagcaggttgagatttggtgatgacttgataacctcgatctttgaaaataatacacattttaatataattaactagctgacccagcaaaaaataataatataactagctgttcatgattaataattgctgcaaaataccttattttatgccaaatatatgaaatagtcacaaattgtttcttgttatattcatttaatgtgatagagccatgccaggatttgacatatggtttcaaaatctacatgggctcttacgttgtaataaattctatcattatgtgtacaacataattaattctaacttgtaaccagcctgaagtcaccacaatgaaaattatcatcatttaacaacatttcaattcattattgtatgtcatatcagtttttagtctcaacaaaaaaaatattaattgaaactaaaaaaagtatagcagtatttacaatattacttatttactaaatgttttcattggatcacatccaatggatttggacccatccaattcaatccaattatttattaactattggatttttccatccgatccaatccaattgaattgagtcatccgat

SEQ ID NO: 117526 - DNA, 812 bp, Cannabis sativa
tattttggacctcgtattttgtaaaaattactaattgaactctctattttgttaaataacaaaatgaatcatgtattttctaaaatagtaaaatatgaccataaactgatcttttgtcaaaatgaaatttaataataattcgatctaaatgtgtactatgacaaaactgtttatattttatgtatctgttcgtgttatgatttgttttcaagttagttatattaaaaaaaaattgtcaaaaattaagtttagaattttatttttactattttgaaaaatacataatccattttgtcatttaacaaaacaaagaatctaatcgataacttttgcaaaacgcatagtctaaaatagtatttattctttattaaatgcaaataatatgtatgaaaaacacttgttctttttttcatttctctttttgcttggaaataaaaagcatttgtttctttgacaactttgtggcctgaaatcaaaattgtgtttattgtttcagacagaaatcaaaagtcgtctaattaaagatgcttatgtatatatttttatatatatatatatatggaagattcgtgtggttctctgcatatatatatacacagacttgtataatttgaccgaataatataacacttcattttgatattggcgatcttaatatgaacagaattttcatttattcttgattaatttattctctctcccccctctattgtttttttcacattaagcgtctctaaagatttggaccatacatatatatatatatatacgattaggtttgatctcccgttaacaaataaacccaataatta

SEQ ID NO: 117527 - DNA, 1128 bp, Cannabis sativa
  modified_base (890)..(891): a, c, t, g, unknown or other
tttatttccttaaatagaaatatatttcttaaaataaaaatattcttatagctgggtttagttttaattttttttttttagaatttaatgatttttcaaaattataatttttttatttattttaaaaaaaaatcttattgaattaaataaaaaaaaataagttggaccaattatgatatgccacgtatgtactgataggtcacttaacggtcaggtacctacggatacaataaaagtgtaacaaaatgtatttttaccaaaaaaattacttaggtattaatatgcaattagaagataaacttaggcattatcgccgcaaattactctttaataaaatacgaggtaccaaatgagtatttatcctttttattataatagatcttaataactcacagtattttaaaatttataatttaccaaatacttagttcagttttttttctacgttctgagtagcagtaaaaaaaataatttaagatagaagagatcattacactctaaagttacactaccaaattaagtgtactaacataactttttattttattatttacattctaaccattctttttgttttaaaaaaaatttaacaatttgtcaaaaaaaaaaaaataattttacaatttaacgtaaattttatgagtgccaaaaaaacctctattttgtactctattatgcctttttttttactttttaatttgagaaacataaattttaggtaaatcttataaaatatacaaataattttctcagaatattattaataaagttaatctctcttataaggattaattaaggcaaaattatatgatgcttaatatataaatgaaatactttttagtaggtattatctattaatgagtaataaataaatttaactataaatattnnttttaaaaatattaaaccattagattttggtccgataacaaataataaaagagaaatttaaattactatacgtaatttagctacttatttaaaaaaaatatcaaaaaagacctctttttatactatatcaaaaatatatttatatgaaaaaatatttaagttaaattcaagtttttttataacttttttaccaaaaaacttttttttattatttttcttcagctgatgaataaattc

SEQ ID NO: 117528 - DNA, 1196 bp, Cannabis sativa
aaattgtaaaaaattaattaataattattagtaatttaattttaattaagattttataagaaaataaagtatcaagttactatcacgttacaagttgtttatttatttatttattttaatttctgaattaatcacaaccatgcaatagtgatccaacgactaaaaataaatgtaaccatgatggttataaagcaaggtattattcgaaaggctcttttctaaatgctgaatttagtttcatttagcggagtatttgggctgccaaagctctcatccaaaatggtgcgagatggtcaattgacaatggctctttggttagtatcctttaggatccttggctcccacatgctaatcatccttatgtcatgtctgttaatcaaggccttaagaataagtatgtctccagtttaatgattgttgaggaaaggtcttgggatttagagattcttaatgacatgtttggggagagggatattagtttcattatgagtgttcagttgagtagttcgatggaagtggattcttagtattggaacatggagacttcggggctgtacatagttaaaagtgcatacaaatttcttcaatctggaggaaattggttgcatcttcaagatgacagcaacgggcaaaaattatggcagtttgcagttcctcctaaggtccatcatttcttgtggagagcatgctcggggtgtctcccaaccaaggtacaactaaatactaaacatgttaacgttgatctcttatgtctattttgtaatatggagtatgagacaatataccatgtgttacttggttgcagcttctctcgttcctactggtttttatcggctgcaacacaacctgctgctggttcataccaggattttgttagttggttttttgagcttttagatgggagccatgttgacattgtagtagatgttgccatgatcagttggaacatttagaaaacccgaaatgaagtgctttggtagaaaaaatctagtttagctttggaggtggttaagtcgactagactagtccttggccaatggaaggttgctaattttgaatcatcacatgctttattttctattgttgattgaatttttagctaactgacgcggagtcgtaataaatgagatttaaatcaaaatcacaataataaatgcagttaataacaccataatttgcaataaatgtaaataaaa

SEQ ID NO: 117529 - DNA, 1951 bp, Cannabis sativa
tcagctatagtaatttatctctctctctctctctttcaaaaaaaaaaaatggataaatataaaagttttttatttttacactttgaaatattttgttaggtatatttttacaaaaatttatataaaaactcacatatagcaactaacgaaataatttaaatcgcaactaaaatctatatagtaactcacatataaaccatcaaatttactcaaaccgtaatttcaaataattaatatataaaataatccctagtaacaagtttattgaatatatataacttgtttattaaccttggtggcttcattttaagtttacatccttcaaaataataaatactaaacatataatatatcaatattgaaacatccatccattaacataatttcaattaaatctattttttagtattacactaaaatatatcaattaattgttcttttaattaatggaaccagctcataatttgtctttgttttaaatgatcaatcaactctataaatagttgaaaatggtaaaatgttaaggaattcaaagttgtctttgttttctattcttttaataaaattgcaatgcagctaattaattgggaatctttcccattttatttgtatatttatatatttttgcaattacctccttcaatgtaatggtaattgatatagagcataagtttcaaacaagtattcttaataaagattttttgtgttttgtataactgtgtcaagagactatgtttgaatttttatttttaagtctatgtatactcttctttattcaacctcatttaattaaaggattctaaagttacaaactggttctttaaagcttataataattttaataattgaaatactgttaaattgaatatttcacacttgatataaggtttttatttgttaggatatggtttgatacatattcctttaatttgtattcatatatatttgtggtattatctagtttatatattatttaatattctctttctatatactcacttaagtattaagtataattatatattgtgtgcgaaatatactgaatacacaatggtatttatttgttgatttgaacaatatgtccaaatgtgatcttcttctgatccattcgagattcttagcattaaatatatggtgataaaagttacaacaaagtaacagcttggtcgtttggaattggtcttcctctttattctattgaatctgattatttagctgtgatttttgttttcgttaaaaaatcatctctttataatgatttggttcttttttagatgatatttctagtcttctatctaatttttgtttgaggcgtccttaattcatgttcgtcggttgaccaataaaattgtttatgaattagctgtgcacgtatttaaagtgggtgataaattagtttggatggaagatttttcttcttttcttttcagtgtactcagattttttttaataaaattttgttcattaattattcaaaataaataaataaataaataatagcttggaatgcatagttacatttaactcatatattagtaataatattatttgtgtaaaatatgcagatttgttttccaacatcatttaaaaatacatcatactgctaaagtagttggtattatattttattttaggtttttaaaataatatttttagaaatagaaaaacaatattttgttgttataaaaattattattttttataaattttttaaatataaaaaataaacacatatatgttttatttttgcatctcattaagtggaatccacagtggaagcatcattagattactaaccttccacttgaggtaagcacatatattaaaacaatctatattactgagcttccactgtggattccttttaatgagatgcagaaataataaaacagtaaaattgcataagtgaggcccattatccaaagtccatggccggccacacttaatgggt

SEQ ID NO: 117530 - DNA, 1474 bp, Cannabis sativa
  modified_base (593)..(593): a, c, t, g, unknown or other
acagtatttttgaaaaaatttccttgtgacagtatttttgtaaaagttaacccaaatttcagtatttttgtaaatttccctatttttatcttctcttctcttcatgggcggcaaggggttttggtcaatagtgtgtctggattgactatgggccttcagaaagttatggcccaggccccaattgatgagaataaccaaccttagtgggctacatagacttacttttttttttttttttttttgaaagggacatagacttacttaacccttagaaggaaagtcgtatagaaaataggtccaatcccacaatagtcaacacatactacaatccatctagatagtggggaaaatgaattaaaaaaatatatatttttacaccatataccataatttttaattttttttctttttttattgtgacgtataatttttttttaaaatagtgtatttttttcctcaaaaatattgtgtatgttttatactatgcactgtattaaaatttcactattatttcatggttgtttcttagtcgttttactgttgtttttaattgttctgttttattattttatgattgttttataaaaagacantatttttgtaaaaaaaattccgtgttagcagtaaaattataaattttgatctaaaatccaatatttttgtaaaaaaaaaacaacccctaaaaaagagttatttgggaagaaaagaaaaaatttacattaatatgaaataaacaattttttttttttttgaaaataatatgaaatgaacttaatgtcaccaaatatgatatttgttaaccaaacaaactaaatatatttgtttataaataaaaaaaaatgccataaaaaacataaaaataaaatagaattaatgtttcaaattgctctctttcatgcgatacgaatcacgatcccttttctttttctattcttcgattgtttctctctcctgggttacttggatagtcctcactctcttctaaccgattccactattggtacttcttctacgattctagatacttcaaccactacaaaattcgacaaggaccgaaaatttgcatttgtataattaatttacaagaataagaaaataattaatatttttatcttctaaatttataatactactcctaaaagggtattcataacacatgacatgaagagaagtatcaaccaaataataacttacttaatgcctgcattttttttttgtttaaagtttcaaattttttagtgatcatggatcatctactcaagtagtaatcattggcataggtcagttggaagacaatttttgaggaagacatagttggattttaacgattatataatttcatcatattttatattttattttagggttcgttaggtagccggataagggtcgtattgtattaaataataaataacactatgtttggataaagcaatgtattgtattaattattacgaccaaattttttaataca

SEQ ID NO: 117531 - DNA, 2975 bp, Cannabis sativa
gagcgaccctaaccacaacccatatagctacaactaccatctatcgccaacccatcttccaatctccattgattctctcccggcattccctcaaccgttcaattccggaagatctgtccctggggcttcggttcctctcaacagcccgacgcaacccaaaacgggctaaaaccgtcgacattggtgcccgagcccgccagatgcagactcggaggctctggctctacgcactgagctttagctgcgttgcaggcttcattgtgttagtcctcaactcattccaagacaatttagtattctacgtgaccccaactgaagctcttgacaagtttattgtaaaccctagcaagaacaagttccggctcgggggtttggtcctggaaggcagtgtagtccacccggcttcctcaccggagattgagttcgttgtcaccgacctaatcactgatattctggtcaggtatcagggagctttgcccgatttattcagggaggggcattcggcggtggtagaagggtttgttaagcctatcactgatgagattagaaatgaggtttcggctaaaaacgtgtctgagaaagcgaggagtggtgactgttactttatggctacagaggttttggctaagcatgatgagaagtatatgcctcaagaagtggcttcggccattgagaagaataagaagaagattgaggctgataaagctgctggggtcgaatccaaggaagcgtagattgatgggtatgtttcaaaaattttgaatttcttattgatatagaattttgagtatattatacattggaggaaagtagaatagtttggttaaattgatatttgattagtgtttaggtgaggaatgctcattattattgagacacagggtttaatgacataagggagagaatcataagattccaatttttggtatttgtattcatattttcattggtgaatttgtaaagtaacctcttacttttcaatgaaataaagtcatgaattgggcatggcaaattatcaggaaatttttggcactgtatatgtgtgtgcttaatttatgtaatgaactttgttgccattaatgatttgcattcatctaatccaagtatcataaaaaaattagtttttactggaaagccatgtaaagatgaacatgttagtgaaactttatttggttttaggaatatagttatgggaacatatgcattttgtagaagatttgggcacttactttctccctacttaatatcagttcaaattaatcattgtactttacatttaaacgtatgaaagtttcaaggtttgtacagttgaatcatatttagtttaattcaatgatatataatccactagaatcaatgttagcaatttgaaatctcaacagttgcgaaaaaaatcaaattcatggagatgtgctatatatataaataaagcaaaaactgtatttctgctgatttgtttatgaagactcagatcctaaaccagatcataaaatagttgaaaacagttgaaatggatattatattattatatgtgttgttcatttcatgattaactacagggtaatctcaataatcatgcctgagccatgtggttgcaagagaaatgctcttatcaacttgcttgattagattgggcctcttttacctttttatataattttttgcagcatgagtaagacttactttttttcattttgaaaagcctgagattgtctttaatactaataaatggaagataggagattgttttcttttttctttttgtctttctttttaaaatgccatccacgtggtggaagtattattttttatattattttccacatactcttagatggtaaattaaaatggaggaaaattagcatattgttcaatggtatatatataaactacataataattatagaagtttatacagtaggtagtagcaggtgcatacttttctcctaatgtagagaactgttttgtttttattggaaaaattatgatgtattttattttatatataatggtgtatagttatgtaagaaatctgtgaaatttcaaataattaaggtaccaaaaacaagcttttaacataacttgttttgtataaaacaagtttcaaaataacttaattcgtgttggtagaaattatttcaagaatttttgatcaattttaaataactatatcaaaaaatttgagaattcacttaaacatatatctttcaaatcaacttatgatcggttagaattctctctttaagaatataattttattgtgataatgtatttttggttctaatttagttaaatactttttttgtactctccattctagtaaatctaaaaagaatttttttttattattttttaaataaatcatgtaattttatcaatagcaatgagctaaaataatagcttataatttaactaggacatctcttttgttggagatacaattaggaatagaattagaaaaactagttaaatattcaaccgcctaattctcatattgtttgacaaaaaaattaaaaataaaatcagatttaaaaagaattgtaacatcacaaataaccttaaaaatacttatattcattttcatgtgtcgctcagaagatacaactgcagaaactattgcaacaggttcatttaacctcatagcttgatagcttgagcattcaattattttgtaagttatgtaactgcactactaacaactccttcaattttcagtcgtaaataacttgttattcccagccacaaataacgatttgatggtgagtcatcgaaaataaaaaaagaaccaataacaaaaaaaagaaataaaatcatgtcacacaaacaagactaaaacactcaaaatcatgtaacagagacaagactaattgtggtagcgaaaattaaatcgcaatagcaaaatacaatcccgatcaaactgcatctatgcctagggaaggccactgaacctggccgaagaaaaaagacaatcaaca

SEQ ID NO: 117532 - DNA, 998 bp, Cannabis sativa
aaaaaatttaattgagaaaaataactatcattattattaaagctaaaatagaattctaaaatatgatctcaaataaactacaaaaaaatttagtcatgaacaattaaaaaaaaaacaataaatgagattaaaaaaaaaaatagattgtgtaattcttcactttctttttaaaaaaattatcttgctttacctattgataaaatccttgtagattatacatataaactagtctctctccctctatttttttttttaaattatctctcctcctaaaattttgcatttcaacaaaaaaaaaattaagccattaaaattatgtcaaagaaaatagttttttttctagctgcattccatatagagatgatagaagctcttaatctcttatacctaccccatttttatatacattttttttagatcattccacgattttttttttctctcatccctaaaagttgaaagtaaaaaagggaacaaaatcctattttgcagtgattattatttaaaattgacagtttgtgaaagaattaatgagcttttcatattccttttaatttatttatcttccatgaacattttatttcttgtcacatgtagatgtgggtccaccactataataataattcttttatactcttttatgctttggtatataaataaatctaaattattcactgccccaaagccacaccagtattatatatctaaacatgagcctatcatatagcatgtggcctgtcgtgttagcgaactataatcttccaccttgattatgtatgaaagacaataatttcatgttggccctacttattcctggacgaaaattaccaggtaaagacatagacatggatatatttctaagaccattggtggatgagctaaaagaattgtgggttgatagagttgatacgagaggttgaaggacaaacactatgttcaagttgcgtgcaacccttttatggactattaatgattttcctgctcgaagtagtttgtct

SEQ ID NO: 117533 - DNA, 1934 bp, Cannabis sativa
aaaaactttacatttaattttttaaaagacaatatttttgttagtggggactatagcccccacaataatataactaggtttgtcactgttaacaatcaacctggtgcgctggtttcgatcatctaattacaaattctactccgagcattctctccaaaatgatcaaaaataggagtaggatacttcgtcctcaattttcagaaccttagaagtatcaaaatgacatctcgaaagcttcgaaaagagcacccagcgctcaggttgacatacggtctggtgcgttggtttttgcttatctaattctgattccgtctcgaccattcatctagtttttcatagggaccaagagctatgaagtcaaaagagtcaaattcactactttatatttttaattttctagaaaaatcacttacttagaaatagggtagtttcactagaacacaaaaactagctaagtgatgtcaaaaaaatcaacttaggcctcagaaaatacacccctaacacgtttttccactcacccagtatccaggttgacgtcatatgtcaacttgggcgctggatgtcaactcgagtgtagggaacagaacaaccttcagtaaaacggtcataactcactcaatattgatctgattgatgcgattcaacttgcgtttcgaaactattttaatgctctatcaagtcatgtctcatactccaatcccatttctgaagctatcaactctaaattttatcctcaagagagttttgaatttaagctacaacttactcgaaatggatccttcagacgggactcaatctctagaaattgatgatcgaccttcagagtcaatttaccgttagatcatcatcaatggtcaaacatatcctaaacgtatttttttcatactttttagaatattttattattattttaatatgacctcttataggagagctcctctagctcattttgcacattcataaaagtacccataaggtcgaagcatttctctctattttctctctctagaaattagagcatccatatttaactattttcttgtaattctcgcgagaaataaaaactcgaagtagacgtagctccattaccattgcgacatggagagtgagctactataaattttatgtgtctttctaaattatttacttaaactcattattcatctcgccaattaaaaagaataatattgactatttttcagcgtctataattataattacttcaattttaaatatataattttgttcaaataataacttgtaggtcatataactatacattaaaattgaaattatgtaaggagtttattattaagaaagttttatttgaagtctaacataagggtattacaatttactaattaacttagaggtgttcgattcaaactcatgccttttctcattttccaattcctcttttaccactgaaatagccacagtcggttttattattaacaaagttggaaaaggattatttatcattgaatagataaatatcatattaatgaacaaatcataataacaaagtaccaaccaactacccattaccaacttggtaactaaccagtgatacattattagtgtattattattattatttatataaaaatatatattgttttattgttgtgattttatattatttggaaatcacgttatgtgagtaagaggtaggtacagaaatttaaattatatgcgaatttattaagtggcatatcctttggtaggtgttatatatttggataacgtttaatttaagtcaaaactatacctctatccaatgatatgtttggttctcatccttccatttttcgacctaccaaaataccagtgacgaagccagaaatttagttgagtgagggcttgaataaatgataaatgtatctttcaaattttcatcttcaacaaaataaaataatactgttgacaaaaat

SEQ ID NO: 117534 - DNA, 1698 bp, Cannabis sativa
  modified_base (41)..(48): a, c, t, g, unknown or other
ttttaaattatttcaaatatatatatctctctctctctctnnnnnnnnctctctctctctctctttttttaaattctctcagttaattttgtattaaaaaatatctatatgtatttattctattaaattaaatattaaataattaacaaaaacacttcacagttcacattagttttatagcaaatttggataatttttttaaaaaacaaaatattttagtaaactttgtacatagtattttttccaattttatattttttgctttctagttaattatgatttaacattttgtgtcatatgtagtttaggctttgagtaagtatgggctaatttttattgaattatgacaagagtgctaaacatatctgcttaaccatttgagtatatatattcaaatgtattttcttttctctacattttatttgaattttagcttcagatataaagtttatttatgatgattcacatagatctatgtatattttgtcatgtcaaccttttttttttttttgggtcaatcctttattaaaaaaaattgttgcataataggtgcacgtaatttctacttttatgtaactttttttacttgattaattttattattttataatttaatttataaattcgatattattctaaaaagtagtagttactcaaaaaaaaaaaattgttctaatatataatagtctaagtatttttttcttcaaaaatttatacattgataataattaaaagtgagatacagtgatgatattgattacaaaattcataagatgaaatttttattgatttatcaattatttttttatatttttattttttaatttcgaatcttttctttattataatgtttatatagaagtgagtatttaatttattaagtaaatttattgaaagtgataactataagtaagatacaataataatatttacgttgaatataatggtgactagcagtaagatcaatgacgaaaaccaataaggccaaagggtgccacacaccccctcattttttttttaattatatgcaaaaaaattattaaaaaataaataaatattttttatatatatatttacatatattggctcttgataaattttgggctaaacggttttgaaataataaaataatttctttttatagatttatcaattattttttctctattagatctttattttttgtgacaattttttaattttgggcgctattttcctttttttttttttttttggtacttttcactttatctcttaagtgtaagggtacttcattagtttctccattttatttttcagaatattttattaaaagtttactttatttattttatctcacattttttatattacaatgtacatcatcttctttatttatctatctattttatttagattttatattttatttatatgaataaaaaagttaaaaatattaaatgagaaaatagaaataatgagagagaaactattaaaatattatttaatgaataaatagtgcttctttacatttaaataagcactattcataatgtaataatttgagctattttaactcacttgatggagccttattttaacacattttctttatattaatttttagaataattacataaggcactattttttgtaaaatatttatatttttacgttcaaagaatgttttctttacatttttacggttttccaaaaaat

SEQ ID NO: 117535 - DNA, 2158 bp, Cannabis sativa
tccctgaactgagtgactaccgaatcccccataagagaaatgccagccactttgctttccaacttccctctctttgccttggattctttcttcattgctacctttctcctatttcttttgctatgtttttcaaactgcttcccactacaaagggcgtacatccatccaaaacatgggcttcatgtgcgtaggaaattggaatgttatagagatcttggtcctgaatttcgttggacatgaccgtggctgattttttcagcttcccgtagcctgagactccatagtcttccacgattcgacgttttccccggcttccatcatcactcctaccttgagtctcctctttcccaatgtcccctgccttcaaaccatagtcctttggtaaagactttgacccccttctatgatctgctgtaagtggccgtgattggtttctctgccatccttcccattcgtattcccaattcttacgtctcccatagcaacaagagaaggagaagcagtagtagtcattcctttgatgggtgtcggttgcttcatagtatcctctagattactgtgttgtcccattccttgtctattaccttgcacagcttctcggaccccattatctaccttcagccatcttccatacgcagtagtaccttcatttccctcctcctcgatagtgattggatcttgatgacaatctttatggcaatgcccaattcttccacacttaaaacacatgaaaggtaattcatcatattggaatgctatccacttcttctttccttcaccggggagaggaaaaccaggacacactggtttgttaatagacatccagatttggaatcggaagaagccatctgctaccatcatggaaatatcttaattgtgcattgtaatcacttcccctacctcagctgccattcaaactgtgttgtttatagtcaaaagatcaatcggaactccccatggccgaccccatattggaaagctagttaaatcattcttccaagattcattagaattttccatttttcccaagattagcaccccattagataaataccatggcattttagataaaattctgctttgaattgactcagatgcaaatgtaaaagttaagaaaagacctgtgtcgaacttctctttgatcttgatattccattcgacatccttcaatcgtcatatccgtcccaacactttcttgaggaatcccctactgtgttctgagtttgtgcaaaggcggcccctcaaattgtatttagcaaccgtgattgacaagctcttattaactttccgttcttcatcttcatccgtgacctgaagattgtgggttttcttcaaaaatttaatccatggtggaggtgatcacctcaatcccagcaaacgggaacccttcgaatgcgagggaagaagacagggacaaggctgagtcgaaccctagcagagcgggaaaattcttttagagagagagagcttatattaagacaggttatttttattcctaatatatcttaacttttgtgtgtaagtttttatctttgttattttatggaactaatttacttaaaaaaaaaaaattaaataattgataaatataatcgcgtcctttatattattttttaaattattgtgtggtattatttatttttatttgtttttatgaaaccgattctatttatatttatgcttcagtatttttagaattgatccccacaaataaatgaagtattcttatatatatgttctcttgttgtgtctcgcctccccacattttgttgtatttgtcatgttgtttctttttccagcaaacttccatcctcttttttattgccttccaaattttaccatttttaatgggaggtaaaactattgatgtccatgattctttaattctggatacctcaaataaatatccagtgattggtttaatttgtataatttgaaactaatatttgttaaacatacggaacaatagtcgaaaaatccaaaacaatattagaaaaaccatggcagttccaatattaatagttttgatatttttgcttcatctcactgaaattaattgtaatgaccgctttagtaatttggattagtaaaggcaattagcactaatttttattattttattattatttgtgaatttttttaattgtggaccccaata

SEQ ID NO: 117536 - DNA, 663 bp, Cannabis sativa
  modified_base (604)..(614): a, c, t, g, unknown or other
gttgggtcggatattgaccaacaactgttatgcatccagtatccacatttgaatgtgaattttgaactaaaattgggtcttatacaattattgacttcatttcatgggctttccgatgaagattcaaataaccatctgaaggagtttcatattgtatgttctactataaaacctactttagttaccgaagagcaaatcaagttgcgtcctttttctttctctttgaaggatgtagctaaggagtggttgtattatttaccacctggaacttttgacacatgaaatgaaaatagtgttcttggagcataatttttcattctcaaagttggaagcatcataaaagaaatatatggtattgggaaagttatagtggagtcattgtatgagtattgagagcgattcaagcagttatgtactagcttccctcatcaccaaataagtgaacaactcctcatacagtactttaataaaaggcttactataactagataggggtatgattgatgcaaccagtaaaggagcactaattgataagactcctacagcagccaagagcttaatttcgaatatggttgctaactatctttcaaatttcatgttattnnnnnnnnnnnatattcaataaaataaaatgataatttaatatccttttctgattttata

SEQ ID NO: 117537 - DNA, 2636 bp, Cannabis sativa
aaacgatcagcaaatgtagcggctcattcctttgcaagggcctctatatctcaccctgatcgccttttcaatttggacactgttccgattaagctgttaccgagcttggtaacagaattattcgtttaataaatgatgactttcattttaaaaaaaataatgtaaaagaaaaattaatatttgatttaattcaaaaggatatatattaagttgatatataacattctttaaaaaaaaattgatatataacatgaaaatacatgaataataataataaaaaaaaagtagagaaaagaaacgcatagtgtcagattttaacattatatatattaaaaatctttaggtgcgaccattagggttgacaatattgttcctaaaagtcaaaaatagaattttgatacgctttgttaggagtattagtagtgacattgtcggtccaaatttcaggcgatttttttgtcgcccctaatagtatttttaggcgcaaattattagaggcgactttgtagcggtaacttatcacctctaatcaatattagtggcgaaatcttatagcttcaggggctactttttccgccgctaatactcataattgttgtgatataaccaatctttctattctaatacttaacttgcatatacaattttgtttttaaaaaaaaagtttgcatatacaataaaagttgatttgtaataataattacaatgtaacagatttaattattagaatatattatatgtttaaataatttgattggtcgatcttaaccatttttctttcctaactagtattagatttatatgtatacatgtttgtgatttcttttactctttctttcaagtttatttaattttatttgttcatttacaaaatatattattaataaattaaacaaagttcattttattataataatataatcataggggtcattgatgattcttcttgtcttctctaccacggtcaagaggaatcaaatgcatacctattctttgaatgtccttttttaaaagcttgtttgtttgaaatcaagaattagatgcattggcatactaccaccgattcagcaactaaattagtgcaatagattgcacggtccaaggttagtaataaattcaagaagaaagtaatggcagcggcattgacaagtttgatataccatatttggaaaaataaaaataacaaggtatggaatgataaatgtgatgatgtaaataatgttgtaaatagagtcaacgaaactacaaaagttagaatatttgttgtgtggccaaaaaaagttagtataattgatacaacatggtttcatacattgtaaaaagttttgagattttgaggtcttctatttgaagatgctctttggttgtaaattagtgtagtaaatgaatatacttgctgatgaattccaaaaaataataataatataatcataaaacaaaatatataaaaagataataaacttactaagtcaataatcttactcaatattgatcatgagattattggttattttgataagtattttttttttttggtacaaaagaaaagtatattttattgtttcgataacatgttaagaattataagattttatcctaaattaataggtaatataagtagtaattcatgcaattatatatgattaaaagttggagaggtgacttgtagaaaaacaaaaagtgggtggtaacagacaccttggttggttggtttatttttatttttctcttaaattcttaggaaggtttttttttaataaattattgaattgtattaataacaattaattaaaattataatactctacaatctaattagaatatctctcccgttaaaaacacgatcaggattaaaattaaaaaacgagttaaataatcagccacatatatgattctcaaattgtttgactaaaaaaattaaaataaaatcagatgaattcatcacatccttaagaatacttatattatgtttcatccaccattcagaaaagaaaatagtaaaaactattatagtaagtttgatcattcaacctcgtagcttaagcactgtatagtgtatggtacgtaattgcactactaacaatacattagttgtagagaatttatattattctcaactactaagagcgatttgatggcgagctagccatcgaagaataaaagagaatcaacaacaaagtaaaactatgtcacacaaacaaaattaaaatactcaaaactatatcatatagacaaaactaattgtagtagcaaaaatcgaattgcagtaacaaaacacattttcgaccaaactgcatctaatgcccagaaaaggccgacaagtttaggctgagaaaaaagataacatctaatagctataaatgtagaaacaaaaaactttaacttttttatattgttatgaaaattattaactcactctattaaatggactgagcatatatatatatatatattatatatattttcaattaggaacggacccattaagattaatgtgggggcagtaataaaaatattgtcttttaaaaaaataaatgtaaattttttaatttaataataataggctaaaatagtagaaaagcccccacaaaattagataaatttagtaagattaattataatgtagttataaatat

SEQ ID NO: 117538 - DNA, 3044 bp, Cannabis sativa
aagaaacatgccatttagtattagaattatcagtcatagatacaaaacaatccacatgattagaggagtaattgttaatatgtacatcgatagcagcagtccaaaacagaagtaaccccccccccctaagccccttctaggtatttccaaaacattatcaaaagaaagcctagacttaaaactaagactacaaccagtccctagcttagattccattacaaaaagaaaacaaggcttatgctgcttcacaagaagggagagatttcggaatgctcggagactccccgaaccccgagcattccaacaaataaaactcatttttctaggcggggttgctcagcaacacccagtggtacaacatgatcagaatcatcagaagaaatcagctcaacacccctagcagcccgagctcgtttcagcatacttcgaacggacgaaccaacaacaacctcctacctagcaaaagatctcttagtacccgagcctccactaatagtaagaggcctaggaggaagctgaggaacaaaggaagtaggaggctgaatcccctttcctttgtccataggcgccaaagataaagcagcagaaataggggtttgaatccccttccctttgtcagtatggatgatagaaggagcctcattcacagtcacctgagaaacggcacataaaagcctctggaaaccagagaaaagagaggcagaagcctccacatgttgggatgaaataggggatgagacgatagtctggctagcaaaggattcctgagtaaaagcatgactttggggaaaaccctgattttgagtaaaaacaggaggttgagatgaagtaactggggaaagaaattggttgacaggatcttgaagatcttgattcggcctcaaggatcgaaggttcatttcctcaaaagggatagaattagctagctcaaaaggatctctcttgaaatgtgatttcagaggtgctctaatattctccttgtaagggagaacaggtggaacacatccctcatcacaactctgaaggaaaaaggcacacttcgagaaattatgatcaagccctccacagaaatagcaataattttgaagcccctcatatttgaacagaagccacttagttctacccaaacttcggaaaaaaacctgcattccccttctaataggcttagagacatcgatcaggatctggattcaagggaaaggacccgagatttcaagtaggttttgtttatggatctcaatcagatctccaacatcatcagcaacaaacttagcaagagcaggggtgcgaaaaccgaaaggaatgtaatgaatttgcatccagaaagggacaaatcgaagttgctccgattggaaaaggtcaaggccctctggattagcaaagaccataaggcagtgatcaaaatgccaaggctggccttcaacaaccctacacctatcaccatcacaaccaaaatgagccatgaaaagcccagaatggtattcagaaaaattaacaggataacgtaaagtccaagcctccctcatagctttatctaaccagtcaaatttgagagttttttgagtgagaatgttgacaactaaacagaaagactcagacgaaggaccactacccaaagaaaccccatcaaaatcatgaataagggcctcctcatcattcaaggcaagatgacgaggagaactacgactggaactcgccataacacttaagaacagacttagacaagaaacaagagaatgacaaacagagcaaataatccccagggaaaaattgaaaactttaagcaaaaagtagtagtctatatataggagaacaagatacctgcagaagagaaacatcggagaaagggtagaagatacccaatccatccctccattaaatgtagtctggcatgatccctcgatagcagaaataatcatcacccaaatcccctgagttcccccagtgacggtttgttgagaagaaatgtcgaggaggaacaaataagggttaagaagagactgtaggtttattaaatgaagatagattttgttagatttactgggatgcattaaatgcctttgattaattagccagaaaagacaaaaaatcaaaggagaaagaagggaaaatcgacggctacacctaatcatcactaagatgaggaaactggagagtccagagagaaaggaaaaaccctaatagaggattccagagctataaaagccaaacttgtgtatatgcatgccactaatttttttattgagggcataagtacaaacaatttaaaaaaataggaggttttactgtaaatatactaaggactacaacaacttttaacagaaggaatttggcagcacaaatgattgataaaatggaattttgctacaaatttttttattaaagggttaagtgtgtcactaactaggagtattgccaagaatcatcatatatataattaatatcaaaattattatagtatttttttactagaaaaaatacatgcaaattaatattggaataataattaattaattaattatcattaatattgttacacctaaaactcagctacacttcagaggatgatacgtgtcaagtagtggaatatgaaccacctggtataataaatttatatcatttaatgtaaagaaaaataatgtttcgttaaaagattaataaaaactattcaaaactcgctaactatgtagtcttaagcgagacaaggatataaagctattaaaacctatatcgacgagacacatacctgccgcgaaatacacacgccaaaaagataactcatttattcgccaaaataaatgtagtatgcaaagaaaccttgggatacataaagcgagacgtccaccttgctattcacaagaaagttgacgaggcaaatgatttgttaatcacttagcgtatttttcacattacaatagctaaggataacaacttagaaagatgtgattgtccagtctgcaaggccttttggtaaaagagcagttcttaagtttgctcagtacactggtactcatgccattgctggaaggcatatgattgtccaa

SEQ ID NO: 117539 - DNA, 1224 bp, Cannabis sativa
ttaaaactataattttattactagttttttttttttaagatttattcataaatttttaattataatatataataggaaaaaaaataagtcttttcttaaaaaaataaaaaatgggccttaaaaaaatggggaccttgtgcaatggcccaggctgcccaatgctttggtcggccctgcccgtgggaaaatatgcatccctaccccaaaacctctctccttctccctctctcatgattctcgctcagttaataaaaaaaaataataaatttggatctgttttatttatttatttagggaaaatattggtggtgggtgacaataatagtgtggtggtgataatggtagtagtaatggtggtaataatgatagtggttgtgtgacgttggtggtgttaatggtggtggttttggaggtgagggcggtgtaactaccatggaaggaagaagaagaaaaaaaatatttttaatttatttatttcaaattttagtttattttatttatataatattaaaataattaatattgagtggaccacttaaattctgttaagtatacatttgagcagtctatcttggcattttaaaaaaagtgtatatactaaataacataacaaaagggaagttaggaaggttttattactaaaaaaattaatttgtggggttaagtattacaaataaaaacagtatatttcaaatagttttgctgtcaatccttattagttaactacttagttgaagcaagtaagtgtaagtaattattacttctataagtttaaaagatgtttgtaatagattagacaataagaatctaaaaaatttgagtaaaaaagataaaaagtgagtggaagctttaattaaaactttgtaagtaatatatttgtcttgtaaaattgttttgttgagattaatatgccaaatctgatttaccaagaaaaaaaagtgcaatggaagcaataactacacatcagcttttctatattttttatataacatttaaataatgtatttataatacattattatattatattatatttatttacttttacacttatatttactattcatgatctaaaaaattgaactattatgcacatgtatctttgatatttttttaccacttagctatatatactaggtgattgttacgtgccaagccacgtagtgttagttttatttaatattttagttttttattttaattaataattaaaatagtataatt

SEQ ID NO: 117540 - DNA, 1532 bp, Cannabis sativa
cctagacctaaaaggaagcacatagtttcatgcaggtggatgttcaagcaaaaagagggaaacaataaaggtgatctagtaaggtacaaggccagactaatggctaaagagttgcacagaaagaaggcattgctacactgagatattcttccctataatcaagtataaaacgataagaatcatgccatgactggttgttcagtatagcatggaagtggatcaaatggatgtgcctactgcttttctataaggtgaactagaggaagacatctatatagaataacctaagggatatgacattaagggcaagggggacttagtttgcaagctaataaagtcgttatatggactcaatcagtcccctagatagtggaacaagatgtttgacaactttatgaaattagacagggattcactagaagctactatgacacatacctgtactttaataaaaccaagatggaagaggtcatctacttactgttgtacgtagaggatatgttaattatcagcaaggaaagagtcaatattaatatgatgaagcaactccggaattcgaaatttgagatgaaggaccttagagtggctactaagattttggaaatttctatcattagtgggaaaaaagaaggggatcctaaagttgtatcaagaagactacttagagaagccaattgagaaattttttatgaaggaagttaagaagactagtcaaactatcacttatcaataccaagtctttaagaaggatttccctacaactaagatagagaaagaacatattagtaaggtgtattataatgttatgggatcaattatgtacctaatggtgagcactaggtctgatttggatttttctataagtgtactgagccaagtacatggctaacccaggataggttcaccagttagccatgaaatagatctttgggtacttaattggaacaactaaaactatgttgatctataaatagaacaagaattcaactctaattaaaggattctgtgattctgattatgcaagggatagagacactaccaagtctaattttgcttactactttctaataggagggaattgtgttagtttgagagttcaattgcaacccgtgatttcactctcaactactgaagcagaatacatatatactacaaaggctattaaagaaactatgtgaatcaaaagaattatgtaagacctaatgctaagtaatggaatgtctacaatatacttagacaattaaagttgcattgcaaaaattctgcattcactactacaaaaatgagtttttctgacgtttttaaatagtcgtttaaagtattcccgtcggtttctataaccgtcgcctatacaaccgtcgtaaaatgggcataataggcgacggttcaaaaccgtcgctaatgtgggttttccgacggttttaaatcgtcaggaatataaaaaaaaaatgcaaatttttctgccattaatggttaatggcagaaaaatctatattttcccccatttttttcctccattagctttataattt

SEQ ID NO: 117541 - DNA, 2217 bp, Cannabis sativa
ggatttctccacttgaatggcttcggagaagctgaaagcgattcgtccttctttgatggatgtcctctcctcttctgaccatggcttgatatattgtcgacagaggtcttccctcgtggtcttcccatgcgtttggggggaacttgttgttcatggcagctagaagcaaatgtcgtggggtttcaggtctagtggggtttccacaatgttgggggtactatccgactgcttactgtcgggtgttcccatggttggatagtttccatcgtgtttttgatcatcctctgcaactgagtgtttcccctttggtagcgactgtgtgtctgtggacggatagaatcgtataacgtctaaagcttttctcttccttgggccagtgagatgttcattaactctaaaatcttcaatgtctaacaatgggttgaatagagtgggctctctatggaatttttccacggtaagagagcccataagaagctcacgacccttaggttgggcccaacagctacaagaaggccaattaaccacacgggcttgagatccaagtggggatgttgtataaggtggggatgttgtatagggtgagtttgggctcagttcggacttattgggcctagtctcctcttgacaatgaccactcacactataaggaacaaaagggggatgaggccccagagtactatgtttctctttgaggttaggttgttgttgtttttctccatcacataagttgtcctccttcaaaatggtagtctctgcttcagacgtgcccagcccagagcattggataatgatatttgacaaccctttttcaaattctttccctgatatggtaatcttggtgaaaggtatagatgggttcctggggccagcatcaataaggtcttgtataacaaccctcttgacattattaccaaaaggggcaaactctcaattgctcggcagattaaccaaggggagttgcataacaactgcctccatttccgttgtggtaaccgctgtcgactcgttgaaattttcaacaattcttcgtttggacggtaattccatacgacactccctagtttcattattctcgacattttgaatagctttgtgaacccgtatttggctacagaggaccaggtcttttcccaagcgcttttgcaaaatccaatcctggaaccatttggcgagaggagtggcgaaagtggattttttcttagcatcgttcttcaaccagaccccatacatggggtaaaagttgccttgatcatccttgacaatggttggcgatttgaagcaggagctttgatcatggttgagtgtgccatattaaagcataacttggggagtttttcatatcggtattgtatccataggtcttttagacactgtcgtcgtaggaaaaggcccgaaaagattggggtgttgaggtcaaccgtggcccctaaatcgtaacgtactcatgcccactacatcttcaatgccagggtggatttcatgaactggggaggccttagaggcgagttccttaaagttagaaagattccaataaaatggtgggatgctctctacattcacccagatgggaatttttgacaaaccggacctcagccggagttagccatgctggccacagcatgatgacaataagagctccacacacgaaccaaggtcttctagccaggacattcattgcatcatccctgttggcaaagttgaactgaatgagccctcctcctctatctccttccatttccagcccttaataacattccatgaaagcttgagggatccttgtatagcaacattctcgagtctatgtaataatcttaccaagtaacaccctgtttgattcttgtggttcatcaacctcgcaagggttgagattgaaagtaatatcactctgtgagatttgtaccgagtcttcaaataagtcgctgagccccgagagatccatcaagttcaatgttggatttacagttcactcaagtgaaaaagtaattgatagccaattctttattaacttcaccgagttaagcccctagatagcattaacttttttttcttctttatttgagatatcattatacccaagttgatgtccaataacaatgtttcattttaaaatatcattgcaaataaaatttaattgtttagtcattagaaattgtgaagactcggtttgactcagtcaaaccgagtatatatataataaataaattaaatataata

SEQ ID NO: 117542 - DNA, 2603 bp, Cannabis sativa
  modified_base (2318)..(2324): a, c, t, g, unknown or other
tttttttctaagcacatatgtaacactctatttaacatgcttttttatttcattcaatttttattcaagcccttgaaaaagaaaatattcaagccctcactgaacagaatttctggctccgtcactgcacacattgtagtgtagtgagttttgtgatcgtccttgtctcatcacaatatctcacgagttaagaatatattatgattacataatagtactcatctaatagaatctaatagcccagttagtaaaaaataccacatactaaaatttccaacttttttacttttatattgtggggcgaattttttttcttcaaaaatactgtgtaagttttatactgtgtgtattgtgttaaggtttcattgttattctacgattattttttaattattccactgttgttttttagttgttctgttttgtgttccactattattttataaaaacacagtatttttgaaaagatttctgtgtgacagtgtttttgaaaaagttaactaaaattctagtatttttgttaacataaaataatttaaaccggttataattgaaatataacaggttctataatataatgaataaaaacaaataatacaaataactcaaacacgttataattaaaatagaacaagttctataacaatattataatgaataaaaataaataacacgaaacaacctcaaacataactaaaatagaaagggtttatataacataatgaatgagtatttttagagtagatatagtataagtgtaattatttggtgggttgaagcatgttgaatggatgtttttgtttgagttattttatttaactgatttttgtgtgtgagtttttatcttaaattctttacggaaccagttttttgtcttaaatttttaactagttgataaatataaccggtttctttatattatatttgagttattgtatgttattatttgtatttatttattttgttatggaatcagttcttttcatatttatacctcaatattttttagaattgatctccattttttaaaaaaaaattataatcggttttatgagacattatgtgttatgaggtattttattgtggaactagttttatttttaatttatgtttcagtatttttaggaactgattttctatttattttttaattgtaatcgattttagttattgcgtgttacttgtttatattcattatgttatataatcggttttattttagttataactggtttgagttatttcgtgttatttgtttttattcattgttacactgttatagaaccggttctattttaattataattggtttgagttattttatgttatttatttttattcattatattacaaagccggttatatttcaattataaccagtttgagttattagtttttataaccagtttgagttattagtttttatatttaaattataaccggttctattttaattataaccgatttgatttatttcgtattatttatttttattcattataatactgttatagaaccggttctattttataactaatttgagttattttatgtcatttaattttatttattatgctacagaactggttatatttcaattgtcggtttgagttattagtttttattcatgaaaccggttctatttttagttatatttgagacatctacttttgatgacttacctagtatttctcatgcgacagtgactttttcagggacggtaatttttcccgcgattttttcggtgacaataatttttacggcaaatcttattattgttttacaaatatagggtttccacttttattaataaaaatatagcataaaaaaatccatataaatgtaaaaaaaaaataaaaaaacttacaaatttataatattatttatttatgccataaaaaagtaaactatactcaaaatacccataaattttatgaaaattctccaaaaatttattctacatatacattagagtttgtatcaaatgggctttttcttagttatcctattagtgtatcagtttgaaaccaacgctaatgagctttatgttttgcgcaagattagtaattaacgcaacttccttcttagtagccaattctaaaccaatcaattaggtaagtgatgcaaaaataccattttaaattagtaaaacaaataaaaagtaaaacaaagttttttaattatacaaaattatgtcattattaatatccaactcacacaaaacaaacttatatttacaaaaatatgagaaaatgaaaacaagttttgatagatgacataaatacttaattatactaaatataacttttttttttttnnnnnnnaaaaaaaattataaatatagaaaaaagtcatgagaaatgctataaaaaactttaaatttgtgtgtgtgtttttttttcttcatattttaaaaaataaaacactaaaataaataaaaaatgatctcaaatgtagatgttatttttttttttcagaaattaaatctgttttttatttaaactaatgtttttttggttaaaaactaattatttcattaaaagtagtagaaaaaaaaatcagtttcatcaacatcatccagaaaaaaaaaataatataaaaaa

SEQ ID NO: 117543 - DNA, 1834 bp, Cannabis sativa
gttggttttggaggggacctcctttttttaggaatttggatgttgatgtatttttaactaaattttctgttaatcatgttcattgctttgtctttggtgtcaattttttggttttaattttattgatttttatggtactccttatcccactaatcgttatcgtacttgataaattcataatggaataagtctttcttaatttttcctaccttgacttcttataggagattttaatagttttttgacttgggatgataaaaacaatggtaataatagtaatggtccttctaattcctttagggagtttattgacaaatttcaggttgaagcccttgactttcaagggccttgcatgacctagaacaataaacatgctagccttaaaaatattcaggaaaaattagtttgggctctggccaacaatcactggtttgttctttatcctaatgtttcccttagccatttagacttctttggctatgaccatagagccattttgttgaagtgtgatgcccctccccctaaccttagtcaggccccaaaaaacaggtgttttctctttgagaatgtctagctaactaaagcaaactgggatgaggttattcttaaagcttggaatccttctattagctctagttctcccattcaacaccttgtttccatccaagaagcatgcgctgaccacttatctcattggaatcataagtctttctttgggtttccaaagaaaattgcccaagctcataagaaccttgaaaaggctagagcctttcttgatcattatgaggcttccttccttaagattagaaagcttcaatcttaattagatagccttcttgccaaggaagaatcttattggaagcaatactctagagttaattggctctatgctggggacaagaacacccaattcttccatagatttaattcgaataggagaagcactaatagaattaatcattttatccttgataatggttcaaaagtggttaatattggcattctttatgaaattaagatgtactacaaagatctcttcacatcatgaaattctcgtgatattactatcgattgggccattcatggtgttaatgcccaactcaaccctgactagtgttgattccttgatcagactttctcccccaacgaagtaaggcaagccttgttccaaatgccactggagttaatggcttcaataaccagtttttccaaaagaactagaatgtcgttggctatgctgtcactgatgcagtgatgagtttcctaaatcatggagttgatatttcctactttaacacaacactcattactctttatcccaaaaatgaagaacacatctacccttcgagattataggcctattagcctttgcaccattatctataaaaatatttcaaaaattttggctaacagaatgaaaaaagttcttaacttcttgatttctccaaaccaaagtgcctttcccaaagggagactaaagtttgacaacatatttatggctcaagagctcttacatgccatcaaagggcataaaataagaaaaattgcttggatggcgattaagcttgacatggccaaagtatttgatagagtggaatggtcttttcttaacaaggtcatgctgaaatcaggttttccagccaagttcacttctctgattatgaactttcttaccatagctttatataaatttaatatcaatggccatgtatttggccaagttattcctacccgtggcattaggaaaggggatcacatatctccttacctttttctcctttgttctaaaggcctttccactcttcttagataggcaaaagctgaggaaagggtt

SEQ ID NO: 117544 - DNA, 3476 bp, Cannabis sativa
  modified_base (1779)..(1782): a, c, t, g, unknown or other
tacctagttaaagaaacatgatctaggtgtttatatttattccaagttggattggattttttaaaataaaagttggctagcttgacttatttcctttgactgaaggaatcatgcaatggaatgttattttggatcattgttattatattgtcaataaattgggaataaagaagatgtagattaaaccttttcagttctttaattactggatggagcacccgtggtataaggagctagttatttaaaactggaggaaaccgatgtgtagtaaagggttgagaggtatcattggtaagttgaataggcttaaacactacctaaaaaaatttagtagaaatattttcagaaatatctcattagattaccaagttgcaagataactaaattatggctcaatcattgttggttgctaatcaaaatgatttgggtctgcaaatggtagaaatagaagctacggagtaatttgaccttgctagtgccaaatatgtgagctatctccaataaatgagtaaaatcacttggcttcggttgagtgataaaaataaaagctacgaagaaggctcaaaatcagattactacttttgaaaaaagtggtagattatagatgatatgatcttgttgttgatcattatttttctcatttttgaaattttatgggtaaaataagtttatctacaagaaagattaatttggattgtcttgcttatggtcccaaactaaacttgaatcagatgctttctcttaacagacttttcttgaagaaagatgtgcaagaagctgtttagcattcattcctctaagagcccagatctagatgactttagagcgggtttctttaaggggttgtggtcagagattagggatgatattactttagttgtgctagtctttttcaaagaggggtgaatccttgaaaagctaaataaggttgttatctctttgatccccaaaactaattctccttcctcagcgatggactatagacatattgcgtgttgtaacactatccacaaatgtatctctaaaatgatgtgttacaaaatgagtgagattattcccactctaatccataacaaccaaggagtcttcatcaaaaagatgtcgctttcccataacattctcattaactttaatgagtgaatcaaagaaactaataacatgaagaggagttcatgattactcaagatttaggccgatctactattgatcatcattatcatataaattaggtttttatagtaaacaacatgtttgataaagacaacttaattacatatcggtccttgtcatatataatctctactatatgcaacacattcacttagatgtcatactacatcagtaatctgaatcgagattacttccaccgaataacaggcatcagtgaactgcactagcagccgttgattaaagattctatagctttaatatgttgttgattattttacttgtggctaagtgatcttaattctctgtacagtacaagtcatagtctcatgtatgaataagtaatattctgatatttatatataaattattcaatatttaatattaataatttaattttcaagcatatatgaaaatattcaactcttattataaatagaaatatctttagagacttttaagggcataaaccctgacaaaatggtacaatagttgcctatgtttctcaaaaattgaaactacatgagaaaaattaccctatgttatctgtatggtacaaattttgagctatacttggatcataaaagcttgaagtatctttttactcaaagnnnnttgaatttgaggcaaagaagatggattgattatattgaggattataatttcacttttcaatatcatcttgtaaaagttaatgtagtatttgatgcactaagtagaaagcctcgtgtttggctcttgaagatttgaaaaggacaatcacaatgggtgattataacttgcaataatattaaggagaaaaggtagcttgtatctctaacatagtggctacaccagtgctacttcaacaagttaagcaaagttagtggcaagattaaaagctaaggcttatctagaatagaatccatgacagtgaacagttagatgggtgggcagttaatgaagaagggtacataaaaccataagggaagactagttgttgcagatatccgtaattttagggagtctattttgattgaggctcatagattcaagtttgatgtacatcttagaagtacaaagatgtaccaagacttgaagacacatattggtgagaaggtatgaagagagatgtggctagttttgtagttaagtgtatagtttgttagcaagttatggctgagcatcaaagacctttaggtttacttcaacctttttatatacccgaatgaaagtgggacgagattacaatggattttgttactggatttccattggcacccttgaagcacgatgttgtttgagtgatttttgatcgtttgactaagtctactcatttcattccaatagaaaagaatataagcttaccaggctagctcaaatttatgtggacaatatagtttgactgggtggaatgatttcaagcattgtttctaataaagatcctcgatttatataaaggttttggaaggccctgtaataagccttaggaactaaacttcacttaagtaccgcccatcatccactgatagatagacagtgtgagaggaccatacagactttggaagacatgttttgctcttgtattttggattatggaggtagctaaggagaacacttatcattggtggaattgatcatgtacaataataactacaaagccagtataggcatggatccttatgaggccttatatgggggacggtgcaaattgccacagtgttgggtcgaaccaaatgagcatgtcattattggactccagattatcactagtaccactgagaagattaagggaatccaagagagacttaaggttgttcagagtcgttagaaaagctatgtcaatctccatcgacgagatattgagtttgatgttggtgattttgtcttcttaaaagtttcttttttgatgaatcagaatgttcattgcacaaaacacttttatacaacctataagcaccaaacaaggccttaaaataatctatacaactttgtatttacaagttttgaaaccaatctagatctttttgctttactttttttggtaaaacatacaaagttctattttgaactacccatttcacttgcttaactaaatcagctacatgatgactagttgtattccaaaataagtcatttctagctctccaaattgcataagctaaggccgcaacagctaccatctttacacccttgcggaacttggagtctttggactttcggatacactttagcagcccttgcaaagagtctgactgcaccttccaattcagccaaacttgcaacatcttcaagcaatcaagagcaatgtgatgttggaaattatttta

SEQ ID NO: 117545 - DNA, 891 bp, Cannabis sativa
  modified_base (36)..(82): a, c, t, g, unknown or other
  modified_base (822)..(861): a, c, t, g, unknown or other
cgctcttccgatctttcatcgttttagaaagttcannnnnnnnnnnnnnnnnnnnnnnnnnnnnnnnnnnnnnnnnnnnnnngtaaaataatttccaacaacctccttatctgtaatactgctcaaccactggtgctcattttgggaaaataaaaatatcctgatctgatatgctttggaattgaattcaagttaaaaagccagttggtgtcgtgggcaaaaggctggctccatccctgtgcgatgtataacacgaacaatgggtcaaatacttaatgaccttgggaatgaactgggtcgggtagatcttgtagtagttgaccattttcttgaagtacagatgcaagggcaagattgcgccttgttaagcatgggccccagaacattcacatgacccatctcatgggctcgttgttagctgccaaggatagggtaagaaagcctccactcccccaaggataccctcatcaaagagatttttcaatctcttataagtaagtatggacgaaggcgagaccaactgaggaaccttctttcctttggtgctcaaaggttgggcctcctcacactcctccttgacataatattggcctgccaccaagacattgcccagcttagagacaggttctccgaccttgttgtatccacaaaaaggaagaacttgaactccttcttcctcttccactccagcagaaggacctgcatgacatactttgcatggtcctcaatttcttagacctcgatgtccccagtaacaacttgagcatccttgctcagagcttagcttgctctacactagccatgttgggttttgtgccctannnnnnnnnnnnnnnnnnnnnnnnnnnnnnnnnnnnnnnnaaagatcagaaataatattttatgttgcat

SEQ ID NO: 117546 - DNA, 1216 bp, Cannabis sativa
gagagagagagagagaagggtagaatttctaatatttgtcttttattcctaattgaattaatcctacaataataaaagattaagtagttttatctcttaatggaaagtgatcacatgtcactaaaagaacaagccacctcatcctcaaggtcaaaatacgaaaattgccctcacttaagtgtttaaatactaaaatggtttcggggtaaaatggtccaataccataacccctgcctaactctgatattccaaataccacatatgttcatcccactaagaaataagttatacactcactcatgtgactataatggccatcgattacattttccatcgtcgccgagcaaaaaaaaaaaattgatgctagtgaatgagggaggaatgtcattattagtttagtcttattctatatctcattttctattaaaaattgattttgtatttaagtttgaatagatggtctgtatgactttaatacctataattagaaatgagtgttgggaatgcaaccaaagtcccacattagctaagaatgagaagaattatggatatataaggatggacactattctattagtataaggtcttttggaaaggtgcccaaaacaaaattgtgaggaggacttattaggtcccacaaggtggaagaatatggggctaataatgaaaaatgatgaatgttagatattattttaatattttattaacttaataaatttattaatgaataaatttaattttgttactaatatttttttattatttttaaatatgtattttataatattaattaaaggattatttataagtattattggagaactattttataatattaattaaaggattatttataattgatattgaaagttaaatttttcaccacttaaattatagattttacatatatgatacggcgttagctggggtctcgacaatattgatggatcgagtaaattatgaaaaatggtttcgggcacacagcattgtaatttcggaaagaatgacgtttaatactatcaatcatatatatgttctatacatattacataatgccaacgtgtgaacacaaatccgtacccatttttttcaacgccctttgttttcgttaaaagttcgttccatttatgtataataattcaaaccataatataaatcccagcctaggcccctacctttagtactgcttatatatataaatatgtagttatatata

SEQ ID NO: 117547 - DNA, 1118 bp, Cannabis sativa
actccaatttagaaccgaaagatgccaacaagaccgtgcaaaagaacattgcaccaacaaatggtaaatggtctcaggcacctggttacacataggacaagtttggtctagaggaatatgtttgcttgtatccatcattttatttatttcaaaatacttagtttctacctataaatttctagcagttacactctaaatatttactatagctttaaaaatattaagaaaaaaaaattaaataccaagacaaaaaatgatgtcaaaaaataattgaaaaaatatttcaactacaaataataaatgaacaaaccccgtcagcctaaacacgtgataatcatttttattttccaacgctgtaataatgattattatggagtcagacctagaattacaattagtaaaggacaaaatataacaataaataactaattaattaggtcattgcaaatttaaacatttttatttttgttatgtaccacgattcaatgaaatgaattactacccactaatgagtcaaattcgtataattacaaattattgccatcaacttatttctttagaataaaaaaaaatgggttaaaaagggttatgttgttacaaaccaattatttgtatttttttattattacattaataataaatagagaatggatcactattcttccactatcattggacaataaacaacaatacaaaacttcagcttttactatgtacaaattacaaaataaagttataaataagtaactatatatggattaattgtttttttgaagggtaaccaataagattaaaataataactaagttacacaataaatgaaggattttcttccattcaagaatattcataactattaaatttatttttaaaagaaattacatttaccttttacttattacttgttacttgatagagcaactcaaaagttactttatatatatattttaataaaaattataggatttattaattaataaattcgttcaaaacaataaaacgtacttcagaggaacagtactccagctgaagcacacgacctgtagagaaacaagaatctcttaccaagtaatgagtctacttatttgcagatcgttttacaaaacacaaatcaacaa

SEQ ID NO: 117548 - DNA, 1994 bp, Cannabis sativa
tattaaggcagattaattagtgtaattcaagggctttgtctaattctggtttaggggtagaatattccttttgctgttatgctattttgtcttgttcaattctgttatttcctttttgcttgatttcctctgcttcccgttgtactctgccacctggctttgagccgttgtaatcattgtgcctataaatacaatcattggcctcagtcccctttgagctgagattttatccttactgctgtgtgtgaatattctcacttggtatcagagcaaaggtttgctcttaccatgtcgaccggaagaaatcagaccccagtgggtcgcggtactggtgctgagcaacagggccataactccagtcatcccagctccccgcaagtcacaagtggagtctctcaatcaagctttcatcttggatctggaggttttagcagttcccctttcggtaacacacttactcatcccttttctattaaacttgatagaaacaactatactctttggagaaatcttgttaccactgtgattaggggccacaggcttgaaagctttgtcaatggcacaagagttttgtcactagagtttgttccagccattggagaacttggtggaaacacacctggttttggagttcaaccaaatccagattatgaataatgggttatgtgtgatcagctccttatgggatggctgtatgggtctatgacagagggcattgctacagaagtcatggggtgtgcctctgctagatccctttgggttgcacttgaaaacttgtatggtgcccattctcgtgaaaagatggatgacactcgaacaaaaatccaaactactcggaaaggaggcactacgatgactgagtatcttcgacaaaagcgtgcttgggctgacagccttgcattagccggtgatccttaccccgaggctcatttgatatctaacgttttaagtggtcttgatgcagaatatctcaccattgtttgtcaacttgaagctcaagccaaaattagcctcacttggcaggagatgcaggagactttattgagttttgatagcaagctagagcgattacatctcttgacagcaaacagcaagaattctggtgctaatactggtgcaagcccttctgcagctcttgtaaataaacagtcgaatcacaacagtcatggaggcagggggtattcgaactacagccaaaacaacactggtagaggaaatggcagaggttctaattatcccaataaccgtggaggaggacattcaagtcgaggtggccgcgatcaaggtggtagaaacgccaaaccaacgtgccaagtatgtgggcgctatggacattcagctgctcattgctataataggtatgatgagacctatatgggctttaccccaggcagcaacaactcctcacaaaacacaaaagatcccagcgcatttgtggccacacctgaagttgtcgatcatgaaggatggtatgcggactcgggtgcaagtaatcatctcacttcggaccacgaaaacatgagcaacaagtctacctacagtggtaaggacaagctaaccgtaggtgatggtaatcaactcaatattactcatattagctcaagaaacatgcattcttattgtggttataatctgcaattaactgatgtattacttgtgcccaaaattgccaaaaacttaattagtatttcaaaactaactgctgataataaagtgtttgttgattttttctctgatgtgtgttttgtgaaggacatagcaacaaggacagtggtgcttcgggggaagcttaaggacggtttatatcagttagaagggtccactgtcaagaatgtcaagccgtctgcaactcccacttctcagcctttttctgaatctgcttttagcccctttactggtttagtagagtcaaatgttacccctgctattcaggaacaagtgtcaaagaaggatgtgtggcataggaagttaggtcatccctcatccaaagtgtt

SEQ ID NO: 117549 - DNA, 1083 bp, Cannabis sativa
ggtggtcggcaaggccactaatctcatggctagtcaacctacagagcctatggctggccaacttcttggaaatcaggatgcttcagctcacaatttgaatccccctgcaactacacacaagtagacacatttcattagtatcttatgtttatgattttatttcatattagtttcatgttcatgtatgtcctattttccctttactttttaacattacttttattcaaccttaaggctttcgagtcttgttttggcttattagccctctacttttgaatacaacttatgtttagccttaaagaattttattatagacatatgactgaccaggaagtctttaatcatggctatcttcttatgcttagacatataagtatctaaattgacttttttgaggtctagcaaagtatgcttgcactaacttgtctttcaatttttttcttactcagtttgaaatttctttacataagttcactgtgctaattcgatgcttgcatggtgtgggtgccgcccaagtaagcaagtagacttacggtctctttctcacttgcaacttaccaagtttcatagaccttgcctttgaattttcttagagggctaccagttgtacgcatgtggaactaaaaataaagaataactttaagaagttatcttgtgagcaagtggtttagacaaaatatattttaactgaaacaccatttttactcatcaactggtcttcaatatgtgttgttgttgtgaaaagcacatttattgactctacaagcttacaaaataaaaaaaattcttatagaaatcaaggggctacagctacccaaaatatcaagtagaggcaatcattgaagagtgatggaggcttagctctttctaaactaactcttataaatgagttaatagaactacaactgaagagtagcgtgttgggattttatgccctaaataaaactcatttagatctaatctgatttgttaccaatgaaaaattagaagtcatttatgtttacatgtagttttcatgattgtggtttaatatatacaaaatctgttaagtctagaatgtatagtctttcacaattacagtga

SEQ ID NO: 117550 - DNA, 2273 bp, Cannabis sativa
aaataacccatagcctacattactaagttctattcatatattctaaaaattacaaaccaaatttccattcatataatgttgtgaatttcacaacattatttttttttcaaattaattacacactcacatgacacttatgtggaaattttcttaacagccacattatcattttgttcgccacatgtaacaaaacttgacataaggaccaattaacaacactgtgaatagttcgagaattatttttaacgggttaaaaaattcagaggcactataatgcataggtcatagtttgggggcaaaaatcttaaatatgttatgctcttgttcttcccatgttggagttttgaaaattctttctggtgtcttgaggcctagtaggttttctttgagattgaaagttttcattctaaggttcctcatttgtggctattactttcttttgtgtgtttatttgattttagtcagacaaccaattattactattgatttacgtaattggaagtaaccaattcacagtgtacatatgatgcttttagtgtatgtttccaaattttaaacttcatagtcattgctgacctttttcaggaaaagaattgcagaaggggaaagttcagcccttctaaactcaaaggaaaacgtgttattgaacttggagcaggatgtggagtagctggatttggtgaatttttcttcatattaattttttttttcagaaactcatgcatgttttataatcttcttgaaattagcttcgtttacctagaactgcttggtattgttgcctttccttatttgggctctcttttcaggcatggcattacttggatgtgatgtagttatgacagaccaaaaggaagttttaccattgttaagaagaaacgtagaacgtaacacttcaacaatcatgcagatgaatcctggtttgggttataaatttaaattttctcttgtagtgtgatgaccttaatgagtgaaatggacattttaatgaatggtattcatgtttcttgtagattcatttggttctatcaaggttgcagagttaagctggggaaatgaagatgatataagggctgttgttccaccatttgactacgtcataggcactgatgttgtaagtttattttcttttatgcaatttcacaagaaaaagtgtaggggaaaaattttacttcctaactggtagtcgatcggtggagtagaattggtacttccattttttttttcatgaaatcacatagtggcattattttgtatgtgcttttggtctcattattttatttctgctccttgcatcttcatctggcaccaaaatacatgctttaactttccgataactgccaggatagaaatcatagtagcattctttttttccgataacttcttccattttttttcaaagtcacgtagtagcattattttgtatgtgctttggtctatttatttgttttgttctccttgcatctccatctggcatggaaatacatgctttaactttttccgggtaaatagtgttacaaaactacagtcaatccattttcttattaaggtatattatgtattaaataggtcaatggctgtatgtcgagttatttcatcgttgtcttgcatttgatcaaaacttaagttgtctcagaattccttaatcaaggtctcatgcatttaggactggaaatatcattacttcaacaaatcatttgatccacagaacaggtgctgccatgataggatggagaattgattctcagaactgttgatcctgctaagaaattcctgcaacttttcccacaatcaatctaattcatattacttttcgaaaattaaaattactatgattcccttgtcaaataaaatcaaaatcaggctcctgaattatgagtcttttttaacaccccttattcaactgtacttggatgataaacttctaattattttgaatttaaggtttatgcagaacatctcttacaaccactgttgcaaacaatatatgcgttatcaggaccaaaaactacattgatggtacgacacttgatttgtttgtctaaatatttctttataagtatctcaaatctcaaaagacatatgtatactgctagacaaaacagaaagaaaaagtatagccttctaaatataagtgtagacttaatttacatatttactacatatcatcacgactccatgtatctcagtattggatattataaaaattataatacttttttttttttttttttgtcagggggactaatactttttttttttttttatccaag

SEQ ID NO: 117551 - DNA, 727 bp, Cannabis sativa
ttataatcaaggcttgcgggcttgagacatcacaaagtgggcttgagacatcacattcaaagttttgaaatattttcttgttcaaaaatgctaaatgttatctagggttgagactttattatatttctcgttttaagaaaaataagttcatttttgaacagccctaatggtgatgtaagagctagttaggccacttgtaattagtttagcattctgttatttttttttttttttgttacaaactaattcattctaatgtaattttcactatataaataccattttctactcaagacttgattaacttagtattgagattcatgaatcaaagtttgtcctactatgatttgtatagataagttcaattttcacaaaaaagaaaaaatagactaaaatatttcttaatatataaataatgctccatcattggaggactaggaatttttttttatttttattaggagactataagagatttgaacttgttataatgtacatttttacattaaaaatattagacgatgcatgactccatcacatcatatgaggcaatgaatagtttgcttgtttggacgtggatcgtgattaaataaaagacaaaaaaataaatggaaaatatgcaattataagtgtaacgccctaaataattaggcacgctacccaaaattattatgaaaccctaatcccctaaccgggattactaattaaaaatagcgcagaatttaaa

SEQ ID NO: 117552 - DNA, 1698 bp, Cannabis sativa
gtataagatcttttttattagcatgcaatcagtcatattttttactatgataaagtcaaaataatagcctgctatcatattcctaccagaatagttctatattggtttttgattgtgattacctaagctctactttaatgacattcttttcttatttcgtgcagtaaagatccaggttatataaaaagaccaggggactcgggtttctctgtcgacacagaggtagtttgttcatttcggcatctcttggtttctttacacaaaatttgttacattaacatcttctacggcctcatggttcacatatggagtagagaataaacaccgattttgataatgaatagcaatggtcggctaagttgtgttggtttttccttttccttgtggaacaacttggttaaatgtgatggatttaacattgcaggatctactattgaaaattgatcataactgctcttccgaatggactggaaattggtctcaactttgtccgacctgcaaggtttgcttgttgaattctctttaagatgaatcgaaggacaatgattatatcttcttgattcatactgctgttgagaagctgcttgaattagtttcaaatttgttcccattttattttgtctcagataattagacctgttcgtgctaagcactgtcctacatgtaaccgatgtgtagaacagttcgaccatcattgtccatggatttctaactgtgtggggaaggtaaattttttctttttgtttggattctttagtgtaagaaaatgtaaattcttatgcaattaagatattgcggttcaggcgtggatgcatttgtttttgctcaatgaagctttcttttattaatattgcagaggaacaagcgagatttcttcatatttatctgcatgggaacaatgacggcattgatttctgccgtagtttctgttcaaagtatgttgttgtacttgtaccgaactaatccgtcttgaaatgacctttatgcttttgtatagataagactgcatttcgggctaactaaacaacactaatgattctgttttgatagggatttggacagcgataccatcattgcaaggcgaagagagttggattcatttcgtgctagttcactatcccggcgcagttgcatttttggcgatggatttcattgtttgtattgtcgtgacaacactgaccatagcgcaggcttctcaggtatgtatcgggaacattactagacaactctattctttcgatattcaacttattttcatgaagctttaaatttttatggagtagatagctcgaaacatcacaacaaacgaattagcaaatgccattcggtatggatatctccgcgggccagatgggaagttccgtaacccctacaatcatggttttcggaaaaactgtggagattttctcatcaagggttacacagatgatgagaaaattgcttggcctccattgcagcaagttgcaagttagtagaaccggcctggtcggttggccgaccggccggtatgtgtaaccctaatttgtaggggtgatattttttttcttctttccttgtttatggatgggatgagatcatgtaaaagataccaagtcctttgttgtatgtacatacaaaaacaattcaaataaccaaacaagaaataaaattatgtggatgtccaaatcttttatttattaccattaatgtaatcaacat

SEQ ID NO: 117553 - DNA, 2019 bp, Cannabis sativa
  modified_base (976)..(987): a, c, t, g, unknown or other
  modified_base (1282)..(1285): a, c, t, g, unknown or other
  modified_base (1423)..(1427): a, c, t, g, unknown or other
gggcataaaacccaacagcaataagtaaaaaaagaagcttaaaaaattatgtataattggaaaaaagttaaaattataattagagtgattaaggatatgtgcatattaagagtatttctaatagagagctaaaaatataacgtatgtgcatatttcaaaccatcttcataaaagtaaactctaattatagtatatagagtggtccatatttagtacatgctaaaagttgtgctaaatttaccacaaaatataacatatgctgaattttataccacaaaaaaatattaccttttatttattttttttctcacttattaatgtaattaattattttatacatttttccttcaaaaaaaaattattttatacatttttttttttatatatttaataattttttttataatttcagtaaaaatttaatgtgttagtttcttttatatatttctataaaaaaacgagttaattttatcataaatgctttgaagcactattataaaatttaggccgaatataatttagcttattttttgagcttaaagtatacacaatatattggagatgataagcaaaatactaagagagatactaattaaacaccataaatggtgacatattgttattggtgcatttcattatcggatctcacaaattttgatttagtgaataatatgaaaaactgttaagtaattattaagtatcatgtctgtatattgttgggtatcttaaggtgcgaaataataatattctattattaataataataaaaataatttaccagaaaaaaaatattgtacaaaaaaaaaatcattcataagaaaaaaacaaaataaaaattaagatcattaagaaaaaaatctcatagaagttgctgtaaaaaaattgccattcataagaaaatattaaaggaggtgctaaatactattataaagggtaaatagcggcataagtaccaaaattttatgtttgtaagcgnnnnnnnnnnnntgtttatttttaacggcataagtagccaatgtttgtaaaattgtaatttttttctaattttgtcagtacagactctgttattattttaaacaggacacatttacagtccaaattctagatcattaggcctaaatagaaatatgtagtatcagttacttctaaatattcttttaataaattcaaaacagaatctgtactgacgaaacttgaagaaaattatagttttacaaatattgtgtacttatgccgctaaaaataaacattgagttgatgccgcttacaaacataaaacttnnnntacttatgccgctatttacccttcatatcactatttagcacctcctttaatattttccttccttttaaaatggaatagttatttcaccaaaatagtggaatgagcattctattagaatgtcattccaatactttaaannnnnaccaaacaaaagaatggaataaaaattgtttcgtttccattctattctatttcattacctccaaccaaacgctaccttaatttttgtaagtagcttattataacactaaagtttgaaaaaatcttatccaataaagaagaatatatatttcttgactagatgaaatacttcaaaccagaattatgaaattttcataaaagttgtaaatgttgcagacatagtgttctgttttcaaagaaattttttaattatacgaatctaattatgcaaagtatattacagaagtagagaacttgattccgaaccaagtagaagaacttgaagatcgatcgaattaacaagtttgattgagaactttcataattgtactaattcaattttcaagttcttctatttggtttggaatccagttctcctctcctctccgataagataattgcttaatttgcttcgtataattaagaaattttttgaaaagggaaaatatctgagcatatttgatattgttttctgttttttattttcaaaaaattgtttttagaaatgagaataaaaaatagtttttgaagtttttaaaaacaagtcatgtttg

SEQ ID NO: 117554 - DNA, 2271 bp, Cannabis sativa
ttcgttgcaggttagccacttcgatccctgtaaaaagggtagaatcgaagtggctttaaccggtgaaatcccaaaaacgcccatactcgtcgccgacgaacctgttacacaggccgttgacttcatgatcgagatcaaacccaacaaaattggacttttacaattatcccccaaaaattctccggctagggtgctataaaaggaagcagaattcctaccccaggaagaggccttcggctgggaaaaatcgcatcggtaattgcgaacagagccagaacgatcgaattcggccttctggttaggaccaaaaatccgattccgaacccaacactcatgcaaagctctgcaatttccgacgcgaatcccagccgaggaagctaggttttgggcgacgtaaccagaaaaagagacggtaacccgaagagccataattgctaattggattagtctgatgaagataaagtaaatagtgtcttctgaaagtaaaaaggggttcgatctagaaaaccctacaatccaatgaaagccattttcgctgaaaaaatcagtgaatcgaagacggtaacgacgaattgagctctagtgatcaatctggggaaaataaattgaagacctttgtgagaattaaggcttaaaaattgaaaaattaggagagaaaataaactataaaagtgtcagaaagcaaaaacgaaagctcggagctacccgagcttcggctgagaaagagaaagggtttcagtttcagaggcgaagaaaaaaaaataatgaaaacggcaagaattgaagagaatttgggtttaaatatttggtttggtggcccttcctaaacttttccttcttactaatttgtacttgtttctttccatatttaccataatactcttttttttttctaacttttttcttcttttttttttttaatgtccttttcattttcattttatcagaacaaactatattaaataagtactatctaatagtccttaattattgtaggactcatttggtaattcctatttttttattattttgttgtatagtattggatggtattagtattagtattagtattaatataatattatatttattattgatttgtattaataagttgagtaaaattatattaccttaatcctgattctaatatgaaattttatccaaatattgtgttttttgttatttatgtattattgcatttatttgtaattttaagcgtaatttttaatatatttttttttttgtaaatatattcataacatttaaaaaaaaataataataatttataagatatgctaaataactaggatacaccccttttctaaaaaaaaaagaaaaataataataagtctatcatatatactatcaatttagactttcggtttcaaataattacaaagtgatattttttcttgtaaaaaagtattttgataacatattttttaataagaccttaatattcctaatttagttcaatattttaatgagaaaataaaaggtttaatgaaatcaaaatataaaaactatttaaagaattttaatttgttcaataaataattttgaaacattaaataataaataaaattattttatattatttaatttatataagtactgctgcttcgatcttatcattcgaaaccgaatgtaataacacaaaaagttgtcttcttttttttcatgatgtttattcaaaaataaataaatatataattgtcattaaatttgttttttttttctaaattttagtttttatcaaataaaaaatgttgatgttccccgaaatagggcgggtggtgattaagacggcaaaggcaaaggaagaagttgagaaatgaaggaagggtagtttcgtaaatgaacaaagagaaggttttgcaatcgtaaatttatcccaaaaatttggacatttgtattaataccataagtttttgtttttggttgactttgaccagctctccttggactgggttggattaggtgtatttcagggcttcctcgcattttccttcttcagataaacctcatgacgtaaatgtccctacataatcgagattccattcccattggatgaaaatggggtaggttgatcgagtttcgagttcgtgggttttggatccaaaaaaatttgcaaccgaatccaacccatgaaatgattttgggttagtaggttcagtttggtcggattaacttggttaaggcttttatttttatttgagtaatttgaggcataaatacttaagtttaactctcagttgcaaataaatacct

SEQ ID NO: 117555 - DNA, 1043 bp, Cannabis sativa
cccccccctccttttttttttttgtaattttaatgtctttttttttaaatctcagaattaaagtttacttgaataatgcagaaaaatcgatgataacacatataaagatagtacatggcaaataagattctggcttgaattgagggatgtgacccaaatctatacactgcgtattgcccttgccactgcacacatttccgaattacaggtatgtcatatattattaactactactacatttttttatacatgttttaacaagtgaaccagatatttatgtgaggggaaacttaatttttggtaaaatatagaaaaaagaacaaaaaaaatgttttaatgatgtatttaatcatgatgatatcaggaaaacttatttcttttaattgattttttggctaaaaaaatgattattaacgatacatttgcaatagtgtgggaaaacattgatgttttaacgattcatttgggatggtctgcgatagtttgataaattttggcgacaagacataaaaatcaagttttcttgacactatcacaatatatgaatgaatcgttaaacatcgttttgtaacaaaaaatcatatctttttggtactattgcaagtgcatcgttaaataattttttctcttttaccaaaaatcaagttttccttgcaccatcacaaatgcattgtttgttagacctcttttgtgccaaaatttaagtttttgtgacatctattgcaaatgcattgtcaggtatcacttttctatattcagagttcgaaatcttcaaaaaaagaaaactgtaaataaaaagaaaaattcttatatgcaaatgttagaatttaatatattagtgtctttgatcagtcaatcaatttggattttaatcaagaaaatattttaaaaaatgttgctaaatacaagagagaaataataatataaaatgtaaaagggctgtatgttgtttctatattaataatataagtatgttttaaagattttttacatatattcaatggttacattattattgtaaccatcatggttacgtttttttt

SEQ ID NO: 117556 - DNA, 1027 bp, Cannabis sativa
acggctggaggaacttatttatgctagaaatttcgtgtggaagttcagattattttggttgaagttggggtcactttggtgattttttttaaacattcttaatggcccagattggtgtgtttttttgttttgtctatgaccctccacttaggattgctagaaaagagttttgggaaagtcaagctttggagagtttgactctggatcatccttagatttggttggagaccttagcatgatcttatgccaagatgataagtttggacaaaatggagttgaagaaggagattgtcaaggccttagcgatttgttggatgttacttggggtgtggacttgggaactatagggaatcatttcacctagacaaatggtcgccgctttcaagatctaatttgggaaagattagacaaagttgtgtgtgatcctgattggattcttacctatcctaaaccaggtgttcgatcccttgctattaatattggatcttttgttggaacaggaaaaatacagaacccaattcaaatatcttaatgtgtgggcaagagatgaaaaatttaaggagatcattaaataagcttgggctattaaagtgctaggagctaagagctaccaggtggtcactcatttggctaacacacggaggtgtttggcaaaatggaacaagactcattttggtattttcaaggaaaagttgaaagtgttaaacaatctcttgattgaagtttagcgctagaatccttcagaggtgaatttgaaacttgaaacggatattgccttaagatagaattttatctcacagcactcatgttggctcggtaaacaataaaatcactactaggggttaaaagagtcactcttttacatataagtatgaagatacttattactattattatttaaaataaatctaaactatttggtgagacactccaaggtaattaaacccagtgttctgataccatttttctatcacggcccgagccttaggtccaggcagatatttaatatccataacttgggtggtca

SEQ ID NO: 117557 - DNA, 1359 bp, Cannabis sativa
tcgacaaagtgcaatgtcttgtagattctcttgccattgctagatcttctttgagtactcaagacatcgtgctctagctccttaatggtattagccctaaatttgatcgtgtggtttctggcattacctctcgatgtgattctttatcacttgaagaaatgcaagcattactcatgtctcacgagagccacctggaacatcattacacaatgattgatttttcagtaaaaatacaagccaatcttgcttttggagcatcaagatcgagcaactctcgctttcttccaccacctgctcgaggaaatacctctaactcttcttcaagaaataatagcagaggtagtgttcgtggttacataccaccacaaccttgatttatatgtcaactttgcttaaagtatggtcaaactgcagcggtttgtcactattaatttgacaaaattgggttccccaaaactaggaactgctcctcctcgagcatatctcactgaattgaagatgtgtcataaacctcaagtatattcctctactattttacctgattttggtgatgaccatatctggtttgctgatacatgcaccactgcccatgtttcaactggtcctgaacctttagactttacaacaacttataatgggatagaaacccttgatgtttgtgatggtaagaaacttcttatcacacatataaggttttcctctttaccctctaattcttctgattccatacacttaaactcagttcttcaagttcctacaattaaaaagagctaagttagtatataaaaactcactaatgataatgacatatttcttaaatttcacaagaattattgatttgttaaggacaagtccactggggcagttctactgaaaggaccagttagagatggtctatatgtgctaggagaatccagcaactcacccaacactttgaagtgtaatctcatcactacatgctagctgtgtaactctagcagtgttcctagtttaccttctaattgtaataatctcactactaaattagtgaccaattgtatcaaaaatttagacattaataaagattttacttctgtctactatccaaattgtagtcaatatgcctttgtgtctaatgtaatttaggatattaatgtctaacatcaaaatagaacatcctaaccctgctattctaagcaaaattctcaaacatatttttcactcaggtaccttgaaagacttgcaattctgtgttgtttgtcaaaaaggaaagtgccacaaacaaccttattatgtgtctcttcaccatgctaaacaacctctagaactaattcacagtgacttatggggtccatgtaacgtccccgcttcaagcctcca

SEQ ID NO: 117558 - DNA, 928 bp, Cannabis sativa
  modified_base (893)..(902): a, c, t, g, unknown or other
ccacctctcttttcccggcccaatctccagccacagtttcaacaaacccaccttgggccttcctagcacgcaggcccaaagccgggaccatgagcctaagcccacattcaatctgctcaatccggcccattaacacatcagaaggattcttccacgccataactatatgccaggggcgattgaaaagctctccggcctcgctgaacaatacgccgccggcgagtttctcgaaaacggtgtcgtttgcatcggattcttcgtcttcgttgtcttcgtcgtcgtcgaagaaggagcggaggaggttggtgaagaggtaagggtggagatcgccgagccatagaaagggtttttctagtgggttgcgccagtcagggtagaggagctgcgagatgtcgccgtcggtggcggcgagatcgagagcgtcgtagtaagagtggaaatggtggcggacgatgtcgacttgggtggagagttgggctatggaggaatcgtggattgagcggcggagatttgggaggtggttgttcttgagttggttgaaccactgtaagtagtagtctttgaatgaagggtttgttttcttcttcccgaagaagccattaatggctttcagcatcttgggatttctttaagaagaagaagaagaagagagttatcttctttcttggttggagggaaagtttgaagtttggaatatggtttggttacgttagagttgattcattcagttcaattcaaagtttcgtaaaacgacaattttaagtattcctaatgtgacggttttaatgtcgtttttgatttttaatgtgggccggattatattccagtgtacttttcttggagggaaatttacaaaaatactcgaattttggttaatttttacaaaaatactnnnnnnnnnnaatattttcaaaaatactgtgttttt

SEQ ID NO: 117559 - DNA, 1300 bp, Cannabis sativa
acattttaccaaagaaaagatttcaataatcaacaaaacaagtactataccaaggctaccatagccagcccaacatcaacccaccaaaaaactatttaatcagcttagcaataaacttttgttcgttatgacttattctttttttcttgtatactatattaaaataatttgtatatggtactaaatttaatatttcatctgatttgatttattaaatataattaattatttactaatttattaaaatattctaatggtagtaaaatttaattattaaatattttagctgctcgatttaattttcaaaattaattgtcaaaatattctaataaataatgtggcagagactttgatggaatatctcacctatataagtagtgtacatgtggtggtaaaaaaacagtagtattgtggtctgtggggtaatcacagacaagtgtgttgtgaatcatagtgttagggagaacagtttgagggaaatgatcaatatttagatgcatcagtgtttagtttgtgaaagggaaacacattctcatggaagacaacattacgaaaaataaaaaactggctattgttgatatcatataatttgtaacctttaattccttgagaatagcccatgaaaacacaagtacgggcacaaggtgagaatttcgttctgtgagtagataggtagaagcaagagtaagacatcctaaaaatcttaagtgattgtaatatggtggccttttaaaaagacattcatatggggttttgtttttaagtaaaggggtagggatcttgttaattaagaaagttgcagccattacacactcacttcagaatttaatgggaaatttgccttgaaaaaacaaagcatgagcaacattgagcagatgttgatgctttctttcagcaacagtattttgctcaggtgtttccacagaagtgaactcgtgcatgatgccataattagcaaatagatccttgaatataggcatgtcaaaaagatctatttagttaaagcgggttggagctccgacccgacggatcacctttgatccgaaacattcggatacttattggatcttggatcaaatacgctccgccctgcctaatttttttctggatcgaatctgctctgatccgatttaaatttatttaaaaaaaaaacttaattcaagactcggatcccttgggacttgaactcggacccggacccagactcagatccagacccagactgggacccaaacccggactcgggacccgggaccctgactcggaccctaaccctgacccagacccgaacccggacctg

SEQ ID NO: 117560 - DNA, 814 bp, Cannabis sativa
tattttttagaaaaccgtaaaaatgtaaaaaaatattgtttgaacggaaaaatgtaaatattttacaaaaaatagtgtcttatgtaattattcctttgaactatacgttcttagcagtgttagctttaggccttttttatgaggttggtccttttagcagcttttctatgagctttttgctcctttattcttgatgtcattggtgaacagttaagtcatctctaaataaaattgatgcggctttatttttgtttgacttgtaaaaatttgtgcatttgttattaaatataaatgaccttagccttaggaaaaaaaactatgtacattattaaattttatgaaaagaataaaaaatatatattttttttattttacttaaaaggtaaacatttaataattttatattaaaatatgtcaagtattttgtttatttttttactttctatcttctatcatttaatagacatttatttttttaagactttaaagaacgaaaaagacttcactcacacacatacacacacaaatcattctttaattaaatttattttactaggaataagattttttttctctatttattttggcttttcaaaatagttagcaacaaaaatatatatgctttaattatttcctgaatttgatattaaactatttgtttcacaaatattttttattgatcttctagtggtagattaaatatatgaaactccaattcattaacttttaagagcttatgggctcgtttaaaacgttgtattaggtcgtattgtattgtattaaatttgattatacattatatttttatataata

SEQ ID NO: 117561 - DNA, 733 bp, Cannabis sativa
  modified_base (661)..(668): a, c, t, g, unknown or other
tggacacttttaaaacgattacatgacatttccccgacgctaccatggattgcaattgctgactttaatgaaatattgtctcaaagggataaatcaagtggttctttacttaatgaatcccaaattgaagcttttcgttaggcactggatttctgtcattaaaagagttgccttttgaaggagatagcttcacttggattaaaaatagatcatccattacaacaatcaaagaacgattggattggtgtttcactaatggtatttgggatcaatattttgaaacttcagtaataactcatctggattattttacttcagactattatgccaattctgcaacagtcaggccattgtttaatgaatccctcccaacaaaacaacacacaagattttgctttgaaaagttgtggctgcctgaccccgaaagcaaagaaattatttataactgatggtctagtaattccctcaatgatcccatctccaatgtgattccaaagttggattcatgtgttgaaagtctccaacattggcatgtctgaaactatggctatatgaaatagaaaattgttgatgctcaagcttcagttgcagcccttaataatgtcagctctcattccactgatacgtctgcctctctcaacagagtttacttgcatttggnnnnnnnntatgttctttccagagcattgtttaaagtaaagctcagattggatgcatggagtatgcatcgcaa

SEQ ID NO: 117562 - DNA, 1998 bp, Cannabis sativa
  modified_base (410)..(410): a, c, t, g, unknown or other
aaaaaaaaaaaaaaaaagctgcaatcgtatacaattcttatttagcaatattttttaagaagaaaaaaaaactacaatcgtatacaaattttatttgcccatgttttatatatatgaagcagaaaatttttgcatcgcaattacttctcttgccttttgttccacaacatacaacgattcaaaaagctttacaaaattattattaatcttaacatcctaaagccctctcccatcagctgcaagaagaagaagaagaaagatgtttgaattgaaaggggaatagctatttttaagattaatccccggttgttttctttttgacatgtgattctcgaatattgaatatcagttcaaatattaataagatttattttattattattttataatatataaataatattttattnttttattaaataaaaattaaaaatcacccatatatttttcattaaccaagaatttcagttatacaagcacactttatataaaataaatataaatgatcatatattttaaccagaaagtcgtagccagaacaattacttacctaagcttcaatattagaatatacatattgtaatgttttcacgtgataatttctcatcacatttagttgccatatgagagtaacattaatttttatgggctaatattcaacttttaactatctagaaacaaatggtagttaataatttgtgttgtaaggaaacttaattgggtaatattaattcaactaaaagctactgttaaaattatattatgtactgatgagttacatattttcaaaaatatataaaatttttaaaagagcataggttactaacagtcgtgtattgagttacctaatagttgccatataacttaataatttgactcattattgttactaatgatttattcactcaaataattattgtaatggttgatggagaaagtgataagacagtttttctttcctcaagttttgtatgggtatatggttgtaactttaacaatggtcttcacccaaaactgtgaaccgaaccgtaacccatttcgaccgtgttcagtcctacctccaacacgctatttttatttatttgtttattttttgaattaaagcataactttcactaaagagaaaattttgtcattagtgtagtaagacaataaacaaataagtaattttttttgcatatcgttcaacaaaatataaaaaaaaacattattaaaattattcaaaagactcgtacaatcatactaacaaatcaaattttcaaggcaagtgcaaattatgcccattagcttagacacaaactaagttatccatttccagtgaaacagatcctattggtgtctatgtattcaactcaacgtctttttaatactaatgatttcacatgttgcctaacgtgactcctctcccccacagtgaaagctttcaagacttggccaccactatcacatcctaagcaatccattccaaatcaaccattcaaatattttaaaattaccctttagtactttttaattaaaagagacttaaagcctattaattgttagggcttcgactaaaatcagcataatctaaacctttaaagcaacaacaattcactatctcttacttatttgttgcgcttgaaacacttatttgttatagtgtttgaatgatctaattaccaaagagagatgatctgaccttatgactatttttctaaacttaagagatgagcatagagctctcctaggtgaaggaggttctataatatgaaaataaaataatccaacaaatataaagaaatatgtttaggttatttttaatcgtagatgatgatctaatggtgaaaattaactttagaggttgattgtcaaatttcggagcttgagtcgcgccgacgagacccgttgcaggtaagttgtagcttaaattcgtaactgctttgtggtgaaatttagagtcgatagcttcagaatggcgattgaagtatgagacatgacttgatagagcattgtaat

SEQ ID NO: 117563 - DNA, 3695 bp, Cannabis sativa
aaaattgctaattgacaaagacacatcatcatttaaacagaataatgggacggaacttaacagaaggactaaatttttataaatgtaaaagttcagggagattcttaacaatattttaagggtcaaaattaatattgtcaaaaatttaggaggtaaaattgttaattattctaatataaaccaccatttcaacaaaaaaaaaaatagttagccaaaaataaataattagcaacaaaatcctttttattttaatatttatacacttttctatttttgttgtggcgaaattttcttaataagtttacttttctttactaatttaaggtgttcaataattttttttttacggctaaaccctcttaattatcattccacttgcactttatcttttaagcttaaattttggtgataaaatcctctaacctattgaactgttagcaaatttaaggtgtcatctattttttataattaactgctaacatagactacttatgtgtacactcttgtacatgtagcatgtttacattggtacatctaatattattatttcaattataaaaaattatgtcaaaatttataatattttattttttatttttataattttaaaataaattttgaaataataatattaggtgtataatataaatgtgtcacgtgtataagagtgtacacataggtagtccatggtggcaattaaccagatgacactttaaatttgctaacaattcaatagtttggaaggttttactaccaaagtttaagcatggaagattaactgcaagtgaaacaatatttgagagggtttagccgccaagaactcactgttaaatacaaactgaataacttgtatacctgtgtatacatgacataagaaacttgaattgttattgtcttgggcgtttccacccgttctcgggccttgctggttaaagattggcctttaggtgactcactcccggatgtcctaggataagaattcaccttgttggccgccagaggtgcacttctagggtgttggtctgctatgggttggacaattgggggtgttgttgttccaaagactcatggccggcccctcaggccaatggttgccagagtctagctattctcgccatcagatctttgtggtaaggcttgtcatactttaggttggggaggtttgtcctagttccagaggaacttggttggacagtttgtctgtagaccctccctgatctgttgattagtctcccttgaagaggatctctaatgagatcctaacctcttctagcagttctttcattgaatagtcttattaagtttctagcatctctgttatggtagtctaattctgcctggtgagattggaggatgtactcttggtcatccatctatctaaaaaatttacgtctctattgttgagtgcatcgcagccaacaatgcatggttctttagtttggctaacttgactgacaacctctttaagtctggctaactcgagatcttctcccaagtctacatggggcttgcccaaggttggctcacaaattcttggccttatctctccagcataatactggggaccagattcatctatggtgcttgggtgttgctccatattggtcattccttcagtgtcaggcgccaatggagaatcctccttgggtggaagaggttggccattgagatcaactgaattggtggtgtcgacctggccatttgtggtggccaggttcgtggtgcttgctagaacgacagggttggccacatctattgggtttgtggagattctagttgtgactggaacacaaacatcaagatctgcagtcatagggtcttgaagaagacccgatgagacagaagttgtagccatagttctccttgtgttagccatggcgtttgatcagataaattgataactcgctctcaatgaaagtaccaaactgttgacctcataatttggccaaccgacagaagagtcgtatttaatgctaatgcttaccatgtgttacacaataagaataataaagtaaatagacataggattttatagaggttctcttccctttgttgacaggtaatgacctactctccttttggttgtattgatgttgagagataatactactcatatcactatattgatgggatctgaagtagctctcttaagattacaatgtatgaatcagtaggcagatctctaattaaagagagatcgagacttagaggcgtgtgagagagagggacagagcccttggggcatgtagtagagagaaaagagaggattagggttttcagacttagagttagagttaatgaattagggttttaaagataggctaatgctctttagatagtagagtttacatgcacaatatccttaggaataggtaaaataaagctattatttacatgtttaattataaatacaaatgactaaattgccccttaaaatagatattttccctctattttcgtgggttgttaaggcttggtctgttgcttgacttgctgtccacggatgagggttgtgcatcaatatcctaccaggcaaaagctggctggctgtgcacctacaagatgtaggctggctggccatataatgtctacaggttgaggtctagtcaaccatgctcctgccagggtctggccggtcatgtgcctgccagggttttccagccagctttgtccagagttggctaggtctttacatgcgttggccagccttagtaggtgatggccagtcttgttgatggctagcctctattgatggaggtcaacctttgtaggtggaggccaacctttacaagtggaggccaacctttggaggtggaggccaacttttagaggtaaaggccagcctttataggtggaggccagcctttgtaggtgtggaggccaacctttatacatcttttcctagcagaggccagacttccttggtcgaacggaccctgtcttggtctgaaagtcaccttttggtctgccagcttgtgcttaaaccctagctggccatacaagctcatcttggccagccagacatggtggtatagctccttgacgactcgctcaacttctttcgtttgctgcttaacatttttgccatatcttgtaaagagattttgtcttgctattggcaaggctgtattctacatttactttgtcttagcttacgtggacatgtcacgttttgtggacaaaatctaggataacatatattattcaatagaataacaagtatatatatacaaaactagagaaactaaaaaaaaactaagaaataaataagaaatcaagtaattatacctattcataatttttacaactaatatacaactgatatatattctaacaaaatatttatttctcaaatgaaaaaaaaaatgatttatgatgataatgatataattgtaactagacttaatcataatttaaaaaattacacatgtcactcaattaaaaaaaaagtacaaaagagaatacaaaagaaaagagagtctccttaacactcctcactaaattatgcatgtatgaataatctctcggttaaatgtaattgtggcattaacattgtcaataagaaatactaaaaaacaccaatagtgtttaacaccctccaaaatatcatatcattattgatgcaattaagtattgaatcacatataattgaagagcattgctattaggcaccagtagtgcctagcaccttctcg

SEQ ID NO: 117564 - DNA, 963 bp, Cannabis sativa
ataacttctttcatgaccctaataggcgaaaggtacacactaattacaaataggccaaggtggcacctttctatgattaccacatattaaagatcttagaatatggataacatttaacccccaagttttttggacaatttgagttcttggagcttgccacttcttctaggaactgaccgtttacacgcactaactaatggggttacaaatgcgtctttttggtgagttgtaatctgtcaagggtagatggaatgtcaaaaattgctggcatggaaatcacgcggtatactaaatgccctagttaattcattacagcggtacaattcaaaaagacttgtctttatggctcgatggacctaaggtaaatcatgactaataaatgattttggccctttcaactcccctgttgttagatcatggtggaagatctggaccattgattttgaaaaaactgtttgtcctcttgaaatgtaaattaacattaatagcattcttttcactttttccacaccaaacttcaattttttccctataactttctctcttgttgctcttattgcatgtaacaagagtgcaaaaatttgattcagtagctgctcaaccaccatgtgaagcttcttcctgacattgagcccctataaatcgaccaactcaacccctaccaaacaaaggatttgacttttagaccagttgcgaccgcctcgtcaattgggataaaaaatattagataagactcttcgacatcaactcatcctccctcaacccagcaagtaagtacactaacccgtggttgaacttttatcattttgtgtctaggatagaaatttctcgctcttgctaaggctaggactgtttacatgttgagttgaaaagtagaatatgttgggattttatgccctaaataaaacccatttcaatctaatctgatttgttatcaatgaaagattagaagtcatttatgtt

SEQ ID NO: 117565 - DNA, 920 bp, Cannabis sativa
aaaattaaacatatacttattttaagaaaaattctttgatattttattttggtaatatattttattttttaatttacacaaagtactatttttcgttaaaaaaattacacttttacattcatatatatatatatatatatatattaatatttttatgctgttttataaaaataacatgaatataataaaaaaaaacacataaaaataatatataaataacaaaaactaacaataaattaacaagaatacaacataaaataatatgaaaacattaaaaaacagtattttcaataaataaaatgttaaaatgttaaaattctgaacagttgtatttttataatttttgttgtttttatgtatttttaatataattatatctaatatttttataaaattaatgtgatatatttttatttaatttttttttatatgtggatctaactcaattcaccttgttcgcggcatatctctattaccagttgtggatggctcgtaatcggtgctaccgtgaaggtgttcgtgagccccctgaggttattttcaagaaaattcttcattcggtgagctctcatgctcccaagttatgcgttgatcctcctctgctggtgccgtgcatctctcctcctgttgatctcggttcaggcaatcgggttaatgtctttgtggatgctgctgtgagagttagttttaactattatgttgtccttgtgcttgattgtcgggaaaggttatcgaggcctacgcaggtaaggaggtggttatttcccctctcgacgttgagtctcgtgccattctcaatgcctcttcgagatgtgtctcttgtgcctggtccgaggcgatgctcttttcagcttgcaaagtggcggtggatgcgatcctggcaagacaggttcctgttggaagttattttaccaggaact

SEQ ID NO: 117566 - DNA, 2397 bp, Cannabis sativa
ttcgttactgtcagtcaacatttcttcgtcgatcaacaacaactcccaattctaacactttatgtaagtttttcgcatccctcactttattgcttgtgttaatggcatgctttactgttcatctgcttttctgggtttaatgttcgaagtttctgggaatttttcgccttgagtttttgcgtaacacgtttagatttctcttttctggtgtctgggtcactattattttgcacattatatttttccaaaggtccatctattccttacgtgatgaccttcaagggtatagagaagactttgtctttctcgatttttaccctttctctttcttttcctttctttgcttatgtgtgatgtcactatctgtaagattcttgcactcgacttttgttatgaaatggtttctaagcccgaaacatagtgtaatactcacataaaatatagtatttatcttcatgctctaattaacacaaaaatcaaagttttaaactacccaatcatcatacttattctacaaatgctattttccatatttcaagagcttgaaacacaaggaccacatgctaacaaacttaaaataatgctcaaaagaaagagctaaatactaaaatatgccaaaaatagaattaacaagctaaatacttcaattcatatttcatgctttaaaacaccagtctaaactgaatttatcaaaaatatcatcataaaagctcaaattcaagaacaccatatatgagctcaaattcttaaaattcaatttagaaattcagatgttagataacaaatgcaatcattaatttgcttttataatctccaattaacaaaacccaactaaagatttggtagaaaatggaaaaattgcaaaagagagaaagagaagagaaaagggacggtggaagcttttatttttgggatgaaagctgtaacatcctacttacttaggaacattacagtgatcttttaattactgtgcatgcctttgctaatcaaagaatttctcaaaaaatgtgataaattaaaacttttgaacttaaactttaacaaatacgtaactttacataatagcagagatcccgtcaaaaagtttaaagcagcgtacaatatatgttttacaaaagtgtggccccgcgactaaaaaatgtaagcccatgttgtctcaaaactgaacactccaaatctaaccattctgatatgtacaatcaccctcaagctttggactcactggtgctcagcctttgcttttcctttacctatacatgtaaatatatatgcgagtcaatggactcagtaagaaaaacatataacatattatcgattgtatctaggcacccatacacctatttataaggcttaatagatgattaaaaatattcttaacagaagtacgacctctgtactacatgcactaagtactcgtcccatactagtgttggtagggctgaatcgcacctcgagtataactaagtgttgtactacatgcactccgtacttgtttcgtactagtgttggtaacactgtgtcatgcccctaaacatcatataatataccaatatactccgtactgcaactgtactagtattggtagtatacaaatcacataatacaacatgcatataacatacatacacatacacatatacatatacatacatatcttatacaaattttaccttgtttcctaattcaagtgagctagtcaacctgaatagaaatttcacttgctgaacggaggtcctatgtcacaatcacgtaaaatgggtaaacaacttgttaaaacatttttggagatttaaactcaaaactagaggtttttctatcgataaaaagtgtgacaataccctaaatattgagaaaatacaaaaaacaagacttcatgaaaaactgcctaaaaaacagcaaactgtttttctgggtctctaccagcaaaaatggtagaccatttctaagaaaatagtctgccattttctgctgcaatttttcaaaacatctcatttcaagttcaaaactatcccagatctcaaactaagctcaaaaatacctaatagaggtctaataaacataattcaagcagcagattcaattataactcaaaaatatatataaaaaaaattataattttgatatgcttgatatcaaaatttgtgagaaattgagaaagtgtgaacattaatctaccatgatataattttcaaagcttaagtgtacttgaggagaaaagtgaccatgtaataatggacactaattttggctagcaatattccattggaatcgaaaattgtgtggttataacaaattgtttaatcttcgtacaagattaaagtatgaatttcgagagatgggatctaaactcccttagagttttattcattgacggtaacctatcttaacactagtaaa

SEQ ID NO: 117567 - DNA, 2349 bp, Cannabis sativa
  modified_base (223)..(226): a, c, t, g, unknown or other
ttcttattgattttatgctgtttttgtgttattttttgtaaaaccgtaaaaatgtaaaaaaaaaattctttgaacgtaaaaatgtaattattttacaaaaaatggtaacttatgtaattattcctattttaaaacgtgcctatggtccccgagcgtattgaggaaattacattgtatactcattttattttacttattttaatttttacctctattttcatannnnttttagatatacccacttttatggatgatgtccccataggttatgtaaattatatgctagacttaagtagagagtgaggacaagttaagcaatccactcaaaaaagtgaatatattttaataaaaaacaatataaaggtatttttgattaatagatacaagaaaaaatgtattttttaacttattccgagcgtgttagtagacgatatccatctcattatgacccaatagtagactcatgcattacggattacatatagttattattatatattaatagcaacactgtcagtgagcaacaatgtcatttaaaataaaatattctaacactaatctgtcatactacaagttcagttagtttttttgctgttagttgaaaagagagaaatacatcactcaagataatttaaagatatatgtatgtctcaatgaaaaaaaaaaaaaaaacttgctaaattcgaatgtcctatgtacatgtttggtggttgatggatgtctagaaactgaaaagaacttttttatctttagctcaagcagggggaattgctttactcaaaatatcataactttgcattgtgtagctgtcttctaaattaatgtgagataattttccattctttagcaattacaaaaataatccaatcacgtgcttgtgatgttttaatttgattctcccttcattttagctttcttgagaattttatttccctccaatccgaaaatggtatatgattaactctagagattcatatcctatggaacagggagcctaacagatgaattttttttaaaagaaattcataaaagtatgttttaatttttgaaccagtggctaatcaatcaaagggaaagttcggataatttgtcctcctactattgttggtttgaattcgtaaaagtaagcctctgtattcttgattttttagtcttatatgatagacacttatttctgtcatataaaaatcccttttagcaatattaatccagtgctacacccactactttattagatgagcactttagtatatgaacgtaactgaaccaaattgttaaagaatattacaagatagtggtaatccacgtactttttaactattcgcacccaagaatgaagtcttttattcgcagatgatacattccatgcacaattttcactatttaaacctcagtgaattgttcttgccagctcatttagctgcttacttgtaagttgccaacttatttagttttcttactgccccagttcatgaaataatttgtatgtttttctaatcaatgacttagtacaatattagatagttggatacactgttacccatggatcttcactgcaattgactttcttaaactcttgtgtgatttatgatcaagaaaaccaaatataggttcttgtatagtttgtatttcacttgaaaatttcatattagagttttattttttgctccctaattgtcttcaggaagaataagaaacagggtggttttttttattattttttttgataaaaaaaaggactatatatggaaatgatagaaacagaagtggattaaaatgatgtgattgtctgagtcacttcttaaggactattattgagtattattgaacttttaagtacaaatgataactattattccatggcacattcaactggtccttgggcaatctgattcgtggctgccttgacaaattttttaaatacaagtgttaaaaatataaggttaattgacagtaaaatttagtctacatcatggctattttaattataaaagtcattctccttgtatataattcatatttgggttgtgaggcatttctttacttactttaatacctaattctttgtcaggattatgttttgcaacttcagaatagggaacttttgctgctgtatcagaagtaagatggtacttctgaactgttgaataaattccacttataaccagtccagtatacttacaaatattcacatcagcaatatacaaacagaaacaagtaaaggaactcaattctaagtggcttcgcctctagtggatcaagacttagtagttagttacaactgaaattgtaactaactcctaagcctcgatcaaccgactctataacaatataaaagcatgaatcaaa

SEQ ID NO: 117568 - DNA, 3867 bp, Cannabis sativa
tactaattttaaattaacatcatcacagttggctaatagttacccaactaactaactgtcaaggcaacagtaaagaattgattcatataattgagttagagtgagaaactaacaatagataaaataaatatgatttttgtaactattaccttgtagagttttatccctgaacttttttttgttgtgaaaatctcttcgaactatacaaatcgttgcaaatatcatccttcagttacattttctcatttttttaaacaatacttatgtggctatgagttacaggtataattgcaatacaaagacctatttaacaattttaagttacttgaaattcagcttattggtattaaacgtactcttgaacatataattcatcattaaattgctatttatgtatttattttttgtctgaagtcttaaattaggctaaattagcatcatgtcagtagaatattttacaatagagaaaaattcaggagacaaaactctacaaatataatagtttaggagacatattttatctattccagtagatatgcaaacagtgaatttgttgagtaaaaattctgcactataaaaactctattaaacaaaataatttataaatatattatgttccattacaagtgtagatattatgatcacacacacaaagacaaaggcacaagaaatgcttgattgggatttctagagaaaagtcctacattctctgttacatgccactttcctaaactttccctggaaacaaacaacctcacagttctgaatacataaatgagtaaaccatttgctgcaggtagaaactcctgtattgagcatggtacctggtggagctgcagccaagccatttgttacataccacaacgagttagaaacagaactctacatgcgcgtttcgccagagcttaatcttaaaaagctggttgttggtggattaaaccgagtttacgagattggaaaatcgtttaggaatgaaggaatggatctaactcacctccctgaattcaccatgtgtgaattttacatggcctatagtgactacaatgacttgatgaaaatcactgaggaattattatctggtgacaaaaacttcttaatattattattattctaatacaatttactgtcttataattagtaacaatgtgtaatcaagcttatataaatgcttgtaggaatggtgaaagagcttactggaagctataaaatcaagtaccatggtgatggtttgagtaatgagcctatagagatagactttactcctcccttcaggtacaccaatgtgtagattttaatgtatattcttttaagtaaaaactactaaattaataattatgtttgccaaatatatatctctcaagttggcaccagaccaaaaaaaataatgattgaaaaagctattataaagcaccattgtcacacttttgaattgagtattgttattgaagactaatactgcttagcactttttataggtaacgctccacgattagttagtgatattctctcaaaattattttcttaaattatatgagacccaatatttaattacactaataatagtatgatatcgaggagagtgctaagtaccaatagtacatttttatcaattctcttttgaattacataaattttacacgtttataaagtgccattaattaaataattatcgtagaatatagctaattatttgcaaaacattatcttaagatagtgctagactattctgtaaataaaattaggattcgtttagtacgccgtatgtttaattttatactaaaatattatatattaatatacttataaaagttaatattacaaataattttacataaaatataatttaatataatattaatatacaatacaatacggggtaatataatacaccaaatgaatcctaaatatgtaaaaaaaatatgtataatttaaatgtgcttctatcaacaagggcatacccacatataactgaggtggggcagttgctccccctaaaaaaaaaaaaatcagaaaaaaatatatatgcaatttagttagttaaaacatatatttataataaaaaataatatttataagcataatattaactttggtgtaatgattaagctagcaatagcatataagttagaggaagggttctaatcccattaaatgtatttttttctttttaaatttacttctttgtcccccctcatttaccaaaaaaaaaaaaattactctctctcactttaaatcctaaattccccacgtctatcaataccttataaaacacatatttcacatattgttttgcaaaggatacatttttttggacagatgatttacacacataatcaaatacaatacatgttttttatatttttaagtgggaaatttataagctagcattgatttggtgttgaatattgtagaagagttgacttgatagaagagctagagaaaaggtcaaacctcaatatacccaaagatctttacagtgaggaatccaacaaatacttaatggacgcttgtcaaagctttaatgtcaactgtcctcttcctcgtaccacagctcggttgctagacaaggtggttaatttatataattaattatagatttgaaagagtggacttttattaataagtacatttaagttgtatgttggtgttatatagaattagttatatgaatttcatgcagctagtggggcactttcttgaagagagttgtgtaaatccaacattcataataaatcacccagaagtgatgagtccattggccaaatggcacagatcaagaccaagcttgactgagcgttttgagttatttgtcaacaagagagaggtacaacactacaataaaaagtatctttaaagtttttacatcacatactgaaattttttaacttttttattgcggaaggaaattttttaaaaaatactgtgttttattttttatttagaaatactgtataagttttatactgtgtattgtgttaagttttcactgttgttccacagttattttctagttgttccattgttgttttaattgttctgttttgttgttttacgattgttttataaaaagatagtatttttgtaaaaaaatttatgactataaaattataaacttttccctaaaatctaatatttttgtaaaaactccaattttatatgtggctctatcattattacaaaattacccaccataatagaggcaaaggtggttctcccattataaatttgtccatatattccattttgaaatcttaatattataaaaataaaaatgattaatggttactgataatatgtgtgtttggtagctatgtaatgcttatacagaattgaatgatcctgaagtgcagcgcaggttatttgctgaacaacttaaggtaaaggagctgctcttaaattaattatagctagtttaattataaataaaatttaaaaaatataaagagtgaataactaaatataatatggaaattaaatattgaattgttattaggaaagggaatcaggagatgaggaagcaatggttttggatgaaacattttgtattggtttggagtatggattggccccaactggcggaatgggaatggggattgaccgtcttactatgcttcttactgattctataaatgtcaaggtatatactcatctcaactcccaactcatcatacttataatactaaatatttacattttgttatgtactattttttttataatgaaaagtgagtacttgcctcataaaaatttaatatttttgaatttacacacttaaatttttatttacgcattacaaaaaatgttacgtttagtcacaacaaaatttgtgactaaaaataaaaaaaattaagataaatactattttgg

SEQ ID NO: 117569 - DNA, 1858 bp, Cannabis sativa
  modified_base (705)..(710): a, c, t, g, unknown or other
ttcttatatataactgacattttgtaaaaacacggtttttcagtgtgttacttgtttgtattcattatattatataactggttctattttaattataaatgattataatttaattatatttagtttgagttattttgttttatttgtttttattccttgtatttcaaaatcggttatatttcaattataaccggttctatttttgtttatatttaagacatctacttcttgtgactttttccggcgacagtgacttttccggcgactttccggcaacttttccagcaacggagatttttccggtggcttctccggcgtcgatagttttccagcgacttctccgcgcgccggtgacttttcggtgacttctccggcaccggtgacttttccggcaaaaacttattattatttacaaatatgggatttctatctttttttacaaaaatatgacataaaaaaaactcatataaatgtaaaaaaacaaaaaaatccataaccacttagctttatttatttatgccataaaaatgtaaactcttaaaattttcccatattttgggtaatttttacataaaaatataaatacataattacataagggcccatttggtaatagttattaaataaaagagaaattttatttacaccctaatattaaaaaaaatataaaaagggcccatttggtaatagttattaaataaaagnnnnnngaaagcagttttccaaatgcatcctgacaaaagtcttggcccggatggtatgacgcccgccttttaccaacatagtgggtggagatgtggtcaaatcagtacgcgatttctttcttactggagagtttgagcaaaattgtggagtggccaacatagtcctcatccctaaaattcggaatccctcagatatgactcaactacgacctatcgctttatgtaatgtgctttacaaaatcatttctaaagttatggtgaatcgtatgaaacctttcatggacaatattatgacggagaatcaaagcgcttttattccgggtcgactaatctcagataacatccttgtatcctttgaagtgctccattacttaaagaggaagaggaaagggaaggaaggttttatggcacttaaattggacatgagcaaggcgtatgacagaatcaaatggtcatttctggaggctatgcttcgaaagttgggttttggggaatggtgggctactttactattgaagtgtgtttcttcagcgcgatatatggtggttcatgggagtcatgagatgggaccaattcggccttctaggagcatcaaacaaggcgatccactatcaccatacttgttcattctttgtgcagaaggtctctcggctatactctgacgatacgatagtagaggtttgattcatggatgtaaagttgcaaatgggactccaagaatttctcatatgctttttgccgactacagttacctttattgtaaagcaacttcattggaagcaactagaattcaagagatgttgaataaatttgaagcggcttcgggacagagagttaacttctcacagtcttctatatttttcagcacaaacacggacattgcgactcaaaatagcatcagctctcggcttgggatgaatacttcttttgaagatagcttgtatcttggcctccatagtattaagagtcagaataaatcggtcgtcttgggttttctcaaagaaagagttcgtaaacgtatttaaggttgggaatctaagttcctgtccagagcgggaaaaaagagatcttaattaaaacagttgctcaatctctaccaagctatgcaatgagtgtttttttgcttcctttggagatcactcgggatatggaaa

SEQ ID NO: 117570 - DNA, 1413 bp, Cannabis sativa
  modified_base (190)..(201): a, c, t, g, unknown or other
  modified_base (1362)..(1366): a, c, t, g, unknown or other
tattttatcattttgaaaaagatccatattaatcaagtcatcaatattacaatttggagaagagtagaaaaagagctagttagttcaatataaactccacctctctatatatataagaaataactaaaagaagaattagtaagcaaattttacttaagtatatatcaacacataataataataataatannnnnnnnnnnnataataataataataatatgatgggaattgtatatactacttatataaaaatataatactcttttttttataacaaaaaatataatactcattaattgattttgagacaaaattttatatatgtgtatacatattattttgtttaccttaagtactcatatttctttctttcgttatttctttattttttatttattatttttttgagaaaataaaattatccactaataggtaaattaaacaaaatctattacatgaacatatagctgccataacaaaatcaatagtaataataaacttaccaaagcccttcataataaaaaaatatatagaagagtattctaatatagttaacctcaactaagtccaataagccaacgattaagcatatcaaagaaatgtataatatactaagttttcaaactaaatggacatctaacaaagttcacctactaataactatcagctaatgattttctaataaaaattgaaaaattgtaacctccataattatttaaattgtaaataagaaaaataacaaagccagctatatgttatagattggatcacgaaatataggccaataacaatctaaatatttcccatatctaacgactaaagagagtaattaaatcgtccccgccaaattaaactactttgatccattaataagacataataaaccaatataaaacacaaaatttgtgtcaccctccagaataattattaaccccattaatctagctaatagagcgatagtaaaccactcttattagaatacacacaaaaaaaaaaaacaataaaacttagcatacataatcataaaattaaaattaccaccacacaaataagaaaccatgacacccaaatcatctctccaacagtttccaaattctggaaagcctttgaattactcttgactcaacttcaaattaaactcccacgacatcaaattcaaatacactcactaaagtacgtacctctaaccatccaccacacaactgcgcggcgagaccacgaaacgcagaaactcccaacaatcctctcaaagaatagtactcccttcatataacaaatgggaaacataaaacactacaaaaaactcctacttttagtaatattaaccttttagtcacaatataaatttttttgtgactaaannnnncttttagtcacaacaaaagttatgtgtgactaaaacatagtatttag

SEQ ID NO: 117571 - DNA, 1409 bp, Cannabis sativa
accataagttaatttataatttgttgaggggtcaaattaaaaatactcaaaactcattctataatgagcctgtaaataggtagtagtctccaagaaacactaaggttcttgtattttctccatccccataagaaaaaatacataaagtaatagtgtattcttggaagattataacctcatgagcaatctccacaatgttttcagtttagtgcttctgcttatttgcattcatattatttttctttaatttagcaaaggttatatagaaagataatttaggggtttttttatgttaaaatactttttgaaatatgattagatttgtgtgagatatctccaacaatgacttcagtttagtgcttctgctcatctgtatttatattatttttctttaatttagcaaaggttctatagaaagataatttatgattttttttatgttaaaatactttttgaaatatgactaaatttgtgattattgtatttctggagtgttttataaattctaacatgtgatatcaaagccacatttatcaaattgattaaaaatctgatgattttctttatgaaattttgaaattttgaaaattaaggttatgatttttgttcgaataatactgccataaagttttaatatatttgctgattgatatgatattttgattaatgtatatatattggcatgtaggccggcaaaatggtcagatacgataacatgactcgaaacccgcatgagagttagtgggtttgggtttaccttaatttggttcgggtcgggttcgggccgagcttgagttgactcgtctaacctgtttaataaaatgggttgtgttcgggttgacatgacttacatgaaattgacctgttaatgacctatttaaagttattttagtactttaacatgttataaatgtgttataaacgtgttgaatattttataaacgtgttattggttgacatgtttaaataaaatatacttataaacaggttacacgggttgtgtcgtgttaacctgtttataaacatgtcgtgttcggattttattttttgacacgattattaaacgggttgccttcggattgagcatgtacttgttgtacatgggtctcgacatgacactaacacgacctgcgattataaattaccacccctattggcatgtatatagataattataggtgtattgctttagtttccttttgccttcaataattatttgtatatatgtctcatgaaattttgtttattaattaatgatttttgaaatcattcatatttttgtttggattgatttatatatctattctatataaaatgtggccatataacagaattcctggtttatgagaaattattgggtgacttttttttttaaataaaaaaatataacaaattattagatgttgcca

SEQ ID NO: 117572 - DNA, 1923 bp, Cannabis sativa
ctcgtccgactatagttgtcttcgccgtcgacttagagaaagagagtgccatccaccactaatttggtttggtaagagaaaaccgagagagttaggagatcggcttgttcttctatatgtgcttttctactttgtgctataatgattcaatttctaggggaacctccgcagccatttcataagatctgcttttccaagttacccattcccaagcccccttggattctgggtttgcaaactttttttcccaaggcaccaaatgtctggacccacacaaataacctccttccagaaagaggcccctcaccagcttttctagggtgagtatatctgctttaggtgctttggacagagacagaaaataagtgggcagcgaagacaacacttattgtatgagttagtccgactatctcttctggataggtatgcacatttagccaacacagctcccaaaacatgtcacccatgggtatccgcccaatggtaatgcaaaatacttagtgaccattgtcctatttcacacccgactgcaagggctagaagattcatcaatattcaatcctaataactgaattttgtgcatattaattctaacattaacattaccctgagttccttattgtgattattgaaggttaaaatatctgagaaaataatatctaatttctcaagttggagaatcttttcattttagagtttatttatttttttatttttcgaatattgcatattttgtattatatgtgaacgagactattgggtgttttgaatatcaatccagacatagtttgtttgtcacaataatttgatgtcttacagtttgaaatctagaaaaatctagtgtttccatatcccgtagtatttgtaatacttaagaaactgttaatagagaagagttgtgatgggaaaaagagtggggtttttttttttgtcgattatgacatgcttttattttatatgtaatgctttatgtttccagtgtaagttgttctgttttgacatgtgtgtgtgtgtttatatgtttaatttttatcttagacttgatttctagttcttcgattaagtttgtgcttgttggatttataagttgattgcataattaatgtatgacacactgtttgtggttttgtcatgttgcagatgcttagtggctttatgaacgatagatttggtcctctcaagtgaaggtatgtttttttttttttttgctaaacctttatacgcaacttctttgtgaaaaataaaagtggaagaaaattatctacattctatttatctcattactggtttatactcagcaaagcttcacaactatttctccttattcttttctttcctctcactcccccttttttccctctctttatgagtcaactgctaatagatggtattagttgacggagactgagaagttaataagattttttattggttgaaatattgcagtaatggaaagcaagactgtagggtgcttgttccttcccacactttgattccttctaacagcttctcttgcctacaaactttgggaggactaaggatgtggtggattgcatactgtttgcgagattttagcagttccgtttgtccttcataaatgtttgggtgactactttgtgatgcaatttcttttcaatgtgaaaaatctgctgtgtttattcatcttctatgagcacttgatggaatttatatatatatatattatgctttttatattagtataaaatttaaacacatgccaactatttatcgacattatgcaactgaaactataacaagcgatgatactcgtacagatttatctcagcttcttattcagtaacctcagcgctcgtttggaacgccgtattaggccgtattgtattgtattgtattatattgaattgaattatatatcatatttttatataatactatgttaaa

SEQ ID NO: 117573 - DNA, 1564 bp, Cannabis sativa
agtataaaagttattttgggcgtgtaacagtataaaagaaagaaaatgggaaaacacagtaaactgtgtaaatttcccaaaatagatgaatagtaatagagataattataccacacactcaaattttttatttttttacttttatattatggggcagaattttttcaaaaatattatattgttttttaaaaaatactatataagttttatactgtatattgtattaaattttttacagttgctctacggttattttttagtcgttctactgttgtttttagttgttttattatgtgtcctactgttgttttataaaaatacaatattttaaaaagatttcgtgtgagtatttttgtaagtctccttaataatactcaatctatcaaatcttgggtttctttttttttttttttttgataaatttcaatagtattaatataagttaacatttagtaactatatttgttatataaattctataaattagtgacatatgaacaatatgagtcagtttgagtggggtcgattttatgtaatctcccctttttcttttttggagattgtagatgtaatctttcgtttattctaaaaataaaatttaagtaaagaataactcgtgtgcctgtttttattttatatatgtgtgcacttgattatttgggactttatttttcagaaaataataaattaaagtctataatttctaagtgtcgaaaataaaaaaaacgttcctttgaaatcttactcccataataataaggcgatcatttcttaacccagcattgcagttttcgaacgttttgctaaaaagactggatttcgcattctgaattatctgtggtgatttttatttaaaaccagcttggcaaatattatcctgggaagagacaaaggctgttatttctgaaactttatgaaagataattaattagtgctgtgttaagcttaaggaatggactgaataaagttcaaatattaagaatgctaccttacctactactacttattttctgtcattttttaatataaaatcaaatatttggtaagagatggctccccaacttgaaatttttctcattaaaaaagttcacattcttgaaccattctaaaagcaaagataaatcctaagattctaatactagtatatatactatacccacagaatacaaaaaatatataacattttctcaagcggtgagatctctctccttccctcatcgcttaatcattatctgactttggataagaacatcagccaaccccaccaacgttttgtcgaataagtattataaatactatttgagtcattgtattttgtaaaagttattaatttgactttttattttgttaaatgataaaataggttttatattttctaaaatggtaaaaataagactgcttaattttcaatatttttattttttagtataactaactttaagactttctaatacgaacagacagggacggacccactttgaatgatgtgggggctatagcccccactaacaaaaatactgccttttaaaaaattaaatgtaattttttaattttataattatag

SEQ ID NO: 117574 - DNA, 2004 bp, Cannabis sativa
tttttatgattatttttttttaatttttttttgagacatcattttttttcaaaaatatatatgtaatgggtacctgatgggaattcttcctccgtcgggtaatcctcactccgccccccctttaatttaaacgggtaatggagtgagtatggggtaaatttaaaaagcaagtagccctgtttacatctaaaaattgaatatcatctttgtcttaagaatttttttaaagaaaatttctagaaaagtgctatatttttttaaaaaaaaatgctcagttaatacactgaatattttgggtgttttatttaatttttattggaatttttttagtgaattgctattaataaagtatgacttatcacacgttttattctggaaagaaatttagcaattctttttcttcctaattattgtaaataatttgattagaatatctatatgtaatacatgaattatatataatttacctattaataaaaatttaaatgttcaaaaaaaatagaaaatacattgaataaaatcattcaaaaaaaataaataaatcaaccaagcaagaagcaatctggttggaatcatgtatactaaatttattagcttacaaaattgcaaaaatagttgacaattttttcctcatcttttaattacttaattaattattaccaaatatattattttgcatttaaaaatatataaaaaaaaatgaacattatgatattgctaaaggtttagttaattatgtgtattttttttaattatcatttatataaaaacaaaaaaagaaagttataaatggtttttttgtattattacaaaacactattggaatggggttggagaatttgcctttgaaagtcaaaagtacgttacatgcatggatggaaacaaatgaaataaataaatgacgaaataagcatttatggaaaaggaaaataaatggtaacaatgtacatgaattatatcagttatatatgaggggttacctagcctagcctgggcagaaaaaaatcaattggaaaaattgtatgaaaaatggttgaacacagaagaagaagaagattactgctttgttgggtggttgtattagtttgtgtgtgcttgtgtggtgaggcaacacaaactcccatcacaacaaatattgctacatcaaatgaaaaaggttcggattcgattttttatcccaagttcgtgaaagttgttaacttattggagggggaggggttgaatctgaccgttcattgtaaatcgaaagacgatgatctcggagttcaagttctggggaaaaatgagtattttgagtggagattttatgtgaatatttggactacaacactcttctattgtaaactggattggcgtgatgcatcaaagagttttgatgcttatagattttggagagataggaatagatgtgaccattgcgattgggaggccaagatcgatgctatctatggcaaaactgaaacaggcaaccatcctattacaataagttggcaataatttgtaatggtcttttcatttccttttaataaatgagaacaaccttatgggttcttttgttctattttattttatcttgccaatgttttgtacatcatgaatgaatgaaattgattgtttttctgttttttttttttgggtctggaattgataacttttccaaaatcaaatcaattataaggcatacttatgagtgaagcaacatcacccatccactcttctccagtccattgccactaataagtaattatttttataagattcagaactctcaatttgattgcacataacactaaattacttgaggctagatgaagtgattaagtgtaataggatgcttatgtggagtgatagaatctccaagtacaatataatgtatatctaaacactttaattaaaaaaaaaaattgtacatcgcaataaaaatatttttaataaataaataaagggaaatttgattttctatacttaaaagttcaaaatttcttttttgaaccaatacatttt

SEQ ID NO: 117575 - DNA, 2046 bp, Cannabis sativa
  modified_base (918)..(922): a, c, t, g, unknown or other
  modified_base (1313)..(1313): a, c, t, g, unknown or other
ttataattttctaaaaatatatatgtgattctaaataactataacgtagacaattataaaaaaaaaaatggactaaaaaattcttctaaatataaaaacagataagaatagaaacttccgttctagtgaatttactatagaattatccaataattaatttttatattatataatatatatattgtaatacttctcgatgggtactaaataaatttaaccataaatgttaatcttaaaaatatttaaccatcagattttagtccgatagtaaataataaaagagaaatttgaatttctatccttaatttaactacttaataaaagaaaatatcaaaaaaatactttttttacactatattaaaaatatatttatatgaaaaatatttaagtcaaattcaacttttttttatcacttttttgccaattttttttttattatttttttttagctgatagactaattctagctcatatataatgtaaaaatgaaaaaaatttctaattaaatataaaaattaattataaaattcaaaattttctaatattacccattcatgagtaatacacgcatatatatatagttcaatatattatatatctaaaaacattataaattgtagactatttagaaattttactctcaaaattatgacatatatattatagtgcttctgaatttttcaatcagttcaaaataattctccatatcgccacctcaccactacgtgtataacattaaaattgaaaaaagaaataaaaaaatatgtattttgaaaaaaattattaaactaaaaatcatttggtgattaaaaaaattaagtaaaataaaaataaaaattttaaaattatttttttttaaattaattacacatgtggcactaatgtgataatagtttaaaaaaatcttacttttagtcnnnnnaaaatttgtgactaaaaattaaaaagttgtgattttaattataaatcattattctgttgtaactaaaatatctgtggttaaatacattagtcacgaaaatcacaatttgttgtgactaaatatattcacaatatacttgttgtgactaaaactaaattagtgacagtttgtaaatattatgtttagtcgcaagtaactttttgttgtgattaatgtgataatagtttaaaaaaatcttatttttagtcacaacaaaataaaaaaaaattaagtaaaataaaaataaaaattttaaattattttttttaaaattaattacacatgtggcactaatgtgataatagtttaaaaaaaaattacttttacttttttttttacttttagtcacaanaaaatttgtgactaaaaattaaaaagttgtgattaattataaatcattattcttatgttgtaactaaaatatctgtggttaaatacattagtcacaaaaatcacaatttgttgtgactaaatatattcacaatatacttgttgtgattaaaaataaattagtgactgttttgtatctaactaaatattatatttagtcgcaagtaactttttgttgtgactaaaagtcacatttagtcaaaaaaatattatattataatactaaaaagttgtcgccaaaagttgtgattctgtttatcacatatgacaaaacttgaccaaaataatcattttatattattgtgaatagttcaagaacaattttaaagtggtgaaaaattcagggatataattgataataatacatccgtcgttgcatggggacaaaaattttaaataactaaatgaataattcaaatgaacttatcttatacaaaatgaatcattacctcttccatgaggaaccacaacgaaaaccaataaactgcaagtagcctttttttcagtagatggtataaaaaaagaaatcaataaatcaatgagcaaaaaaaattctaaaagaaatatacaaaagtgaaaaaataacactgatcgaagataaacttaaggtggcattttgttgggaggaatagaaatatagaaataagagaatgagaatgagaataggaataagaatggaatagaataaaatttaa

SEQ ID NO: 117576 - DNA, 3322 bp, Cannabis sativa
  modified_base (3290)..(3296): a, c, t, g, unknown or other
aatctctcgtggatcgtttaggatttattggtcatcgtatgtttttattaaagattatatatgcatatggctccactgctttcaaaaagccactttccctctatattaatttgtcaatgctcccaaaaatttccctaattctctaattattttaattttttattaatttattaatataaatattaataaatcaataattattcttgtattctaatatttaaaacaactaatgtattctattatcatttctaagatctaatgagggctattacattagtatcacataaaccgatccaaattaatcaatctacaatcttagctttagttattcaattatttattagattcaaaacaaaatattttaaaatatcccacataggaaacacaactgaaataatatttaacttttgtatttaaaatgatgtgaaaacaagtataataaacaacttctcttttctctttaatttcttagctctcttctctttctttctcaacttctcttttctaccgcaggctatatatataagaaaaaatatctcaaattctaaccaactaattaatataatttttttttaaaaaaagataaaataattaaaaaaaaaaacacacacactattttgattttatttttcacttcattcattaaaatacaatggttatcaattatttacggaaaaaaaaagttaaaagacaaaaattctaaattttgaaaaaacacaaattatttaagaccaagtactccaatataataaaaaataaataaaaatgtaatcgaagccattatcatgcaattcagaattgagatgccattttttaattcaataaatatgatatacatctaattagaaaattttcttcttctaaaattaatattaattttgttttctaagattgtatatgctatatgtaatttttaaatttttatactaaaagtttataaagtagaaacgtggtgactcagactgttggaaaaattgattgtatatattaatcaatagtaaaatttttaaaaaaggattgttatctgtgaatgaatatttgattcgtattaaatctctcgtggatcgtttaggatctattggtcatcgtatgtttctattaaagattatattgtatatggttccactgctatcaaaagagccactttccctctaataaaaacaatttttcttgctaagaatttagtatccacattaatggtgcaatggccacggctatgcagatcccattttgctaaagcacgctgctgttgtagcttcatttgcgactgagcattaatgtaatccttcatataccttccacaccattcgaacacatcactcgctcgaggggccgagccaccatgaagaacagaattcctaatagaccacagatgccaagaaagcaataaaaaataatcaaacacattgaaagtccatacctcatttaacccctccaaaaatgcgatgacgtttgaagttctttgccttttcatttgttcccacagcccactctgcttccatatatcataagtacaccgacaaccccataacgcatgaaacacatcttcctcatacccctcagaacatcgaaaacatgtcttgtcaattgccatacctcgatgagcaagtgataccttggttggaatccatgaatgacagatcttccacacaaagtgcttcaccttaggtggaatctttttcttccacagaccattccaccacccactcaatctactattatcagactgcgattcttcctccaacagatcagaagctaatctatatccattactcaccgaatactcgccattcttactataatgccacattattttatcctcaagatcacaatcagtactaggaatacccaatattaactcagcatcctcacgattgaacaccgcattaataaacatagcatcccaagaaccatctgcattcttcaaatcagtgacatacaatggactaggaactggcagaggatcaaaaattttgaagctaaccggatggggaagacatggatcttcaagaactcgaacactatttccattcccaatgcgccatcgataacccataatcttccttagctccgccaaacgaatgatgcattagaaccacacttagcatccaacacatcaccattaggaaagtaacttgctttaaggacccgactacaaagcgcatcaggaaatctgatacacctccatacttgcttagcaagtagagctttgttgaacaaacccaagtccctaaatcccaatccccccttctctttaggcttacacaaataactccacttggaccaatgaatcttgttgttcttctcagatgacccccaccaaaatctagccgccatccgatgaaggctattaatcatacttttaggcagcagaaaataactcattgtataagttagaatcgcctgcaaagtagctttgattaacacctccttaccagcaaccgaaaataaagacgccttccagccccgcactttgttccataccttatttctaatacccgcaaagacctcttttttggttctaccaacgaaagaaggcaaaccaagatacttcccatagttttccaccactcgtacccccattatactagccaatcggtccctcaccccgcttggaacccgcttaccaaaacacatctcagacttgtggaaattaaccatttggccatatgccttagcataattatccaatagagttttgaacccctcacactcgttctcattagcatcaaagaagaccaagctatcattggcaaaaaataaatgtgagactgataacccatttccgccaaaattaaggccatgtaaccttcccacattttcctcatgagaaatcaaactagtaaaagcttcagcacagaagaaaaataaaaacggagatagaggatcccttgtctcaaccctctcccaggaaccacattacccacaacttcaccattcaccaaacacacactattttttttaaaaaaaagagaaaataattaaaaaaaacacacagtatttttattttatttttcacctcattgattaaaatacaatggttatcaattatttacggaaaaaaaagctgttaaaagacaaaaattcaaaattttgagaaaacacaaattatttaggaccaagtactccaataaaaaataaataaaaatgcaatcgaagccattatcatgcaattcagaattgagatgccattttttaattcaataaatatgataaatcagtacaaaaatctgatgcttttaaagacaactttttagtcacaacataatttttttgtgattaaatgtgannnnnnntcacaacaaaatattacttgtgacta

SEQ ID NO: 117577 - DNA, 2210 bp, Cannabis sativa
gtatgtaactcaaaaattaataaattaagatacaaaatttgtataagcaattttatttatttaattattaaaaggtaaatacataacattataattaattagattgagcatgctcattaaatgcttcataaaagattttagttaaattaactagaaaaacctataattttactttaattaaactttattacacacatacaatataacaattatcctattaacctacgttttattaaaactaattaaattaatataaatctaaataaaaattctaacaatatctcttattagtaacacactacctatatatatttccgatatatataatatatttgtattgtatccatatatcatgcgcgcatgcacatatatatatatgaactatatggaatatcatcaacaaatatatctatggacaatatgatgatacactatatcaacatgaacgtactatatatatatgtataataattgtgtttggataattaatattaatatatataagcatgtgcgttgaacaatgaatgaatagttaaggttttccaagtatatatatatatatataacgatagcaaattaagggcgccagccactgcagactatggaccccaaaggttggatattaattaagtaaaccactaatatatacatcttttatacaagagcaacgttactcatcaacactatattcattcagatttatttttatattatttattaaattaaaatatataaaaacactgatattgaattattaattgacagctttaacatttttctttatataaataaatatataatatttatgtttttttcttggtttgactaaattagtaagagaaaatgatatgagttttcatatatggatggtttaagattcaacaagagtacatgacgacaagtcatgataaatttattatccaatcagctaaaattatatccaaattgaatataataatataatgacgtaccactcaaccataataatcaataaaattatctacattaaaattttgtccagtaatacacaatattaattttcaatcaaattcacgtaaaatataagactatatttatatatggctgttataactgtaggtaatttttgatttaacagctatatattcttttttaatttttttcgttaactttaacagattttaacagagctttttattttattattaaattattatattattgattcaattgttcgttaaatttttctaaataaatggtatattcatagattattttcacacaaatatggcattataaatatgctaattctcctttaaaaccctgaatcgtattcgttttctatgatgagaagggttaaccgagtttcactaatcagtctatttctgctactaatcagtctatttctgctggattaggtgccactcagtacatcaacttctttctaaactgcaccaatacttaattatatcaataaccttagtgtactttgggtgttactatacaccatttatcattttttatctaataaatatataaatatatgcacataatcaaataatttaaatataataaagattattcatcaaataaattgttagaactttgtggaattttttttttaaaaaaaaataaaaaaagtaaagtgtgtgaatgaagtgtatataatatatatccaagtttggaacttgggttgggggccctaatggatacccagatttgtgcgcatgggtgaggactcacacacgcgcgtgcgtgcactgcgtccgctgtccaatcgaccgtgccgagttggcgggtgtggtaaacagagacttcttattttttgatcccacactattccttttagtaatgtccttcttcgcgttattaccttctgagcattgttgatataatgggagaaaaacatatctttttctcattgaaaaacatatacgataaattcatacaattatactatatatattgagcagtagtatgggttttaggtgtagtattttaacagttctctatcgtgtaataaagttctgatacattatgttcaactgagatgttttatcttgagaacaacgagactgatagtctgcttacacagttctactaccgcaaatgtcttaaagaaagtgacatgtgactcaatccaaatttaattcgaaaatttctttccttttattttgaaaaaccgtgtttttgcaaatgtcagttatatataagaaaatataaaaactgta

SEQ ID NO: 117578 - DNA, 1994 bp, Cannabis sativa
aactaagactttcatcaaacaagttgtaaacaaaccattccaaataaaagaaattaaaattaaaataaaaactcaaattaaattcaacattttcaccacaatcagtccaaattaaattcaacatgaacaaaccaatatcaaatcattctgtgatggtggccgattctgaggcagatgagctcacatcagcttcggcctcggcatcgtcggtcgccgctgccagagtccactccggtggaagctcaggcaaaggagcgtagactgtgggtttcctctttatatcccattgctgggttttgcgaggacgagtcttcctgtggtgagctgtcgacttcttcgttggtctggaggagcattctatcacggccaatccaccgccgccgttagaccaggctggccgcctagccgcgacgccgaccgaagccggaactagtgggttctgtacggacaagagttgagagccgaagagagcagaggttgacatttttgggggtttggaattgtgtgtgtgtgcctctcgattttgaggattacgtattttatcttctttggaggatttggtttgtaattgggcctaatgggctttttgtcatgtttctttgtgtttggcccatttgtgtttttgggggttaagatgaaagttttatggtatttttaaaaatttcccttttatgacaatcattagtttgggttaagacacaattgtgtcagtcatacacaccttctatacagattgttcttcttcttgggctgttaatgaatcaaaagttttaagggattatttaaaaaaaaaaatacaaaaaaaaattactaaaatctatattatttgttattttgttgttgttttaatgttgttttcatattattttaatgtaggtttattgtgtctttacagaatactgtaaaaaaaaattaaatgtaagaaaaataacaatttatataatttttgcaaagtaatataagtacacttaaaatcttaatatcctaaaagaattctttcattttattttttatttttaaataaaagagctattataaattaaacatattcatttctaacaacaaattatataggggaggggacatcctccaaccaaactaagtcattattcaactctaaaacatattttgctaagttataagcgactgaattagcatctctgtgaacatgagagacaacaactctagaaaaaaaagataaaaaactaacaacttttacaattataggtgttaacgtagataacttaaatgtgagctgattaatcgcagtagaaactcttagtacatttgtttccacctcactgaaaagtaaactatgaaataaagtcattgcttccattttgtgagccttaaaacattctttgagtggcttaaacaaagctggaatcacttggccatgttcatttctcacaatagcacccacaccaatagcacgtctagccacattgacaggagcatcaacgtttaattgatcagtctcgaactcgcagaaggttaatttccaaggttcttgtggtgctgaagggactaaaatcgggtcatcatggcttttagttgctctaaattgtagcataaagttagcagcgtaagaatcgagggccatcgctggtcttacttgatttccatgaacaacaacatttcgttctttcaaaattgaccacattgtgcaaataatggattctatctctgatttagacaagagagttgataaatgaatcaggtaatcaccttgaaccatggaatttactttttggaagtcataagaaagacctgcatgtctccaaacagctcgtgcatacttacagctaaataaagtatgttcaatagacttccaagcatgtgagcatagaaaacaagtggttgttgtgatgatttttcgctgcactaatttagtggatgtgacagtcagtagtcccgtgatccgtaagggaaaatattgggtaagctgtgtaatcctacaccgcctggggaaggtcaagggggatgattctgag

SEQ ID NO: 117579 - DNA, 849 bp, Cannabis sativa
ttgagaacaaagctaatttaatgtccaaaaagatataaataactctattttcatagagttatcacttgcagtgaagtggaggaagaatatataaaatatataaaaaatcatagtgacgtaaatacaggctaattagtacttttgtaattttttaggccaatatcatgtagaagaaagtttaaaggtatgattcagtagctgttaaaatttgggagtaagattttatagatagaagacataatttagtacatagataattcttatattagtaaaattaaacagaacagaacgcaaaatatttttaaattcaataatttaaatagtttctggaagtaagtttaagagcatgatttacggtgaaaattctaataaaccttagatatgtatctacgataagcctcaccttggagcaaattgcaagccttgcttcttctctaacccagccaagtatgagtcatgaaggtcaacctaatctttctctttcgtacaaattatcttctaaaatttgttgagcactcttgtgatttaattatgaagctactttgctcattttggttgaataatttcagttaaatatcttaaaatttctgaagaatttgatggattcatttgcttgtacatgtattatataatgtatgattttgttcaaaatctcaagtttcaatctgtagatacagaaatttcattttgattggttcattgcagattcagtttgctgagttctcaactacgaatctcatatgttcatgacagcttataatattctaagttagaagaggctttctttttgggctaattaggatttttgtccccgaactttgacatgtaccaaatcatgctccctgaact

SEQ ID NO: 117580 - DNA, 3034 bp, Cannabis sativa
  modified_base (32)..(71): a, c, t, g, unknown or other
catgcaagataaaatgttatttctgatctttnnnnnnnnnnnnnnnnnnnnnnnnnnnnnnnnnnnnnnnnagggcataaaacctaacagtatgtgtggtatatatgtaccctataaagtatggagtggtttagacaggttccggttgcatttcagtgagtgtgtaaacttggaaaattatatttttggcccctgacaaactgctcaactggttctggccaatcggtttactgtttcaggtagcctcgagaactcgggaatcgtatttttgccataacttttcacttgagtcttcattttggacgttctatatactgttttgaagcttacgacgagatctaccatatgctatatgtttcagagccaaaatataagtttcattttagtgtaattgaaatatggggtttggtaggaaactgtaggttgtcctttgcaactattaagaagtgctttgggaaaaacattggtttattattgctatgacatagagcccatgatcatcgatcattcttcaagtaggtccgccaacatacctgaatcgaaacttgaggtaaggaacgtataatgtaccacatggcatgacaagttctgaaattatcgattgtttgattagggaatgataatgtgatgatactatggacataatatatgggatcaccgattaggtgatgcaatatagctggcaacgtagagggcgtaggtatgggcataagtgacatatcttgcataccgagcgtaggtacgaactcacctgattaggtgatgtgataatccttgcaacgtatcgagcatatgtgtgggcatcagtgatatgaaaatttcctggttatggtatagattgaaaccattgttgggttttctcctggcgatgtatcgggcgtaggtacatgcatcattcacatatgataagtaccgagcgtaggtacgggcttgtctaattagacgatgttatatattggtgccaagttgtggcataggctcacctgattaggtggtgtaatgatattgcattatgacacgggcttgcctgattaggcaatgcaaatatatgagcatatccatttctatacatatgactggttatattacctactgttgaaggttatagtttaatcattttatgatagtaaaatgtataattagctatttaatgtatccttatttattacttttcttgctgagtctatgtgactcacgggtgctctatggtacaggtaagggcaaggaaaagtgagaacaaccatgaggtgacagtcttctccaggaatgtacatattgatccaatcggcttgtgtgctaaaattctaggagttgttttggactggctctatctgctatattttgaatttctattgtatatagtcttttgggtaaatcttttataacagggatccctagaacacgtttttactattattatagtgtccgtttttagtgttttattttagtcaagttttattatcctcgccatttttaatatttaattaatatattagtattaaactagtttataaaattacacacatggcgtccctatggaatagggctttacaacttggtatcagagcaaccatagctttaaaggtcctgaagacttattgatgtacattcgctgcgaggacaagtcgactcatggtatagtaagtttttatgttattttctattaccttacctgcttagaaaataatagtatatgatgggaagaagtagtgtgtgaatggcttctgcatattgattattgatggtgagaactcgtcaactaagttagtagtccaaaaatccaaggttaccaagaaatgtgataaagataagataaagatgaaggtgaaagatgtctgaatattcctctctataccaaatgattttccaaccccctttaacatctgagatggggggtttttataggcgctaatggcctgatgtacaaagttgtcccatggggacaagacgttgctttctggctgcatgatgcaggtgctggaggtggcctggcacccggtacccttgtctagtgtcagatggtccccatttacaggctgcaggaggatggtctctaggtacatgcgcatggtccctagttgcaggctgcgggaggatggtctccaaggacatgtgcatggtgcccagttgcaagctgcaggagtatggtccctgggtacatgggcgtggtctccagttgccggtgctggaggtggcctggcgcccagtacccttgtcaggtgttagatagtccccaattacaggctataggaggatggtctacgggtacatgcgcatggtctccagctgcaagcggggtggtccccaggtataggatgttggagagtggtttctacgcatcgttggtcgggtcttcaggccttcctggtccgtttgtcgccattacttgtacctccttgctctcagtcttccgaaggcatggtcgtaagctctttccttgcattcctagtccttggagctctcatcaaacgtcatctttgtctacacgccttcgcttctttccttatacgcacatccctccaaaatacacccaaaaaaccttacctttgactcccttctcccaaacacccaaattcccctacatgcacagccaactcccccaaatgaacacacaactcgcatgcaagccccccatgggcttgcatgcgagtcctctcgctcacataacactccctcccgcacttgcactaacagctcctgtgcgagcccccatgggctcccatgcgagccccacactcgcacacaccacactccccctcacttgctctccctcccacatatgcactcacggctttcgtgtgagcccccatgggctcccacgtgagccccccattcgcacacaccacactacccttgacttgctctccctccccaacatacactcacggcacgcgtgcgagccccccactcacgcacggattgcatgcgtgcccccatgggttcacatgcgagcctccatacactcgctctgacactccccgcacacaatgtgttaggttataattagcctatgtttcgggtctttaaagttagc

SEQ ID NO: 117581 - DNA, 974 bp, Cannabis sativa
tcttaccaacattttgaatttgcagacctgcaccatcgcccatatgtatctgatctgtgccaaaataaggttccttctgagtgaaattgttggtgttagcagtgcagtgactggtagcacctgaatcgggataccacgaggcatctgcaactgtgtcagcagtggctatgttagcagagaactgttccacattagctgctcctacacctggaaaatccatattaaatcgttgataacagcgagaggcaatatgccctggtttggaacatagttggcacacagcacgtgatccaggagcaccattggagtaggtgttggaagcagattggcctggtggagagggagaaactgcacggcctgaagttgtgaacatctgattggacggtggaccacccgcagtacgaggtgtgacagcatagggattccaagatccacgtcctcttccattagaggcagagtgaggaggattgttgaacctggtatctgcattaggataagaaaagccagatccacgattcctagaggatcgattagtagctagattaactgaatccagttctctgtgatgattgtccattcgatgctcttgggagagcaaaagtgattcgatttcagctatagtatatggttgattgcgtgaattcacagatatgatgaaggtgtcataatcagctggtaaacctttaaagattgcagagatatgttctttgacagatacatgatggccaacagactcaagacgatcaacgaccgtcttgatcttaagtaagtaatcattaacagaaagagagcctttcttgatggtagacaactgattagtaaactgatctatttttgcagaagtttgagtggagaaatatacctcaagagttttccagacttgagcagacgtttcgttgccaacaacacgagtcaagacaccttcggacatggacgagagaagccatgagtagagaagttgatcttgaatctcc

SEQ ID NO: 117582 - DNA, 1161 bp, Cannabis sativa
aaatttataaaagaaaaggagcttaaatgtcaacaggttccattcccacttggctaggaaagccaaattcatttctcttgttttccgaaagcctagaccccccaaagacttaggaaagcaaagtttatcccaagcttttagatgaaggtcatggtttcctttctcaaaaccttaccaaaaatccctgactaaaccatcaatcctcttaaccatgcgactagagtggattgaatgttaaaagttgtattttaattagattggatcaattattggatatcaatcttaaaattcaattaaaaatcgatccaatctaattacatatgatacatgtaaaaaaaaaattagttatatttatttatatataataaaaaaaaagtttcgattatatttacactagattttttaaaaatttgttatttttattattttgtttatttattttcaagatgttttgtcttatttatttagttagcagtgttgttgttttagttaaggtaatttgcagtcaaactcccaaaactttaaagtttgataagatcaatcccctagactgaaattttgagggcttaactcctaaatatataaaatcgtttttctatatactcctttcgtccattttggtctgttaagtgccaaagtggactgtcattatgtacaaagtgtacacgtgtaaaattttattgatccacctaaaaaataatttaaaatattaaaaaattaaaaaattagaaaaacaaataattttttaaaaataattatttttttctctttttttcctttttcttcttctttgttcttcttgaaccgttagctctaactcactaccccttttctcttcctcaatctgatccccttctctctccctaacgattctcttgtgcgacggcattggccacagaccaccacgagcttcgaccctataaaccccaaaaatccccctgttgagctcccccttcctcaatctttctctttcttttcctttttcttttcttttttctatttcatcttctttgttcttcctggaggttgatggtcctgagctccctcttcctcaatctttatctttcttttctttttctttttcctttttctctttcatcttttcgttcttcttggaggttgacggtcccgagctccctcttcctttctctctctctctct

SEQ ID NO: 117583 - DNA, 1339 bp, Cannabis sativa
aataatccaaggctcattaagatttccaaaactcacaagattgtcccacagctctttacgagtctccatagcattactcccatacacagtcgtgataagaacactctttttctgcctgctgatctttattttgcaatgcaccagctggtttgattcataaatgacatcaatttgaacatatttatcttgccatataagtaagattctcccaacaattacctcactagaataaaaattctaattttgaaaattatccaccatcacgccttgaattttctcatgttttattttagtctcaaacaacacaccaaacccaattttattcagcctacacacatcaagaattgtaatttgcttttcttttttattcatgcccctcacattccaccctatcatattactaacttacatcagcatttaaatttggattagaaaccaaaatctcatcctctgttgctgctattaacacagcatagccattgcttgattttgccactgtagaaacctcctttgcatctttgttctcaaggtatcggatagcctttctcttaggcgtgatccactcatttccaggtttaggattgtcaacatctctcaccctagaaatcttctcagcatcagcctttgtctgaatacttatagcaacatctttgtcctctgtcatgccagcaatatcccctgtttcaccttgttcactcttctgaactttcttagtctctttatcagctacatgtttcttttaccacacaaccttcttttccttgttactgtttgcaactgtatgccccaagttagcacaagatgtgcattttgtaggcagccattcacactctatcccttgttccaccaattgtttctttccattgataaatgaaattattttcggaggatcatctaatatctctatatccacaaggagacgagaaaatttcaccatagttctatcttgagtcaccttatcaatcataataggtttacctattgtgctaactaaggcgctaagatttttcttcccccaatatttcaattccagaccattcaaccgaatccatactagaactgagtttactattctcttcaaattgagatcagttgtccacggccttaaaaccaccggcttcttatcgaaatgaggtctcgagtagcttcatctcgaaaattgaccaaagtgcaacctgagtgcatacgaacaatcttttcaatacctaggttaccccaaatcctcgtgataaatccctcaaacaccttaaatggggggtttgctcctagcacaatacatactatcacatttttcttgtatgaggcctcaacctcaatctcctttaggtcgagcttagcc

SEQ ID NO: 117584 - DNA, 3520 bp, Cannabis sativa
ataaatcacttatcgcttactaaacaagactcattatcgttggctaaaagtgaggtcaacaggttataccttggattaaacttcttgaatttagccaaattacccctaaaaattgatgaaaatgagatgggtttcttgctggtcttcttggctaaaagtagagagagaatgagcaagagtagggttttgcttctaattgctttgtgataaatcaaagaataaagataagtgaatcttatctttttacttaattactaataaccaattgtagcaaaagtagtgacacaacccactcaccaagaaaataaaatgactaaactaaccctatctcaagcttaactaataaaatagcttaggggtataatggtcttacaccataacctcgcctaccccaatattccaaatatcacacatgtgattgtcctgctacataaatggttctaatctcttccatgtgactctaatgactattcgttgaattttccatcgtcattgagcaaaaatcataaaaattataaatttcacatatagtataaacaatacacttgagtgtttgataaaatctctagaattgagaaattataactctaattcttataaaaatggggcccacacaataaatatttatatatagttaaaaaataaagataatgaatgctaattgccctactaatccatgtattaatcatgaggttattacaacagccctatttcaggaagaagacgagatacaacacccagtttactacatcagcaaggaaatggtcgacactaaaactaggtacgctcttattgagaaattgaaattgtgtttactcatctcctccacgttgttacgctcttatttccaagcttcttgaaataaagctaactgttgcccatcatctactttctttaccttagaagcctcctctttgaacctctagatgaagttcatcaaggtttccataggtagttgattaatgttggtcaaggcgctgacttcaaggtttatctttttggctgcaataaattgccttcaaaaattagtttgtaacttatttcaacaatccacagatctgggttccaacttcttgaacttttcttctgtagatcctcccaatgtcagtgggaaacataagcattttgcatcattgttgaccctcacgactttcataactctattgaatctagacagatgatcactttgatcagtgtcacccgtatacatagtcatttcaggcatcttgaagttcttcgggagttcagcctcgagtatgtttctagcacaaggcttccggtcttcacagtctaactctaagtcatctctgttttgtctctgggagacccttggtatgtgcttcttgaggataacaagttcggtcagaactccttcatttaggacactctcggacgctggagcaactttttttttctagttaggatgcgccatgaggtctccaagtttggcattgagatttttttccaaattgacaagagggtctttcttagtggaccccctctattttcccgactcttggtgcacaaatacgctcttctgacctccacggtcctaggggctagttttctctttgggaaacctaccccctgtagaccttttgcttttgggagatcagaacaaactttctatggatctcaggccattttgttctttccaaatacagtcgtagggttcccctttgggttaggcctctcttgagggtaccagatgggactaggctccctatccttctatttttcgcctccctcagggtgagaaggctcttcccttatcttttcatgtacatataggactgcaattggatatacgtgattgcccacattttccattgccttttttatggcaatcaatatttcttgcattctcttattttgctccttttgttctgccaactcagcctcatggtcagtagccttttgtcttaactcagctagttctgtatagttggcttcatcgtattcttcttggtttatattctcagggtcattggtgtctccttctccctcagcatccaccctagaagctgcctcttcttcttctggaccttttggatcattaggctgttatggacgtgaagtgttccttgttaacaccattatacaatgagacttcatgcgacttcctttttttggcaagcttcctacagctctgaatgaaagtaccaaaatgctgaccgagatttttggcaactattaattagagttgtttgaagtaattaatgagtattaaagaagagattttttttgcgtggttggggtattaatgagacttagttcacgagtcactgtattaatgagtgtttttgttttcagagaattcccaaaaataagtcccatcttctatacatcagtgtgatatttataagctcataatggtggtaaaagaccatcatttccgtgatggtatgaacaatgctttgtacaatttcctaaatttgatcatagggcattatttcctactttttatggtataattgggctgactataggtgttcggtaagatatggcatatctcttatttatgatttgatagctcattatgtagccgtcaattgatgtatgagcatcgtgaaatcaaggtattatgggtttaaaccctgaaacacatctattcagtgtaaggtgttggttgttcttccccatgttgcattaaatgcgtatacggtgatataaccttgagtagtgtgctacactctgcctgtcctcccatatcctctccaggtcgaattcactcgttgagaggaagagacgagaatcatccgtcgtccaggaagaccctcctagagatgacaaatctgtttattattcttttgaaataataaactctgggagtgattcgaatggcatgtcccatagtgtgggtctcatttccacctgacttacttctaaacttccaagtattttaaaaaaagttctaggcagcaagtcactatagcaatattttccatttatgtatttttgttaattaaataattgaaatgaaaaagaaaaggaaaaaaaatattactaagagcctatatatagaaaaaggtaaccataaggttgaaagacaattacttttgactcaacctaaaggctctctcttttactgtacgattgaattccaaagctctatctttctctctctttagaaatttcacctcaagtattaagaaaaattgctcataaattaggtgatttaaaggcaattgtcgaaaattatgaagaaaagcggtttggattccttataatacctaacatcaaaccagaacaaaaaattaggaaatctaaaaggtagaatcaactacattcccctatgtaatcataattaagtatactcaatttctatttaaattaaattcaattaaaaaaatgttcgaaactcttttacatatttacatattattttttttcagtttaaaccaaaaaaaaaagtaataatattacaaaaatactttcagttggccaaataaacaaatatagaacccaaataaaaaaaaattacacaaatacaacatacacacaccttcaactcaggatc

SEQ ID NO: 117585 - DNA, 1027 bp, Cannabis sativa
attacgacggttccaaatttcccagatgattccaagaaagagacggagttcttccttagaaaaatcttggaaacccttcaacaagaactcacaaatgtcaccactcctattaagcaaataaaagtttttgaacctagaatccttccattctcttgaagctctggaacactctattagagcatgggtaacagattcagaaaacctagagcaacaagaacacacagggctttgaacaatttttttatggaaaagatttaaggctgtaggaagactatggtgaaaggttctccaaagaaagtgttttattttttgtggcagttttaaattccaaaggggtttccaccatttgacaagagtgatattactagaagatgttggcaaagaataaatagaattggccaaatgataagccgaactcacagtgagaaaaccagaagggtgatgctcccaaatgagagtgtcctccatagaaatatcactaataggaacagataaaatggcatgcatcacctcctcatcaaaataggtagataatctctccttattccagcagccatcagtgttgataaaaaaggaaataatagggtcagggggggcaacattattttgaaagatatgaaccgccaaccagggatccaataagaattaatggtggagatggactggccatctccaaccttccacaaaagacctcttttaagaagatcccgaccccaaagtaagctacgccaagtgaaagaagggcaatgacccttagtagcctctaggaaagagttttgcttaaaatacttggcttttaagaggcgagcaagaagagaatttggcatggaaaacactcgccaagcttgctttgaaagtaaagcctggttatggtgcacaaaagaacgaaaacccaaacccccagaaaatttagattgacaaagcttctcccaagatttccagtgaacttttcccttattcccagaagagctccaccaaaacttagccataagactctcaatctttttacatatagaaatgggaattc

SEQ ID NO: 117586 - DNA, 2946 bp, Cannabis sativa
cacgtaactttttactagtataaataatatatatatatatattgttagattttcattgactcccgttattattttttaatagaattattgtaatattgttatacaagtattagtggaattgaagaaatttataaataaacaatttttttcatcacaaataaataatagttattattatattaatattcttaattagtatctattataataattacgtaaattatgtagtatttaaattcaaattttattagatatttaatttgttatttgttattccacatttcaatataaattatgattattaaatttgtaaattttaaaattaaaattaatttaaattataattttattcaaacgatacatgatttaattattaagaatattagatattataatgagagttgttttattaaattataaatataatattattaagaatagtaaaaagttactcatataatttttttttgcttaacatgtaatttatattttttatttgatacaaatatctatgtatcattttttaagaaaaaaaaaatatattttttgctgaattttatttttctatttttaattaatgactgagataaaaatatcaataaaaataatctatgataatgaaaaaagaaaacacaagtgaattcaaaattttaagttttgaaaataatgaatcaaaatagggtaattaaaatacatgttcaaaatggtgtagatttttgaacaaaacataaatttatttacatataatttacaatttttataattaatttttaacatataataacgaataagaaagattcaaaagttaattttaaaaataaagaatttaactaaataattgacatggattaaactgctcattaatctaaaaactttccaccaactctaagagtgtggaagttataatgttaagaagaaaactcttaacgaagacatgttcatcaataagatgcctattcaaaaattgtaagagactaaatggagtgatatggtgatgataatagatgagatacgatatttaataatataatgatgacaatgagcgagatacgatgagagacaaggggtgagatacggtgataacaacaggtgagatacgatgttgaatgattatatttaaaaataatacattatattatgggaaacacttaaatttttcctaacccactctatttacttatttttataataataatattttttaacaaagaaatttaaaaatctatatgtatagtataaatttaaattttataatatcaaataaactcaataataatatattgtgaatatatatatatttttattttttaataaataaaatattattaataatatgtaattaaatgatacaattttattattattatatattagaataattttttaagcatattaaattaataaatagttttttattataacactaaaagaaattaaactagccgcgcaaagagcggctatattgcctagttaattaatagtcatcatagacttagctagtactgcgaatccaaaaaataattttagggtagactaattcaaatttgtactgaaattttgggatgaagttataaattggaacaaattttggtacatctaaataataatataagatttataactcttgtttttgtttttttatgtgagaacttgtattaattattgataaatataattcaaaacagtttattaacctaataaattttttttaacagaaaaatcattaataatttgaatgttctatattaatactttataatttttttttcaaaagaataaatttatatatataaataaaaatagaaaataaatttaaagaaaattagattcaaaactaagtcgaccaaataacaaataaatacttacactaattatataacctttttgaaatttgagggtcaacttaattaagccctgccatgcatattcaattgagtttgttagtcgttagcttgtgaaatgggttgataactaattgtgaagttttggatatacgttgcattcattaattaagctcactgagaatttttatgtgaataataattcataataatatatacattttttattttaaaaaaaaaaaagaagaagtgaaactgaaattgaaacttttgtatggggacttgggagagtgcatgtgtgtgtgatgacaactaaaaagaaaaaggtttgttatgtatgtatggtggttcatcttctgcaaccattaattgtcactaaatagtattagaatatttatatacatgtgtcacagtttatagataatgactactcctttttcctatgcccaatatattatatttatctttctttaatggaccacaaatttttctaactctcccaaacaatattatctatttatacatttgtatactctcccttactaacattttgcatatatttaactccatggtagtgacataactattaaatttcaagttggtaagtgtcatctaacgattttttttttatcgacatataagtacttaatgttaataaaagtgtaatttttctttaatttctctaatacaaactctattaatatcttaaataagacacatataaggctcaaatttttaattattggagctagacaaaaatatgcagtttgaattacgactaaattttcttttaataaattcaaaataagcaaaattagatgaaaattatagttttacaaacattaagtacttatactgttaaaaaaatcattcaatttatgtcaattaacaaacataaaatttaaagtacttgtgttgcaattattcaactctactcaactaactactataaatagtattaaattaattaatagttaggaattatattaattacagtgttaaacgaaaaataataagaaatttttacatgaaaaatcacttttgcacaatttattaccaaaatactcctacacgcctataccaacttttttacttacaatgttgg

SEQ ID NO: 117587 - DNA, 1592 bp, Cannabis sativa
acatctatcttccattttcttcaggaacttcaaacctttctcatgtgaatgatcacaataacatgaaattaaagtaccgtaggttacaacatctggggtagcgccattctttggcatattattaaacacctcttcgacatctttcaaccttcccgcttttccaagaatacaacacaaccattcaccttcattttctcataaacctctgaagtttcgtgttcctggttcgctttccctaaagcaatcattataatggtttatgtgacaacagttggtgaacaacttttaaccttcatttcatctagaatggcatctacattttggatttccttgttgtgacagtaaaatttggcaaaccaagtataagaaaatgcattgggctggcacctatatttctccatatcctccatagtcttcctagcagtataaaacatcttagccttgcaccatcctagtattcataggttgaaattgtgtgtattcacaagtattgaatccttatactccaagaaaacttcttgggcattctcaataccattttcctttaccaatgcttccataagaatgttcagcgctgttatgtctttgctaatgccaaacttctcaattcccctgaaaaacatatatggcttgtttatacaagcgagctccaacaagtctcctcatgaactttgtcactgtgaccaaggaaaaaacccatccaaacagttcatttcctcaatcaaatcccacaaaagctggaacttcctcgctttccccaagatatcaaccattgagttatacaacattggagaatgcttataatctgtttgtgtttgcccccaaatgaaaaaatcgaaagccaagacccactcattgttaaatcgcgttaagaactgttggactaaactatttgataaaattaaaccacgtcgattgagagcttgagatactacctcaggcgaagagaaccttttatggagaatcgtgctcactttatctccagctcagtagcctcgtggagagattattgaagttgtttatggggttcaagttcaacaaacccttgactcaatgatttgatcaaataaccaagaggagagataacaaaaccatcatcttcttcctcagcagtaaaactcggaagctgaggagactctatgacttgggttggctcagtcttggtgcattgtgagctaagtagaaggtaccgatgcaaaccaatggaattagctctgtgccaagagagcatcttcgattgagatgccaagccttcgaactaagcaaaggtcttccaaatgaacttcttcaaaacgttgaggcctttgttcatattttggatccatttaaccaacaacaatatatacaattgaacattaaaacttttaatagcagggatttcaatcacagatagccaaaagctctgtcaatgcatcaaatatcaacatagccaaaagctaggtacaaaccaatactatagtctatagcattaccttttctcacttcaaaacaaaaatgattgaaattaccttaaggcaacactctgcaaccggcgtgggtgagtgtgttgactcgatggcagaatgaaagtggccacagcgaccattgtcaat

SEQ ID NO: 117588 - DNA, 1969 bp, Cannabis sativa
tacgtttaaaaatcacgtaatatgcctatgctagttagggtgttacagtcattgcatatcttgaggtacaattttcaagataagacatttaatgcttcagacagtgaagagacactccatcagtcatgtcggatcagtggtaaaaactgaacacgcgtcacccatccaatcagcttcatgactgaataagtccatgtgtgatcaaaaagctcacacgcggacttggggggtaaatgttatccaaatatctacacagggtgatgtggcatccacctgggtgacacgtggaaaagattatatgacctggatggaagattccactattgatgaaccatgcaggtgtagggaggttagatactcaaagtgagcagaagctggaacatccaagtagggcatgcgagaacacccgactagctttcaacatatgggtagctcgcataagctgaccagagaatgcgagttagatatttccagatatatatcccacacatctttgtgcttgtaaaacacaacaatatacctattcccatgagatggatatgcaatatcaaggaagaaaggcaacttggctagttttcaattttgctcattgtaattatagaaagtaaatagtttcctcattttatttcttattagttttgaaaaaccaattgatgtaattcatccctataaatagtggagtcatctcactatttagggaaaaattcatttagagaacacaaaatctagattcaagagtaaaatacttagagatcattgtaagagctagactattactatcatcaaggggccaaacctctataattttggtattttctttacttaatcttaatttatatttattatttaactattcttaatcgctttaatttaattcactgtcattggctaaaagcgaggtcaacaaagacttttgtctaattttccaatagaaagtttgacatagataaaaatttaaggggtataattcggtacatattaaattttagcatgatttagtacatatcaaaatttgaaaggagaacaatttagtacataaacaatcaccacgttagtaaaattgcatgaaatttgatatgaattaatctttaaatctaacaatttagtagtttagaataaatttttaacgacttgaaaaaattcaaaagacataatttaatacattttaaaattcagaaaaaaaattataattagttttttttttttttttttttttttccttctccaaattaccaaataatatttttgctgggtacatgggggaatgtgataatcacgcgatgagaaaaacatttgagcaaaatgaaaaagaagcaccacactaccaattgcaaaccattcttttattttcttattatttatttaaagagagagagagaggggtaggactatgaatgatgaaagaaaatgtagcttaaagaaggaacacaaaagggtcctaccttattgccatagatgtggtccctaactaggaatattaggtcccacattttactacactttatttttaattaataaataaaataaaataattatttttgtgtctcactcaaaaaataaaaacgagaaaatgctcctaaagtggaattggcattggcagtagcagtggcagcccatatgaactgtttttcccagatgacaacaaaacaaaatataaagcaaaaagttaaagcttattacaaacacctctctctctctttctctctccatattctacagtagactaagagagagagaagaactagggaggagggtagagctccatagctcggctctactactactactactactcaaaaacaagaagaaaaactgcccactaaaagtaaaagcaggaaaactcattttgtttgttcattacttgagctctgtacaagaagaaggaagaagacgacgacccactacgtaatttgccaaaataaaaccgacccaccgaggttttttttttttttttttggctttttttttt

SEQ ID NO: 117589 - DNA, 1990 bp, Cannabis sativa
aatttttaacggtaaaaaaaattcagtataatttggtacatgtcgaagttcggggaaaaaatcctaatgagcctaaatataaatgagtctgtatcgtggtataaaaaagtatgagttgtatcgtgccgtgtcatgataaaatatgagttgtgttgtcatatcgtgctataaaaaatatgaggcgtgtcgtattatgctataaaaaaatacaaatcgtgttgtgttgtgcttaaattttgtatcatgcttaaatttgtatatattttactttgatcggtcagttttcttatatagcctcattttgtattcttctttttgatattttatttttacaattaatgaaataattacaaaagttatatattttttttatagctttaattatttttatataatttttcagtactttttttacataaagtcatataaaaaaattcattaggactattaattttttaaaaaattactaataaatattcatattattaacattactatttattattatcaaatataaagtttttaacatgtcgcgctttaagaatagaattgttgtcggaagaattaagataacactaaattctgcgagtattcaagcacaacaaaaacactcactagcagttaaacgagtattcacctaaaacagcgaatatttaaaatataaggtacgaaatagataaaaacaaaaacaaaaatataaagaagacaagagaattatagtggttcagttagagcttgatttgcttagtccactttagataatagtttttgtttagtttatttaaatttggatcaccctttatataaaaagcatgtgccctttagaattacataactagtcaaacaagactgttattacaataaattacagaattaaatcaagataaatgtttaaaaaataaatgaagagtagttttgcccgttcttggcttaattacagcaacgtatgcgacttgagaagtcgtagcttgtctatttgtattcctaacacacgagctcacgagctctatggtattatattcgcaggataggcctttaagcctatttcattgaatgtctacagtccattgagcgtattcagacattctatgcattgacaacttagaacatgtgagtttttcgaacataataatcattcagacaaaacctatgtaaagaagcggtctttacttatcgcatgagagatatcttgatcatcacatataattagtatatgtgcaattagtactatcttctctcggtcttgcttatcctttgactatgctgggcatagtatgcgactagactctgcctcggtcgcaccttctcacaagttcgtatcatgcgagattaattgactatcctttttctggttgcactagttattgtgtcccttgcttttcgattcgttttacaaaagaaactaaaataaattcaaatgaagaagattgcagcatcgcagttaaccttaagaacaactacattcagtttactccatcgctcagaagactaaacagtagatttgttgttcattcaacccattagctatgttgttcattcaaccccttagcttgagcattcaactattgtgcaaagtatgtaactggacaactccatttagctgtagaaaacttgttgttctcaacaactaacaacaatttgatggcgaattatcgaaaaataaaaagataaccaacaacaaaataaaataaaataaaactatgtcatagagacaagactaatcacagtaacttaaacaaaagatactcaaaatcatgtcacagagacaatactaatcttagtagtaaaataaccgaccctaaccaagacacgcctaagtccgaagagggccgaaaaacctggccataaaaataattttagagaaggataattttaaattagggattatttcacaactccacaaaaacaacaaaaaaaaaattacaaaaatacggttgtacgaaattttaaacagttttacgatttttatgattttatttacagaaaatac

SEQ ID NO: 117590 - DNA, 1700 bp, Cannabis sativa
atatttttaagctaatattgaaatttaagtgtgtaattgggtatccaattataaaaccgatccaatccaattagtgattggattggatttaaaggtctaattggattgaatcagatgatgatttttcaaatctaattactaattgaattgaattggatgagaaaaaacaaattatattggatcggatgcccacccctattcccacatactcagcccaagcctcaataacaaatctcattgattcattccaatctcaaaaggagaaaaatgatccaacggttatgattcagtcacgtcagcgaccgatctccgagaaaatagatgagctgatattacgaaagtacccttatgttgtggagacgtcagtgattgggtgatgtgtcttttttgggcatttcaaaaaaaggagaagagaagagaacgtgtgatgtctcagtcattagtgggccacgtcacttgtgttcccccaaagctaaaatccaaatctatcgacatttatttattttatttttattaataatttcatcaaatatatttaaaatttaaacaaaaattaattagtgtagtatagtatgaatcactcctcctccaccagctttctaatttccatatataatatttgtttaaaaaaacataaacaaaacaattatctttacataaagagtattttacacttaaattcattacaaaaattattacttaaattcgttaatttgaaaaaataaaatatcataaattatttgtaaacaacttaaaatgtctatattaattaattttactatttgagccttactcaaatatatctaatttatctattaatgaatattaattttacgaataaaagatctcataaaactttaaaaaagggtataacaaaataaaactagaatctaacatattttaagtttttttcctttctctttttacaataacataagttaaatgtatttagctttaattgaccaatatatttagctatattattgataaatacactcttatagttaaagttcacaacaatctcaatttaattttatttatcaacattaaataacaccattaagttctacaagaatttaattaattttaaaattaatttactacatacttctctttaatgttgtcttttaaactctttcacactcaaggtgtgaggtgacacattaggattattttgtaaagaataaaaaatataaaaatatagtgatattagaagaaatatcaattttcacccattcctattattttaatctatttgtagttacaaatttacaatggatagttaagaggtgtcattgtaatcaattttctaaaattttatttgtaccctacaattaaatacacccaatttattatttatttttaattagtttttcatttttaaagtctaatttattatgtagttgtattattattaatttttagtaagttatataatcttttgtttttatactataattttaaaaatagtttatactgtttttaagcctatttatgtatatttatagtatttttacttttgtttttctgtaattataaataaagtcaaataaaaatatttaaagtatatggattaattatttattttaccttatttcaaaattatatattaaagtatatttattatatttattttatttatggtttctcactcaataattttataatgatttatagtttttatgccttttacgggtatt

SEQ ID NO: 117591 - DNA, 1205 bp, Cannabis sativa
tgctatggtgtacttagatttgtgatggagagtggtgcaaagggatgcgaggtgcgatgatgaagctattgagtatttttctatattttttcattcatctaaagttgtctactttgttaaattagagacttaaatgttttacaacatgcaggttattattagtggtaagctcagggctcagcgtgcaaaatccatgaaatttaaagatggatacatgatatcttctggtcagcctgttaaagaatatattgattcagcagtgaggcatgtgcttcttagacaggttagcctattctgtcactagctcaactattaaggcaatacaaggcatagtttatccttcatactagtaatgtcagttgagtcctctgattgattaaaatgtttgcagggtgttcttggtatcaaggtcaagataatgcttgattgggatcccaaaggtaagcaaggccccacaacgccactacctgatttggtcacaatccacccacccaaagatgaagaagaatatgaatatgaaaggccctcttcatttgtggcaacagaaataccagtagtagttgctgcatagattgttattctcttgctattttaagattgcacattcgtgtctagggctgagttaaatacgtctgtctgtagacgtttcctctttatagttattcttatttgtttaattttgacttggtctgttgtggttgtctaattttacttgagacatcattttaaaccagtaggtgtgctcgatggattatccatttatgagcaaaatcttagtgtgtctcccatgagattgtataggctccagggcacttaattttaggtcaaattcatgcaatatttcattgctgatggtctgattgtccttgtaataattttcagtatgttgtagaaaaggataagttattcatacttgacacttgtgggacaatttagttacctggtttgagtactaattaatcataagttattcatatatttaattaattttaccatttagtgaaatttacgaagtcactttcatcatcttcattgattattgcattgccaatatcaccatttatgacctgtagatgttaaatgctcatgctcatatagtaaggcttgagagtgcaaagtagggctgtacatcggtcggtttgggcggtttaccctatatattttctaacccaatctaaagttcgggttgctaaaatttaagtgca

SEQ ID NO: 117592 - DNA, 2022 bp, Cannabis sativa
ccgtcttacccgccccaccactccaccagcattcccaatacccaccccagcaaaggcagcaagagagcctcccaatccccgatgatcagagatcaccgccaccccttgaaactcctccaagacatcctttgctagctttagaatcagatctagtctggactgtttcttcccaaacaaaacggagtttctatcataccatacccaccaccaaatcatagacaattgagcaaacttattctgatcaagtacctcaaataagcagaccaacaactctgctaatggaccagtcctgcatcgatttaaatgactccacacctagagctttgaccacatagggagcaaggaagaacagaacaccaaagcatgctccggagtctccgtatcctcaccacacctatgacaaatcaactgaaccgggacctttcttttgataagcttggaattggttggaagagcccgatgatacattctccagagaaatattttgactttttgtggaatttttaagttccacatgccattccaccaatgagattgattcacagaagaacacccaatcctttcactcaccaaatcaagggccaccgcataaccactcttcaccgagtaacatccattggagttgtaatgccaacaccacacgtctgcacactgtcccatcctcaacggcatgccgagaatgacatcaatgtccaaccgtaagaaatattggcctaaggactgaagatcccaagacccatcattaccaataaactcctgaaccatcacgttaccattaggtgccgtttaaataggtcgaaacgttcgaggtcggggtattcaaggatcacgaaacgcatcaatactatggccatcacccacaaccttcctcatactcttctacaacaattccaacccccaaatgagactagaccacaaatgagaagaaccatgtcgatctttagcttccaatattgaggtatggggataatacttgtgcttcaagacacgaccccgcaaggaattcggcgactgaagtaaccgccaaacttgcttagcaaccgtagcttggttgaaaagcgtcagatctttaaagcctaaccccccccttcgacttaggttgacaaacattatcccactttacccaagtaattttcctcttatcacacttcatcccctaccaaaactgtaaaatgattgaacgaagtttatcacacgtcgccacaggcagctgaaacatgctcatcaggtaatttggcactgcttgcagaattgccttaattagaacctcacgccccccagctgaaaagaaacttcgcttccaacccctcaccgttttttgaactttgtcacaaatactagggaaagtctgcttcttattcttaccaataactgttggcaattacaaatacttataatgagtcaccactgaccccaagcctatatacccaatacacttgtacgttccgcctgatgataaatctacattttataacattaatttattaaatatctttcataatcagctatcagtttttttgtttcttcttccaagcattctttcattttcatctctgcgattttggtggtgaagaaaataagtataatatgctatagatatagattgcgttaatattttttatttctccactaataaaataaattattctattaaaatattttttattatttttactttataataaaaataaaatttatcttcttcatttgtttctttacacattgagcaatataatttccatatgttaaataagtagtgtatgtatatatgttatttcatttggatataattagattagataattaagggtatataactcatctaaacattatatatgttatgcattatactgttgttattaatattttttttttttgcttactctattcttcttaaacatattttcttgcttaccttttactttcacttttgtctttttacttataaaaatgaacaatgtaattggatttttgtgtaattagagggatatactctagtgataggaaaatttcagaatgatg

SEQ ID NO: 117593 - DNA, 1513 bp, Cannabis sativa
acataaatgcactcttagatgttgagccgaaaggcaaagctttcaagagagatcaaaatcaaggattcaatatttgctaatttaaatctaaagcacttgtcaatcaggcagaatggagactacagggaagaagaggaagaggagcaggaatagcaggaagaaagaagagcgaaggaaggtagctatgggcagattcagggcaaactacgaactctcagagaaaatcgcagatgaacacaaaccagccaaagaagcattcacagacatactagaaatgtacacatgtaaatcggagggcacaataagcagattgataacaacatgcgtaggccttacaaataccgaggacgacgctatgcaaaaaggtgcgaactatctgagtgcaatcaccatatatctgccttcacttgaaaaagttgtcaaacgcgttttagggatgaaaggatatggggtcattgagctagatgaaaagggattggatgcaaatgacacaaaattagaagcggcagtcaacatggacaaaacagctgcaataactggccaactgatattgattctattcaagaacataaatgagaagagttatgacacctacatcagaaagagggcagcgactttgaaggcaatagtcgagtatcatggagagctcattcctgggtgcgatgaagacgtcttacttaatagagaaagtgcagagattatcagtaatgtactaggtgccagttgccttttgcattccacaatcatgcacgctgtgatagccaattctaaacatgagggaagctttggtgaagtttgtgggtatgtaatgggtatagccgcgtggacagaaatgaatgcaataaagcatatttttgacgcgatacttgccctaaaatctccagtattgggtgtgagcaggctggccgcagaagttctgaatctgcaggaggcatgcatgacaataaataggacggaatatccgcaactttttaagatctttcatccaactgcagcaactcgggttttggagaaacaccaatttgcaaatttgacatcgatcgcaaagagaatcaaagcagctgaccaggcatcaatgaacaattatgtgggagtagcgggagtagaccaggcgtttgtgatagagatgacgactctacatgtcagcgtaacaagcaagagacagaagggagaggtgaagagagctgagaaatatttgactgatatcaacgctcacccggaactggaggactccgagagcggctctgagacagagggggaagactaagatggcttgttctaattttataatttaagacaatattaagtagatatttagagtttaatcaggactttttgcttaactcattttggggccagatggcattttaagagacttgaatttagggttgtttttatggttattattaaaaaaaatgcactcttagatgttgggcggatagagaagttgaactgggcttcgttcatctttaagtttttacacgagaatctgaaagcacatcaaaaacgactc

SEQ ID NO: 117594 - DNA, 5447 bp, Cannabis sativa
  modified_base (35)..(36): a, c, t, g, unknown or other
  modified_base (84)..(88): a, c, t, g, unknown or other
tcttccgatctttaatcacgtttttccataaaccnngttgattagcgacgagctgcacattacgtttaaaaatcacgtaatacnnnnnagatagttagggtgttacaggtggtgtactggaaatttgcaattgtatgctatgttctcggtgccaatccaccactatcagttctagagggctttgcacgaaggatctggaaggataaagtagacaggataggtatgatttcttatggtatattcctcattagatttacaagtgttaaagatagagatgaaattctagctggtggttatatcttctttaacaagaggcctgtcattatgaaggcttgggaccctaattgtaattttaagaaagaaaatatctgaaccattcctatttggattcagctagacgatttagagctgaaatattagggccaaaaatcgttgtttaagattgttggtcagctaggaaagccaataatggttgatgaggttactagagaaagggataaactcctttttccaagaatccttattgaagtttcaatggagcaagagtttcttggtctgatctattttgagaatgaatatggggatgatgtttctgtggtggttaattacgagtggaagcctattctttgcaaacattgcaaaggaatgggacacaatacggatgaatgcaggaagaaggagacaaagaagcaagaatgggtggtgaaagggaagcagaaacaagagaatgaaccagatgggaaagatgcagaggggttccagccggtgatgaagggttggaggcctaaagttcagagtggtaatgctgaaccatccacttcgaatcagtataatgtgctacagaatggggtagctcataaattacaggagtttgaggttcgggaggcaaaagggagtagcgaagaggtaataactagaggagggggagagcctcctcttaacaatggataaaatactaagttggaacgtctggggaatcaacagccatcacaagcaaatagatgttaagcaatttattgctaaaaataacgttggctttgttagtctcctcgagacgagagttaaggcttcaaatcttggagccttatacgttagaatgttttccaattggtgttttacggcgaataatgcttggcataaagggggaagaattttagtagcatggaatccattgagctacatagtagacatactattttgctcaagccaaattgtccatctttcggttagaaccatagataataggaataagttccttgtttcttttatttatgattttaagaaggaagaggataggagacttctatggaaagaattagagggattgaaaacaaatgacccgtgggtagtgcttggtgattttaatgatattctagagaaaggggaaagaataggtaagcgagctcattttaatgcgacaaccttctgtgaatgtacaataaggtgccaattagaggatgttaaatttggagggagtttctttacttggaataacagacaacaaggagatgatagaatagattccaagatagatagagttatggcgaatataagttggctgaatcagtaccctgttgctgaagcaattttctcgaatgagggcctcttcgatcacactcctccaatattgccggtatatccttcacttccaagtggtaggaaacggtttaaatatttcagaatgtggtcgagctccccccaataccaaaagctagttgctgaaagttggaatataccagtggtgggaactaaaatgtatcaaatagttaccaagttgaagagacttaaacctgtactgacagcaatcaacaagcagggttttgctgatgtccaaggagaagaattgagggtgaaggagcatatgaatgagtgtcaacaaaggctggctcaggacccattaaatgctacactaatgcagcaagagaaagaggcccgtgagcagtatgctgagaagcataaagtgctaatttcttttctgcaacaaaaatccaaagttagttggattaaaaatggggactctaatacatctgtctttcactcaagcatcaaggatagaacacggtagaacagaatcctctccataatcaatgctcaaggtgatagagttgatgatcaagagaagctcactaaggcttttcttgattattacaaggagctgttggggacaagaatgacagggagacagagggtcaaggcatcagtaatgaatgaggggcctttgatatcaaatatacatgctgaagtgttgatgatagatttttcaaaagaagaaattaaagcgacaatgtttagcatacctggtgtgaagagcccggggcgtgatggttttggaagttactttttccaagacaattgggagcttgttggggactctgtgatgctattgcctcctttttgaagtcaggtaatctgctaaaagagattaactcaactgttattaccttaattcctaagataaaataccctaactaggtaagtgattttcggcccatatcttgttgtaatgtgctatataaggtgtctaccaagttgatttgtactagacttaagaatatctggcctgagatagtctctctaaatgagggaggatttattaaaggtagatatataacacataacatcatgatatgccaagatctaattaggaattatagtagaaaagagtctaagcctaattgtatgattaagcttgatcttcaaaatgcttatgacactatggattggaactttttggaggaaatgcttttttcatttaagttcccggagaaattcataaggttaatcatgacttgtattagaacacctagattcttcttaatgttcaacagatctatacatggattctttgaagcacaaagtggtttgaggcaaggtgatccaatgtcccctttactttttgttttggggatggaatatctaagtcaaatcatgagcaagattggaaggaaaaaggagttcggataccatgagagaagtgctgaattgaagctaaatcaccttagttttgcggatgatgtactattgttttgtagaggtgactttaaaagcatctatttgttgatgcaagggctcaaattgttttcaactacctccggtttaacaccaaataaagcaaagtctgcagttttttgcagtggaatggaggaaagggagatcaaaagggtgctggatatgactgtttctcgagatagaaagcaccattcaagtacctgggagttctcatctgtgcaaggaagattgcagttgctgattgtgttacacttgctcaaaagatgactgggaaaataagggtctggtcaactaggaatttgtcatatgctgggaggttagtattggtaaattctgtccttattacaatacacatgtattggagtcagattatgattctccctaaaaaagttattaaagaaatagagggagtatgtagatgtttcttgtggacagggaagagcatgatggtaggggctggagctgtggcttgggaaaatttatgctacccgaaaaaagaaggtggccttggcttattgaacattgctcaatagaatgtagcagctatgtttaaacatatctgagctgtggcaaataaaaaggacattctttgggtgaaatgggtgcattgtgtatacgtaaagaacaaaaattggtgggagtataaagctccccaagtagtagttggtattggaggaaaatggtgtcaatcaaagatttagtaaagcaaacaatgcaaattgaagaattttcgaggaaggaatataaagtggcagcatggtacaaacttctagttcaagaacatgaaagagtggattggtgcaatgaagtttggtctagactcaataccccgaaacatagctttctcacatggatggctatgttacaaagattgaaaaccaaagaacgactctgcaggttcaaggtgattgaatctccggtttgcagcttctgcaatgttgcagatgaaacgatcgagcatctatttttcaggtgcaatttctcccagtagtgtctattataggtgaagaattggcttcagtggagcacctgagctgatactctacaggtcattttcaaaagcataagaaaggctaagcaaaccaagtttaagaagtgtgtcaaagcatcaagtattgcagctcttgtatacttgatttggaaagcaagaaatgatctcatttggcaaaagaaggtacagcaggcagagaacttgttccagcagcttcaaagaattgtcaaaattagaacaatgcttctaaagccacaaaaagtgaaactcaaagatagagaatggtttgaatgtttgtaaataattgtatagatttattgaggccaaagttggtgcttttaggatgtaaataaaagttttgtgcaatgaacaattcctggttcatcaaaaaaaaaataacgagtacaactgctatatgagaaataagtaaattagagtattatatgctcaaaagaaacatagaaatgtaccctctacttcattaatctcttcatcatcaccaaaggcatctaaaacagaagctgattcatttttcgaatcactaccactaacatcatcatcatcatttaaatcctacaatgacacaattaaagagaaccttagtataaaatgaaagaacatttctcttatttaaatgacataaccatttatatttcatatcaatcaatatatcaatcaaatcaacataataacatcattaatcacatcaaaacatacataaccatgaaattgtttatgctacattcttaattcaagacctcaatcccatcagttggaatcaattcaaagggaaaatcccttatgctccaccagatttggctctttaatgagtacttgtattattgaatatgacatttttcaattcatattttaaaataacaaagctttaaaaaaaaattcaccaaattcaccttcccattatcattagcaatgtcttctccaaaaaaagcttttctccttagccttcctccatgaaattcaacatgttccttcactttctctttttgctcagtttgttgctctgaaacatcatcatcgttatcttcatctgaaacctcagcctcactatccatgactacatgtccttcagtagcttcagctcgatataacttttcattatcttcttttggttctgattcagacttccgaccaaaagtgaaatgaagatcttttctaacttttcatcaactgaatattctgccttctaaagagattttaccagagccacacccaactcaccttccttttctgttaataagtcaagtcaagtgcacagtaatacaaacataggttaaatcacaggacaataaagagagcttcatacctcccatgactatttaataaggttgttacctataaataggtagtgatggcttcagaaaaagaagatgcatttcattccttcagagaaaatcttctagctgccaccttcttctcttcttttctt

SEQ ID NO: 117595 - DNA, 2703 bp, Cannabis sativa
ttttttttttttttatatttagaataatatttttatttatttttaaatgtatttttctttctttttttgttttctttttaacaaaaatggatcgttcttaaagctgtttgagttcttttttttcctaatttcttttttgcttagtctattcttgtaatgtaaactttgaatctctatttttgttttacaatagaagattttcaagttttacagagagcatccttttggagaagacagttactttttctttttttataagtgttattttttatcttttttttattgaagcgtttaaatatacaatacattgcacaatccgaaattcaatcccaggacttctaacacatacgcatcctcccaaacctctttatggccatggccgctagctaggctgaagtggtttgttttaatttttatctttgtatctgtgtatgcaatatacttatatacacatgttttgagaaagtcttaaagatttagttgttagattttgagatatttatttactcggtgaacaatgactaatattctcacatgaaaatattctacaatattatttttcaatgaagactaaatattaatgaattttttcaaatatgtttgaagagaggcacatcaggatgccttttttaagtaattaggaaaagtatattatagattctgcttttcaaattggttggcctggattaaaaaagatattctattaattgactacgtaggttaaccattacaataagcagcggtaaaaattgaatacaagtcaccctattataaccaaacaaacccaaaccgttagattcatatcagtgatcacaaaaataccttcacttataagagcaaaagtaatactctcactcttatatatatatatatatatatgtatatagggatatgattttgttccgtgtactttcactgaatgtattccgtagtacattagaggggtctcagggtacatttctactttttaaccctaattactcttagatcaatctcaaccgtcagatcaaataactctcacatctgacgactgtcgtacatcacggattataatccgtaaaagtataataactggacaaaatcatatccctatatatatattatgtgacttgaaatggtatgtcatggtgatgaaaaggtgagatacaaggctttgcgtgtatgacttagtgaacataataataataataataattctcaagaagaccaatatttccaactagattattattcttatttcttaatattaacaattttagcatatttaattggaagttgatacaattttaatcacactataattaatttaactgctctcatcaccgtccttattaatttttgtatatataataatgtatgccaataaattactagaaagaaatactaaactgaaaagaaatcagtttggtgaagcattaacatcatataataataaaaaatgtatatataattattaaatttatatggatatagtttttattatagtataacctgatcctgatcatgatatgtatctaagtatgtgttaatcaatataatggagacacgtgtttacttaattatgagtatactataaattatatatacctatatataattatcaaatgaaaatgacaattaactagctacttctttttaattattacatgttacgattaacaataataataaacaaaataactaatgaaaaggggacaagaaaattctggaaaaaccaatcaatttgttctaatccaagtttaattatttattttttaataataattataaattactagtaattatatatctcatcgttttatgtcaattaattaatacgacatgttaaaacttaaaaggtatcgatctctaccaattattagttaataataaagtgacacattggccatgctccctccaaatatctatatttttttttaatttttttagttataattttataattttttattaacaatttatttattggtcccctgaaataatttattttgcactttagtccttacaaaaactttctggctccggtatgggaccggtaagtaggtccgaccttattagttcatgcagagtcacttgtgacctaatcaatatattgaatctttccattatatatatatatatatatatatataaatacatatttatattataattttaagtcaactttcatggtgtgtttttttcttcttcttatcgtttaacttataaatacatacaaatatatgtttatatagtttcaaatatataatgttaagtatatcattgtcaatgatgtttgggttgagttagtgggtaaggtcccaattgtgggagcatgtataaatattcacttaaattggataattacttcccattcatcttgttatatacgtaaccaattaatatatataaattttttaatatatattgatataatttggtttttttcataaaaaaaaaattaaatcttttttctctcaaaatatttatctataattaggtgataataagatacaacgcaatcaaactcgatatgaattattgtaaattaagatcataaaaattaggcggaatcaaaatttgtggtccaacgaataatataataattatgcacctatggcatcggcagggccgtctcaaggtgagaagaggcttggggcaaaatttaaaaataggtcttttttttatataaaaattaaagataaatattaattacatttttga

SEQ ID NO: 117596 - DNA, 919 bp, Cannabis sativa
ccactgccttttgcagcccccccctggatggactttttgcaacacagatatcgcaattggggacaagatgtttgctggggctgccatcttcaggaatgaccaaggtactttttctcatgtttccactaagcggttctcttactctgattcactgccaggggaagtagctacgttagtttggggtgctaaatcagctcaaaggctaggccttcacaatgttgtcttcctgagtgattcggtggaggcagtcaactcggtatgctggaagagactacagggcctttccacctcattgcatcacaatgtccaggacctagtcagttcatttcatgactcagctaatcaacttggtctctgggaggcctcttggatccctcgaaggaacaatggtgtggcgcacgcggtagccaagtgggcactcgatgcaaaccagtttgggaacatcgaactgtccaattttgacagttccctgctcacttgttgagcagatggctgttttttactttcacttaatttagttgtttttgtttaggcctgtttgtctttaatgttttagtttgttatcgttcctgttagttgttagtctgtgtagctggccctgtgggggatagtttctgttctttgccggcttcgtccggtcagactcttgtttctctgttttgttgttctcgtgttttagtgctcttgcgaagcccagcaatcaaaaaaaaaaaaaaaatagaacctacccataatatacatttctatgagatatatatagatattatattatatttttccttttttctttttcttttaaagcctacatataaaccaaaactaaatgtatgatatatatatggaacactttttaatgggtattacccataaatggttactaaacaaatttaactataaatattaattttaaaaatatgaa

SEQ ID NO: 117597 - DNA, 742 bp, Cannabis sativa
ttttatcttttcaaattatgcatgaaaatagtatttttgtaaaataaggcaaaatatcggggcgtcacaatatgtaagaaaaaaaaacgaaagctttgtagacaagtaattcaagtcaaaatctcacaagaaaagttctctttttttctctttgaattttaaaatatactttcccgttctcactctcaaaatcgcatctaatagtgagttgagtatcaacctagtctaattaaggtggtacttagatgtttgtagaagatcgtgaagacttgccacttttcggttcgaggatacaattctaggttcattacttggcaataacctactacagaaatggaagcgagggttagagtgactaaacaaaatgagtcacttaattatgttgcaatcaatgtaagaaatctgaaactttatatgtgtttatattaattgtttgataaataatattttaagatgttatattgtaatataaataatcaaatatatatggtaataaatagatttaagtaaaataagttccaacaattacaacaagcaattgacctataatcaatagctagtgaatgtttttcaatcttgagaattaaagagagaagagtattattcacctgataaggaatctttcatgtttcaaagaacgacaatacatttgtggaaattgatcctctaaaccaacttattatccaactccttaaaccaactaacttaactaactttcggttatgttagttagttagttggt

SEQ ID NO: 117598 - DNA, 775 bp, Cannabis sativa
gaaaaactatttctattcaaatttggtgtgtagaatgtctgattatcgatcttatttgaattaaattacttttttttctttcttaaaatcaactaattaaatatgtttaaaatctttttcttgttttggtattgccaggctggactttgacttgccctttcaatttggctgcgttagtgaagatataactttcaattctacgcaaaggttagatcattgtataaattttcaagttatgcaaaccatatatgtatataatgctaaataaaagcaatacttataacataagcattaaaagttatgcagcagattagaatggtaagctatatggggataacctctaagctaagaaactctcaactttactattcattgtattcaatatttgcaatgtgtggggtgcgtttttgagctattttgttaaaaccaaattacacatacagtttttacaatttcacaaatgcaccacaaaattgaaatttcgtattttaatagtaccagtttattatttaattaaattcttaatgaaatatagaataataaaactggtactgaaacagttttatagtaactataaaagacagctttgtagcttcagaataaaccagaaaaacaaacagtgtagaaaagtaaaaatatacaaagtttttgtaagttgtttcaacgattctttcagattgttactagtcatggagccacgctcagagataagattcattagatagatcttaaaaatacaaaataattaacttatgcataaatagactccctctta

SEQ ID NO: 117599 - DNA, 1016 bp, Cannabis sativa
  modified_base (942)..(971): a, c, t, g, unknown or other
cgcatatgttaaagcctttagagttgctttggcagctactccactagccgttgctctgacttatactccacaagttacaattctggcagtcacactttttgaaacctagtacacaactcatactgtctacagacctgctgcctctgggcatgcgcctatgcaaactaatttctctagttttggagcggtacagaccagatgtagtgtcactcccaatcaagtaagaaataaatgaaagttccagaatcgaatgtgagccattctcagaataaaagaagtgggaaaggacaaaaccagagcgatgctccaaagaaaagaaggaaccagtatgagcaaaaatataatgaatacaccagtgtaattgacacttgagaaaatgcctataaggaaacatgtaatatggctcattacaagaagcctcctaggatgtacaatggagagaggaagaaaggacctaagcaagagatgtgagtaccacagagaggtggaccataccaccaacgaatgtgaccacgtgaaagatgagatagagacattggccagagcgggacacctcggtcagtgggtgcgaatctccatagtttatcccagacagggcatagcgcatggacaacatggagtcgtaaatcctcttcagggagtaggcctccctcaagctcccagaaaactacctctgactttacccactttgccagcataggccacggtagcagttttacctcctggacctaggaatcgctatcacttgggctggatctaccacctgtagatggctatgtggcgactatctcgggaaggccacacatcgtcggaagcactcacaatgcacaaaaaagatatttgaatgagttagaccaggagggagaagtatgtgcccaagtacagtccccagcctagtgcccccgaataatgaaccttcccattgttgggttttatgccctnnnnnnnnnnnnnnnnnnnnnnnnnnnnnntacttattaatatagatcagaaacaacatttaatgttgcatggtt

SEQ ID NO: 117600 - DNA, 2524 bp, Cannabis sativa
  modified_base (26)..(38): a, c, t, g, unknown or other
  modified_base (1589)..(1603): a, c, t, g, unknown or other
ataaaatggattacattgaaatggannnnnnnnnnnnncataaaacccaacaaaaattacacatagtaaagatatgttaattttttaattcccttccaaaattacccctatcttttaaactccccccattctctctaactcccttctttctcctcctaccctctccattttcgaacccagaaccaaagtccccctgaacctttgaactcacccacccactccattcgaaccaagacgtactcgaagccagtcgacctaatcgacccgacgaccccaacaacccaatctacgacccaatcaaccccagtgacccacgagacctatgatagccactcgaaccccaacgacccatgaaacccactcgaactagtctccgatcaccgtccccaccaccgtccaacgtccacgagacccactcaaactcaggtgcattttttttttaatatttctttaatttatcctttaaatgcgatatgtgtgattaaattaaaattgttgatgattaaaattttgatttctaattttttgcgtttgggaaagaaactgagtttcgggatatagtttttttttggattttgtgtgtttttgcgatattaggcgatatatgtgcaattttgtgcaatgaccatcctaagttaatggtttccgtgttcacattttttttttgtgtttttttgggcgacattgagcgagcaatcatcctaagttaatggttcttgtgttcatattttattgtaatttttgggtgacattgtgcgattttgtgagactaaccaacctagatttgtgtattggtgttattgagcaatatttgggtgacatttggtcaatttttgtgcgatgtatatatgatttgcgaatttcatgtataaactttaagctattttaactgacgtgtgtgcgatttatatgcaatttataagtgttggtttgcgattttatgtgatttatttgtgttgttttgcgattttgtgcaatttataccaagtaatagtcatcgtttgtttgttaatgcagatggctccaaaacttattctcccattgtcagagcatttttcaggacgtatcacgtatagagggaacatgtactttccttcaataaaggctaagttcgaagcctttaagttgaccaacaaggtgaaggaaactccctttggagttatttagaatgccagtgatttgaaattattagctgaagatatgtttccaagaggggataaattagaaatttaagctaattttagaaatttaaaaactccaaagataattcatgcaaatattcaagtttaatgcaataacaaagattatcacaactataaacaaatacaaactagaaatgtaaagagtttagggatagagattgcaaactcttaatttttacaaggttcggtagaattaagccacctacgtccttggtcttccaagttatggacctagctttgagttcaactatcgagtcaagttaacgggcttgactaacccttacaactaaggaatttttcaccaagatttttcccaaacctctcacaatagttttcttccaaggactattaacctcactgggttgttgaaatgccaatctcactttnnnnnnnnnnnnnnnaaaatcagtgtcaacctcacctacaacccagttgtttttctagcagtgcaaacttcacctctcaatacaatgaatatgtaattttgaaatacaaaggaaactctctctaataagatgaaaaacaatgtaaaatcctaaagagaattgcaagcacactagagaagataagaacaaatttagctcaagtgtgtgtggttggtgtgtttatgaaaagatgataactctttagcttagaacacttagaatgatgttatatgatgaatagaagctaaaccaacctttatttttgagtgaaaaacgagtttatatagtgtagaaatgcaaactaaatgtttgtagccattagcacatttttcgaggccaattcagccgtgatccgaaatttcgaatggctaacaggggcaaaaggttcattttttcgaactaaaacgtgcataactttttactcgtttatccgatttcaaaaattccagttgcgttctcttagtaaaattatatgtgatcttaaaaatcaatttaaaaaatttagatatcatttttttgtgaaataacttatcacacaagttagtgagccaaacttttaaacttataaaccctaatgtactatgcaaatcactttaagaagactaaagtaaacttataccacttgattgtgtgtagtctggatgtagatgagctttttagcttgatttgcatgttttgatccaaagttgacttttctctgagagttgactttgactttgactttcgggttgacttttaactttaaatttttgaagtcatcttttggatagggtcttgaattcttgatctcttgatgaaactttttcttttatgaagtatgaagtagttgatatactggttgaatctacttctttgattatgtttaactttaccgagcaaatattaatactttgtgaa

SEQ ID NO: 117601 - DNA, 1945 bp, Cannabis sativa
cattcagtattcaataataatctcactttcaaataacatagaaaaaacctagcataaaatttaatatacgtgtctcgcacgtagtttttttctagtctataaatatataaattagatattaagtttttggaatggttggtaactatctacatttctagtatagtacatattcaatggataaacatgaaaatgagactttacaatacatgaaagtgagttttaagatataaaccaaacaaatatatatatatataagagcatttttgtaaatttttgtaatacataatgctttttgtatgtatgtttgtttataataaggagtcttattacattatgacaatccttagttagtctatttttacactaaaaattatatgttgtagtattttttaaaatttatttttataacaatatttattatagttacaatatcataatttttgatttcgaataatttacactattgaaaaataaaattctcgatattctaatttactatacatattcaaaaaacttcaaatatatttttagcactacaaactatgcgaaattttttaaaagtttacatagatgtgaagatggtgttgtaactataatgaacaccgccatgaattttttttaaaaaaagaaatattctatcatgtgtttttggacattggagattgactaattaaaaggttgtaataggagattgagagttactcctcttagataaatttaaattatcacaaaatattatgaaaaaattatgcatgggtaattaaaagatttttccttaattaatagtaaaaaaattcactgatatttaatatatgattaaatccctccttataatatatatatataattaaatcatcactatcaaaaaattagttatccaagttatatcactgtatgcagaattatatttttaatattttctttttattaattttcttgaatttgctaattaattaacacggttaaatcatatgcctaataatctaaaataattaattaacacgcgcctaaagaaactaataatcgcaatccgcaatacccgtctcttagtgcatatcttttagcattcacaatattcaggttgaattgaatggtcaaagttcagtccataaactcaatattttagtagtcttaggttatttcttgataatattagagatatatattctaatttttctgttataatttttaattattgtcttagaactattaatatagtagttgatactcttgcaaattatgttttgttaattggccgaggtcagttatcaatgaatcctttagtgattgattcttttaacggtgttttcaaaggctaacataattttaaggagaattatctcaaatattatttttttaactttttttttgttttcaaatttacggtttgagtttctaaagtggttttgcagcgctagttgcaataggggtttctagctatacgattttttgttataatttaggttagttgttgcaataagggtttctatgtagaattccgtagaaatgaaaaaaaaaaaattgttttgaagtgtaaagtgaaaaaacccctaattttaattactaacataatttttaaagcttaattattgtaaattaaaatacatctcagtccaaacaaacaaaagcgacattaaataataaaaaatcatatgagcacgatttatattaaataaaaaacttaatttgaaattatatattataagtgtgttttccaatatccaaattaatgccaagcaaattccataaaatttgaataaaaaatcgtgtatctttgatgccattcgaagttatatacataattacatataaaaaaatttgtgattatgatattgtaatttaaagttataattttttttttttttgaataatgatgaaattttattaaatcaaatcattcaaaactaaagatgcaaaatctatgggtaatgcattcccagagtaa

SEQ ID NO: 117602 - DNA, 2317 bp, Cannabis sativa
taaaaatgccatatttttctaactttgttatgaaatcccatatttcatgtaattttcactattataaataaataaatatgtatataaaattagtaaaattaaaatttgatacaattttattactaagttatcattaaataaaagacataatttatttatttgtataatttaaaatttcttaaatatccacctcgaagcacggcttatttactagttgtaatatgttaataatattatatataattattaagtacaaataaactaacctcgaaagatgatacttgttcggtaaatttgatacgcaagtatacgcaatcaaaataaataatataatgataaataaagtattatttctaagaggattgattatcaattaccaattaattaattctttagttttatttgattaataaaaattattggatagaaagtaaataaaacaagacgataattaaaattaaaaaaataaacaataaatacaaggttattatgatccctaactattctttattttacttcctattgtaattattcaatttttcttcttcctatttaattgacgtacaagtagaattaagcagtttatataaggttaagacttacaaacccaatctacatgaaaaaaaattatattcctatggtaaagtttaatcatacagaaatcattaagcaaaacaacttataaattatacatataatctagatacttttgtcctaaattaatttgcatccataacaatcagagcatattcaaatctcacatttcagaattttgattcgaactcatagataacaattatagatgaccagtaaataattataaaatcaaaacagattttacgaaattgaacaaagagaagaagaagaaattgaacaatcacattacataaaataaactcaagtggttcacataataatctttaaaaataaattagctactagaagtcattctaaaacaatagaaatttaactaaaaaatataaaagatagagataaagagatagaacaatatttgaagtcctctaataccttttgctcctagccttccttctaagcgactaaattttcaaattgtattagatctctcaacccctttaaatacacaattaggaaggttttccaaaatcttccaatactcaaaattgatctccaagttcgacttataaatgaaacatagttccaactcatttttttaataatagttccaactcattttataaataaaatttgggaagttttccgttttttccgcaagagacgcgactctttcgttttctgatttcctgctgcaatgaccgatagtattttagtcacaactctctcaatatagctcaaaattggacgattcaagatattttagaaagttgaaaaaagagatctaaaatttttatttagaaacttttttctagaagtgaatagattatagtcaaaaattagtttgaaaattcaaactttattttcagtcgcaacagagcgtgttgaaaatccaaaacttagaatttttcacccattgtatcttacaactccaaaagctaaatgcataaaattcatattatttagcatattttctctcattttaacccacatgatatatttgactattaaaacttgaaacaaaaagaaaacaaacgtagacatgaacaaaaacaaataaaaagcactaaaatatatactaaaatggactctaaaactacataataataagcctaacaacgtttatcattcaattatgattagagtataaaagaaagtactcctcaattagtttgttgagaagtggtaattataacctcttattataattttttagtcaattttcacgcccgaaattacttgtcgaaatattttttataatttgtttttcatagcggtatttgttatagttgcaatatcatccttataaatttttgaaaattttcgaatagtttacaataccgaaaataaagatcttgatatttcagtttaccgcgtgcattcgaaaaatttcaaatgtattttcagcactataaactattcgaaaattttttaaaatttataaaaatgttgttgtaagtataacgaacaccgccatgaaaaaaaatatttcgacatatatttttggatataaaaaataattaagagattgtaatagaaaattgatagtgacacccttctactttgtttgtgttctagccaatatttgtaagtttgcagtgaaaagaatatatacatatagagcggaccctccaattgggtgagaactacttgcatttagagatggaaattgggcggttaatgtacggggaatgcaatccccgcccccatccccgctacctat

SEQ ID NO: 117603 - DNA, 736 bp, Cannabis sativa
ctctctctctctctctctcgactttgcttcaggaagtctcgagtttcgccaagtagatatgaaggtgggatattgggtcgtcggggtgggttttaggtttaaaaggttgggaagccatgttttgggaggtttgtttgggttgacgatggccggaggtggcctttccggggctaggtagtggctgtctctatcatatgacatataatctagctaaatcattacaccattaataatgttatgtttataatatcatcttttattacaaatatctcttgtaattaattaaaatgcatatacattttttaggaggctattggcccctcatttctttgtgctccactcctgagtcctgtgtaccaaccatgtccttattgttacaacaagaaaaagaaaactagaaaaaaaataaattacaaaacttgatcccgcagctaacgtagttgttacacgcagaagtaattaataagtagaatcttgtagattgatatataactgcaacaacttacttcgaacatttttcttcattgaataaacggtgccgttttgtatcaaataatgcatgatctaatatcaactggccagtttattagtggtttgtttacattgtgagagacgatgtgatacaaatgtaaagcctcctattaagtttacttatgctagaaggggtaagcaaggtaaattggcttaggagagggtattttggtaattgtctttagtagtgagctaccttttgtat

SEQ ID NO: 117604 - DNA, 1695 bp, Cannabis sativa
atgttgattaactctatactgctcacaatacattcccattagagtcagattatggaacttcctaaaaagattctaaaggaaattgcagcagtatgtatagcatttttataaaaaaaaaaaagccaagcttcaacaattgggtcaggagtagtggcatgggagtctatttgacatgctaagagtgaaggtggaattggcttcaagaacataacagaatggaacaaagcagctatggttaaatatttgtgggctattgctacaaagaaagaaaataatatgtggctcaaatgggcacatgatgtgtatttcaaagtggagtacaagtggaaacacaaagctcatcctcaaagtagctggtgtttgaaaaagatagtctctatcaaagatgaggtaaaatcttttattgacactaatatgtttatgaatgagagctatagcattttaaagggatatatgctgttgcataactgtcgtaaaaaagtgtcttggcacaaccatatttggggtagacttaacaccccaaaacatagtttcatcttttggttatctatctagaacatgctgaaaattaaagaaagactccttagattcaatatgattgaagactcagactttttattttgtcaaattcaggaacaaaaacttggaacatttattctttaattgttcttttagtcaaaattgtcttcagcaggtgaggaattggctcgaaaggcagggttcttctacttctctagggaagcttactaaatggatagaaagagcaaatgtctccaaattcaaaaagaaggtatatgcagtagctctagcttctctattatccaacatatggagagctacaaatgggagactttagttagaagaaaatatagatatagaagtcactatacataaagaaaaaaatgatgtaaaaatcaaaattaatattaagcatttgacctaaaaatgtaagccaaatagatatttagtggcataattgtttgtagtagaagaaaaggaattgtattgtatatgatagattatttagatcttcgtttgaagatgctattagattgtaataattttggagtaatgaataccactgctgattcatcaaaaaaaattatttagactatatagatttgtaatagatttaaaaattaatactgggaggaaaaatagcaaaaaatgtgcatttttccctattttccaatataacaactgaaaaaaaacgtcggtgaaataaacttttttaattaaaaaaacttaacctgtactattctgtcgacatttttaagcagtcatgaacttcaaattagcgactaatttgaaccgtcgcctattgtgcgatggtcgtataggcgacggttatagaaaccgacgagaatactttaaaaacgttgagaaaaactatttttatagtactgtcatcttagaatgagtttttgtatttataattgatttgactcctcaataaattataaattaacttatggtatctacacattattttcataacaatgtgatacctttttgatacacataacaaaaattgattacttaactttatatcacactttataataatatactagatgaaagttacgtggcgagccacgtaaatagtagatttatttaagttttagtagtttttgtttaagaatttggtaactaattgtaaattattttttaaacgatatgttttataaaaataaa

SEQ ID NO: 117605 - DNA, 2814 bp, Cannabis sativa
  modified_base (31)..(36): a, c, t, g, unknown or other
tccgatatttaatataaattattcaataatnnnnnntaataatttaacattcaagcatatatcaaatgtttaactcttatttaataatcataaatgtcttcatagacttttcaaagcataaaccccaataatctcccacttgccttaaaagcaaactgggcatctctcttagtttatatgacccataaaagattccgctcgtagcgtctttgtgaatagatctactaggttatgttctaacacgatctccaagattattacatcacctctctctactataactcttagtagatggtacttcatctaaatatgcttgcctctcttgtggctccttggttcatgggagttaggcaccgctccatttttgtcacagtagagaaccagtggtttttctacttctggaactactttcagagcaatgtaaaatttcttcaaccaaaccgactacttagccgctttgaagttgctatatattcggctttcatggttgaatctgcaatgctgatttgcttaatgcttctccagactacaatttctccaccaagagtaaatactgacccagatgtcgactttcgactatctttgtctaattgaaaatcaaaatcagtatatctagttatatttaaatctccacgggattattcaagcatgagatctctcattctctgaagatacttgggaacaatccagtgttccaaatttggattagattgataacgactaacaatccctacagcgtagcatatgtcaagtcttgtaaacaacattacatcaaactcccaactgttgaaacataaaggtactttctcatgtcctcttgaggaatctttggacgttgatctttacatagaataattccatgtctagacggtaactattcttttttagaattctccattgaaaatctttttagcaccttatcgatataacaacaaaccaactaactaattggtattggttatcacttacaatggatcttgtttttcagctgattgtattctttattggttgttttggtggctaatttaaattaatgaaattgcacttttcattcaaaaaaaaatcaaatttatttagtgtcgtgaccctttatagtaattaataattaggctaagctcgctcttttgttagacgtactggtttgaagtttaaacatttcttattttctccaaataatagtcaattccaaaattccgtgtccgacggaattttggaatcccccccgaaggattggttgaagctcaactgtgacatcagagtgggattggatagcatgtgtgcttctgtggttgcaagggatcacgttggcaaggtgatctgggtttctacatctaagctggagttttctaatgctctctgtggggaagcggcagcttgctgtttggccctagaggaggctaaagttcgtggtgttgagtttcttattttggagagtgattcgagggtggtgatcaacgctcttaatgggaaggagtcccgtttggagcttgataactatgtttctttttgtaaaaacacctccccttttttattggttgtatgtttcaatatgttagtagacaatgtaattttatggcccataatgtggctaagtgggctttttcccaacagaaattcggctccgtgccactatcctccatgcccgatactatattttgtaatgaccatgaggtctaactgatattaatctaatatatgcacgcttttcttggcaaaaaaaaaaaatccaaaatatatatttatatatagataatttcttggttagtaaactatggcatggccatggcccatggttgaattaattaagcaaccgattaccggacaaaacaaggaaattagagcaaaccaacttactagtcaaacattcaaccatcatatctaacggtccatatgcccaactactaatactactactattgccattgttgttttgtttttacttgctcccaaacaaaaaacctttcacatttcatataaaatatatattggaaattaattaagggcaaaatgctagactcctgccaataacaataaccttatgatatatttcttttcttattcctaggctggtatttttgttttatcatagttcatcattcatggcgaggacaagcaacaagaatatacaagctaaattggtgggtatgtttgtatttttctatttaaattggaaaatgttgatctaatatgatgagctgaaaaataattaatgggattttcgattcatcatttggttttttattaattgaaaatataatgtgttctgtttagattattgaacataacttagtttaacattaactgagtacaggttgttctaggtgacatgggaactggtaaaacaagtttagtattgagatttatcaaaggacagttcaatgattaccaggttcaattatatagataatcttccatcttcttaatgttagtatataagaattatccagtaagaaatataattagtaataattgatgcaggagtcaacaattggagcagccttctttacacaggtgttatcattaaatgaagcaactataaaattcgatatatgggacacagcagggcaagaacgctatcatagtttggctcccatgtactatcgtggtgcagctgctgctattgttgtatatgacatcacaaccatggtactgtattattaatgtttaacatttacactaatttttcaataaaatgggtttgtgtaacatttttgtgatatggtacgaagcttttagttacaatataagaataataatagctaattaggatttttattccgtgaactttgacatgtatcaaatcatgcccttgaa

SEQ ID NO: 117606 - DNA, 2938 bp, Cannabis sativa
tccttagtcaacagaaacacactcgtagcataacttggaagagcttgagcaaccgacttgatcaatacttccttgcctgctttagacaagaacttagtttcccaactaaaaatactcttcctcattttttctttaagaaaaccaagaattgcattctttttcctacccataatacaaggtaagcccaagtaaagactatcctcattagcctcaaccaaacccatgattgcacaaacttgcctccgaacctcctcccttgtattcttactaaaaaaacctgagaacttatcgaattcaccttttgaccggaccccaattcatagctttgtagaagctgcatcactctttgagcttccctatcattggcctcacattacacatagctatcatccgcgaagagcatatgagaaactctaggagcacctctagcaactttacacctagttaaccatgatgcctctcatactttctcaaaagagtcgaaaagccctatgcacaaataaggaacatatatggtgataatggatctccttgccgtaagcctctaccaggacaaattggacccatagagtgacccccatgagtgacattataagttacagtagaaacacagaacataatcaactccaccacccttctatcaaaccccatccgaagcaagagagactcaataaaagcccattccacacgatcataggctttactcatatcgagtttgacagccataaagccctccttctcgatcctctttcatttcaaatagtgcattatttcaaaaaaataccaatgcattatctgatatcaaacgtcccgaaataaaggcactttgattatccgaaataacattaggcaacactcattttagccgattggccaaaacctttgatatgatcgtataaagcacattgcataaggagatagggcaaagatcagtcattacctaaggttgtttcttttttggaataagcacaatgttcgtgtgatttaagtccttcggaaagataccattcgtgaaaaacttcttgacaaaagtcacaatatcatgactcaccgtactccaacatttttggtagaatcccggtgtcatgccatcagggtttggggatttatccggatgtatctgaaaaagagctcaaaatcagttcaagaagcatattattttgatcaaccgtgactgtactgggaacacaatcaaccacttcagcaaaattaacagctgaaggagtgaacaaatcagtaaaataatcaactacaacttgcgagagtcctccttgccaatcgacccactcaccagtagcaattctcagtctttggattgcatttcggcgtctcctagctgtagcagtagcatgaaaaaacttggagttgctatctccttctctaagccaaagttgtttactcctttgcttctaaaaaacttccttttgaagcataatattatttaaattattaactgcatgctgatacttctcaaccgaagccacatcactcccttttttccattgacaaatctctttcttgcactccttaatacactgagaaaagttaccagagtaatctttcccccatgtcttaagagactccccacaagcctttaatttctcaagaacaccttcactatgatgcaaagaccagctatcaacaataattttcaaataaataggctcttttaaccatgagttttcaaatctaaaattctgatttcttgcaacaacaacttggttaacagggattaattgtataggacaatgatcagaggttgaagcttctaaatttaaaagcttagcagaggggaaaagatctaaccaagattgactcgccaaagctcaattaatatgcacctccacccagtcagtagtgccacatcgacgctcccaggtgtactgatatccgaagagttccaaatcatgaagcccacattcagttaaagcatcattaaatccctcaatcaaccagtatggataatgaatgcccccacatttatcctcattcgaagtaatattgttaagatcgccaatgatacaccaaggcaaactttgtttatttttcagcacagtcaataacacccaagtctttctccttaaatgtctttttggctctccatataatcctgttaatctccaatggccataaacaccatcagtgttgataatatcaatataatctctaccaaattcaagcacacgaacctcctcctcaaatctccagaataaggcaacaccaccacttttacccaaagggtccaccaaaatagccccatcaaagccaataaatacacgcaccttctcaatcatctctcttcgggctaacgtttcataacaactaccactttagtacccttaatatatataaaattttaatatttccaaactatctcattttaataattattattattatttaacaatagaaaacaataatcacaaaaataatttctttttatcattataagagatcaacatggcccaaaaatcccagttctttatttctattatatatgttgacgttaattataatgtctccctccttactttcttcttctatatataacttatatatctataattaggggtagatccacattaaagcgagatgggacagtcgtctctctcgaaaaaaataaataaatatatatacatactttagttagttaaaatatatatttcgaatcaaaagtaataatattaaacagggatattggcggctaaaccgcttgaactttacgttttgtaacacttaaccacaaaaaccaaaattttggtggcaaaatctactgaactcccattccgttttgctctgtaccccccgtccaaaaatcacagttaagtgccatggtggactgtccacgtgtacacactttttagagatccacataattttaattattaaaatattttaaaaaattaaaaattacaaaaaaaatatttttattttattt

SEQ ID NO: 117607 - DNA, 573 bp, Cannabis sativa
tgcataagccacggcaatgaggcacataagacactcgtcagccatgaggttccagctggtgtttgtattgtattttctaatgtttttagttttgttttgggtttacacatccactcaaacacaacacagcataataaatcaatacattaaatcacagaacaagaagaagaaagaacattgacattcgtggttgtttcgtttcgcaacattattctattcctctatttattttttcttctaaacttcatctctctcctattgtgcctttttaaatatagtatctttaaagaaagtatctaattcttccaaacatatcaatttcactgttcattatatctaacatataataaatgccttagtgataaagaaaattgtttattatgtttctggtctctctttctaatccttgctgatatttattataatagttatataattaatgacctagatttcgctactgataaaagttaacactttcactgtctgaactttaaccaatactaaatcttacccctttttatataaaataaaaaataataataattttaaaaattataattttctattaattct

SEQ ID NO: 117608 - DNA, 2113 bp, Cannabis sativa
  modified_base (2088)..(2088): a, c, t, g, unknown or other
gtgaaatgataatatttccaaggcatacaattcaagtagaagtaccattaggtaaattcatatatgaaatagacaaatatgtgtaagtattttgaaacagtgatagattattgcatacatgattattggcacatgaatctacgaaagaattttactagagaatttcgacactaatggttgactacattgaacatgattaggtgtttcttgatccctctgtgatagcatggtcattaatttctggcattgagcaagagtagtcgtgagatcttgttcaacattctgaccatcttcaagcttcacactgtcttctagagctcttgagaaatttgcagcaagtggtttagcaggtttggaagcattcttgttttgaaatattccatgcaacctagcagtttgccataatgttacctgtaatcctaaagtgattacagaacatctttgatctatgttgttgcacattccaactaaaatattctgaagatgatgatgctacaggcttatccacctaatcatgaacaaaagtaatgccccttttccttttttcttggttaatggaagcaaaggctttgtcaatattaggaaatagatcttgcatcaagatctctgactttgcatcgctgtaagactcatttaggccaattgggaactcaagaattcaatgttcttcctgatatttctatattatcttcatagaaccacaactataaacaagttgctctaagttcatgaattaaatcccaaaaatatttcaatttaatgagataggttgtgacagaattaggaccttgatttaaagtctgcatacatctcttagcttcaaacaccctataagtatttttttgatgatatcattctagaagttccgcccaaatcttggttgcattgtctaggtacataacactgtcgacaatttcacttgagatagcatgaagtatccatgaaatcacaaaagcgtggcacatttaccaaagatcataatcttcatcttcaccaccggtctcttccatcaacaaatttgatcttgtttcttgcaacaagcgcccccatcatcgaatgccttcaagaactatagtttttacaacaaatcacgattgagaaaaagacttactcttgggtgatctccattggatatgaagtaaggattttgagcataattggtatatgatcgactattaggttcaagagtagagaacctatttggatcatctgaaccatctccttggttctccgtgcctcaagtctaaaccacgggccatgaacacaagcaacgatgaacaactaacaaagaagaagaagaagtactggaaatggagcacactaagattgtgactctgataccatatcacaaaataaaaatagagaacaacgaatgaaattgcactgtattgattaagaaaataattacacaaagtgagctatatgtagctcaagttacaatttagaacaagtaacaaattttcattataaacatatcactccagctcaatagtcaaatgcaagttgactctaagaccatctccaatggaagatgtaaaagttgagctatattttgtataaaaatagttttgtgatattttttgcatcaacttttagtctattgtgctcaaatgcataattctaaatcttaatgcaaaatttaatatgttatttaatgtttacttaataatatattaaaaaatataaattaataaaaataatgcaaagttaaatgtaaacttttaataataaaataataataataatgcaagtcatttaatgtaaaagatttaatgctgaggagaatgttagttaaatttaatattaaaatattaaaaattgtttaatggtaaatataaaagcataatatttatcgtaatacaaattttgcatcatgctatattgtgatacaaatttggatcacttttgagtatgcgaaatttttgcatcataatttagcacactattggagtatacttttaacaaaatgagttacattttgcatttgtatctctattgaagatgctctaactaattatcacttattagaatatttttattatggaaattattttctaattaagaaaatgattttctatttaaggaaanaaataaataattgattttctgataa

SEQ ID NO: 117609 - DNA, 2063 bp, Cannabis sativa
  modified_base (2000)..(2016): a, c, t, g, unknown or other
tacaaatgtcactgcatcataaaacataacaaacaatcaatactacaagatatatatatatcttatattattaagtgcacctatataataaaaattgctggtttaatgatttattttttatttttccggttaatgatatttaaaactaacaccgttaaaacaatcaattaattatctttatttaaaaaaatatatctataattttaaatccataaaagtaatttatttattaaaatgtaacaaatttttttatataaatttgaattatatattaatgcaattaattaatcatatttataataaatttattattatattgtttcaaatatctgaacttatttacttattttattgtttaataaaattagttagatatattttcttataattaaatttaaaattagattaaatttttaatatatatttaaaaaaaaaattaattaaattatattagatttaatgtttaatattattatttaaattaataattagataataataactctaattctataactctaggtaaacatgcatgctactaatacttaatatataaatgtatgtgtattttaaaatattgttaattattgttgaaaatgtgtttatacataccatcacaaaaaatttgatactctggttcaaatgtagcttcagtcacacaaccaacataacgacaataaactttgttggaattttcatcgagagagcagtgtttactcccatttgttttgtcaaaacattgaatccatgaaaggtgaaaaccatatgctaactgtttgttgatgtcatgacatgctgaagcatgaaagctttgatctatgagagtcacttgttgtatcaagcaaaaatccaactcaaaaggtctcatttcatcagcatccaatagataatacgaccaaacaaaacgatcattttttcttaacatgcatggagtagcatcaatgaaagaagaattcaccactcttctttcgcagctaattaacgcaactgtttttgaaatttttctataatgatcataaattatttttccttttctggaagtatatatttgtgctgcgtaattaccatacacatttttaagggtcaaactattgttggtgaacaagattgagtagttttcatcatgttttagaaaatttggatctacaactcgaattgtatagttactataatttatttcctttacataaaatctttgatatttgatctcgaaagggtaagtttcttctcgatcatgaacaggcaagtttaagactgtaatgttgttctcgcaagaaagattgtaccttaagtctccacagctagagggatcacttgtgagtcgaaaaggagatgttatattagagacaccaccacacgaagaagaaaaagaagaagaacatacaacaactttcatattctttgcattgcaactttgatggagcatcgttgtgaatagcaaaaggaaaaaaagaggcattttgaatttttttttctttcccaaatcactgtatttttaagggtttgtaggtttttttatatcatatcactctgaagttttatactaatctatatatgtttgtatatttatattcatgaatacatctctctcgtgtcaattttggtgtctcaattacaatacctaaataatttctatcataattgtataaaataagcaatattatttttctaatacatatatataatctgtatcttaccaaacataattttataatgccaactagctaggtcaatttgtcaacttccaaatatttgttatatgcaaattacatatgtagatgtagcaattatgtagaaatagtctttacagggactacgcaacttctttattatatatagtatattagtcgtacaataatttatttcttacttgatattcgtgtgaaagctttcatacaacctacaaaaaatgattttatatttttgggacatggtataattgaagcatttacggttggtttggaatgtggtattaagtcgtattgtattgtattatattnnnnnnnnnnnnnnnnnatatttttatataatactatgttaaactttaatttacactaaaatat

SEQ ID NO: 117610 - DNA, 2192 bp, Cannabis sativa
  modified_base (1323)..(1323): a, c, t, g, unknown or other
  modified_base (1829)..(1837): a, c, t, g, unknown or other
attttaagtatataataaagtctgctggggtttctcattcttaaatttttagatgtcggacgtcgccttttcttttagccaggcccgtcaactctcctagggattaggtgtggcttggtcagggtctatggttttactagtacgattagtcttataactgtgatataattttgggtgtcttttgtttaggttattgtgattaatgttctttgtgatatggttttgtttttattttattgttggttcgtcttctttgttctttgatggcatgccatcaaatcgttgttagtgtttgaaaataacaagatttttatggttaaagaagttgttaattagtggtgtagttacgtacattatattttataatagttgagtgttcaagctaagaagttgaatgaacctgttgcaacagtttttactattatgtcttatgagcggtggaaaaactgaatatatgtgttcttgaatctaactatgatgttgttaccttttttatctgattttatttcaatttcttttgttaaacgatctgaaaatcaagcagccggttggttgactcattcttcttattataatcattgtcatattcctaaccagagatgtcctaattgaattacaaatcttattattttaattgattactattaataaaattacataacatttaccaaaaatacataaaaaatttaagggcaccaaaaattatcaagaattataatatctgtattgcatatcataaatttgttatatacgtattttgtaacacttatggtaaaatctcctattgtaaaaacatttaccgaatctttgtttattagcaatttagcatgtgatcatttcaatattcaatatatgtctatacatctatacaatatataaaaaagtgggtgacttttgagtttggttgttattttgtccagatgtaataattttttttgttctatacaatatattaaaatatatatgtgttgggactttgagtttaatgaagttattttgtccacctgtgatttttatttattttttttttttttttttttttgagtttaactaagtgattttgattactttgtaggcatggtaaataatttaattcaaaaagcatttaattttactatgtcatatgtaaattttgagtaaaaatttatttttcatacaaattaatttttatttgaaattcattcatcaaataaaatcttctcctgtatagtattgtatagagatgattcagagactatggaactatatttcaaagctccaataaattcaagattattagcaatctcatcaataaaaaatctggtttattaattctattattantccactataaatatagaattgcactctttgacaatatagaattatatttataaaaattttatttgtgatataatcaatataagtagttcgccttttaattattaattcataattagaattggtcaaaatatcgttttacccttctaattatatcttgattctttatgtgtcattaattcaatgtgaacagtagttaatctataacttattatagatttagatctaacttttagtagtcccaaaattaatatactataagggaactaatattcaatcttggattccactattatctaacatgtttccatgaacacaaacatgagttcatgtatacttaggattcatctactaatgatcatcgttatgatatgaataactcttttcatggtaaacgacaagttaatgaaagatgtttattacatatcggtccagtcatgcataatctaattaaacacaatatatttactacatgtccatctaatatgtgatccgaatcaaaatcacannnnnnnnnagtatagtgtatagtaaatcatacttagtagttccatattaaaaattcttaaaactttaatacactaccgacttattttattcatatcatataatcttagttctcttgtagatatacatccttacaagattatacccttttcatatgaataaggagttttcaaatatttaataattatactcttataattaatatataaattatcttataaatgtatttattgtgaaatggaagaatgaaaagtaaatatgttattgaaaaatgattaattaatggcatgtttactaataagtaatgggaatcaatagtaaggtaatcattcccttacatttgtttacttgcattattaaaatta

SEQ ID NO: 117611 - DNA, 1174 bp, Cannabis sativa
  modified_base (37)..(47): a, c, t, g, unknown or other
aacttgtaactaaattttatgttttagtcacaagtannnnnnnnnnntgactaaaagtcacatttagtaaccaaaaaattatgttgtgactagaaatttgtcactaaaaataataatttctttgtagtgacactcacttataggcattcccaagatttgactgaaagaattcttagtggtttcaaatgtattaggagagaaagacatgaccgatttgtcctcattaagtagttgtcctgatgcacggtgataaatattcaaagcactcttgaaagcaccacaatatctatcgtttgcttgacaaaaaagaagactgtcagttgcaaaaagaaggtgtgaaatagatggagctcttcgagatatagccagtcccttgagacgacctatagacttctcatattgctgaagactggatagactttcagaacatattaagaataagtatggtgagaatggatctccttgatggagagcatgttgaggaatgactgagcctgtgacaacaccattgataaggattgagaaagtgtttgagtgtaagaaagtcataatgagtgagatccatcagatattgaagcccctttttcccattactgctgctaagtaggaccactcaacacgatcaaatgccttactcatatcaagtttaagagttgcgtatcctttagatccccgctttcaatgttttaaactgtggataagctcaaaagcaacaaaaacattatctgtgatttgcttgtttggaaggaaagcactttgagtttcaaaaatgatatgaggaaggacatctttaagacaaagagccaacatctcggagattaatttataggtcacattgcacaaacttaccgacctaaatttttcatggtcattagcgttttgatcttaagtattaaagtgatcaaggtcttgttaaaagctgcaggtgtgacataattattcaacacatttaagataattttggtgaccaaattatcaacgatgtgccaattatgttggtagaacattgtggacattccatctaagcctggacttttatcatttcccattgtttgaaagcatagagaacctcatccttagtaagctcttttaatagataatcgtttgttggaaataatttttccaggatcttagatctactcacaagtaggttgatttaacaacctaaatatga

SEQ ID NO: 117612 - DNA, 2906 bp, Cannabis sativa
gtggaattcacatgcactcttttttattggagctggatcattgttgagagacatctttccgatgcacgccataacatatttttcattttcggtggggtttttagcttccacagcttcctccaaaacctgtcttcggctaaaacatccaacccaaactcaccattaagttgatgcagaagcttatatgcactcttcattgaatataacccagaaagatcaagcgaccaatttaaagtatccatggttggtcgagatagaacagggatggactgcaccaacaatctatcacgaggcagcagcaaatcattaagaatgtcttcctcccagctcgaaccgtcgatcttcatcaagttgcaaactttggcattggttaagctcgggtgagaagagataatcaaaggattctcaacatccggaagccaaggttcacctagaatggatatactttttctatctccaacaacccatcgggaccccttctttaccaaggattgagcttccaagatactcctccacacaaaacttggattaggaccaattgtcgtagttaagaacgaaccatggggaaatatctagccttaaacaccttcaccatgagcgacttcgaactaaccaaaagccgctatccttgcttatccaaaagggcaagattaaaatcacgaaggtttctaaaacccatgcctcccttatctttgtgcccacaaagccgcttccaagacatccaatgtatgcctgaggatgaattattagacgatttccaccaatacttagccatcatactctccatatctctaacaatctcaagaggaagcaaaaaaacactcataagataattaggaagagcttgtgccacagttttaataagaatctccttactctcccgggagaggaactttgagccccaagattgaagctgctttctcaacttttctttcaaataactcaaggctgccattttgtttcgacccattgaacttggaagacctagatacatacttccctctagagcaataggcacacccaacaactccacaatcctctccttattatcatccgtagtattggcactaaaaaagattgacgaatttgcaaaattaactctctgacccgaagccaattcaaacttttgaagtacttctttgattcggtgtgcttcctcataagtagctttacaattcaggtagttgtcatctgcgaagagcatatgtgagatacgaggggccccgttagctactttgcatccatgcaaccaaccccgattctcatactttcgaaggaaggccgagaaaccttccgcacacaggatgaacaaatatggggacaagggatccccctgacaaatgcctccggttgggagaataggacctatctcatgagcaccatgaataaccctgtaacttgccgaagacacacagttgagaatcagttgaacccaatgattagcaaaacccagcttcctcaacatcgcttctaaaaaaatccaatccacacggtcataggctttgctcatgtctagtttaagggtcatgtaaccatctttgccttttcgtttcctccttaaatagtgcaagatttcgaaagaaaccagaatattatcagagattaaatgaccagggataaaggctctttgattagctgagatgattgtatctatgaagggcttcattctattaaccatgaccttagtaatgatcttttataggacactacataaagctataggtctaagatccctcattctttctgggtttttctttttggggatcaaaacaatattagcctcaccacaaccgttttcaaatgtaccattctcaaaaaactttcgaacacaggcaataacatcgctcccaactatattctagcacttttggtaaaaagtcggtgtcatcccatctgggcctggactcttatctgggtgcatttagaacagagctttcttcacttcctcaacgtaagtggctgacacaactctagattaacgtggtcaggcaccatcggctccacacaatccacaacttctcgacaagaagcacccgaagtctgaaacacttcctgaaagtagctaaaaaccacgtctgacaaccccgaatcccaagaaacccaattatcatttgcattacgcagttggattatcttattataattttgacctttatttaattcattttattaaaaattttgttatttcttttctcaatgtgatatctttatgacatttttataattaataattaaattaattatttaaggctactgggtttacttttataagagatgacatgggaaccatgaattcatgaactcaagttccaataagttacagtgattttatttcaaacaaataatctcactagtttattaattcttcgtgactccactatagactcgacattgcactcttaatttcatagaacgttttacgccaagtataaataagttatcaattgttataactattcctgtcattcaatcatctatagatgatatactaatgaggtgggtacaaattatcgttttaccccttcttagtattttatccttaactcccactaagttctttataaatgatatttctacaaacttaattatagaaatgggtactctatcatttaacacttgaacctagctataaggaaatcaatgtttcacctcttaaacaaaagtttaaaagctatagattttatgtttatgataaatactctcactcggttatactactaaatctccaatgtgtaagtatggactagtccgtaggataagtcaaaaatgaacaaatcaaaagacttaataatataatcggtagaatatatttatcactcggaataaagatcaaattgacctatgatctatgatatgattacataatatacaataacgataattaattatcttatcaataattaatt

SEQ ID NO: 117613 - DNA, 620 bp, Cannabis sativa
  modified_base (554)..(593): a, c, t, g, unknown or other
aaatgtagtcatatatggcctatggtataacatttaggtttagggaaataatattaggatttattatgtatagaatttcaaatttccctataaatatggggtgagtatggctcaatagagacaacaattaagtggtatttttttctctctctcaaatgagaagattactttttaccaaagaagctaattgatttaatatttatgttaatcatggtgagaaacttttaaaattatcaattattagagtattttttaatgagaaagtgtcaaatcttatatatgaataatagagaaaataaaaaaataaaagtaatatttttaaatgatgtgtatattttgattactataaatggtactttcattgtagatactcttaatatgcttaaaagatggttgtcacgtgataatataatttggtaccaaaatgaatgtcactagtgccaacttttaccatccatactatgtgcactttttattttaaataaattttttaaactcttatttttacacaatatcaacccaaaatttatagggcttttttatttttacacttnnnnnnnnnnnnnnnnnnnnnnnnnnnnnnnnnnnnnnnnaattctacatagaaactactattgcaa

SEQ ID NO: 117614 - DNA, 1062 bp, Cannabis sativa
ttggggttttgaaaaaaaaaagtatagtttttttatgatttaagtttttggtataataataaatttttttaattatttaagcatataaaatcaaaattcccggtagatatcgatattctttatgaaaaaataactaacaagggaatgggtttcgggtttgtgtctttcgattctgaagaagctgtagaaaaggtacttgaaaataatttctataatctataaggaaaacaaatagagataaagatggctgaagcgaagacaaataaaaagaacgaagttcctaccgtgacaaacaacttgaatcaacattctcttcccgatttggcttcccaattttattactccactcccaacccattccaatttcatcccatttcttggatgtcttattataatcttatgattcctacctcatatccatatgaatatgaacagagtgctatgaatataagagttaatcctataattcctactccatatccatatgaatatagatttaatcctatgattccttctaccccttattatggacagagtcctataaatatgggagttaatcatatgattcctactttatatccatatgaacaaggacaaagtcatgtgggagtttattatcccatttagatatgttgttgtttcaatttatgtcttatgtctttttattttttttaataattaataataaattctatcataatattattattcatgaatccataatatttttggtgctgatgtgattttttttaagatcttgcacgtgtaatatacacttttgtgatgtaaataaataaagggtattttttatttttatacttctaaacatttttttttttttgtatttttacagaattttatataataactcatattgtaattagcgctgtaatttaaatcgcaacaaaaaaaatcttatagaaatctctattgcaactagcgctgcaactattttagaaagtacttaataaatttgaaaatatatatatatataaggtaattccccgtaaataaatatataatgtataatggaagaggtttcaatggttacatttttattgt

SEQ ID NO: 117615 - DNA, 1507 bp, Cannabis sativa
  modified_base (1445)..(1449): a, c, t, g, unknown or other
gagagagagagagagaggtggggagagagaatgaaaggatttttttgattagttaagtcacctgaaggcttaccctaacaagtctcatcgctttctttatgtaacactcctattaggtttaggttagatcaaaataatattattttgataaggaatatattttaaatcctttaattaattataaaatgatataaaatattttttccatctaatcgaaattgttatcccaattttttcccatgtgatgtggcatattcacgtgagcaagactagagccatgtggagtacaacatgtcaataggctagctaaatcaccatgcacaacatgtctattgacgagggatccaaatactcagtcaggacaaagttacaagaaaattaaaaaaccaagagggtttggccggacaacccttggccggctaagggacaccatgtgccagccaaccccaagtaaaggatctgtcagctagtacacgtaatgggtgtcctaaagaagttcaatcaattgagatttttgcagccctcatcctggacaaaccacaacttgtcctctgctgcgaaccactccaacaacccacaaaaatagggttacaaccccaaaataattacctatcttttaggaatattaattagttattttttgtaagaccgtgaagtttaataactacattagcaatcctaactaggttaattaagtgttaatgagaaattaaattattatatgatttaatatgtagaattattatgattaattgcattttaagatcccgttggcatgtcagggtcattttagtatttttgacccgtgaagggtaaaatcataattttatgatatattgtgtttatggactatactattatatagtatgtttatcctatctttctgcaggcaatttctgacaagttggtacggtatagtcacaattgggtgttttgggctgaactaggttcagagcccaacatacacttttgggatttagttatggcttatatgtgttatatgagaaagtatgatttatgcgatgtgtgtgagtggaaatgagaagtttaccccttttaagtgttgttgctaatatatgtgccataagggcaatatggtcatttgaccaaataagcttttttcataaaaaaaaccaattttcagcaaaatgtaattcattttctgggttctatcaactctaaatcgtcctctctctccctctctccattatatagttttcaaacacaatcttgaagaaaagcttgaaattggtgtggaattttgaggattcttttgttggagcttaaggaacgttgggtaacttgctttaatctattttgcttgctttaatttttttattttcaagcattatcgtcatgttcttggtgttctttagttggtggttgcatgttgttgtgaattaggagaaagtggtggttttggttgttggaatttattttaccannnnnttagatctactcacaagtatgctgtttaacatcctaaatatgaactttctaagatcgg

SEQ ID NO: 117616 - DNA, 916 bp, Cannabis sativa
ttgggtggggggggggggaatacagaaaattagaacctatcctacaaaaactaggcattctttttagacacccttgcccacacactcaccaacaacaaggtagagttgaaaggaaacataggcatgtcactgaaatgggcttaacaatgttggcacaagccaaaatgccacttaatttttggtgggattcctttgtatttgctgtctatctaataaataggcttcccaccttagtaaatgcctataaatccccatttgaaagtctttatcaatacatccctgattatacctttttaaagacttttggatgtgcatgttttccctttcttagaccatacaaccaacacaaatttcagtttaaaacatctaagtgtgtttttcttggatatagtccatttcacaaaggctatatgtgtcttcattcttctggaagaatttacattgctagaagtgttaatttcaatgaaaatgaatttccctattccactttattttcctccaagcctactatagcttcttacaaaaattaccttgcccctgcctatgtcattcccaccatatcagattattctgatctaccaaacattcagtttggttttattccccataccccaacagattcaacatctgatgttccccatatctcttcacctactgctctcatttcagctgctccttctccttctcctaccattgaaaatgaaccttccaatgacaccattttacctactgttaatataccagttcctcctccttctttgcctcaaggacaccaatgcaaactagatctaaatctggtatatacaaacccaaggttttgttggtattatatttatccaggatcttagatctatttgcaagtatgttgatttaacaacctaatattgaacttctaaaacgatgaactaaacacata

SEQ ID NO: 117617 - DNA, 1238 bp, Cannabis sativa
aattgaaaaacaaaagtggttatagaacacttttattttttaaaaacaaacttttaaaaatacaaattttacttttattttttgtttttaaaattaaaaaagcaaaagtgttatcaaacgctctctaaattggtcaattctaatctcgtgtataatctcaatcttaccaaactcattttgtttttgcgtatggacaatatatatattttttgaaacttatatttactatatactaattattttgcaatatatattgatcaacataattagtatttatatattttaactttatttaattatttttatattatattaatttgtttgactcatttaaataatatatataaaaataaataatattaattaattaaataatttattacaaaatatcatcagtataataaacaaaattcttaatattatatttaaattattcatcttatacaatttttttttctatttatatatatgagaaaataaatactaatttaactataaattaataattttaacaatatatatttaatattaacatattaatttgtatcgtttttcgtgtcatatgggttaaccataatccaacctagataattattgtatttgaccacaacttttaatctatgtctattttttatgatcctaatttataaaaattcatatcaaatttgttcctattgtatcttgtcatcatctaattatagataaataatttgagagaaaagagatttaatttttttttatcaaaagcaaattatataaatatacatagtagcaaatttatatgtatatattaattgggtacgtaacaatatgaatgagaagtacttaattatctaatttaagtgaatatttatagggaaatttgaatttatatccatattttatacccaaattaattctctaaacatatacttataactattgaaaaaataggattatttttccctaaacttctaaaccctaaaatacccctcttattattctcaaccatctctctcttcctcctttctctctcaaatcaaacccaaaattaacacataccataccggccgaatcaccacccacccacccaaatctcttcctcgtggaaccacccacgcgatccctctcttccacgctgatccctctcttcctcctcgaaccacttacgcacggcgttcaccacccacgccgatcaccacccacgcccatccatctacacccatctcgaccgaaccacgcacgacgaaccacgaaaa

SEQ ID NO: 117618 - DNA, 2896 bp, Cannabis sativa
taccaaacgccacctaaataaattaataactaaatgagttggcaagagtaagctacagattcactgaggtttaaatagtgaaaattttacatggaatgtatcatctgcgaatgagttgcaagtacagaactcaccaatgcaggtacagaactcatgagtggttttcagcccctttcagctggacgaggactgaggaagaccaagcccctggagaaggtggacgatgattgaggaagaccaagcccctttaggttttctagcgagggttttctggtatgaaaagaggatttcgggttatgtgggtttggagaagacaaagcggctgaaaaataaaaagaaataaaaatgtcctcattaaaactaataccgaggacatgtccacagtacaaaaacttaaccccaaaaaaatcgcaaaattttctcgttggtgcgaaaatactaataacgatgacatgtcttcaatataagtgtccttgttacagacccagttttttgtagtataccctcatatacacacatatgtacacatacatacatctatatacatacatacatacatacatacatatacacctacatatgtatatatacacatacatacatatatatacacacatatacatacatacatacatatacgtacagtacgtacatatatacaccatgcatatacacatacatatatatacatatatacacacatacaaatataaatacaaacatatatgcatatatatatatttaacacacatatataaaaatataactattattatttttaacaaataaagattacaaaatacctttaaaattgaaggggatataagcggtggtggttggatcggaggtggtgatactggcggaggcggcaaaatcacgagatgaaaagagaagagagattgagattgggtgagtgagaatgagagagtgagattgagagagagggggagtgatcagagagagagagagagaagagaaaagagaaaaagagagaaatttagaaaataaagaaaatagggaagaagggactttggcctctgtattatcggaggtggtggtgcatggtggtggtacgtgcatttttgcgaagatttttcccgatgcaaaagtgcactggtaaaactcttcccatctaccattattaccatgcgagaatttttttcccttttttggtaacttttgtcggcgcataattaccccaataaaagtggaaaagcgcccttaataattataaaaaccaaatttggtatgcgtcgaacattttttttccctttatttaagaatttttaccagcatattaatgcgtcgaaagaagtctatgaattgagaaaaactgctcgcgccttttggtagtttatctttttgggtttcaccagtgcaattcaccaaatatgcatcgatattaagttatttttgccaacgcattattgcaccgacaaaagtagtggttgagttaaattagcgatccaacaatccctttatgtcaacaacttttgccggtagtgtgtgtacattatctccatgtagacaataccttatgtacacattgacaattatcttgcagaaaaagatcgtggtttagatctcatctcttggtgatttcaagcccaacccgaactagaccacatgctctctatttgaggccaaatttgaataagacccaatttttcccaaaattaatatagctttatgtaacgtttttttttaaatgttatggtttttgtaatcaaaaggtaaaattcttgtagtgttggcagttaagtgtcaaaaataaataaaaaggctaaatactaaccgaacgcgagttttagggaatttttgtaaaaaattggaatttggaggttaatttttagcgaaataataatattgagagtgttatgtcgcaatttactcttatatgtttacaaaatagcaaggctttgggttttctaaccttttacagtttcggttaacttgagttaagttaagtttaaatataaagtaatattcaaaaataaatatctttacaaattataattttagagatgtctctagaatatcacgtaaatagcctttggtgatatgtgacttggaacgtgagtgtagctacccagtgtcacgtccatgagagcctatagtaggtggagaaacagcagggtcaacctttggtcctggtggcggagggtcggccttattgctggtgatagagggtcgaccctgttgctagtgatggagggtcggcttcgtggatcatcacgaaaggtcggctcgtgtcttgtccatggtcatgcagggtcagctatgctcgtggtggtgtacggtctaccccactagtggtaatgctccccagagtgtcttcacgatgcccatggatagtttaatgactttcctaatatcttgaacaaaatccatgcatattcatgttggatttttaaggaataacaacctccaacttataatccctccattatattcaatttttataaattagaaaagtaacctcaacaaatattattaaaaataattataagaatagaaataacaattttataaattagtaattatctatcattccatcatttcatcctttctaaggacaacataaaatgattattactactctctcttatattttccatctttcattaattctcaatctatcttcctcttcatgcatcccaccaaatatagccttaatatcatctttagcatatgctattgtatttttgtttagtttttttaacacaatgtatttcttttccctactaagtgggctttactcatagaaatttcatgggattttttcaacaatatacattattatcaaactatttacaaaaataaccttacacaaataattacttaatactaacgttccacatcagtaaataagtaccgtatatatatatatatatat

SEQ ID NO: 117619 - DNA, 1734 bp, Cannabis sativa
  modified_base (392)..(393): a, c, t, g, unknown or other
agataaaatagttgagaaaaatggcaaaaaccaaatttgtatggggcccattaagtggccagtcatatgtgcttattttgctccattttttgtcaatattttattctaaataaatcaaccctaaccctatggaaattagtataaaaggatagctatggtctcattatccaactaatgcctctaaagctaaaaacctagtttttctctctaggtttgatgagacctcttccttcttcttcttccttttgaattttcgaaataccatagccttcttcacaaaccaaaattcagccattagtgattgagtacatgcccacacataccaagttggtcttcaatcatagtatgtaagactgtgaagaatccaaaacaacaagaaggagaatcgggcnnagatcttggtgatactctactacataaaggatacaagggttagagatctaagcggaaggagtcatttaattccgctgcaaggtttctcataccttttatgtgtttattttcatcgttttaaaaattcatattaggatgttaaaaacatacttgttagtatatctagatcctggtaaaatatattccaacaataggctccgagacctacaagctaaaacacgtgggtagatccctaatctcaagagcatgaaatgtcgatcacctctgcaagtactatcaatagttaggggtttggtatttgatttcatctttacattttccaaattaaagacacctttttgtgaattgagaacctagtataatatacatgttattattttgaatttagactaagtgatccaaaaattattttaagtaacttaggggttactagaggcatatatatgcataaatatgcaagtaaaaataacaaagaatggtaagtatatatacctataagtgctgcttataaaaaacaaacaaaagaagaataaaaattaaaacattgttctagcgagagtaaaaataaaggaattgttagaaatggttgttaattaatctgctatgggaggaagatggggacccactcgttcgactagcatctgttcaagcttcttatttttctcccaaaaattgagccaagggggcctaaagatccgacataaaagtgagacgaggttcaaacttgttcgttttctagaacatgaaggctctatcctagaaacattttaaacaatgcttataggtcaccatagtcaaccaggcctctctcgtagcttttgcggcctcctttttggcttggtctcaaaattcacgtagctttttctgttccatggacatgcttaccatagtttggatgtcagcctggtgcaattcctcaagagttttaaccttggacactaatccttgattctcctccccaagcattaagcaaatctgtctccaccttggttagcttagcttgaacagagattagggtttcatccttggccttcagtgcctactgatcttgctctgtaagggccttttctgccagtgtgtcattttgaaaagtctccatttcaccttcagcctctctgagcttctttaacaccgcccaaggccacattgctctacaacagagaatccttactcgatcaaagtcttggataggcggactgcctttgtagtcaaaacataattaggattagtgttgggattttatgccctaaataaaacccatttcaatataactaattttctatcaatagaagattagaagtcatttaagtttacatgttattttcatgattatggtttaat

SEQ ID NO: 117620 - DNA, 1342 bp, Cannabis sativa
aataggagtgttaagagttaaccccaatttggcctgccattttcgagatgagcgggtcagatcaactaagctctcccaattatacacctttttgagggagctatctacggtattctttacaccttctaagagatcgcactcccaaagacagtcgtcatgaagaagaaagcgaaggtttcgttgacaaatatgaacattttgaagaaaggtcaccctttcgtttaactagtccaatggcggaatatggatagcccttaaaaccaaggtacaagttagtacttacatcaacaatgaatgtgaagaaaaacaaatggagctgaattgctaaggggtaataacaatatgcttgaaggcataatctctgtacaggctccatacccaaaagaactcatgcttcttgcctggttccttgctaggaagaccatgtagtatcattgggttcgtcacataataaaggtagtggaagctatctccatgcctttcattttcggcaggactagcccttggttgatacataaataaaaaatcattgggtgttgggtctcatagccccatgtgtgataaagagactagaaaccaaccaagattctatagctattagaagataattgaaacggagctagtcccaaagctccaaatatactctaaaagtatggtgctagtggaagcatgacctccgccatgaaaagagaagtgcccatgcgtacatgtcattatgtggtggtgtacacttacgctcatcagggacaggagttctacatagcattcacactccaaagctaagttcttgaactttaagggaatgtcgaacttggtcaatgtttttaaatggagtggtgatgcagcttgcctcaaagtacacccccgcagctttagtcttaatcctaatcttttgggtaggatccctagtggccgagtcctctacatctgcaggagcattattacactacatgatttgtgactccggtcccataactcttcttttttgttcctaaaaaattaataaaaataaaaaagaagttagaacccgagaaggaaagtttttgcaagttagaagaggaatatatgtctcatgaataatttctccgttttcttggaaaaggtaacacaacgcactagactaagaaagaagcattttcacaaaaaatgtcatgcaacacatatagtgggacccatgtgtgatcctaaagttatagaagaaagacaaaattgcccatgcagttttatgctcaacaacattcaacttttgctcatgtggcagtatggcacgctcatagaaatgaccattggcactaatggtgacgtgacatggtccaccatgaaagtccataaatttcaagcg

SEQ ID NO: 117621 - DNA, 1275 bp, Cannabis sativa
gacccatgttatacatgtacaagccactagaggaaattcaagccaaccaaattgttattaatagcatttctcttgggtggatattttggcgcttgtaccgtactttcatttcacatgctattttagactaagcgaaaaaacagataggaaaaagtcaaattgattgattcttccttgtcgatggatgttggttgagatttgatctcataaaaagtgtaaatattaaagggttcgaatatccgttttcagagttaggttggttatgtttcacgtgttgattagaataatcaaggttgattaatgtttatatatcatctatatgtgtaataataatgctccttataggaataagacataattagtctaataagattgaaaattttacacaaaaaaaaaaaatattaattacacaaatactactacaattttatttaagctcttgtaactatttctagcttaaatatttacgcatatacaattttcacataaaactactagctcataagcaaaaagtaattcaacatttcaataagcaagtgaaaaaaatgaacttttttgtgacagacatggtactcaaaagagtatttcgaaacacagaggacaatgcagcatgtgtactcgaacctaattgggaatgatcataccaagtaaataaagttaccaaatctagagcatacaaaatttgtcggtataatgaaaatatagacctagttcttgtaccaaggtattagaatgtcgaacatttaagaaaatactaagtgcgaaacgtccggggatgatttaagttgcacgatgcttgaacattactcttaagtaatggtcttatgagcgaacctcgctcaaaggttcagaggacaactggtgcttaggtcggatgacaattttcaaagtacagttaattagtttaaaaaaccattgctcttgagtaatgtattttgtgcaaaatatactgttcaaatgttcattattttaataagataaagatcaggtagatcatgtaataacttcttataattcaataaaggtaggttactatggtaacaacacataccaactaataaatgatatagatagcaattatcattcaaattgtgtcaatcttatgcttttttttttgcaaattatagtaagttatataattaccaaacatgtacaaaggattttcctgaaccaaaaagccagagagacaaaataaaacttgttaaatgtaactgaccaagagtcaaaagtctgtttggtcacttaaggggcacctatgttgggttttatgcccta

SEQ ID NO: 117622 - DNA, 1948 bp, Cannabis sativa
tgagtgatttaaagttagagtttgggagtggaatgttccttacattttagatcattttgactccttggagtcatagtctattttatctactcctactcctactgttgatcgagaggatagagttttctggaaattctctacttctggttgttatacggtgaagagtggatattagagcacttttctcgattgtgttaggggcatgaggcgtcacccactggttcctctcggtggtagaagtatttttgggttctcaatcattctcctgaggtgaaaaaatttgtttggaaggactctcttaattttatccctacttatgctaacttggttcgacatggtatgagtactccagatgtatgtctgatttgcttaaaatttaatgaaatgactcttcatgcactttggttgtgtccctctctcaaatgaattcagaaatggtggggaattcaaggtttggataaggttggagtggctacgtctttttatgatcttgatgttggttatacatgtttcttcgtaaacaggaaattaaaaaatttcttataatttgttggaggatatgacatcatcgaaatactatggttcatgatcatcatcttctgaaagatgaaatagtataactttggactttaaattatcttatgcggtatcaagaggcctaatctcatggccttaatagtgattcaacatcgactattgtgtcatcgggaatagtgttgcttgtggaaatccaatctattcgtagatgctggtgttcgaacagaagcgggaacggtgggacttagggctgtgttgtctaatgtccccgaatttgttttgttctcggtggctctcctttagtttgccattttgaaccccttgttgctgaagtgggtgctttactctatggtctccagctttgtctttaaatgggttatcgtcatgtgaagatattctcagattgtcttcgtcttgtgcaaagtgtgggttgtaaagaataagttttttgtgagtttggtattgtgctttatgatatcttttgtgtgtaggattatttttcttctatcacattatctcattgtaagcggaaaaataatgccaatgttcattcacttgcacaactagctttctctcttgagtcaccgcttatttggtggtctagtttgcctaattatttagtgcgatgtgtgtcttttatttgaataattttcttagtgatgtgccttataatattgttttttttaaaaaaaaattataaaaagaagaattcattgtgatgaatttaaatttggtgataaaaaaaaaaaaaagagaatccttaaaacaatgcatgatttctataattttaatatacatttttttttattacatatctttcttatatataaatatctatgttatatgctttcaaaaaaaaaatatatgtatctatgttatattaaatgtggttatatgacaaaaagtattgttcttttttaaaatattacaattcaaatttaacttttcttttatcttatattttatgtatattaaatgtgattatataacataaattatttttttaatattacatttaaaatttaaacacattgtacaaatctaaaaaaaaatatctttctattatcattttttttacctaatccaaatatctaaaaagtatctttttattattatttttttcttttctaaacaataaaaaagaaagagtgattatgtttcttaaagaattagtgttgtaacactgtaatcttgtagttattaaaaaaaaatatttctattattatatttttaaaaaataagtgtatgatatttttaaaaagaaaaagtattataaattaaaatattatgattaaaattataatgaacaataaaattttaatattattgtgtttttatatatataaatgtaacatcccatttcaagtctctattgggcccttacactcacagaatgatagctcttatacac

SEQ ID NO: 117623 - DNA, 1116 bp, Cannabis sativa
aagaagaatttcataatacatagactgatttccctttctctggggattcaagtcaatttgccttttccttcttctgcattgtttttttttctctttatgtatttattttggataataattgaattgatagatagatagatagggctttggtctttggtggtagattgctagtcttgttaattgttatagtatataggaatataagaaagtacagagtgatgggttttgtgtcatgggtcatgctgccaatttgtgttggaatttttttgttgcatcaagtttatattttaaaccttcaaatacccaaaatttaaaacaatctatgtgcacatatacatgttgtttgggtgttggattttcagtggcatttatgattctgtttggcttagcttattattattattattattattattatatttcttgacaattataaaaatgtttataaaaagttttatttttttattttttatttagaagtcctttttttgagaagatgggatttgtagttttttttcaaaacatcttttggaaaattatttataaaattataataatttacctactttttaatttactcacatttactcatattcaaacactttataaataactttttattaaataaaagttcattatattatattgattcaaattgaaaaaatatgtcaaaatttataagtaaatatttaaatttcaacatgctaataattttttttatatgatgttttaaaatattattgaaagtataatttagtgattgtaaaaaatatatataaaaaagtaaagtacgaatttaaattcgaatatgaaaatgagtttgcccgtttaagaaaaacggaccagtacgagtaaagcacgatacgcattcgagtatagtacgaaaatactgaacttataggccgtataggcccgtatcctttaaaagtattagcatgacataatatgacatattatgccaaagtttatcatttttacttttttttttaaacattatgccaattttactcatgtcacttcaagatacttttcatatgattctcttatgtcagggtattttgggtataatacctataaaaagaggtatgtttcaattaaatataaaattaaaggtaa

SEQ ID NO: 117624 - DNA, 1869 bp, Cannabis sativa
aaaaggtacactttacattttattaatttgtttttgatgcatgtcctatttcaaatgtggttgcattgacgataattatgcaaacactactcatccatagaacccagagagaacagtgcaaaacataagagcagaaaaaaaaaaaagtttatgatttattgcaaaagataatagcaaaaaattacttacaaacgataatataatactaaaatacattgataagcttataataataactcttacagtatctcaagtatttttgcattataatgtgttttagaaacctatctaatgaggaactagtcaagtgataaaagctggcgcaaaaattgggtaaagttttatgatgattgtttaatggaaaatgaattagtcatcaaaaaaattatgtatggccatgccatgaatttttcttaaaacaaaaattctgttttttacacaaattttacactaaagtaagagttatttaaaattgtcatacttattaatcaatgctacatggccatgttgctcttcatcataaaattgaattgtaaaacattaaaacttctatattaatgtcactcataataaattttgtatattactaatattttacataattcaaagagtatttttataagaggtacacttggagagaaatcaatgttttcaaacaagggcttcctccaaaagcctcttttgtactatatttaggacaagagatagagtttcgagtatatcttttgcttcgactataacgtggtcttctggaaagaaagataaataaataataataagttagattatgttttgaataatgagactactattcatgctctttggcgttgtctttctcttaagtctatttgttcggattggattctgcgaggtcttgaatctttgaaggatgcctcttgctattatgaattgttgtcgggatgtgtggatattttgagtagacaggaacttaaggagttcattacccttagctggcgcatttgacataggcaaaatacctttgttcatgatcataagctcctccccaacaatatggttagtccttgggctattaactatctttggaggtaccaagatgttaatattggtaggtcatcatctatgggtcagtcttcttgtaatgtggacaaagaagagtcttctaccgaggtagatctggctcttggcgaggtcaacttatttatggatgttgggattcgttatgaagattggaagatagggatggggactttggcttacaatcccaatggtcatgtcttcttttctagtgcagcttcgtgcgtgagatcttttgagcctcatgttgctaaagctaaagctttacttcaagggctttctcgttgcctgcagttagggtatacgtccgttactgtcttctctgattgctcgcggttagttcttcatgtcaatagcaaggatcttcgtctcaataaatttagcattgtccttaattatattgactatgtttgtaaatcttgtaatagcatatccctaactcattgtaaaaggtctaagaatactattgctcattctttagcgaaacaaacacttgatttagatgagtctcgtgtttgatggccggacttacctatgaatttagttgtctaaatttacaaattttttgtatcttaaatctttttaggcttgatgctttttaatagaatttctccgatttttttttttaaaaaaaataatgattgcttgccaggagaaataacaaattaaatatacctaattatgatatatggcctaattttattatgatatatggcctaattttttttcctcttttaaaattatacatttttttttaccgattttaaaaaatatcacattttttttaatataaggacccaaattttttttttt

SEQ ID NO: 117625 - DNA, 3031 bp, Cannabis sativa
agaagaagaagaagaagaaaatcgattatcaatggtgttgttgctcaatgccctaaccctagttcggaccatgaggatttcgacaaacgacttggtgttgcaggctgaagatatcccctttgggacgccgtggtggttcgtcttcgccggagtctcatgcttgctagtcctgttcgctggaattatgtctggccttactcttggattaatgtccctcaatctcgtcgagctcgagattctccagcgtagtggtacctcctccgagaaaaaacaagccggtccgtcaatttccaacattttttctttttctttttaaattaaaagtaaaatattaataattgggtaatttatcgagaaattcatgctttgaaggtgatgaacagtgtttaatttgattaattttatggttaatcttggtgtggtgcagctactatattaccagtggtgcaaaagcaacaccagcttttagttactttgcttctttgtaatgcttgtgccatggaggtaattaatgatattatagctttcgagaaacactgttttgacagccattttaaggtcaataggtttaaatttgtaatcaatgtgaattgcacggaaatgggtttatatttttatttttatagatatgtgtataaatatttgtatgaggacaaaatatacagtataggaatgaacttgaagcatatttgggtgaaaaagtattaagaaattaaaattacgaatgattacaattgttaaattataaactatttctgttcggtatagtattaatactgaaattgtcttgtgaaattatctgggaaaataataataataatctaattactgaaatgggggttgaatttgacatttataataagctgttatggatttgaagaagaacccgaaataatactattttcatatatttctttcttacattccactgcttgtgtgtaatcttgtgtaacaagaaaaataaagaacgtatagcattgcactgatatctaccctgttctacatttttgcttctgcaggcgcttcctatatatcttgataagcttttccatccatttgttgctgttgtactgtctgtaacctttgtcctagcttttggagaggtgtggttaattttttttctttcaaactctttatgctttccatgtaagtgttttagctttgggtaggactaacatgtcttacaatgtgggaacagataattccacaggctatatgctcaagatatggactagcggttggtgctaattttgtggggcttgtacgcattctgatgataatatgttacccaatttcgtacccaattggaaaggtaagcaccaaaccttgagttttctttgggaatttacctgacatcgtgattgatttattgcattatgattactatgcttttttacgttctttggaatgaaatctactcctttatatcagttatgagtgagtacttttattgtgtaggattttaaattcttgctttaagaagaaattagttttgtttatatttaaaaatttgcaaccggaatgatctcgaagatgaatttgtggaaacttccaatagttttaaggaaattgacagaatacataatcaattgcttgtctaatttaaaaatatctttaatcgattttaattctgtcccgtctcaagcagttcctgaactcaacttgttttcaggttctggatgctgttctagggcacaacgaagttttatttaggcgagctcagttgaaagcccttgtctctatccatggcaaagaggtagccacctttatctagaaaactctgtgatgggccaccacatgtactattcgatattagttatcttgaaacgacaacctttactagaaatgataatgagtccctctaaatgtttgaattgggaagaaatctgttggtgttgtttcactaatttgtttgtctcatggcttaggctggcaaaggtggtgaactctcgcatgatgaaacaacaattatcagtggagcacttgatttaacagaaaaggtagctactgtgatttaaggattcccttatgtactttgagaattttcctttgtaactacagtacttgtttttaaatacttatctctctgctgaggtgaatctttcatgtatcacgttgccacttaaaagagaaactataatgtccttctgagttggagagtgtcgtctgataaatcgaatacatccgctatatagcatatatacgaagtttctcttttttaatacttcttaatactgtacatatgaagcaactttaataaactgttgactcttttagggtttcattatccaatgttaatggttttattacgtagacaaaagaattcgatgaccttcatgacgtgatagttaatgattatgagcatgtatcttttatattagaaaccttatttattttgtgtttattttgcattgtctataaacaataaaatgtaaacaaagcttttttgaggtgtgtagactgcagaggaagctatgacacctattgaatcaacattttccttggatgtcagctccaaattagactggtgagttttagattcagattgttactacactattgtctttttgtttcctatgtctaggtgccattgttgtatttaaggtcacttttacttttttttttggattggtaaatctgtgtagttcatattcatatatttcagattgaacttggattttgttatccttttgcacaattttttcattcttttataaagaatgaagaattttatgaggcacaagatgttaggtgattgtgggtggagcgggggttggggtggcttagtttttattgttaatactctgtatagaatgcagtgtgatcattttgtataaatcggtatgtgatgtgtcctacggcatatttgctcatttctcaatgaagtttattatatcatatgttccctattttacattgcagggaagcaattggaaaaattctggcacgtggccatagtcgagtccctgtctattctgggaatccaaaaaacattattgggcttttgctggtctctctctctctctctctc

SEQ ID NO: 117626 - DNA, 1726 bp, Cannabis sativa
  modified_base (102)..(106): a, c, t, g, unknown or other
gcgaggtctaaacttcgagaagcctctcctggacatttcagccttcactggaagtctggatacacatgtccttcaaagaggggtctggtctcgagtttctannnnngagaaatctcactataacagtaattaacaaattaacctacattattaatttatttatagtcatataaacattattttaatacatacatacaagggagactttatagtcacagttttgtttgtggaaaattataagccatggtattctcatcattaaatcaaacatataatggaaaaatataattaaaaaaatataattaattatgtatattattatataattttccaattatttaataaggaaaaatatgaatatagcccacatataagattattttgttaataaattttttaataaaattattctactaataaaatatttttatagaggctatttttacaaaatatcattaagacaacaagaaatcacaagaatttaaaattatattatttagcatgtctcaatttttactcaaattagatcttctattgataaattattaatgttgtttactaaatatataacttgtttttggtattatcacaattattatacagacaactaaattgaaaaattaaaaaaatatatatatttttcctaagaaaaataaaaatttatttcaaaatagaagacatgtggcaccttatatgtaccttttttttttctccaattttttttacttttattctatttttcttctttaattacattttagcttttattccttatttgatttccttcatttttcttattaataaaattaagttaacaacattaataacattaatttatttttaaatacttcctcaatatcaaaaaaaaaatagttaatttttattaaatgcacaataatattaaatacataataaattattatacttggaacctttttctccttttatttttttttaaatgtttgtaatttttttaatatatatataattcaatttattgtcttaattttttcccattgtcgacactctttcatattcttaattattattattgttattattattattagttaattacttacaaataaaatttacaaatgcaaaaaacaatattgtagctttttatatataaaacagtattagagtatgtgtgagtgaggaattatgagattaaatccaagcaatataacttaaaatataatttaaagacgcatctatagaaaatgatatatagtgtgacattttatatttgttttatatatatttaaaaaatctaaacaaacgcgcaaagcacaatttagttgcctagagtggtgatgtgggagtgttacagtgtatatgagttttctttcaatttctttacattctcattttttcagtatttttcaatttcttaatctattttaatcaattactatctatttgttatttaatataatttaacacaattaaaactaataataaaacatacttaaaaacctattaatctaataataataataataatataatcttttatatatctatctatatataaagaaaagcaaatatatgtgtcatgtaacattttttctctattgtatttaatattctctattctcttattattttgaatttatttattctattctattttttttatattatttgctaataaaaattaattaattaattacaatttaattcttaaaatttaatatttgtgttatagttttttttttttttt

SEQ ID NO: 117627 - DNA, 831 bp, Cannabis sativa
agagagttttgatcacttttattaatatcaatatgaatatgaatatatataagaatcataataaaatcttatagatgtcactaatattaaattgttgatttgtttggaaagttatgagaattgtttgaatcacaaatattggcttcaattttcagtatttagctttcaactctatacattctaaatttttcatgactttatattatttatacatttttataaatgataaaattaaatcgtcttaaaaactatattttcaataactacactttaatctaatttgaatatacttatagtaattcaattttaaatttaagagtcataatgaagatgagtgtattgtttttgttgtaactacgtattttgtcatcattatctacatattttgtaatttcatattgcatgatgcatgttacaatttaataaaaacattatttgtcatatatttatttaaatattacatattgtataaataatataaaagtttaaaaaaaataggcgcaaatacaagtagatatttaaaatttattttcaatattgtaaattttctaaaattcttcaaaagctaacaatatatgttgtcatataaaaaaaaatgaattatatatttttgcaagtttcaaagtatagagcaaaattgattctccacctcattaattaattgctcataatcaagagagttttgtgttgggagattaattcctcataaggcggaatactacaaatttttttacttttagtcacaataaaatttatggttaaaagtaaaatagttgtgactaattacaaatcactattcttatgttatgactaaaaagttcgtggctaaaa

SEQ ID NO: 117628 - DNA, 2353 bp, Cannabis sativa
aaattcctcaaatcttagaaacaaaaaattccaccctaccaaacaatttagaaattcttaacttttctgaaaacttacttagtggatcaataccttcttggatttattctcttccatttttacggcagttgatattaaattctaataatattactgccccaattggagaatttaaatcaaaatctattgaaagcctttccttaggtcaaaataaatttcatggccagattccaagctcactttttcaactagagaaactgaaaattctatatctctcaaccaatcatttgtatggtgttttggagttgaacaagttctcaatgttgaaaaatcttgaaattcttgatctttcttataacaatttctcattgagttcaaataaaaatgttgatggtaataatctctttcctcaacttttgtatttgagtttggcttcgtgcaattttcatgcctttccaaattttttgaaaaacatgaaaaaattgaagagattagaactttccaacaatcaaattcatgggagaattcctgaatggttatggtctcaaggcccaacttcattgtcacatttaaatatttcctacaactttttaacacatgtagagaaaattccatttccaaacttatcatttttagatcttcgctctaatatgatacaaggaaatcttccaaatgttccactttcattacaagtttttttcatatccaacaatcatttatatggagaaataccttcttcatattgcaacttgagtaagatttacatccttgatctctcaaataatagtattcaaggaaaaattccttcatgtcttggaaataaatcttacctttctgtattggatttggatatgaatgagttgagtggtgaaattcctaatgacatgtttgaaaattcaattggcttgaggagtttgcaccttaatgggaatcaactagaaggagccctaccacaatcattgtacaattgcaaaaatttggaggttttagatgtgggaagaaacatgataaatgataccttccctcaatggttggaagatctttcaatgcttcaagttcttgtgttgaattccaatagatttcatggttctatagggtcacctaaagttaaatctccttttcaaaagttgaaaattatggatctatctaacaatggattcattggtgtgttaccagcaaagtattttgaaagtttgacggctatgatgaatgaacatgtcgtcaataaagtgacacgattaggagatacgaattacctaaattctgtgattgtggtaatgaaaggtattgaacgttcactcgaaaaaatcataaatattttcacaacaattgatttctcaagaaatgatttcgagggagaaattcctgcgtccattggaaagctaaaagcattgaaagggctcaacttttcccaaaacaaactaaagggatccattccaacctcgttgacacatttgagtaatctcgaatggttagatctgtcttcaaatgatttaataggaaaaattcctagtgatttgtcaaatttgacacaactttcattcttaaacctttcgcataacaaattagtgggcccaatacctagtggaaaccaatttgatacattcgaaaatgattcatatagtggaaacttgggattatgtgggtttcctctatctaattcatgcaagaaggtgacacaaaaaggtgatcatgatagtgataaacatgatgaggatcatgtaaacctatttgattggaagattgtgacgatgggctatggatgtggaatgatgatcggaatatattttggatacataatgcttttcagtacaaggtttgaatattcttggcttaggagaaaaattgaaagaggatgggtggaacaaataagtcaaagacaaaattgtaaaacaaatgcaagcttgagaaggagctagaataccatgatcaaagaaagaggtgacatatatatggtaagcatcgaaaactaactaattttattttatttgctatgaaattaggtttaggtttatttagttttggtgtgttaatttagtttattaactttgttgtttggattaatttaataattatatggtcataagttagaatcatatataatttaggaattttgtttgctaaataaataatttgagtaaagtatattttataaacataataatttagatatactttcactaccataataatttagttaggcacttataaaatgtactcgtttggcacattttttagaaaaactaaaagttattttttataaaagttgtaataaaaaagtattggtaaacagttaaaaaataacttattaaaaaatttataaaaatgctatatctaaaaattaaaactggta

SEQ ID NO: 117629 - DNA, 1512 bp, Cannabis sativa
cataaaatgttatttctgatcgttcttaattagtaaatctgattatactaaaatgggttttatttagggcacaaaacccaacattagcttcaagtcatcactgaccttggtcttggctgcagcctccatcatcctttgagtgaaagctttcaaactttcattagactggtgcttgacattggttaaggaacccaactcccatgtctttctcgcctgcgataataaattgcttgcagaattagactgtaagtctttccagctgtcaattgatcccatagccagccgcttctaccagtcctccgcagacttggttaaagtcaaagataagcataggcacttagcatcttcactaacgcgagcgacttgcatcatcttgttgtatttagctaagtgtgttcacggatcggttccctcatacaattcgatgtgcaacatcttgaagtttttgggaagaggagtttccacgattcttttgacacagggtccggatcttcatcctcagaatctgataacgctccaattttctttttttccaactttgttagtgtagcaatttcctcttccagcctttttacgtcacttcttgggaggtcgcacccccgcagtttatcacacagatgatttcttagatcaccccgtcgtggcctcaccctctcgctcttgtacctttcatacttcgcgtctaactgctaccgcaaatctggcgtggaccaactatctccagaataactaacagtagtcctctcgtcttgattaactgaatcgctagggggatccacttgtctcttaggccaagggacctccgtcgccagtcctttcagtgcaaccctatttcaagggtcgaaagggcgtccaggcccaaaggcgctgatggccttctacgttctccagggttatccaactgaaggcgtatttttctggcaaggtttaggagcgattatgcgtgagggttggcctactttgcttttacccttatccgtacaaggattctagatttctacgttagtttgcgcctaggctcattatttagctatttcttctatagaaaatttttcgtctattcctgtcaagccattaaactcaatttatagctgcttcatggtctttttcatcttagctgtgagcatttgttcatttgctagggcctctggtgcggctgtaagctctttagttacccgcatcaaactaggatcatgctcgtaatatagaccatccttatcgtatccatctttatagtagtcgctatcgtcatcctcttcataagtctcagcatactgatcatccccatgaccttctccaacgttctcgttgtttgcgtttggatttccactaggagtgcccttctctaggttctcaataacagctacatcttctctaccatctgccacatgtgcgtcggccacacgagaggtacctgttgtgttttgtgccctaaataaaactcatttcaatacaatcagattgactaattaataaagattagaaatcataattttatgttgcatggttcac

SEQ ID NO: 117630 - DNA, 2246 bp, Cannabis sativa
  modified_base (1046)..(1051): a, c, t, g, unknown or other
ggtgtactcggggagctccacctttcctgatcttttaagatgggcagcataggccttgacaaactcatgtggcgaaacatctttgactgtccttgcagttgccatttttgtcaagagatggagcaagggatcctcttctctactaaatattgaaaaagataacagaatattagatgataccaacaaatatcaagaaataaagtttaaataacattaaaaaagaaaaggtcactgagactactgttaccatctcatagtttgtttcgacttcataggtgttactagaagggtacaaattctattcattcactttaatggtaaaactacaagcaaggcctaactagacacaaaataatgaaaactgtaaatcctaacaaaggtagtgccgactaattcaaaaagagaagttattattaatcaaaactaatcaattttaagcataacaaaatctgaaacagaatttgttatgtgtgtttgaaactgaattgcaagatgcccagtaagcttttgaacaatgtcttcaatgcagcaatggagggtgctgcataagatggtatatggttgatagaaacttgtgtttgtttgaaggttaatgtatgtcacctcaatgtattgatcaacttgtcaaagagaacactaagacaatggttttatttgttaaggtttctaaattgtccaagatggaaaaacagattgtagaatgtgttgagaatttgtaagaatcattgggtgaattcccttaaaaaaaaatctgaaacagagaacaatattataatggacaaatataaacctcaactaatatgaataacaaagcttaggcaataccaaagcaagacaaatcagattgtcttatctagcccttattagatagagatcacaactctctgcattctatatctactacctatagaatagtcaacaaatccataataaaatttcttgtggcttaacagaatatttatagaagctcctaaaaacaacgctgcagagatgcaaatgaataaaacataatttttcacagcttctctaaacaggttattagttgnnnnnnattcaatgaagtattgtccattttggtttaaaattatctttccaattaacaacacaacatcgtcaccaagagaacttaaaataatttcaattcaaaattcctagaaacaccattaattagaaatagagttattccaaacttaaacaaacttacaaacaaaacaaaaaaccattccccgcactattagccatgtagaaacaaataccatacaaatgtgataaagaaacaaaattttgtaatacccttgtactaaaatcacaaaattatcgaagtttctttggtcgtgggccttaggtttgaaatggaaaaatactgagaagaaaatcaaggaaatatccagattagaacaaaatctcgtataattatcatcttagaacaaaatcaaggaaccacgtaatcattctattaacgtttaagagaatgcaatgaagcctacacatacaatatttctaaatcttagaactaaacattataaagtaattatgaaaaacctaacaataaaaaagaattggataataggtaaatcatatccgtgtaaaagaaaaaacctagaatgccaatttagaactctattcaaaacaaaagaatcacttgataaaactcaaacacaacaaagtttccgtattgtatgcaaaaatacatgtttcaagtagagaagtcaatgggaatatcacaaaatctattgagttgaaaatatgaattaccttggcgatggagagtggagacgatagagagagatgcttatgccgacaagagagaccgagagtgagagaggtgtgagaagtaggttttcagtctgctgccactgccagtcatgaaaccctaattcaattgggccgaatacatattgggcttctgatattaggtagatgatatttttgaaaaacaaattgggcccatgagctggactggttatatttacaaactcatttgcatagttacacattttgtcatcattgttaaatttgtattgataaatacttgttaaataataaaataaatcttgtatttttcaaaatagtacaaatattttttcatattaagaattgtcggttatattaaacaaataatcaattgaacttagggttctgtttttactattttaaaaaatacaatctattttatcatttaataaaataagaatactaacacagataataagaatataatctataaaattaaaaaaaaaataaaa

SEQ ID NO: 117631 - DNA, 936 bp, Cannabis sativa
aaaaaaaaaaaatgcatgaagacctaacttgaaccttagaatttaaagagggagatgcttaccttggcttcgctatcaataaaccttgagtttgtaagctgaaatcctctgaatgcacttcaaaagaatgaaaaaacactagtttagggggtaaggttacttggggcctaaccttgagggagagaagagatgactagtttatttcttttattttttttttggtagcttatgataacaaaattaattaattaatttttttaataaattactcttttccaaacactctaatggaaatgctagattccactaaaaacaaatttccataatttagggtaaatgactattttgattatacttagccatgaagtaatctctatacctgggggtaatatggtctaaagcaataactccaacattccaaatttctaactatattacctcgctaattgtaagatactctaccatatctaagttactctaatggccaaatcattgcattctactgttactgaacttaaaaatataaaaaatataaaatttaatatatatatatacatacataatacatttagaattaaaatatatctccgttattcagaaaatattaatctaaagcctattttcactaataagccgtaattatttgctaattttcaaaataaagttaagcggtcattacaattattcccgttaaaaggattttttccttaaaatctaacttgaacaacttcagatactgagccctcgtatcagactctgattcccaagtggcttcgtccaccttactgtttctccagagtaccttaaccaatgctatggtcttgttccggagaactttgtctttcttatcaaggatctgtatgttgggctttgtaccctaaataaaactttatgtcaatgtaatctgttctattcaattatcaataaagaaacaga

SEQ ID NO: 117632 - DNA, 645 bp, Cannabis sativa
cagccccgtgccgatgttgatccacagattgatcaggggatgagagtcatgatgctgagtctgatcgtgaggaggatgcaccggttaggaggaggtggtataggacttatactgtcctttcaaactgtcccttcggtcattatgatactgatggtaacctacttaataggcttgatgagccttcaacgcttggcttggatcatgtcttgggtcaatcttctgagcttgagattcttgatgtaagatcacaaggaaataggtggatctcccctatatcttctatctctgctaacaattttgaaaggatacgggccaatgggctagtatagccggcatccattgcaagaagcctctgtgggatcaactagcgcatggaatggctgtaatgccctaacaattaggaacgctacgctaactgattaaaaaaccctgatcacctaatccgagattactaaaaggataagtgtgggaaatttaaactttatttgaaacacaatgaaaattaaacttgtaataactttaaactttacaaccaaaagatacatcttgcgggatcctgtagaaattttcacaaaatattacaagtctatttcactagctgacctaagcggcaaaatcagagttacaaaatacatcactggtaga

SEQ ID NO: 117633 - DNA, 1043 bp, Cannabis sativa
ttattaaaaaaataaccaatccaaaataaccgatctaatccgcacttttgcggattggatttgagctattgtgcaaattggattggatccaaaacatgaaatctacacttattgtgaatcagatacattatgagcaaaatattacagactaaattagatgaacacccatacccctgttcccatagttgagttagagagaagacgcatgcctatcttttcaagttttagaacatctacttcaagtttgttacaacaatttaaaatatttttaaaagatagtagaaattaagttggtaatttaaaatgaaaataatatttttataataataaaaataattattttttatatatttaattataccaaattggtatttattctattgctaaaaatatttagttcaaatctaatattttcatcaatttaaaatatatttaaataaagctaacatagaattctcaacacaaaaattacttgaagctagctaagggtgtgtgttaaaggtccttagttcgagtcttaattataaattgttataatatataaacgcttaaataaaaaaaaatccccacacaaaacatggttccatcatatcactatgcatcaatctagcattgttacatcattctttttcttaccccttatgttttttcaagaacacaacccagagtcctcaatcgatggtggagtatcattattagtcttgatttgggttacttgttttcatacttaagctaaaataactgtttcattcttcttataagttgtagattagattgatatacaataatgggtttcatatcatagcaagcagtttataaaaataatttacacttttttctccagtatacagttttagtttcaaagtacttaggtgtgcacatatgatcaaattcaactattttattctaatatgatccattttttttttttttgacgcaacaaagtcacacgtgattaacaatgcagcaaaccacaatcggccatggaacctcctcgatccaggatagttcatcgtctaaccgaaaggcatgttttgccaaac

SEQ ID NO: 117634 - DNA, 1310 bp, Cannabis sativa
aaggaaactgtctctctccaagaagttcaattcttgttacagacacaagaacttcgaattgaacagatgacttccgttgctgctttggatatgcaaaatcctaatgctaactatgttgtagcaaacaagaaaggacctccagcataaggttctaccagtaacaatcgaggccgtggttctgtcaggggcagaggaggtcgaaattccaataatcgtggaggaaatcgccctatttgtcaagtatgtggttgatcaggacacacaggcctgaagtgttataacaggttcgatctgagctatcaaggagaaggaaactccactactcaagactcaacacctgaagaacctcaagccatgcttgccactgcttctagtgttattgatccccaatggtatctggacagtggggcctctcatcatgtcattgcaaatactactgctctgactgataaaatcgactacaaaggtaaaggtaaactcacagtaggtaatggtgcttctttctctatatctgccattggcaccactgttcttccttcttcttctaaaatcttgatcttaaagaatgtcttacatgttcccactatacacaaaaatttgattagcatttctcaattctgtgctgataacaatgttatcattaaatttgacactaatcattgttttgtcattgacaagatcaagaagcaggttcttcttcaaggaactcttaatcaaggtctctaccagttgtccctgccatcatcatccactactccaaaatatgttaatctttcactgtattctcctactatgtcttctaaaaatcccaataaaattgcttgtacagcttctagtccatgtagcacttctcattgtatttctcaactttggcacaatagacttggccatctttcctctgttattctcacaaaagttcttcaagaaataaacacaaagttgtctaaatctgatttacaattctgagatgcttgtcaatttggtaaaaatcacttaatgcattttagtagctcttctttaaaaaccactcaacccttgcaacttgttcattcagatgtttggggtccttccccacatcctactactgaagggtatagagattatatcctctttgttgatgattttaccaaatatagttggatttatcccatgaagaataaaactgaagcttttccaatttttctcacattcagaacttctgtagaaaaacaactagattgcagcctaaaggatttacaaaccgattggggtggggaatacagaaaattacaacctctcttacaaagattaggcatcttgtttagacatcc

SEQ ID NO: 117635 - DNA, 599 bp, Cannabis sativa
  modified_base (40)..(50): a, c, t, g, unknown or other
aatatgatatataatctaattcaatataatacaatacaannnnnnnnnnnctaatacgacgttccaaacgaacctttaatgtattttttagcatattcttgttgaaggtcacggacttgtaggattttctggagatggctgcttccaatttaaacagaataattgatacataatcacctcttttattgcacaccattcttctcttaatttatcaagccgcgacaatatttgttttattagatcatacaactctccacttaagtatttttcttttttgtctgacaaagatctcgtacgaattactttttcaatcttcgatgtaatgttattttttctcattgtaaacttgttgcaccaaatgaaaggtatttcacttaaatataaatgtaaaaaacgcattgagaataccttctcaataacctattataggatgcaccaaatcgattattttgagattattgaagaaaaatcttattcattacatataaattaattaaataacaatttcaagaaataaactttttcgtgtaattcacaaattaagagcatgtttagtattgttttctgttttttgttttcaaaaaattgtttttagaaat

SEQ ID NO: 117636 - DNA, 3080 bp, Cannabis sativa
  modified_base (3032)..(3044): a, c, t, g, unknown or other
atgattggatatccgattctattggatcggttgggattggatcggtcggttgagattggatcggatggctttttgcacacccctaatattggtgataagtactgaaacatgtgttttggagtgttagtattcacatacattgccacatgggttgtagtagtgtcctccaacacccctcacttaaccacattactcaattcctgagtaaaatgtaccaatctgcattgtgagcctatttcagacccgataacttcagaattgagccatggttgtaagcatacatagatttgtctttaaattatctttcaaatgcaagttgaaccaggtcatttggataaaaattgagagagttatgcccattttactgaaggtagtttatgttatcgtaccagttgtgagcacttacatgaccaaatggcagtgctcgccatgcatgttctcggaccccttatggtgttttttgacttgttttttttttttatggtgagtcatattttttgggtctcgcgatccaaaaacctcatttcaatgtccgaaatcctaatgggaggccattgccactagttggagccggacagtggcagtggtcggccatggcttgtgggaagccatgggtggtgtttctcacttgtatttgatccatggatgttaaaaatactacttttccaatgaaactcatttccttgtgtagtggtcgaccactgccactccgttgtggtagtgcccatcaaaattgatgggcattaccatttccttatggcagtggtcggattagggctttacgaaaccttggttttgacatagtactggtgaaaatgcattgttggcaaaaaattgaagagcgctgcgatttccatatgctagtggtcggctagggtttgccatatgtgggaaatgatctctctcacttgtttttcattccttagagttgagggaacacatttgaacaatttttccttcatagtttgtaaggagtgaccactaccattctctagtggcagtgcccatcaaaattgaagagcactgccagcactgcaattcccatatggaagtgggcacatatgcctttttttcttgagggtttgataccatattaactttatgcacaaacctaagtccttttatgcccaaataagtcaagtccttgttggtttccttggcgaattaaggtttctagggtgaaaacgctcgcgcggggcccatgaaccctagtttggacacacttgggtgtgtgagtcccgacaccaaatggttgtttgatatttttgagccctctagaagtaacatggggccctcaagaaggatgtcttgcttcatttgacttttataagtcttggtcaaagtcataaggtggacgttttttttttatttttcgaaaatcgggtataacactaagaaactaagttttgggcgcccaaaagttaggcagatattgtagtcacttttcagtagtgcacaccgctcagtaaaatggccataactctctcaaattatccaaatggcgcgattcaagtggcaaattaaagctcttttcaatacgcatctaagtgtgtcttaccccctgtaattctgaagttttggtcctcaaagtttccttgcatgctagtgtaggatttcatagtgaattttgtgcaatttttctattattttattgtattttaattggacctcctttccaataaaaggaaagtttccttagcttattattcacactttacattttttctacaaggttagagcttctctctcttcacactttctttctctagaaattgtaaagtgaagctagacttagccattttttcttgagtgcccttataaggtaattgactgtttgtgataataaaagctctaagtagacataactctattaccttcacaataaggagagtgaactactataattatggtgtcctctttttactttatgttcatacattcgttggccgttactgacgatacaaagttgatcgtttctatcattcaaaatatatcactaaaatcatactttttttttttttttttaattttatatcaaatttttatattacaccatacaacaatttctctatctttcttcttttgatatttattttaattaaaatataagaaaaaaataataaaaaaagtaattagtaggagagagaaagaaaagaaattacaaaaaaatattattaaaaaaatgtttgaagaagctttaaagcttctccacatgaagagaagatttaaatgatctctattttaaagaatttgtttaagagagctagtggagcttggtttatgtcattttctataaatttttaaagaacataaaactttaattttttttaagaatcataaaaattcattttgttaacttctaagtaggggtgttcctactacgagcgatgtaggttgtaacctactttttaaaccaaaccgcatatatagtttttgtaatttcttaaactgcaactataccgcgagattttaaaactgcaaaaatatattgtaaaaatgcagtgcagtgcggtttgattaatttgtactattatcatcttcaaacattataataaaaattcaaaaattaatcttataaattaacattaaaaaaaaatcaatataaaaaagttttaaagtcattacatacatactaatcttaaatcatcatattaaattgtatctaaaaaattatgtaatatattacatagatttgatcatatatttaaaaattaaaaattatattataaaaattaataacttttaatatatagtgcggtgtagttttagtcgtaattattaaatttaaaattataaaccgtactgcattgtatagtttggtaaaatacaaaccaccactgtaccacactgtattttttatgcagtgcaaataatttgtgcacattgaacgatttgataaatagcccatgttccaagtaagtgcaaataaaaataaaaattaggtcaaggtaaaagtaaaggtattttattaatatttttctctttttttcttaatttctaagaaaagaaaatttgttataaaataatataannnnnnnnnnnnnagatgagaagaaagaagaagatgaagagagaaagag

SEQ ID NO: 117637 - DNA, 1577 bp, Cannabis sativa
ccccccccaaattctcaactgatgatgaccagaccgcaagtcaatttttgaaaatacagtcttctcctgaagctgttcgaacaaaccatcaatcctggcgaatggatacttattttttgtttgtaagcttgcttaattcctgataatcatttcatattcaaagggaaccatcctttttttcacaaataaaactggagctccttaagggaatacactgggtcgggtaaaacctatatctagcatcccatataattctatttttacattcttgaattctgttggagccatcctttatggcactttcggtacgagttctgccccaggtgccaggtcaattataaaatatatctctcgttgtggcagcaatcccgacaattcctcggggaaaacatcagtaaattctcttaccactctgactacctcaggcccaaatgtctcaggtctgctgaagtcaatcacaaccgcttaaaatcctatgcattaactatgtagtaaacccttaaaactggaatattcgggattcaagacccctgaacagatccaatataaacaaatggatcttcgccccccgattaaaaagttaccattttccacttgtaatcaatgcttgctgaatacttggacaaaaaatccatcccacgtatgatatcaaactttgttaattccagctctactaggtcagcactcaactcactattttcaaatccaactggcatagacctaaattgccctttggagacaaccaatttgcctgctaagcagtaggattccaaaccctttctcaatgaagtcacaaggcttacccaattgatcaattactcatgatgccacatatgagtatgtagccccagagtcaaaaagtacagtaaataggaattattgaaaaagaagctaacctgttaccacataagaactggtcacaacatcgacttgaatgatagcaaacacccgaacaggtatgggttttgcttttttgcttctactcttccttctccgcctgagggcaatctttcttaaagtgcccaaccatgccacattgaaagcatcttttctgattgcactatttgaaatgatgtttcttatagtgaggggcactcaaggtatgaataatcctgacgtccacctcaccctgggctcctcagaactttttgttctatctcaaacaaccagattccagggtagtcttactttttctaatcagtagtggaatcaccactatccctaccatttctagatataggaagagcaggggtgtcccccaacatttagagtcccacggggctccagaggaaattcactatactctcggctcgtaaggcctttcaactaactcaacatgagtctttgtgtaatttgtagtgactactagattatatttaatcttggtatctaaatctgccaagtgtttttcttccttactgaaattcatagctacttcacccataaccaagttgacttaacgatcaaactttgttgtgtagccaattaataacatattctcttcctatcttgttataatacctagcattgagcagatcccgaatcaactttcctatttcatcatttctagtttccca

SEQ ID NO: 117638 - DNA, 3065 bp, Cannabis sativa
  modified_base (26)..(27): a, c, t, g, unknown or other
  modified_base (2451)..(2458): a, c, t, g, unknown or other
ttacattgaaacagagttttatttanngcataaaacccaacagagtcttcttttcctttttcaagaagataatacaaagagagaaagtgtgaaatgggagtggaagtgaaaagttattcaagtgagccttatataggttctgatgagaatttccatccaaaaacttagtgggtggttacactacctacaaaatttccatgcagaagatcaagagttcctcagtgggaacgtgtgctgtaaaagatcatagtaattggaaaaaaagcaattctttgtcatgaagtgggacatatgagaggccaagtacctcgctggacataagctacccggttaagatttcaacagtcagagatggagttggaaagtccctatttagacaaacatctgcacagggacttgggggaaaatgtcatcctaattttcacccacatgacgcggcatgtccacatagacaagattgatgccacgtggagaacatcctatcaatagatgagcaaagtcaccacgaacaacttatctgtagaccaaggatccaaattctcaagtaggacaaagtgacaagaaaatgtccaaataggagggtctagctggaacacccttggccgaccaaaggagggcatgtgctggccaacattaaacaaagggtaggtcggccaacacctataacactgccagaaagaagcccgattgattagggtttctgtatctttttcgttgacagaccataactcattctctgttgtgaatccactccaacaacccacaaaaataggagttcaactctaaatatctacctattctttaggagcaattaagtgtttatttttgtatattaaatatatgtaaaaggagtaatatctccccattttaagagatgttaaactattttgaatctagatcttttgtaagctttaacttatataaagagcattaggtcagaccaaaaacctaagttctaaactctaatcttgagaccctagctctctttctcccttgaatgcccatagcattgacactaagtctgtgtccttatctcatctgttcgagatcatccttgcattgttctcactattgtaacattcatagagagccacactagaaattacaaggtaaaacttgtaatctgtgtggtatgatctctctaattaatacagcagaaaagggagtaggtcattacccgctaatcacggggctcgaacctttataaattgttgtgttattttctttacttgattatgttatttacacatggggattttgatcataaataaggttccactttcagttgaccaactctgaggtcaacacattcacccttcagggccatcccgatcactatcctaattctagtttttcccagaacttcttattctaactcgagccactagatattgctggtgtaatgccctaacaattaggcatgctacgctaaccgattataaaaccctaatcccctaattcaggataactagaaggataagtgcgagaagtttaaacttcattttgaaccagaatgaaaataaaacttgtagtaatttaaactttacaaacaaataaaagatacatgttttgggatcccgtaaatattttcacaaaatattacaagtctattttacgagcctacctaagcgacaaaatcaaagttacacagtacatcactggtagaccataaccggcttagtctagtgtggtcagaacatgtaaacgcatcaccaagccctcgtactcatggctgatcaccgactagttcaccctttcctgcacagtagagcacccgtgagctaagcccagtaagactgtataaattaccatatacacattagatataaaacacataattaatggtgccaccgcactatttgtctatttgatatacacctgcgtgatacgctcacatgcctatatatgtctatgtggcatagacccacgtgttaggctcacacatctatttatgtttatgtagcatagacccacgtgttacgctcacacgtctacttatgtctatatagcatagacccatgtgttacgctcacacgtctatttacaataaggccttagtagggtttatctcggttatagttaccgagtctaacctgattatgccttgcccgtataaccctattcatatatatatatatatgtaatccacacattacattctttcagtggtttatccttgtgatatatactaggtctaaaccaattatgtcttataaacataactcttaacataaatgtatgcccatcttagggtaataaccctaacttgtatactaaatgttcactcatataacatattatagcatgctcaaaataacatctattgagggtaataaccctaactcatgccttcactggattaacaatattaccatacatcatcgctttcttaccttaataatattctagggtaataaccctagactgcatttaattaaactcaaggtactnnnnnnnngagtctagcttaattatgccttagtcgtataattctttattccaacatattaagcatggcataacactcaaaaatattttaattactagggtaataaccctagaccatatttttttgtgaaagaaacccctagaccatataaccgctcattttagggtaataacccttatcatggttctcaattaataacaacctcaatatataatatgagcgccactatgcttaaatctaagtgcaaactactgtcttacctgatgtcctgcaattggagattccaattccccgggtgctcctgaccaagccccggtaatcctagtcacaaatttccaggattcacaaatagggttaatccctaaatccatttccataacatataaaattggcattcaaattacagataatcacatagatctcggaacgatctttcaaggatagaaagaacgtgccaaagggagtcctgagtcaaaagttacggcgaaaacaaaaacccaaaaaaaataataatttaccattatcatggtcgcgaccagacctatgatagtcgcaaccactaggtttaaaaacccagaaaacccagttttcagcttcgaaaatatgccaaactcac

SEQ ID NO: 117639 - DNA, 912 bp, Cannabis sativa
aggtaaatttaattaattgatgaataaaagaggcatttttcaacttataactaaagaaaaagaaaaataacaaatttaacaattaatacaaaacatatctttaaacacaaaattaattaaatttattttacaattgccaaatgttactgtttcttttttgaaaaaggtaatcaaactttattaatcttaaacttctattaccaaacaagaaaataatatccccaaactgaaaatgcaattaagttataaactataaattcttataaatgtactatgagctatttggtgaacctttaataaaataaatagagatattttatgaattcacaagcaaacttcttgtatgactaaaccaaacaaagaaatcattttaaatgattttcgtaatgcttgtaccaccgtcaaacaatctatctcaagaaccacatattgccatatttttttcttgaatctaactcaaagcttctctcacccccaattactttagttaactgagaatagaaaaaaaaaactaaagaaattatcttgtataagaatacattaaaaatattatttaaatacgagaatattttaaaaacaaaaaataaaaattaaattacatttttttaaatttgagactaatacaatataagaccataatgtaatttgcatgtgagatacacatgacattatttttttttttgatattgggaaaggaaattcaaatttgaaacattctctttgtgaggagaagtgtgaaaccattaaactatgtctatgaccactacgtaacattacttagtaattagtatattgaaattttaaataatttaaagtgttgaaatcagagttcaaataaccagttgtatgcaattatagtagactacttgaacttttttttttttttttttttttaagcgtttatatattaca

SEQ ID NO: 117640 - DNA, 1829 bp, Cannabis sativa
gctgcttacaaatataaaattttgagtacttatgctattatttacccttatttcaatagtgttaaaatgataaccaacttaaaaaaatatatggtacacttacaattatggatgtttacaatatgaacaaaaatatgatcttttttttcaaaaatatatatattttataggaaaaataaaaaaaaaatggcaaaaaatagttaagggtaactacaatataatttttttgtgattaaaaatatataaaaaatgatattagtccaaagtatcctatttggtaactagttattttaaactattttccccacatttttttagctctttttcttttcataaaataatttttttttaaaaaagccacatttttataaacttgtgcctataaaataacaattaaaataaaaattttcctttttaaattaactactcattatatattttatgaggttttatacaaataaaaatatgaatttagaaaaagttatttatggaaaatatatatttatatatataataaagaagttaaaaaataagaaaatttacattaaataccaatttctttccaaattttatatttatatcttgaccaaaaaaatttcatacaaactacactagaaacttatataataggtgcttaggtggttagtctttttgtggaggaagtgacagagcatcaaacacagatttaatattgggtaatgaattttttttgtttaatcatattgttggttgttatatttagtttataatgttattttgatgcttgatcggttggttattactgtttatggtattttttatgtggaaatggtcgttcttcaagttttctacatttttttttttgcttagattgatggtgcctgataggggtgtgatggtggtcgaatgattagttcagatttgagattaggaatgatgtctatatcagtctgatagggtgtccgatgttagtttgattgtttattgttgaagttgggtttatagggtctgatataggttcgatgggtggtccgatggccattttgctttgtgactttagtggtcaggtccaatgttacgttcaatggtggttcgattgtatggtccattgattttttgttgaatttgatttgagggggtctgatataggtccgatgatgtccaatgtttgactgatttatggctttttaagaattttttttatcacttttctgttagattcttgttttaaattttttatagtgtgttgttttttatgtctgtggatggcaaattcaactaattttgcattcattatgaataatagtgtttgggagcttgagggtagagattgatttataactgagctaaaaatttgacatacgagattgatacgattaacctactcacgtttggttgatcttttgtatgaaggactcgatgttgacaaagttcagtatgacttgaaattggaagtgaattacaagtacatgaaatggttaatgtatcaccctgaagttaatggaaatgataagcgtctaaggttatttttctctatgcttgcaaaggagccagatgaatttactctcttatttatgactttggtgaagaataatttttgtaacgatccttgtcccacactaagtattgataaggatacccgtagcgagattgggagtttcattctagaaataaatctggaggtgttggtggtcgatgtgttacctgaattaaatactatgatatcgacagttgacattgtagcactaatgccctttcatgatgattttggtgatggtccgaccttgaatgaaattttagaggtaataatgatataagagatgactgagatacagaggtccctactactg

SEQ ID NO: 117641 - DNA, 2750 bp, Cannabis sativa
cggcctgaagaagttctctcccatataaaatgccttgccatgtgagagaaggggagtgaccatgtgaagcttccaaaaaagatgtgtgtggaaagtatcgtcctttgagtatcttgcttaacaatgaagacgggtgattaaggatcctccagctttgtttggctaaaagagcttggttgaaatgcacaaaagagcgaaatcccatgcctccatttgattttgttttgcagagtagcttccaatttttccaatgaattcgagatcccgattcagatttaccccaccaaaagtttgccatcattgactctagttgattgcaggttgttgttggtaaacgaaaacaactcatagcaaaggtgggaatggactggaccaccgctttaagaagcacctcctttcctccagctgagaaaatcttttcactccaactattcattagtttccacactttgtcttttatatccccaaacaactcttgtttgttcctaccagaatatgatggcaaccctaaatatctctcatgacactcacttataggcatagcaaggtgtcgatgaaagaaaatttggtttgccaaagttgtgttgggtgaaaaggataatactgatttgtctggatttagtaactgtcccgaagctctatggtacaaatccaaggatcttttaatagccaaacaagaattctcagttgcattgcagaaaagtaggctgtcatcggcaaaaaataagtgtgaaattggagcagtatgacgggttagagaatagccttgtagattgtcgaccctttcctcatgctgtaaaagccttgacaaaccttcagaacagattaagaacaaatatggtgataaaggacaaccttggcgtagccccctagatggtgtgagtgaaccagtaacttcaccattaacttgaaaagtgaatcggtttgtagtgaggcagctcatgatcaaagatatccacttagaagcgaagcccattttctccataattgagcgtagaaagcgccattcaactcggtcgaaagccttgctcatatcaagtttaagagcagcggcacctttacgacccgttgttctgtgtttaattccatgaatgagttcaaaggcaactagaatgttatctgtgatcagacggttgggcaggaaagcactttgagtttcagagatgacatgggggaggacatgcttgaaacggttcaccaaaactttggtaattagtttcgagatgacattgcagagactgataggacggaagtctttcacaacttgtggcctcttaaccttaggaatgagtgtgattatggttaagttaagaggggtagggtctacgccatcattgagtacactaaggacagcagcagtgaccctttcccccacaatttcttaattctgctgatagaacatggctgacattccatctatcccaggactcttgtcggcacccatcgttttcaaagcagcttcaacctctgaggcagtgaaaggcttggtaagatcatttttcatgtcatctatgacagttgttggcaaagtatccaaggtggtagcaagagctgcatcatcaattgagtttgtggtgaaaatttcagcaaagtattggcaaattgtctccgcaatatcccttttagaagtgaccgtggtgccatcatcagtcttaagggaagtgattttattattagcacgtctggcattggcttttgcatgaaagaactttgtgtttttgtcacccgaatgcatccaatcaacccttgatctttgctgccaataaatttcctcttgctccaaaagatcatcaaggacattttcggattgttgcagatttgcaattgaagagcttgtgtggtgttcaacattgttcagagtggagacctttgattgagcatcggcaattttcttcttcattctaccatacttgttgatgtgccaagtttgaaggcgagttgcacatgaatcaagctttgcaataacatcagaaatggggtctgaggcagcaaagttagaccagcaagcagcgatgatgtctttactttcaggatccgagagccataatttttcaaaacgaaacctgctccttcttttctcaactatgtttgcattattcagttgttggaattcggctgtaatagctctatgatctgagaggtgaaagtcaagatgtgttacttgtggttgttcgaaagcttggttccaatgagtattaacaaagcaccaatcaagcctctctttaattgtagcaatggactgtctattcttcacccatgtgtacttgtccccggaatatggcagaatttgaagttggcagtggtctaaggcatcccgaaagctatttatttgtgcaccatttcttgttgaaccaccatgtttgtcttgagttgacaaaatttcattaaaatcacctattgtaagccacgacaataatggtgcaacgtcagccaatctcttgaggagtaaccatgaagcatctctgttttgaagagttggctctccatagaaggcagtgaaatggaaagtattgcagctattgtaagtggcaaaacagtcaaaatagccacgaccaatattattcagagagatgtcaacagtatcattccatagcagcatcatacctccacttaaaccaactattggcatctctaaactattattaaactttaaggattgtcgaacatgagaaatagaattaacacctagctttgtttccataaggaaaacaatattgggggactgttgttgaataagcagtcgtaattgc

SEQ ID NO: 117642 - DNA, 2055 bp, Cannabis sativa
  modified_base (1650)..(1650): a, c, t, g, unknown or other
aatactctcaccatgttagtaataataatattattacttaatacaatgaagtttatataaaatacataataataaaattcaatacatatataataaaggcttcttatttacaaatacagacaacctatacgttttcgaagcttatatattaattgcatgcaatgctagctgtaagatatattgattgaacccaaattaaacacatatacaaatatctctctatcctctagatattatataagctttatatatataaatatatatatatatatgtgtttgtgtccacaaataacctagctagctaactgaggatcgtctgtccgaaaatcacatcctcttcgctgtccaacgaattagagaaagacacgtgagttaataattttgtattaattttaggggcacagaaatattggactagacagaataataatttaattttagtagtccaatatttggcccgccatgctgataggattaaatttttctctctttttatggtttttaattttgtaaatatttttgataaaaacaatttaaatggaagaatgaaatttttatttataaatttattatcaaaattttatttatttaaatagatgaaaatgtatagtattgagttatcatggataggctataaaaattttaaaatgactataactaaaaaataaacaaatactttattctaataaatatatataatgtagtacgtacaaagcttattttccttaaattattatacatatttttttaaaattttaaaaaagtaatatttatattaaattaataaaataattagtttaaaatattactgacctacttttatttttttttattatgttaaaacatgatacattatttataatttccatacatattatatatttatagatgatatattaatatttcttttacaaaaacctatcatttaatattttttattatttaaatttaaattttatgttataattattaattatttaatatattttaaatttaattgttatttatttatttattagtccaatatattttaaaaccaaacacaaaattatattcagcataatccaatttagtctaatcctatcattttttgctaaataagccaatctaatctaatctagaataaatgctccagacaatcttcaatagatacttacagttagattaataatggtcataatataaataaagaatttaaaaataatttttcaaaaaacatcatctgcaaggaaattattaaatgattgatcgagacacttaaattatatatacatattttttatatatataatgatgtgcaattcatcttaactatataatatatgatctcacttaagaatataaatagctaatatttattacacattactgtatgtaataaatgtgtacaatttaaatatgtatctctttgcataaataataagaaaagatttgctggcctttctcaacaaaacaaaataaacagatctaaaaaaaaataaaaacttgttggcctgcctcacaaatatatcctttgcatcacaaaatctgtttcgttttttttttcaataaaattgttactttgtttaaaaagcaatgaaattgttacttatatatatgatatcttgccaccatattcaaatacacacatatctatatatatatatatanatatatatatatattagtttgatagttttctttttaattaagtttaattagatgatattaagtgtttaattttattaattaaataatgtaatttttttttaactgttaaaatgagatttgacattttaatttttgagaatttttttaactattgcgataatattagtgtatatatgcctctaattagtacttcatataatcatgatatattaagttgaacttaaaatactttagattttgatattagaaaataatttatataaattatatttcaagatcatgtgtctttaaaaatcatgtgaaatgcatattgataaaattataaaacttattaagtttcactccatttatatattgatcgaaaaaaaaagaaaaataaataaataatataagcacactaaatat

SEQ ID NO: 117643 - DNA, 859 bp, Cannabis sativa
taactttaatattaataaaaagataatatattatttttatatattattagtaactataatacatgcaaaaaaaacttaataaattaatatatatgtacaatggtcagtttcggttttttcagtcgttagcagttttttcagtttttagtttcgtcggtttcggttccaacggtgttcggtaggtcggtttgaatggatttttcagttttttggattttatgctcactcctaaaatcaagggaagagtcaacttcccagtcaccagaacgagcacgcttgagttaagaccttgcagaaccaaccacagcttattggggttgaaaggaaggccgcttaactctaaaagcagatgccagacccttaccacgtacattagaattaggttggccagtaggagggttagttcccatagcagatgaatcaccagcatgggtaataccaccagcacaagccataaggagagcagaggtagaagaaaaagtttccatggggcaatcagcacgatcagcaacaaccaaagagtcagtggagtaggaggtaaaagcagatggacgcaaagaattatcaaagttggatctagtaaatggaagggtcatagttgaaatgttgtggttgaaagggctaggaaccatcacagcaatggtggaatgaggtgaaatgaattgagtgaagaagctagcactgagattcagaaaagaagggaaagtaatagaatgacttaaaatatttccaggaggtagattaaggttaacagggttcatattaactattgacctcgcttttagccaacgatagtgagtctaatttagtaagcgacaagtagtttataacgattgaaataaaataaagcaatataaag

SEQ ID NO: 117644 - DNA, 1256 bp, Cannabis sativa
tggctggaggtatttcgatcctatgttatagtacatatatgttttattaattccgcattttatacttaatcatatatgtttcagtctatacatataaaatgtctaacaatgaaaccttacattactaaagcataacacgcataataaaactaacacgaagaacagataaaataaaatggaacaatcatcgaccgagagacacgttgctcaatctatggtgatgacatccggaacatactcctcgccagtgtggtgacaagctgagtccatgaacccttcaatggtacaaatctcgtcgcttgccttctgttgttgttgctcttgcttaaataggatcttgcccagagccatgcaccgttgtccaacttcgcagcaattagcgtgtgcatcacgccttgctttcttcttagccagtagcaacctcctctcagtcatcagcaacccctctagaaccacacagttgctgcaagtgttttcgtccgtaacatcgattcagcgactgcgggaagattggcctatctttgatgtgcttggaggtggggaacacttcataggagtgtggtattttgggcttgcatttgttttgggagccatgttgtcacttggatatatttaaaaaagagaattttttatccttctcttcattctgaggtttatcatgaagagggtatgccaatatttataaggagaatatatctacagtatattaaatatattattattataaaaatattacttttgtagccttaaatcagaatgtaattcctcttgtgtggtttcattttttgatcatcacaatttttttggggataacataaaataatattatatatttgccaagtcacaaaaattagaaataaaaacatatatttatatatgatattacgtaccaaacaatataacttagcagtaccaccttgaaaagtgaaatacttaatataacattacaacatcaaacaaagaaaaagaaacacagtactacaaccatcaccatgtatacaaagtgaggtcttttgttttatatgaaactaggagtacacaacataaacataaagataagccaataacatcgatcctcacatattattaagtttattctcaatattctgcaagagtttgtcaaccttagccaacttcttctcagtcttatatatttccacacactactacaaaaatcactatttacgtcggtcaacgctactgttcattgcgttgaccgacgttaatagtataagggaacattgcagcgtcatttt

SEQ ID NO: 117645 - DNA, 1049 bp, Cannabis sativa
tattttaattattaattcaaataaaaaactaaaatattaaataaaactaacaatacgtggcttggcacgtaacaatcacctagtagaatagatatatgtgaattcttagtataacaattaaattttaccatgcatgtatatttaattatgatatatttatcattccctacaatatacaagagaggaattagtatatagaataaaaaaaataatgaaacaattgactcctttaaaaatttagcaaaacggaaatatatagaaaaaaaataataaagaaacaattgactccttttatatggtggggaatgataaatatatcataattaaacatgcatgcattgtgaaatttaattgttatactaaaaaattaattgataaatagaataaaataaaataaaatgcaatatgtagtataatttttttttaaagaaacgtaaattaattttttaattgttatacaaaaatttgttttaatacaagaagttattatattttttttccttttatttgttttcttaaaattgttacaaactttttaggtaaaattatattataataacttcttatactaaaaaagaaaaatatatcaaaaattagtaaagttaaatttgatataatattattacttggttatcattaaataaattaaagatataattattttataagtataatttttttttttaaatatccgtcggaaaacgcgaattatttactagttaattgataaacggaataaaagaaaataaaatgtaaaatgtagtataaacttttaacgtaaattaaaaatctaaaaacataataatacatataatttaagaggaatatttaaattaaaatagaatttgaatttattattattttctattttgtctttttgaaattgaatgtggtctgttgaataaaattaatttaacagtataacaagatatttatcttctttaattttatgaaaaaaacatttaatttatgcttaagcaaaatatattatttgtgtataattaatatatgttatattattttataatataataagtgtagattaaaat

SEQ ID NO: 117646 - DNA, 1441 bp, Cannabis sativa
  modified_base (1391)..(1406): a, c, t, g, unknown or other
gagctacgtatgtcactatcgttgtccgatacagcaaacgataagtaagaaacctatctgcagtttcaagagtaattactcataacggtaatgactgttttccaactctcgatcataaccgaggcataacaaacacataaacaggatctccattataattgagactataacaactagaatcgttaattatttaaccataagtggtgcgtatcactttttcttacctcagtccgaaaaatagacgtgcgggccgacttgagtggaaacagagctggatgatcccgttcctatgtcacgataaaaaaattccgataaatacctcaaaattgaaattccaagaataaaaccctaattcccctaaactggacataatctaacttccaacaatcccaaaataggctacacaacacataaataacttaaaacaagtactaggtacaacaccgagtcaaaatagaacttgaagaaaaccccatgaattccccatacagggcaaccggtcgaccgcgtctggtgcaccagaaccaaccggttgaccgattctggtagactagaaaacctcgggttttcttctccaaaattgaaccaaatctattccaaacctgtccaacacttccagaatagtatcatactataaatataactcatccaacacattaattcacattacttcagtaaattacacatgacactaagttagaatcaaagtttggatcaaaaacccatttttcttccaagttcagctcaaaaccattaactcaatcttaaaccaacttaattaaactctagatatcatcaaaatctcaataatttcatcaaacatgaattcataaaaccctaacttaaatttacatctataacttgaaataaaataataataaagtataaaagcttacccctacactaagataacttcacttcttagctaaatcttccaagaacttgaggaacaagctggagaaaatacttaaatggtagttggctccttagggttctattatcccaattttggcactttgacgtggcatcacacaatggtgacacgtgaaatcaactccatgtatttggtcgcaagagatacgccaaacagagcaccacatatattcgctcggacgaagccttcttaaccgggcagtgacccatccgtccagcacgccatcacttagcaaattcagctttcgcatcgtgagtcacctataaaatccctataactttcggatcagatcatagagatatggcaagctgtctgaatcccttgattagtgtattttgtatttaatatgaaatctttccacttatatcaattgtaatcagaagagaaattcttccctcccaagcttatagccttataaatagtgattcatacacactgggcaaagggtcgaaagatnnnnnnnnnnnnnnnnttcagagatactattgtaagaactctaagaaaagg

SEQ ID NO: 117647 - DNA, 2048 bp, Cannabis sativa
aataaataaataaattatttaaaaataatttctttttttctttttctttcttttcttcttcagcttcttcttcttctcactaccagcatcaatctcaaatcagcaccaccaccaaaataactccatttatccatgaaaacattaaactcagacatgagaaaaagaaaaaaaaaaattaaagtcgccccgatttgaaacccctgcgtacccaaaccctttgagcccaagccctcgcgaaccaatcacctaaaagcagacaccatcgacccctgcaaacccaaactattgcaacctagaccagtaagaaccttcgtcgaaaaaatagtaaattttcttctacgtattttgatatcttagatctaggaatttgtaggtttttgtggtagctaacagttggagctacaaatctagttatgaaaagatctttcgccgaaaaaaaatggtgggtcacggctggaaagttatgagtttctttggtatgggattcaatcgattttggccatagtggttgtggaaatgcgtagaaggaagaagacaaaggagaaagagaagagaaagcgtcgggctgatttctggggattgaaaagaagaaaggaagaggatgactaagaaaaaaaaaagaaaaaaaataaattgataattttaaaatatttttttagttttattttattttaattatttttaattaaaattattatttgaccaataaagcttcaacacatggcacttttgaataaattaacggaacagttaaatttagaactaatggacttacaaagggtgcgaccttgaggactattgtatgttatctaaattttttattttcacattttcatttgcattttaaagttttagtgatttaactctaatgaatatttttgaaagaattccacaagatttagaagctattgtaggtgttgtacttgtggctatatgaatcactatttcattcactttgaattgtgccaaaattagtattacatattttatgtgtggataattgataaatttaattttacataattattgtaattttaaatgatagtaacactcctaataaaataataataaaaaaaatcatttgttatattaattttgtaaattaaaattatttgcagtcaaccacttattaaaataaattatttgtattgtttgtataattcttattcaattttataatatactgatttatttgtagtggttgtaaaaaaatttatatatttcaatattagttattgtcacaagtttgtagttaaatggtattttttttttcaaatttacttttcactttaaaaaatatataattataactaaaaaaattaagaaaaaaagtcatttgatgacatttttaatgcgtttaaaaaaatatttctgtgacatatatattttgagaaatttatcttgttgatgcttcaacatgttctcagaaaattattttcgttgacgcttcaacatatacatcaaagaaagtaccatttgtcgacacaaaagcctaccttcactaggggtatttttctcctcatctgattcaatctaatctaattagacctcaaaatccaatccaatctaattactagttggattggatcagctttttaattagatatccaattatacacctaaaatttaaggaatttttacaccacataatgaaatttccaactttttttcttttttactgtgaggcgaaattcttttcaaaaatactgtattttttatactgtgtattgtgttaagtttttactgttgttctaattttattttttagttgttccactgttgttttaattgttctgttttgttattttacggttattttataaaaagatagtaattttataaaaaaattatgtgtgacaataacattatgaacttttgcccaaaattcagcatttttataaaaaccctaaattttaatattaacttaaaaatatgaagaaaaaaaatgtgtaaactaaatattactctttatttaagtgtaatatacaatcgttacaagtgtaatacaactaaaaattttaaataattaaaataataacatttctaag

SEQ ID NO: 117648 - DNA, 641 bp, Cannabis sativa
gcttaattatgcaggaaattcaaaattgtagctcattcgacaaaattttctccactttctagggaaccaaacataaagaggtgaaagaaaagaggaacattacgatgaagaggaccggatcagaagtcttggccctaacggcggcattgacggcgtcctcaattttcctagaaagcatgtgcttgtccagatactcttgtaccgacatttcgtcgctgcctttatcgtttctcttcttctggatttgaaatcgatgaagaagcgatttctcgagctgtgtatcgtcttcttcgcgacggtaaaagagttctccggtacaggctcaggtgccgggttttcctctctttcgagtgagctgagctaagctgagccgaacgtgttggatcgtcccaaatcgtgtgattatttgaaatttgttgtcgtttgagattaaaatgatgctactctttcttttatatagttgtacgttgagaataaatcaacgacatgccgttgagtttcgccagtattcattttgtatttacttttttcttttgctcaatagtattttttttttcttcaatggatagtaagtaaacgtttctttttggctgcatgatgtatcaaacactttttttttttttttttgtttttttacggaa

SEQ ID NO: 117649 - DNA, 2544 bp, Cannabis sativa
attctattttaccagcgcaatactaacttttgccagcacaaaaatgtgctggcaaaagtgatatttcttgtagtgattctatttatgaatttctcaatttaacgcaatctacaaacacttaaaaaagaattaaaaaagaatgtcgaacctcttccatgtatgatgagaggatgggaattaggagcaccgtaaaaggacatatatatgtatatatataattatattataattaatactataagtatacttaattatatttttaatttttattttaattatgcatatttttaatttttaattgtatatacttagactttctttagatgttatattcacatttctttggttatgcataagggtttaactaacccaataatcatcacccatgcgaaacacatttcttttcttttttttttaaaaaaaaaaaaaaagaaaatagagagaaaaataaaaagaagaaaagattattggcactatatataagagaagaagatattaataagagaataataataaaagaaaaagaaaaaactctatataatcaagaagaacaattaaagagtactagagtttgaatatgaagatcaatacaatactattattattcttaattctcttattaattttttctttccattgtgtgaactcctcatcgtcattatcgtcatcgagcaattatgccgttatatttgacgctggtagctcaggcagccgtgtccacgtttacaatttcgattccaacctcgaccttctcccctttggaagggaactagagatttttgtacaagtaaatataattaattaatattaatgtatatgcagaaaaagccaggactaagttcatatgctagtataatgtgagtgcagcagcagaatctttaatggatcttcttcaaatagctaaagatggagttctatcaacatcttcattcctccacacctgttagggttggggttagttccataattttatttatttaactaattaaagcaccaaaatattacagtcagtgatttctaatattttttttttactgtgagtctcattttaactagatataattggctataaaatactagtaatattttggtgcattatttatatatctataatattattattcatatatatagttatgtaattttttttctatactctcctatatataatataatatttataaaaatatatatataataaaaaagaaattagaaagaaagatgatgatgatggataacaaattaaggcaggtttatatatttatttatttttgtttgttaagtgaaatattatatgtacatatatattttttctatatatatatatggtaattttttatttaaattttttgactaaaaacataaattttagtagtcctaataaaacttttatgaaaataaataatttcatgcactactattattttcttttttctttttatattgatactataaatatataaattaatgacaattaaaatataggcaactgctggtttgaggtcattatctgggaatacttcagaagaaattttggaagcagtaaggaatttttctgatccttgttcttgtttgtaattgtataatatattattaaaaaatcaatttataataattgaagagtttgatgttatttttatttgttatatagttttattaggttagaaatcttatcaaagaaaagagtgactttaaacttggagatgatgatgcagttgctgttcttgatgggattcaagaaggatcctttttgtgggtatgaattaattatgatgaaatatttactaaattaattagtttttgtgttatcttatttgcatttatttgacacaattattgggggtcccttttcaattcaatttatttgttttttttataataacttagaagtcattatcataaaataaagattccatttttttatgtattattttactttctaaattttgtagttggttagaaatgatctcaaaattattgaagtattgccgggtcatttttagggaaaattttaaaaaataagcattttatttgagaaataaaataaaatttaaataagttttcaaatagtttttctagcaaaagaaatttattggaattcttatcgccctactgttaaaaaaattaaaagaaaaagaaaatggaggcctcttcggctgaggctgaggggcctaccttaccttaaaaatgatcatgcattattataaaattttattgacacattagaataatatatttaaatcttttatgactaaaaagaaaatagaaaaaattgcatctaacaactaaaatttgaaattaattgccacaatattgttattcaattaatttgcacatataccgtttcttcaattaattttattgtaataggtatatacctataaaaatgcatatgttttctttcctattacactgacgcatattctttactttacttttttttttttatatactaattttctttttctcaatgcatgtgtactaaccatttttttctctctcaatatatatgacacatcatcatatatacaattatactcttat

SEQ ID NO: 117650 - DNA, 1398 bp, Cannabis sativa
aattatatataaatatttgaaaaggggatagtaataagaaaaactaagataataggatatatataacataattttgtaataccaaaaagctcaaagggattacactttaactacagttaaatttgacttaataataggaataaatatagtgtaagttataaaaatgagaagacatattcattatttgataaatatagtgtaagttataaaagtgagaagacatattcattatttgataaatcatgaataataacatgctcaatcacaagtataaataatgatataaataatgatataatgaattttttgcatagtttgaaatttaataacatgctcaatcatgacataccccttaagtgctctttagaaatctaaatcatatcaaacaaaagtttatgcaatggcacaagactaatttccacctatctatggtaaatggtcaattaatcatctgatctttggaacaaatattggtcaaaacgtaataatcttaagaataattatttcctccgatgaattcaagttgccatttaagctcaacaaaagacaacttattttggcaccatattttgtcattacaatcaatactatcatttaaacatgtcatttatatcttcctatgcaagtacttacttacaactaattatatgtgttgtgtcttgagttgcgataagagaatgattgattataataaacgtcgatgatgaggtggaagacacaaccttaatcaaaaatatcgtgttcaaagaaatattttaaaatattatctaatcgtcccacaaaataaaggtatcttattttaataattgcttttataattagaaatccacaaacaactttataatgtacttatcattttaattagctattttatttaaaaatatgcaaaatagtaagacaaatctaaatttcattatagaaaaaattagtcttcttcataaagaactccattttcatcattacaaattttacttcttcataatttgctaaaatatatcctcttagctaaacattttatataatataattctatcactaacacttttatatgaatctctcatttttctatcttaataaataaataatgttgtgtaacatcttttacaattatcctccgatattcacctttgtgaaataggtatttcaatcacacttcaaaacaaaatgtctaaaattttataaatagcatttaaattgttattgtatatttttttaaaatttttgttgagtagttctctttttcatcaattttattttaaaaaaacatacaatttctatgttacttccattctttttctttatttatcagaaaattgttagaatttattggggtcacaattgtatatataaaatgtgtgttggtcatcaaataaataagtcaaatttatgtggtctatt

SEQ ID NO: 117651 - DNA, 1037 bp, Cannabis sativa
tataggcgacggttttaaaccatgccttatactaagttttagtatagggcacgacttaaaaccgttgcctataccttgttataggtgacgtttttaaagtaaagtccacattagcaacggtttttaactgtcgcctattttgcccatttttcgacggtcggataagcgacagttatagaatcggacggaaatactttaaacaaatgtttaaaaatatcgaaaagaatcatttttgtagtggtgataagggattaagagatccttacatcggttatagcggaattaattgacttcttccatttagttctctcactcttaatcctttctgttgaagagtgtaatcaagaaagaactgaacctagattctcctttaggttgtaaaagactacacaaccttccatactaaccttaatactaccttgaaatgtgtagaaaaatacttaatactcaagcattcaaaatttgatgaacaagaataagagaattttgaaattactaaaatataaaacctcttatttaatcttaatttgtctaaccagagaagagttaatctattattaggctaagagatataatgttatatttatagcgtaggtctagggttaggtttagaattaaataaccttggccgaatcctataaagaagcccatgggtttcaataatgccattttgttataatttatcttttctcaaaaatactatttttgcattctaactttttaaatgttaattttatctactttgatatttataattaattatcaaataaaattatcattcaacttatttattagttagaccctacatggtctcttaattgacaaataaaccctgaatactattatttttctcaaatttatccttgcttagtgaaactcataaataagacataatcttacttagaattcaaattgattaattaaaaccaattaattgagactacaagacaatattatatcaggtaaagtggggaccatgagcctatataatcaagctttcaatcgataattctagaatttactgagtaaattctcta

SEQ ID NO: 117652 - DNA, 1484 bp, Cannabis sativa
  modified_base (1424)..(1426): a, c, t, g, unknown or other
gtttgtgaaatgcgctggtaaaagttacttacttttaccagcgcagtagcgaattgtgctggtaaaagtaacattttttgtagtgtgagttcctccacctcgcgccatgattcacaaactaaatacagaattaggaagaagagcttacaatcgtaggctttgatacgatattagctcgaatgagcttgaaacagaataggaaagaaagagaaaaggagagaagggaaccaactgaattgcatttcatcaaatctagttgttacaatgtgataatcagctacttatactagttgagattacaagagaaacaaacacaataacaaactaactaattgtgacaaagctaacgtcctaactaattgtctaactaactaatcaatacactaatcaagcttaatatgtatgttggcagttttgatattatgtaataattacttaccatcatgtccatgtgtctgtggttctgagaaatttagaaccatataaatctcaatagcattgatgatcggctgatgagtagatttaggagtttggtagagggtgtagtcaatttgtttgccactcacaggtgcaacattcgataaagtggttgcagttaagtactcaggactaaatggtttttgattattccactcctccattatgttttcaatgttttcaatgatgaagaattgtcttgactcatttgcttggagtttttccaactccgcaaagtgcatatatacatagtattcagcggtcggatcatcagggattaaataaaaggaaaacatatgatttttctcctggcctggacacatagcagttgccatcacacttggtgaaggctggtaaatattagaactggaatctattgccatcgacaatgatgtgagcaaacctttgcgttctgggaaattgaatggctgccatattcgatcataaacatcatctttgtacctaattaaaatcataaaaataatgtccaaaataaatatatttttgacaaaaatctgaaaatagaactcatgaaatcatcaccaactcattaattttaagtcattacggttgtgatattttttttttctgtttctaaatatgttgttaaaaatagtaaaataaaaaaaaaatataatgtgaaaaactcccctttaaccttttaacttttaaataagcatcaccttccatcatcctcactctcactttcacattcttcattagaaatataagaaagctcctcttcaaccgaaccctctcttcaaagttccacacactagtcaaggaaaattcccaaagcgttgaaaaatgattttttgaatgattcaagcttgaagatctccttttgagtaagttttctcaacctttgatgagttatttcatgctttaatgcacaaataattaagtaaaattgtggaacacgattagaaatttattggggtcacaannntgtatataaaatgtgtgttgggtcatcaaataaataagtcaaatttatgtggtctatt

SEQ ID NO: 117653 - DNA, 882 bp, Cannabis sativa
atccggtgcagccgcggcggccctacccttcctcatcatcattgtcatcatcagattcgaattcccttgtccttgatgatcaccgccgcacgacgacatccgatacggggttgcaacgacactattaacgacgtcgtttgcggcggacgacgtcgttttgtagttattataattattgtaagggttgagaggcaagagatagtagagctcaccagggttgagctcctcgctgtggaggagtggatcggagaagaggtcccggctacggaatatggcgtggcctgggaactcgtcggtgatggagctgaccgttatgggagcatagagctccattatgccgccgcttgaggttacaactttgactttgaccgcatctatttctgactctcctaaccctgctttgaacacacaatttcccattattatttgttaataataattttaatgatcatatatgggaggttaatgggtttctttggtcataatctttagtgtaaggagtttcttgagggtttcatgttgatcgattcgatagctgtgttgggccgacacaagaattccttttctttctaatccaaaattgtgtgtgtgaatatatatatgccgttttgaatagcactaatatgggtcccacttttccttgatcatgataaattattgatcactacgctatacgaatattgtaatatttatggaaagtttaatccaaaaaaagcttttaacaggaaaaaaaagttaagaaagaatcttaattttatatagatttagtcacatcccttacccagtagcggacccagaatttaaagtgagagggcgtaaataaatttaaaaagaaaatataaagtgtagttagtgggatttgaatctttaccctctaaccta

SEQ ID NO: 117654 - DNA, 1291 bp, Cannabis sativa
  modified_base (469)..(472): a, c, t, g, unknown or other
cgagtagcttcactttattagtactttagacttatgatttcatttgcatagccattttgatttcatcttcttatggcctattggccttgtagttttgaacagtacttgtttttaggcttaggtatttcatgtttgaacatgactatcttggctatgggcactctgtctttgaacaagactattgtttaaccctaaagcatttctatcatgcagatgtgaccgaccagatggtctctaatcttggctatcttcttattttcttgacaagtaagtatcgaaatttacttttctttatgccaggctgaagtatgtatgcacttaacttagagttaggtctagtaccctatactaagctttaaaatttcactacataagttctttgtgatatttcaataagttgtatggtgtgggtggccccaagtgagcacataaacttatagtctcttggtcacttgcaattcaccaagtnnnntagaccttgccttagaattttcttggggtgctaccttttgtatccatgtggaactgaaaaagaataaccttaagaagttagtcttattagcaggtggtttagacacaacatatttgaactggaatattgtttttattcattaattggtctttgttgctatctaacttacatatattgaactacaagcttacataataaaaattctgcttttagaaatcaaatggctaccactgcctgacatgccaagcagaggtcatcattgcagaacgatgggcggccatgccaaaagacaatgggcagtagctcttttactctaactcttattaataagttggtagaactactactgaagagtagcattctataaaccaatcacttgtagtacttgcagaggtgctctccattctgatatcttggtaggagaaccagctccatgttctagttgtaccttcctagcttgtaggctcactcgcttgctatctctgtcacttggtaggggccttccaagttgagttcgaacactcctattgttggatctttgctgtttaagaacactctttggagcacgaggtctcttatgaagaattttcagtcgttgacttgtttgtttaattgccttgcaaccttttactgataagcctgcaactttaggttggattgatctcttattacttctatattttcaagggattctccaagcatgacatttttgtatgctggtcatatgttttcatcatgtgagagggtggcaccagctctatcgataactgtaaagcccgcttagttaatttggaaattagcagttatttatgttaatca

SEQ ID NO: 117655 - DNA, 918 bp, Cannabis sativa
gagagagagagagagaggaaatcaaaatgaagaagagttgaaccttacataggttctgtagtcttttcccccaaaaacttattaggtagttatttttccacaaagatagccatgcataggggtagaagaccaatagttcaaaaatgggaaagtgtacagccaaaacataaatccccataatgaatggaaataaagccattttttgtcataaagtggacgatttgaaaggtcaaatattgggacatccattgctgcccgggtaaggttgtttacaagcaaggatagagttggaaagtccatatctgtacagatgtccgcatagggacttgggggcaaatgttatcctaatttttgcccacttgacgtggtatgtccacataagaaaaattgaggtcacttggaatacagtctgtcaatagatgaacaaagttaccctacacatcatgtgaattaacaagggttctaaatagttgggcaagaccaaaatggaaggaaatgaccagctaaaaggttctggccataccacaccctggccgaccaataaaacttatgtcccaaccaggccctaagagtagggtagactggccaacatgtgcaaggagcatagaaagagactgaacgattggaggggtttgtagaaaactttgtagatgggttatagcttgatttcaaatacgagacaactcaaacaatccaaaaacacagatattctccctcaaattatctacctattctttaaggatattagttatcttttttcatgacttaatatacaagataaaagtgttacttttcctattttggagggatattaacctatttgaatagtgatgttttgtaagccctaaactataaaaaggaccttaggcaagtagaaaagtgttgggttttatgcccttaataaaactcatttcaata

SEQ ID NO: 117656 - DNA, 2481 bp, Cannabis sativa
  modified_base (226)..(226): a, c, t, g, unknown or other
ttgtgttaaagtttcatgaatccattttttttaagtgctcaacatcacacaaagatgtgacacactgtaaataaatatcaatcgatttctaatattatttattcaactaaaatgttgttagaatttatgctctaaaaaatttataaaaaaatttctatttataaataggagttgtacattttcatatatacttaattgttcaattattaatatttaatattgaatnatttatatataaatatcagaaaattccttattcttacatgagattgtgacttgtattgtatacagagaattaagttcacttagccatgaataaaatgattagaaacacattaaagttttagaatcttaaatcaacggttgctaaggcagttcactgatactcgttattcggtgcaagtaatctcgatttagattattgatgtagtatgacatttaagtggatgtgttgtatataatagagattatatatgacatgaacagatgtgtaattaagttatttttatcaaatatgtcgtttactataaagaactaattcatgtcataaagatgatcagtagtaactcagtctaaatcctgattaattaaggagttcatgtttgtgaactcagatttttgttaataataaatgtagcttttaaataaaagtttactatttataatcaataaatataaataaaacactaagaacttttacatggttttgtagtttaaaatatacatactccccatgtccatcttatttctgagtatttctttataatgtgtttggattacaagagaattttcctagatatttactcaatcttgtagggtttttcctcccaaaatgattattttccatgtaggttctatccttatttatatgaattttaataatgccagttattctctttcaatcttttttttttttttttttttatgaataggatcattgtatttaattctctttcaatcttatctaggtaactattcatgaaacatggacaatccccacgtttcatatttacaacatgtgaataaaatgaaataactgctgataactacttttcaagaaatagttcatgttgtcgaggtaacatattccttccaactatatattgctcgcattcttcaatggttttcaagaatagttggttgcgttccacgagatgttagttaagatgtttatcctcgttattgccttttatggcagttcttcgactaatctttaagaatttcgagattggtcgctcctgacttattttccttagtcttttaacatactcatgagtatgtagatcaatgagttgtaagctcttttaagaactcgttatctaccattttccaacgatatagcttcagttcttgtatttttttgagttatccttgttagcttcctagatgatctaaggatatcgtcacctcacacttctgtgtattattgtcgttgtcattatggcacaacgcgagacatgtatctatttattaccgcttatccctagacaagataatcattgtgttgagtgtggatttagccaatcgacgcagagtttgactaggatcagattattcttatacgactgtcacatgtaggatgataataaatataaagacacaaagatttataaaggttcggcccctttgtttaggtaatgacctactctcctttcagttatattcattcttgaaataataccaattagatgataggctgaagccttggaattttctagctatgactctcttcaagtattacaatgagaatgtgtacatgttgcaggtgagaagtatgagagagagaattctatgccttaatgcttctgaaaaaaatagttaaatgttatttttacaaactaattaattattcaaaaatttattttagaatgagtggaagcctaatatttgtgaaaaaaaaaatttgtaaatattatataaaaaattggtttgattgttaaaaaaattataatagggatttaaatataataataaaaatatttataaatattaattctaaaaagagttttgtttaatatttaaatttaaaattaattatttaaaaaaaatagttaattacaattaatttaattcaagaaattttacctactggtaaccttctattagaggttaaaataaatgtaatcatcacgattacaataaatatataaccaattacccatatatatcattaccaaaaaaaaaatcttattttagtcccagcaaaatttgtcataatgtaaaaaaattgtgacgaactataaattattattcctatgttatgactaaaagatctgtgactaaaagcattagtcacaaaaattacaattttttgtgattaaatgtatttttagtcacaatatttattgtgactaaaactaagttagtgactagttgtatcagttcttttagggctcgtttggtacgccgtattgtaatgtattgtgttggattgtgttgtattgtattgtattagtattatttaatacaatacaatgtttg

SEQ ID NO: 117657 - DNA, 1689 bp, Cannabis sativa
taaaactaaaactatactttgctcctcaatgcaagtacatgtattttaaatgactttaatttttttaccctttcaaaaattattttctgtatatataattatctattagatactctgctttctacccctcccatttattattagctacatgaatctacatttggaaccaatttgaatatgctattggattttggaccctattttggtttttgaaagtaaacatcgggacttgtatcattctttaaaaataatataggagggtattgagtgaagacagtccactccaataacactggaaaaaaaaaaagaaaactgacgtgtacagaaggaaatttttttgtacgcttagtttaaagataattttgataattgtttcatcatgcatttgaactccttaagtttagtctggtgatgttgttatgaacatttgaatgatgaggttttggattgtttaatggggcccatgtattcaagctgactagttgagaatttttgctgtcttaaattgcatgtattatagttgataatgattagttagtttcactttcattcactttttgcaggggatgtaggtgctcttggctggtgggacttattcataaattttgggtactgttctccatatcttgtaataacttttttttctttttctatttatgaacaaacatttttcatgcttgtactaatttttttcttccctttactgcagaattgcagagtgctttgcttttcttgtctgtactaagtggtcgaatccagtgattcatagaaattcacagacaagagaatcaagttcatcttcttcatctattagatatcttgactggaacagtggattagtagtttcttcagaggaggatcaggatcaggatacattatgtggactacaagatattggtgggcacattatgaaaattcctgtaattggttttcaggtcctcctatgtatgcggcttgaggtatgttatgtttttgagttcagctcatccaatttttgttgacccttatatattgataattgatgtcgctccaactttcaggggaccccatctacggcaaggaaaataccactccctattctcttctctcctctgtttttacttcaaggtgtgggtgtactagctgctgcatctaggctagtggagaaaattgtactcttactacgtactggagctagcacaggagcatactttagattttcttctagagctcatgattgcttggggttcttgcaccacggttcaaggtaatcattttatcagtcaccatttccacttttgctctttttcatggggcaatttcttattaaatattaattgtaccagttaccttgtatttattattacctcagaattctgatagtctattaatcaagtgcaattttttcaattaattcttaattggacattaaatatctaggcttcttggctggtggtcgattgatgaaggtagttgtgaagagcaggctcggctgtatcaggagagtgcttctgggttagtactgttgattgatcatagtttttgagcattcatatttgtaaatgtgatttgataggtgatatgatgttcttattgggataaagtaacagaagaagcatataatatatatctttatatattaaaagtgcctatctaacggtatttcttggtttaacagaatatactttaaaataaaagaatattctgtta

SEQ ID NO: 117658 - DNA, 1413 bp, Cannabis sativa
gctaacattactgcactagcaatgtgagttaaaaggtaaaaaaattactatttcaccaaaataaaaattaatattttgataaaataatattaaaagaaaaatctattgtcattgattacttaagctgattctatttctttattgctccattcctgttacaatattaaaacaagaaacaaaatacttaagttgcagcatttttgtctgagaatgtttttggaatataaatttgaaacataagagtataacatttcacaatcatatatatgaatatctgtgtactatttctttcaataaaatcatgattttattttagtgctcaaaatgatgtactattgatatataaaaatgtattaaaaataaatgagagagaagaagaaggaccatctttgattatcctctacatttatgggtcctgcacattcaatcaaggagaaaagagaaaaaaaaaaaggaagaaaaaattataatatatatggtccaaattggcccacgaaatttgtaccttttctttttcaacttctttttgctttctttatttcattttttcccatttctttttccatgtgtttgatttttcttcaaagtcgtgttcatcataagtccagcctttagtatatagtaagtacttacaagtaagaacacaaaagatttggaaagatagtgaaaatcttaaagtaatgatatttttgaaatacaagacatttacataagttgggatttagttgaattcttctagacagtcaatttatatccattactttgatgaggtctcacaagttcttatgacaattttgaagaaacttcgtaacattaaaggacaaaggtaaaaaaaaaaaagaatcaatttgagatttcatcaaatcttaatttatttttgctaaaaaaagaagggaaaaaaaaaaggtcttagccatgcagtttgaaatagcaaatcaagtaggtgaaagtgaaacctcaagaaatatttgttacgatatttgcattttattcatattcttttaattatttatacctaatgtaaaacttgttaagtaattaaaaaaaaaaaatgtaaagttaagaaattcaaaacatgttaagtacatgttcataatcataattttttttaaaaaaaaatgaaaaatggaaatagtttgatgtagttaaaaagttgttttagaatcttatacaatttaattaggtgagttgttattttgattaggaaataagtgatgtttcataaacataatccttggaaataaacagcttaataagaaaagtagtaatattttgataataatcttttttcctttaaaaaagaacatatttttatccatgtaaaatattcaatttatcatcaaaacaaatatctattctacatatataacagaattcttagtttatttgggtgatttttttttttaaataaaa

SEQ ID NO: 117659 - DNA, 1451 bp, Cannabis sativa
gggggggggggagatccctctcttcccaatggataaaatcatatgttggaacgtccgaggaatcaacaatcagcaaaagcaacatatggtcaagcaatttattgctaatcaaaaagctgttttagttggtctccttgagacgagagtaaaggccccaaagcttggagccttatacttgaatatgttttcgggttggtgttttacttctaatttgacatggcataaggggggagaattattttagcttggaaccccaatcaatttactgtaaatatcatcagttgctcgagtcaattcatacatactcgagtaactacctttgatggtaaatacagtttccttgcaacctttgtttatggttacaatgaagaacaaggcagacaacagctatggaagggaatgcaagatttttctaaactgatccttggatagtactaggagatttcaatgacatactcaacaaggatgagcgtataggtgaaagagtaaggcatagcagttcgactgcattcactaattgtgtttcctattgtcaacttgaagatatcagatactcgggaagcttcttcacctggaacaataaacagcgtgctgaagatagaatttactccaagattgacagagttctagctaacaaagtttggatagaactttttctgactgcagaagctattttccttacagaaggcttgttcgatcatacaccagcagtggtatccattcatcctactttaccgagtggaaggaagccctttaaatattttaggatgtggtcctcccatcctagctttcagcagatattgtccacagtttagagtcaaaaatttcagggcactaaaatgtatcagattattgctaagttgaaagcacttaaacctgcccttaaagaacttaacagatgccatttttcagatatacaagcagcagatttcaaagcaaagcaagatttagatgaatctcaaactcagcttcaaaaagacccgttgaacagtgagttacaagaacaggaagctacagcaaggaaggtttatgctgaaattcacaaaaactactgctcttttctgcagcagaaggctagaatggcatggataaaagaaggagacgaaaactctgcactttttcacttcagcatccgtgagagaaggcaccaaaacaagattttatcagtgattaatgcagatggtattcgagtggaggattctcagggtattacaacagcctttcttgcctattatcagcaattgttgggttcaagcatagagggaaggacaaaagtttcaactaaagtaatgaagaatgggccgatcatcaatgatacacacaaagagattctcttagctcagtttacaagagaagatgtgaagaaggcagtttttggcataccaggaggcaaggccccaggcccagacggatatagcagcttcttttatcaagacaattgggatctggtt

SEQ ID NO: 117660 - DNA, 3254 bp, Cannabis sativa
aaatatgatattgatgatgattcgaaggtaaaattgttaagtttttgaaaaaaaaaattgttaattaattaacagaaatctaatgaagtcttacaaattttaccatatttgccaaatagtcaaagattgcgatgatttttacaatgtgggagaagtttttttttttttccctacataatgctatatgagatgatcttgtgaatatttgatttagatgatcttgtggtcataataatgcttgtaataattaactaggaaaaacatgagaagttaattagattattattgctattggtagcttttggaggtttacccacccatgattagatttagagggttaataagtggctcaaattacagctaccattacattgtagatacctaaagcctatgtattattattaattattgattagcaacatcttacttcaaatcttctatatggtctataaattaaaggcacccaatattaatgactctaattaactatattgggtggtcctaatatattaaatcctctacgtgtactttaatttataataaattgccccttgactatttgagtaggctatctaattaatttggtttaatataagaattttagtagatgaagttgtaatattattgtttgatcaattaattaaactttaattttcacaataatttagttaagaaagttactatttatggctaatcaaagttaccgaatacaatttgttataactaatttagtgtatttttagcaacactaactcatttagcaactaatttactatatgttgttgctaagagctttcaagcgcttcccagatacttcgggcctacaagctaatacaaataaaattgccatttgctgttctggtatgtctaactctgatgtgcaagctagttattattgatagttttggtttcactcttagtagttttccttttaaatatttgggtttttcgatttgtacattctgaatttctaaagctgagtgtgattcaataattgaaaaaatggaagctcgaatcagagtttggagttcgaagcatattttttatgtaggcaagtgtatcttgattaatactgttttgatggctattcacacatattgtcccaaattataattttgcccaaatacattcttgaaaaaattaatagcatttacaggtctttaatttctttggaaagtgtgatgataatttttcacggccatgcaatatatttgccaaccttaaaggaagagaggtcttagctttagagacatagggcagtggaatgtgggtgcccttagtaaatatgtgtgggacattgccactaaaaaagataatatttgaattcgttgggtgcactttgtgtacattgaaaccaagattggtggagttatgaagctccataaacctacggtttgtattggagaaaaattgtgatgactaagaatttgattagaagcaaaatggctttgagggagttcactagcttacattttagcattgtaaatatttattccaagctttggccaaggaacaacacgacgaagaaatggtttttcttcatttgggataggctaagtgctccaaaacaaaaatttattacttggttagcttgttggaagagactccaaaccatgaatcgtttatttaagtttgacttaatcactgacactaatggtaattgtttattttgtgatgaggagttggagacacatcaccatctcttctttaggtataggtactgtacacaaattcttgtgaaggtttgtgattaggctggtttaaatacccatcaaaatgatttagatggttgtctgatttgggtgaaaaattgtagaagattgagatgtagacgtggagtctacacaaccgttttgaatgctttggtctacaatatttgggaggctaggaacaatgacatttggaataaccaagtttatactgtacattttattgtaaatagaattcaaaaagaaattcgtataaggctttctcattttcaaagaaagaaagctagtttcatagatattgattggttggatagtttaggtacaattcattatgcgccttgaattgtattcaagagtaaagtattctatttgcaataaaactctttactgatttaccaaaaaaaaaaaaaaactaattgagcaacaataactaattaaggtcttatttggttaagtttttacttttgcttataactagaagtatcatataataagtataatttttgacttatttttactgtttagataactattatatgaagatttttttaaatgaaaagtgtttttcaaaaagtatcttttgtaattattttaatttaaaaatagcttctcgaaagtctttttcaaaaagctataaatcctagcctcttccaaaatgacttttaaattaaaaaaatgattttttattttttatccaaacatccttagaatgatttttttttttaattttaaaaactaaaaaaaaaaaaacttatagaagttaagttaaatcggaccttaatgtttttagcaacactaactaaattagtaattagtattttagcaacactaactaatttgttataactaatttagtactttaagcaacactaactaaattagttagtgtttttagcaacaataataactacattaatgacaatgtttgtatctaaatattactgtttttttttactcttatgtaaagaatagaatttcttgcagtatatatatacctaaaaatacttaacaagtagactttttttggaggctaaatcagaattcattgctaaaacaaagaacatatacatccaccaaacttttatcactcagaccaataattacttggtgactcacttttgctagaataatagtcaaaattccactgaaaatgtcattttttttactctatgtactattgcttgtactgtatatgtagttacagccccatcccaataaactctattcctatgcttgtgttgactcaatcgagtccaaacattttggtatacaagttcttgatgctaaaattctgttgtaggaattcttctaaggtttattgttactttatgatgtctttcaccatgatcatttctttcaatactaagagcaatccgtgagagcttcgtactcttacgaggcctcatttttcaagtaattacaaaaaatcttacttttagtcataactaaacttgtgactaaaaataaaaaaaaattgtgactaattataaatcgtgattcctatgttgtgactaaaagcttcgtggataaaagtattagttacaa

SEQ ID NO: 117661 - DNA, 1439 bp, Cannabis sativa
tatatatgacatataaaaagcattttgaattcaaataaatctccgtaaacttataattcataactaacatgcaagtttcatatttataccctatttatctgctaatttgcaaattaaagataagtggtctttaaagaaagaaggaggattgccactacgccaaagagatggtgtgaagtggtaacccaatcaagggaggccccttatatatagtgggcatgaactcgataaatgcgacaagcaataattgctctgtagtagtacaagtgctctgagtgcaagagtctaccagtacacttaaaagaattctcgtaaactagggggcaagtgttaaccccaagaattgacatctttaatttatgagattatttgccgaggggtagaaagacccacaatggtgcaccaaatcagcatgcacgcccgaggtccaaccctaaaaaatagtactctgaatgtcggggcgcgtccgcaccgttacaagaattaccttgaggggtcccatggagatagcataggtgtcgcttgtcgtgtggggagaggcatgggagccgtgtgacgcacgcgagccgtgtgtgcaggaggtctgatggcgagacgtgatggtggaggcgtgtgagatttgggggcttgtatgcgagccgtgtgtgctggtggcatgatggcatgatgggggaggcgtgggagatgtaggcgtgcgagacgtggggtgcgagatctgggcaggcgagacatgggggctcgcatgcaaccgtgtgtgctgaaggtgtggcgagacgtgagtgggagtaagggggtcgtgcgagtcgcaagtggggagtgtgcacgaggtgtagtgacgagctgtgagtaaactttggagggatgcaagtgtaggaaaggaagtgacggaatattgataagggtgaagttgagtgagaactccaaggacacgatgtgcagaggaagacatataaccatgccttctgaaacctttgaacgtagggagtacaagtagcatcgacaacagaccagcttggtctgaggacctgaccaaaggtacaccatgaccatcacctaaggcttgcaggtgggggcttctaaacgtgcaactgaggaacacgtacctaaaactcaaaatcatgcgtctataattcaggatcacacacctgcagctcaggatcaccctctggcagttagggaccacgtatctaaaccccagaagcacaggcgcgcagtcatggaccatctaacaccagacaagagtatgaggtgcaaggccactctaggcacgtacaacccacaactcgaaagtgatgtgttgataccatttgaccatgttgtacccttggccacttgtgcctaaaagtacccccattttagatgtgagggtggtcagatgttcattattagtagctcataaagaaaaggcaatagagagcatgtaacaccctaactagcat

SEQ ID NO: 117662 - DNA, 1425 bp, Cannabis sativa
agaatgatcatcacatttcttaaggtaggtgatacacttagtgagtgtgtgatcaaacattccacagtgataacagatattgggcaaattttcgtatttgaaattcagccacttctcacggtggatacttttgaagtccacaagaataccacgggtgaccggcttagaaacatcaataagaacacggatccgcaggaaaagaccagagacttttaaaagagtaagctaatcaacttctaagaaatcacccacctcatcccctataagcttagcaagctttaaagatttttgaccgaatggaatagagtgaacttgaatccagaaaggtgagtatcgaagctgattgggaagaagtgtgtcaagaccagttgggttagcacaggtaaccaagcagtgatcgaagtgccagggctgtccctcaaggacccttctcatgtctccttcacactgaaactccaccataaacattcctgagccgtaatcagaaaaagtcaaagaagctcgagtaacccaagcatttctcatggcatcttcgaaccactcaggtttgatggttctaggggaaaggactctaaagactagacaaatgggtttattattcagattaaccccccagaatcctcttcaagatcatgcacaacaacctctttatcagtgaggtttaaaatttcagagacgttaagggctaaggaatccatgagcatgcaaggtaagcagcaagagatcgagaagccaagaaagaaataaagtgcaagtaaaaggaagagtaacgaacgcaaaagaaaccagtaccttaaatagagaaaatgaaacatatacctagagagacgaagcctgcaaaaggaagatttgcaaagatgctctgtaaatcctttcagaagccctatgtcgataggagcaatgatcgccacctcccttgggtgtctcaaaacgacggcagccattaaatgaaaacaaaagacaaacttaaaaaggaacaaagaacaacagattcacctgaaataagttctaaacgataataaatgaagatcaagagtaataaatgaagagtagttgaaaggaaagataataactgctgcacaggaggtgaaaagtcaatccctaaactaaactcaaaacaaaggaaagcaacagtcacaagacaaaccaatgagcaacacaggagttataagcttaatctaataattaattaaacgacaccatgaaggtgaaatcaaacaggatttgatccagaagatgaaaggcaaacaggatgagaaaccagaagaaacggtacacagcccgctagaaggttccagagcttttcatagcttttacagcaccaacatcatgctcagataattgtttatttaaagaaaaaaataaaaaaaaaatctgacacgccaagaaaaaaaaaataaaacatattacaatttgaatgtatac

SEQ ID NO: 117663 - DNA, 1262 bp, Cannabis sativa
ttagggcataaaatccaacagaattaccagttcccactcgtctacgtaatcttttttttaacaaagatttaccccaaacgatactacgccacacatagctaggggtataaccaactgcaacaaattgaaaaagaaaacagataaagaaaagcataatataaatataggaaaaattaaagcttaatataaacatccaaacatgaacctgtagcttttaggaagtttgtgtttcgatgatattgggctttaaagatcaatgatggtaaagagtcaggtttgttaagaattcgccatgcttgtgaagccaaaagggcttgagtgtgaaactcaaaatcacgaaatcccaccttcattttttggaaaacatagtttataccatgctaaccaatgagtcttattactttgtacaaaattcgtccaataataatgtgccatcattgattctaaattttcacagaaacctttcggaatttgaaaataagacatcacatatgtgggcatagcttggataactattttgagtaaaacttttcgcccaccatatgaaaatagttttgaattccatgtgttcagtttttgccagaccttctctttaacatctgcgaaaagcacttccttattccttccactcaacattggaagtcctaaatacttcactattgccattgtaattgggacattgaatgtagtcacatagtaatcttggacattctctggtgtatttggagagaagtatatagaagacttattaaaatgaataatctgtaacaataaaaccattaaaattcttagaatgtaattatataaaattaactggattaaaagcatctgaaagaaattttaatattagcttattagtgatatatgaactacagcaaaaactttacttatactcctattgattataaaaataaagcatgttgtttaagtctgaaccaaaaaatcattctatcccaaaagaaattcatattaaagtaacaatataaacatgtgcacctattgattatggaaatggaccaaagcataaatctttttagaacttttaatttctaaacaagattatgtttagacaaacaacaaataattacattaaataaatttgtataaattcatcaactgtataaattcattagatatatataatgttattttaatttctgcacactctgatgtggcatcactcgatggtgacacgtggaatcgactccaggtatctgctcgcaagacacaagctgaataagacactgttgggttttatgccc

SEQ ID NO: 117664 - DNA, 1135 bp, Cannabis sativa
agttttcactggtgttttttagttattctgctggtgttttgagttgttctgttttgtgttctactagtgttttataaaaacatagtattttgtaaatttttccgtgtcacagtatttttgtaaaagttacccaaatttcagtatttttgcaaatttcccaattaatatacacaaaatttgacagacaataattttttaattaattggactcttgagagactttagtgttgtggcggagcttcttgctatcaagatggggctaatgctggcacacatattttgagtttaatcttgctagtattaattgtgattcaactgtggttgtgggttgggtgaataatcctcatttaaatattagttcaattctattatttttatgttaattatttggtagttgttgttggcgatagttcttataatgtcgtgtcatgttttgcgaatggtgttgttcatatagtaaaaacttctattattatagtataagagaatgtatttggatgaattcttgtccaaaatgtttgagttcttctataatagttaatttatcgtaatgaaatctagttttctctcaaaaataaataaatcacttatgaaaatgatgttacatttaaacactatttttattttatatatagaccataataataagacaataatcaagaaaaaaatcgacttttcactctgttttaggattctatcgtgtaacccttgggccactggagaagggttccttcttctgatcttcttcatcccagttagactttactggccctttgatttggtttcgttggaggtgtaattgggagggtctattgttgtttgagtgagaggtttgtacgctcatgtttgcctagttcagtggctcctcttcatgttcgtcgagattctagttgaagtagtcgtgtggtattctagtttgaataaatggagtgtcttatcaaatttttattgaaatatccttgactaattttttattaataggtgtgatctatcacatatgttaattcaagatgaaaatcaagtattcttcgtattattttgtgttaattctatttttggcatatttaattgacaaaaaaattttattattctttgtataatttcggctggtatactttaatatggtttcctattt

SEQ ID NO: 117665 - DNA, 584 bp, Cannabis sativa
tgtctgcatctgagtttgcatgcctattctgatgcggattgggctagttgccttgatgaccgaagatccacaggaggttatgcagtatattttggtgggaatcttgtctcttggtctgctaaaaagcaacctgtagtttcccgtagtagcacagaaagtgaatttcgatcattagcaaacacaactgcagaaattcgttggttatgttctctgctttctgagttacacatatctccaccagccacaccaataatatgggttgacaatcagggggctgcctctcttgcagctaatccggtatttcatgcgcgatgcaagcacaatgaaatagatctcaatttcatctgagaccaaatacttgccaaggagatttaagtcagatacgtgccatcgatctcttgaccaaactactgatattttaaccaaatcacttagcaaagatcgatttacatatctcaagaacaaactcaatgtgtgttccacaccgtttcgtttgaggggggatgataaagctaattctgttactcattagttagctgtttgtaactgtctctgacatgttagttattttttgtttttttttt

SEQ ID NO: 117666 - DNA, 2654 bp, Cannabis sativa
  modified_base (2615)..(2615): a, c, t, g, unknown or other
ttcttgtccttgtaatagaaaactcttggttactccatatgaatggttttaatcatagttctcttggctttacttcttagttccttattctgactatctgtttcttattgtcagctacaatttcttggggtaatccgaatctgcacactatgtttctccaaatgaacctttctacctctccatccttgatttgcgcgaaggagtcagcctcaatccatttcgagaaataacatgaatttcttctgagctggcaccgtcggtaaggggcccactatgtccatcccccatttcatgaacggccacagactttggatttttgtcaactctgttggaggggtcaaaatggatggggcgtgtttatgacatttctcacatctcttatagtagttcgccgagtcttcttggaccgtcggccaatagtacccctgtctttgaattctttgagcggttactcgtcctcttaaatgactgtcgcactcaccttcatgtacctccatgagaattagttctccctcctgctttcctacgcatttcaagtagggcccgtggtaggatcttctgtataattagtcctgcagtagcgtgtaccttgaggcccttaatacaattttcctagcctcttttgggtctggtgggaatttatcatctctaaaatattctaagatcggatgcatctagtccctcagtgtctccgtcggtgttgtcgcacattgaacttcttcttccaatgtgatgctaggttctggaataaagtcaaacaatattgttcttgcaatctggagaggagaggaggatcccaggcctgccaaagcatcaacatgcatgtttccctcttgagggatctgaataatctaaaaatattcaaaagttgatgccaaatttttaacctgagccaaataactgatcatttttggttctttagcctcaaaatctcccctgtcctgctggactattaattaagaatctgactggactaatactctatcggctcccatttccttgactagctttatcccgtggatcaaggactcatactcggcgccattgttggtagctcgaaatcccagctttatcaattaatccagcatctccccttttggcgacaagagtaatattcccaccccgcttcccctaatgtttgacgacccatctacttttaacaaccaatcatttttgtcggaatcccgttcgcagggaataggttctagtgctatttcgaccaagaaatctgccaatgcatgtcctttaattgcgtccgagggaggtattgtatatcgaattcacttagttccacggcccatttcatcagcctcccagatatctcaggtttatgtagtaccctctttaatgggaatgacgtcattactacaatcgtgtggcactgagataattagggcccaagccagtttttcgattgctggatacctactttctgctcttgagaaggtcttgctggtgtagtatattggtagttgcgcttttccttactcccgtaccaatatagagctagccgcgtgtcgagatagggaaagataaataagcaaggtttcccctggttttggttttgacagaatggggggagttgtgccactgtcgctattcagaattacccatggagtagtgcctccgcactagaatacttcccctaacatgaactcctctgagtcaccctccagtcaaccaagtagcccttgcaacacagacactgaagctaacacatcctctgatagtagctcacccaccaattgtccaatgcatactccttttgacaaggactaagtttggtgcacccctctgggtgagtttcgcaaaccaaccgtacctaatggcacatacagaacacacttccattaaagtcaagtccctctagacaagtcccttcagaaacttcacacgccaactccatggcgcaccatcctcttgatggcaatcgagcaagacactcctatcacagggtaaagtttggggcatcccacctggacgaggctcgcaagccaactgcacccaatgcagcaccaagtgcactcttgcataaaatctcttcgcaaagttctcaacattggccctctggccctactgcacacccacggcttcatgcaaaaggcccctctaacccactacatacatgctcctccgagctgttttcacgcagttaatgatctaacaattacccaaaaccacgaatttcccctctatctcctgcttgtgtcagctcactaacactatgtcacaagtccatcgcccaaaatcaaccctgcatcctctgatgactcgctaaattttgacagacttgataacacaaagccttacacttaaaaattgaagtcatcgcaatctgctatctcccatcggtgtatgctctctgaaccattcgggttacagtgtcccatacaacaccagtgtccccataaacacaaaacatgcccataacatgccacaaactaacctagtcttgatctcagcctacgcccatgcatattgtctatctgcagcttgcagcaatcatgcaagtcttcgcactgaacaacccatttgttttagtgtttccctctgaattcacgcaccaaaactgaacaagtaccctgattcttcaaacacatgaattagtgggctcncccacttcaacttgggaaaaacttctctcttagaggaat

SEQ ID NO: 117667 - DNA, 2048 bp, Cannabis sativa
  modified_base (45)..(59): a, c, t, g, unknown or other
tgttttagagaattcatatataggatgttaattcaacatacttgnnnnnnnnnnnnnnncctggtaaaatattcccaacacccctttgctaccattttttgtagctgtaagagggtttcttgtatttggtaggtagcttctttctacttcgccattttccttgttgatcaaagactaattgccttaatctcaccacctccaggtcctcatcgcagtattcctcttcatagtttttttcatagtttttgccatagccttcctgttcatctttgttgatgagaattatcaacatttttatcctgttgctggtttttccgaggagttcaactaccaacttctgacatctccacgtcccctatgacgctcgactaagcatccgtgggagggggtcaatttgactcgtcgttagtgatagcatcttcacagtcttgataaacgtctggcttaacgattgtgtttctagttgcagccattgttgttgatgtcaataatggagaatgcttttcttaattctcaatgaaagcaccaaaatatttacagagattctcggaaaataaattaattctaaattaagccaaggaaaaattatcaaatgtaaagaaaaagaggatttttatgtggttgaggcattaataagccttcgtcaacaagtcaaatattattgagccttttggctatggagtattttacacaagattcttctggccaaatttctacagagtttctagccaaactttgtaattcttggcatgcagggataaagccctatttgtaggctaaaactgggttctcgggtgaacccagacccgtaagtgttttatacatgaaataagcccactgatggtgtaaaatacattataatattgactttgggatgggtaggtgagactcaattgagggataaccatcatccgtataacatagtatcgtatgatgttgacatgtgttcatgcatcgctgtacagtaaatattagagtaatggagtcagaaaaaaggaaggcttctttttgtgttgtgtgattttcctagttctcacctaagggacaaacccctaacttttggggattctgtgttagaggtgtgccatgccagatcgatcctcgaggatcaaccaccgcaaccgcaacaccccttggactatccttatgggataccatgggacattcatttattctttctcaaacacttggtactttggtcaattcagaactctagattcgtcgatctaaatctacccgtaactgagttgtgattgaatctggaccacctgtttgacttcattcttggactaatcttctatctatttgggccttgagaatgggcacataaattgatttgagacactagatgtacacgcgtcacctatccaaaaacatggataacacttcctttacctctcaatttctacccctattcgaaccccaaacccaagcctcatcgcaacaaccaccacccagtcaaaacccacaacatgcatcaccatcattgagcaccgccaatgtcaacccacgtagagtgtcgccatagtcaaacaccaccgacttcgacttacgctggtagagagatgtttagatattaaaaaaatagaggggggaagcgagggatcatgagataaggagaagagagatcaagaaagaagtggaagagagagaaattgagacaagggtgggcaaaattcatggtggttgtgacgtggagcttttgatcgaagctattacatctacaatttcatgatttaattgagatgtttgcagaaataaaaaagttaatattttataacaaaattaagattaattaaagttttttttttaggtttaaatttattttataattcagaatttattaaaatttgaactcatatacaaaattttgggtgcttttataatacacctctataaaaataggtgtatctctatctgtttcggggtctaggaaaattttttaatttaattttttcatagtcatgtatgttatagttatttaagacgtcctacaaaatttcaaaaaatttgaaataatttacaatataaaaagttttatttaaata

SEQ ID NO: 117668 - DNA, 651 bp, Cannabis sativa
aatatcaaccaaataaaatacaatatatgaataaggccaattcaatcaattggccacttgtgtggtacccataaaaacaaagtcgtatttgaaggcactactatctagtagtagtagtagtacttgacttgtgctgttttttctatttttcttaaatataactttatattgagttttaatcaataaacaccaattttctcacaccattaaactttctaattttatgggccatatgatcagtttgcttgcctaagttcgtttcatctgtccatttcaatgcataagtatattttgtctctttcaagaaatagaaaaaaagataaattaataatgtgttattttgaatgaaacttcgaggttatatagcaagaaagaatacaacatcctctatattatttactagggatttttgatgtgtcatgtcaacgacaatttactgtgaacaaatagaaacagatatcattattttgatcgaaataatatatatgtatatatgaatgtttatatatgtgtgtatatcacaacataaaacattttctatcatgcatgttattggttggttgaaattgaataattgagataaatagtaatatatatcatatatggtgggcttggtaggtctggtttgctgttcaaaaaaaaaaaaaaaaa

SEQ ID NO: 117669 - DNA, 788 bp, Cannabis sativa
atttcatcatcgacctccataggactaatacttggtggaatattcggttccactcttcgctcttctaccataccaacaacatcattctttcttttcacaccactaggaggccgcttaccctcatctaactgtgtagacaccaaaccatctatcgagctactagcatcgtgtctatctagggaggatgtatgcctcctctacgtcttcttcttttgggctttaaccatagaccaaaaggtactttgaaacaacttaccctcctccacttcggagcaaacaatagatattcttttataatgattcttaacttcggtaggcccatgggactcgccaacacgaagcactagttcaggagggcaatgttgatgctcccctaatggtgggaatgcattgacccaagactcttccaccaaaatattgttagactggagctgaatatcttgcaatggaaccacccttaaattagaaggggatggtgggctctcatctccaacattaatctaaataggaagagcgtcatttctcatcgtttggattgaagagagctctctagtaactacctcaatttcagaagtacccccttactcttacgaagctcttcctctcattcacgactttctaaaatagttgttgcagcaaactcttctttcttgttttgtcttggagaggagcgtttaaaagcctcactattcttcccgcttctctcatgctcataaactgtgactcaggatgtcttacaatgtaggaattgttctttaaaattagttataattttttttatttttaat

SEQ ID NO: 117670 - DNA, 1927 bp, Cannabis sativa
catatttagtggtatttactttttatgtcatatttatcataaccttaataatttttcccatatttttgaaaatagcccttatttaaactacaaaacccaacatgataccatattagtgcagaagaaaaacaaagcaaatagagatgtacagggaaaagctatttatagcttaagaattcattaggactatctaactgattgtagcagaatgtaacagaaatccaactaattaatgctaacatattctaactaaactctaacacagatctaagcctaagtctaatatttaatgaaaacaagtgcatactttgatccaaattttgtagttatcttcatttttttctttttaacatcaatactaacaataacagtatattaataattagataaatattatgtgtattattgaaatctataataataaaaataattgttaatggataggtactaccaataatcatatgatcgcctacaacgtacaatacatgctagtttttgatactgtgcaccctctaaagaaagtgcatggaggatgtacacttttgtgtttcaacattcatataattaatattatcaatataagattttagtattattatcaagttagtcaaaataatatatagtttcttttaaataaatatgattttcactagagctattatcaatttatcactattttattgtgctttcacacctaaaacatatcgataagtaggggtgtttattagaccacatctaatatttttagatttatttagatccgatccaattatatattagatagattttaccatccgatctcatccaatcgatccaacatccattggatgttggattggatcgatttctatccgttggatgtatttcatatatatttattgatttaatttgagtttattcgatattttagacttagtattttttagatcggactggatccatccaatattttaggtccaatatgtattggattggactagatccatttaatctaagaaaaaaagagtaaaattttaatgttaatttttatataaacatatatattttacgtataacattataaaatctaattattcaaccaaattaaatgaaaatgctaattagttcgatttgatgttggatgtattggatttttggacaccccatcaaacatccgatccgatccaattggatattcaaaaataacatccaatccaatccgatcacaattggatatctaatatttgacagtcgattgtaatttgattggtctgttattattgaattagatcgatttatgcacacccaataagcattattatggcaaaaaatattacatatatatgaaattacaacaaactaaactaaataggtattaatgcagaacatttctcttaagtaagcatttttaatgaaagtgtaaataaataatgcaaagctaaaatatggggcacttaacaaaattgttctttaatagtctgtcaaaaagtaattcaaagcatctctaacatagagtgctatctaaaaattataataaatttaaggtagggtataacattgccaaatttgacccacaatattttatattatataatataggataaatactattttgaattttgtgttttataaaagttactaattggaccctatgttttgttaaatgacaaaataaatcctgtattttctaaaatggtacaaataggatcctgaattgattttttatcaaataaaatttaattataatctgatctaaaagtgctatgacaaaactgtttatattttctatatctgttcgtattaagaattgtcttcaagttggttatattgaaaaaaaaaatatcaaattattaagctcagagtcttatttttaccattttgaaaaatacatggtccattttataatttaacaaaacagatagtacaatcgataatttttacaaaacac

SEQ ID NO: 117671 - DNA, 7596 bp, Cannabis sativa
tatcagagaaatctaataagatagactcatggactatgcaaaattttaactgcaaaaccacatataaaacttggtgtgatcattacattattcttcttatttttattttatattatttctgtgtgttattccattttttgcactatgatgtggcacacacatgctggtgacacgtggctcctatttcctacatctggctaaaaagatattttgaacagagttctgcatacacttgcacggatagaatctgcctactgagcagagtaggggtagatggttcgagcagcgtatcaacactttgcaattccaagattggcatcgtgaaacaagaaagcaatccccataattcaaggatcgtatcaaagggatatggcaagttgtccgaatccgacaatctatgtattctatatatgtgatgtatgtctttactaattatagatattgtaagcagaagggaaacattccctttagaatttaactttataaatagtaatccattctcactggtataggggtcgaaagaattacttcagagagatctaagagaatacactcagagatttcattgtgagagctttaagagaggcaacactgtattctttgttcttgagttaatacaatccaaggtccgaacatctttaaaatcttgtgttctttactgttcattagttcttattttatattaattatattttctatcacttattatttgactcattgtcaatggctaaaagtgaggtcaatattttggtgctttcattgagagcaatagtccaagtttgctctttgttttatgtttaaccagacacacaaaatggtggttcaaactcgcaaaggcgtagtatatcaagtttatccattagtagcaggtcgtacattacagactcctggaatgctagggtcccgccagctactaatcctgagcaaccaaatgcgcaaccacctactgtgcgtcaaggtgtgagatctcctctggctgggataacacccggtgtgcaagagactggaaacaccaatttagcagccgacctgcgtacacccagtactagaatcagtttagcaacaaatgttcagacgaccataagagatgacactgaaatttagaacctctacaatgcgttggggctcatgctaggtcataccaataccttgcatcatgatcaggaagagctccgtgctgccgtgaatcttgtgtttgaagagaaaaggcattagttcaatgaatggagggatagagagatgaaaatgttgaaggctcaacaggcagccatcgaagaccgaacaagacaggttaccgtactgatccgaagagcctatcaagttgctaaccgccaacaagctgcagcctccagcatcccactaggtagctcaagagaaattcttgctggtcataccacccaaactctgaacggtcagtcgtccaaagcccgatcacaggttccacctgtgggccaagtggtaggcggctagaccttatttggcaattcatcaggtggggttataccgaataactccgcccagactaacagttctggccaactgactgaccaaaccaactagttgctgagacaacctattgtttgagtattcaatagacagggaacatttcatgatctcagggatgatcaaaatagaaggaggggtctggacaaacaatatgttcaaccagctacttagcatggtatccgtatgtaagatcaatttcaaagagatcctaacgtggcattgatcagccaagaggtcgaacaagttcacccatccatgcaagcacagttggatgaattgaaaaatatgttccaaggcctggccggtcaaaaactctctgatctagagttggattgagcacgcggatcgccattcactcctgagatcaatgttttagaggtacccctcatgttcaaaatgccaacttggatatatatagggaaagaagatcccttatcacatctcaagtattttgaaatggaaatgggtttgcaaggggtaggagaagatgtgaactgcagagtattctctgccatactttcagaagtctcacagtagtggtacttcaagttaccaccaggaaggttcaaatcttggaaagccttcttctcagaatttcatgcacagttctcttcttcctgccaacacccattgcatttagaagacctggtcgaagtgaagaaaagaccaagagaacctctctgagcctacataagcagattcatgacagaggccacgaaagtagcacgatgaactgaagaaaggaagctagccacaatactagggggaatcaagattctaggagagatataaaaagacatcaagaaaagtggtcctgtagactctatgacggattttctcgaacgagtagatggtttcatcaagcttgaagaagccattcaacgagcagatattgagcctagaccaagccaatcacaggcttcctcagcaagagcgtctgcccaaaaccctcagtatcctagtagttcaaatctgggcggcaaaatatctaacaaaaccgtagagaaggcaatggaaaaaaggaaaagttcacaggcaaagttgaacagcccctaggaagaattcttccaagttcactggtttctctatcttgactaacgacctaaagaccatctacatggctacttagtcagtagttttcacagactatggcaagcgagacatgtccaaattttgccgttttcacaaagactatggctatgacactaatgagtgcaacaatgttaagcgagaaattgaattcctgataacaataaataacttgcacgtgcaaaagtatgtcaaggccgaccaaaatcaaacggtcgcccaaacagacaataaccaagaccttttactgcctccactagtggacgggcatttacaagttatcatcgagggcccacacatcgctggagattcgagcaaagcttgggagagctatgcccgaactttaaaacacaaaccaaaggaagtggttctggccgtagaagaaggaaagtcaaatataccacaggtagggaaatccattataaccttcactgaagaagatgatgtcaatgtttgattcccgcacaacaatccattagttgtggaagtacagatagcaaacaaaacagtggccaagaatatgaaagataatggagcatcaacaaatattctgtacaaaacaatgtacgagatgatggggctccaactcaaagatctaatcccctgtctccaaccggtatatggtttctccggccagagtgttgcacctttagggaaaattcacctacccctaactgttggacaagctccgaagagcataactgtgatggcacaattcatggtacttgatgttccatcagcctataacgtcatgttaggccgacccgccttttatgacttaagagttgttacatcaattttccattcgtgcatcaagttaccgacaaagaatggggtagggtgcctaagaagaaaccaacaagttgcacgggaatgttacaaccttgccttgaccaaggacaaaaaggaagaatcccctggctagaattcagaaaaggggaaaagcattgccaaataaggaactgcccaaggcggggacaatgatgtggatccccaacttcaggaactaaatacaaatgtttggccgatggaagaattagaatagatagaaattgagacaaatgtcccgaccaggaaactcgaaattggaaaaggtttgctgcttgaagtaaaattaactttgattaaatttctaagagaaagcctagacatttttgcctggtcacatgaggacatggtaagtatcgatccttctataatttcacatgccctaaacatcgatccaaacttctggcccgttcaacaaaaaagaagattgttagataaagaacaggcccaagcattaaaagaacatgtagaaaagctgcgcaacaacaactttatcaccgaggctttctacctggcttgggtgggtaaccctgtactggtacccaagcccaacaaaaaatggtgagtatgtattgacttcaccgacctcaacaaggcgtgccccatagactgttttccacttccaagaatagatcagctcgtggatgcaatagttaggcacggaatattaagcttcatggatgcctattcggggtataataaaatcaaaatgcattcaccttacaaagaacatacaagttttcgaacatatatgggtcaatactgttataaggtcatgccatttggtctaaagaatgttggagccacaaaccaaatattggtaaacaaaatgttcaaagaccagattagacaaaatatggaagtatacatttattacatgctcgtcaaatctaggaaggctgggggcatataggttagttggacgaatgcttcaaagtcctcaaaaaatacagcatgaaactcaatcccttaaagtggtccttcgcagtcggctcgggtaagtttcttggctttattgttaatgcacgaagtattgaggtcaatccaggaaaaattcaagccctcttggatatgaaatcgcctacaaaaaccaaagaagtccaaagtttaactagttggattgccgcactagtacatttgtttcaaagtcggcagacaagtgtgttcctttcttcaacatcctgcgaggaaacaagaaatttgaatggataaaggaatgcgagaatgcctttcaagagctaaaaagtcaacttgcaaaacctctcgtactatcaaaacctctagacagagaggagttagggttatacctagttgtcacagagcatgctgtaagtgtcatactgatcaaagaagaaaacaatatccagcatccagtctaatacatctgcaaaagacttgttgaagctgaaggacgatatccacggatagaaaagctgacttattgcctaatcttaggaacaaggaagtaaggccttactttcaactcatcctgtacgggtatacactgaccaaccattacgacaagtattataaaaacttgacgcgtctggacagttactcaaatgggcagtgtagtagggtcagtatgaaatcattttccaaccccgaacaacaattaaaggacaagctttagcagatttcgtagttgagtgtatgggcaaagaggaaagcatttcagaaaacaatccggagccaataaaagaacttcagccgagcaacaacaaagataaacccacctggaagtgacatgtagatgggtcggctacagatcaactgtccactgcaggaattgcccttgtcacacctggggggcaagctttacacggggcagtcaagtttgggtttaaagcatccaacaatgaaaaagatatatgaagccctcattgctggcctaaaactttctcgggatctacatgaagaacacattgagatctgtagtgactcacagttggtggtaaatcatgtatctagggctatatcctcaaagaaaaaaaaatacatgacctgcttgcacaattcaggagctatatcctcaagcgaattccaagagaagaaaatacaactgttgatgccatagctagacttgcgagcagcaatgtaactgataaggctaatctaatcacaatccagtttcttgaaaaacccagtagcacctacttggaagaaatttagatgatcgacacatctccgaactgaataacgccaatagtagcctacctcaacacgggggaactcccaagtaacagaaacaaagctttgaaaatgaggagaaaggttgcccagtacatcatctggagtcatgtatagaaggagattctccgtggcgttactcagcttgttacacaagaagaagctgcgcggtttttttctaaagtacacgatggattttgttgcaaccacgcagctggtcaaagtctgtcaaagaaaattctaaggcaaggatatttctgactgaccatgattgaagattgaaatgcctacatgaagaaatgtgacaaatgccaaatactttcaacgatacctcgtgcaccgccgaatgaagtaactcaaatgcagagtccttggcctttttccatttggggaattgacctaattggacaattgcctaaaggcaaaggtggggtacagtacgcggtagttgcaatagactatttcactaaatggacaaaagctgagctattggcaacaatcacatccaagaaagtgcaagagtttgtggtgaaaaatataatattccagttcggattaccgtacaagatagtctcaaacaatggaaaacaatttgatagtcaatccttcactgatttctgtgcaaaccatggaatcataaaaagttcctccgtagtagcacattcccaagcgaatggtcaagtcaaagcagtcaacaagacacttaaagacactttaaagaaatgacttgaagatgctaaaggaaactagctgaaagaactcccagaagtactatggtcttactgcacaaccgaaaaacagtgatcggacaactcccttttccatggtatatggctacgaagttgtgatgcctgtagaattagagccttcgtcccacaaaagattgacatatgaacaagaagttaaccatgcactctttgtagaatcacttaacgaaattgaagaaaaacaaactacaggaaacctgaaattggtggcccatcaacagaaggtagctcgatacttaaacaagcaaatgaaggcacgaaagttctttgtgggagatatggtcctcaaaagtgtcttcttgaacaccaaagacagcacgacatatgtgctcagacagaacagggaaggaccatatcaagtggttgaaattctagaatcaggtgcatacaaattgggtaattatgacaaaaacatgcaactcgttctgataccaaggtatttgaatggggaacagttaaggaaatactactagtaaaagtactaggtcggatgaccatcttaagtacaaaacgaaagaacatttactcttaagtaagtggccttctgggcggactacccccaaaggttcagatgaaatgataaagtactcaagctgaatgaccacctctgaaagtacaatttctattttatgcaatttgttttatttaaattaagctaaagatcatattagattagtataatagctgtgatttaagttactacaataacaagtgtgtttcgaccaataaatgaataaagatatttatttaaattcaaattgtattaatttttttagcaagttataaatttaccattaagtgcgtacaaaggtttacccgtaaccatagacccaaacagacaaaaaacatacttgtgaaatgcaagtgaccaagagtcaaaagtctactcggtcacttggggggcaactatacccgtacaaagcattggtaaacacaaataacaagcactgaaaaaaaaaacaaaacaaacacagttgcacgatgatcataacaaggaacaaaattcattaaagataacaaagcatgtaaactgaggatttaaggcagcccagtcaaccaggtgtttgaaaaatgaaaaatacattccaagtttaaagactgcttggctggtcatcttgactgaaaagaaggcctactgggcgaacagatgtatataaaaaaaaaaaaaaaaaagaaaaagaaggctttcaaacagcaggagtcctaggctcttggt

SEQ ID NO: 117672 - DNA, 1425 bp, Cannabis sativa
  modified_base (1375)..(1376): a, c, t, g, unknown or other
caatcacattatatacattaatctcatattaatatgtaatgtgtcacattttaatattttaatatctcttatattataacaaatataatataacatactataccctaacttgatcatcatagcctgaatagatttccactccaccctattatacgcttttttcgtatccaattttaaagtaatttttgacccatttctaaatctgttcttcctcatacaatgcgacccctcataagcaatgattgcattaccctggatcagtctacccttcactaaagcactttgagaaggggagatgacaaggattgcactgaatacgtttgcaaatataaacaatactagtgttattccaaggtcccaagagctccaccaacagagataactcttatgaatattctttcgccctttactgtttggggaatagacttggtgggatcacttctaactagaaatagaggagtaaagttcgttattgttgttgttgactacttcaccaagtgggtggaagatgaacctatgaacatagtcactttcaagaaggccttggactttgtaattaaaaacattgtgtgccaatatagacttctacataaaataatattcgataacagaaagtaattcgaaaatgatcacttcatggatctctgtgtgaagcacgaatttatcaaaagccttttaactgtgtccagacatcaggcaaacgaacaagtggaagatgtcaataaatcaaattctcttaaaaaaaattaatgtataaatcatttttttcagtaaatatttaatttttgaattttttattaataatacatgtgacaaggtattaatttaccacattatcatccaaatagctacttaagtactctttcacctcggataaaaactaacataaatcacataactcaataatatgcatagttcggggagaaagcaaaaaatttaaggggcacaatcatatattgataatagttcgtgaagcaaaaatcttatatataaattagttagatgtagttttgaaaaataattaaaaatttaacaaacatgtaaaaaaaggtaaatggatggatataggtaagttcatgaaaaaattaagaattttcgctacaaagattatatttaaatgaatccagtggttagtagggacctaaaaatataaatcaatatatatatctctttatatattaaaagtgactatctaacgacatttcttggtttaacggtgtttttattttcctttccgttaactttaacggaggccattgataacgttatttgattttataataataaataatttctttttacgagttgttacgtaaataaaacctcaaatagtgagaatattctagattacgaacgaactatacctcaaattttnnagatctctcgaatcaataacccaaccccattcttctccaatgcaaacta

SEQ ID NO: 117673 - DNA, 1458 bp, Cannabis sativa
aaagtctatattacccttttttttgaatattttataattttaaaataaaagtaataggattattttggtcaatataaattttattctattacattctcatacaccaaacaaaacataataattcttttttttgtagggacaaaacataataattctgattacaatgttcattccaactacaaaccaaacattgtaaacaattcctattactattcttattccattaccattactattactattaccattacattacaccaaaccaaacaccaccaagtttcaaaaaattaaagatctattcactacaagaaagtggacttttgccagcgcatttggccaacagcgccggcaaaggttgctagggaaagttgctggccctaaaattaaacaaaatcatattgcactttaccgacgcaatattgtaccggtacaagtacttaataccgacacaatttataaattgcgccgactaaacctgtgaaatgaactgccttatggtgcaaacaattcctaatggttcattcacttttaccggcacagttatgcaccaacaaaaagcaaaataaatttttgggggaatttttaccgcctagctaaatttttttggggaaacttttgccggcgcacatttgcaccgacaaaagtgtatcaggtaaaaagaattttagttttagcggggaaatgttacttttacgctggcaaaaagtcctaaaaaaatgtggaaaaaatcctacatgaaaaggtggtagatgggaatacttttaccggcgcatatatgtgccggcaaaagtgttgccaaaaacacaccgtttcaatttagattaattttaaatgatatgctggcacattcttcgcttttgccggcacaatgaaatatgccagcaaaagtgtatatatatatttcagaggacgaagcccccttcgccatttcttcttcttcaacttctttttccttcttcttcatcttcttcttttaaatatcgtcccccaccaccaccataccaccaccacgccatcaccaccaccaccgcaccgcaccgcaccatctccctttctctctcccttttcatcatccatacacgctaccatccgcaccaccatcatctaccgtcgtccacaaccgtagaccaccgcaccaccaccatccaccacctctttgattttaggtattttttatgatattaatatttatgttttttatataaatgtgggtatgtagtgtatatgtgtatatatataaattttattttattttattttgaatttgtttatatatgtgcatatatgtaaatatgtgtatgtgtaaaattatatatatgtatgtgtaaaatgatatagatagggaaatttgactaattatacatttattggactaatttttttttctaaacctaatctattcaatataggtaaaatatatcattatttcctaaaaccccattctctctctctctctct

SEQ ID NO: 117674 - DNA, 613 bp, Cannabis sativa
aagtttattacaaaatattggatcaaactttacagtttgctcaatctacttctcatgcattgtccatctcaaaacaactactattacatcaaagctcattatgaaatatttgcaagtaaaggttcattataaaatatggccttaatatttccacttctaaggtctttttacataaaaaaaatagccactgaattcaaaatcaaaatgaaagaaaagtccagtagctgctatgtatctagggttggttgacttgaacttgtttctcttgccttctacttgcttctcctaatgttcctctaaacagtttgaggatcgggattctggttgagaggacgacccatctttttcttttgggaaagttcatgcataccataaataagtaatagtttcaaaagtgtgtatactataaatatttattaaactaactattacaaagaattgagtatacttgcagttgtacttttttcttacaagtggtccttgtatgacctggtcttttttaattacaataattattagactgcgtgaatatcctcatttcagttgcaccaggtggaggttcatccacttctcttctccttgatttcatgccaagtaaaataatttatggcgg

SEQ ID NO: 117675 - DNA, 1851 bp, Cannabis sativa
  modified_base (1813)..(1826): a, c, t, g, unknown or other
tagttttgagatagaactccataagtcttactataccgtacatttactttctactatctagacttcttcatttcgatctgataatcgtcaattagttttgagatagaacttgacaagccttactattagtttggagatagaactctatgagccttgctctatcgtacattctttcatctagacttcttaattttgatctgataatcgtcaattagctttaagataaactccacgagccttattatacccaggcccgaccctgtgcataggcgcgctaggcctgtgcctagggcccatctagcctaggggctcaaaaaaattctcattttaaaaaaaaaataccacaataccacattttttttttctaaataagagcccaattttttttttcatatgccccactaagtttcagggcttgccttggctatatcgtacattctattatcgagacttttacattttgatatgataatcgtcaattaattttgagatagaactcaatgagccttactatactttgtacattctactatctagacttctacattttgctttgataatcgtgaattagttttgagatagaactctacgagccttactatacgctacattctatggtttagacttatacattttgatctgataaattttgcagggtgtgctgtaaactgtaagaggaatcttgacatgtttggtgcttgaattgcgaaagcatggaaatgaagatggcaagtccatttcatcgaaagcgccttattgtgcaggcaataataatgtttgagatttcttcttatgatgagacagcaaagggtgagtgattggaacattgtgcatggagtgaaaatgatgagtatttaggtgatacagtacaagttatgttgttggtgatgcaaacataagatgctaatcctccttcttcttcttcaataataatccttcttattttattttaatttgtacattttcattagtttgaattaatggatgagtgagataataagttttatattatcttgttgattcttctcttgtagaattttgggtttcactcataaacaaaacaaggcaagcaaattgtattgtattgtattctcttaagaacaatagcatttattttcaaaaaaaaaaaagaacaatagcatttaatgctttcaatctcttcttcattttaagttctaaggtaaaaattgtgctatatttagcttaaaaaaaaattttgtgatatatttatattaatttttagcattgtgtttcagtaataaattacaaatttttgatgaaatatttaatatttttattaaaagtattaaaaaaataataatttcatcattaattctattattattttattatgtaagatagtaaaaaaaatataaataattaacagctaattaggagagttcataaacatcaaactgaccagaccgtaattgaatttttagtttcacgtcatcaccaaatttgatagtcgatttcggttatgaactaaaaaactgccaaaactgttaaaaattaccataaatcatttaaaactgcctaaaaccgccaaaaaccatccaaaaccgtcaaacagaaaaaccactaaaaatcgccaaaaattatacgatcggttttacatagttactaaacggtaggttacggtttttgtaaaataaaaaccgtaaccgaccagtcagttataaatttgtaaaaactgaccgtaaaataatttcatcagttataatattaatatttgtgttttttcttttatattaatttttgccaatatatttaggtcacaaacatctcaatattatttgggtaaatactattnnnnnnnnnnnnnnttgcaaaagttacagattggaccct

SEQ ID NO: 117676 - DNA, 1474 bp, Cannabis sativa
atttaaaatataatatattttcatttgataagtatatttttgtaagaatatgaattgaaataaaaaaaagttaacaaaatttattacaattaaaaatataaaatttctataatataaaaattctttaaataaagtatctttaaaaaatttgggagtgtaaataaaattttccataaaataattagaatttttgcccctctactttgtagagtaactattcttctaaccaataagtttaacaagtgaattagggttaatgtccttgtgcaagtcaagtgttacaactccatttatcttatcctttgttattttttctatcaataatggactttcatttaagaaaaccattagcaaaatttgaaatgaaatcatggtcatgtattgtggggtcaactatgtggatttggttgatatggcatatatcaaaggatcttagctctcacatcactcgatctagaagtaaattgattaaaataattttagtaaatataatttattgatgtatctaaatatataattcattttaaaggaaaaaaaaaattgattaaaaacaattatgaattcaatgtcatagtatagataatattgacaaaactattggaattcatttcaagcctgaataagaaaacattttgctgtataataataagaaaaaaaatgaaaattagtattattattttatttatttttttcttttgagggaaaccattcaactccttatagaaagcaaattaacatcaaagaaaggtgaaaaaaatgtcgagaaaataaaaattgatgaaattgaagatatatgtgaactataatcatcatttttgatgtcctgatttagaaatgtaaaatgagaactcttaacatgtttggttgggaataataaatatagataaatgagaaattaagaataaagatgaaataaaaaaaaatagattttaatatttcatgatattttaagagtagttctttgttgctggtatttttaaatagtattagaataatctttccttttaattttagaagacttggtaagtataacaaatttattcaagttaaatgagaggtaggagacatcctacatttatgttggtgtttgtggatgtcgtaactagggttcgcttgttttaggagcagttgtcgtgagagatagtaaaaagttttgttgccctcctattttttcgtcttttcaaattataagatgttaattctctttatgttttaacttaaattcattaactttctaatatgatttttcaaaaggatatttttcagtattaaggaggtagtatcttttatcattaccttttatttttgttttatttatctatttttttttaataaaaggatacttcattagattaaatcaaaaaaacaaaacatccttagaatattgttttttattttttgttttcaaaaaaacatttttagaaaatgagaacaaaaattagtttttaaagttttcaaaacataagtcgtgttt

SEQ ID NO: 117677 - DNA, 1562 bp, Cannabis sativa
catcttctgagtcttcagcacctacatccagtagcattcctattgcaccatttacttacaatattgcatcattatttccaactgatattgatcttgataatactgttgacaatactgttgtgccatctcactctaatgctactggtttttcgtgtttacctatcactacacgtgctaaggatcatgatcatgatgaagccaggcctgttccatgctctatagctcctgcaatatctcctacagttgatccagttactgatcctgagttacgagcaccttctattgaacaccaaaatccatccacatcaaatgcagaacctgcagatgcttcctcaaatcccgctgtctctcttcctgcaccagtttttccatctatctctctccctgtaaacaatcaccagatgcaaacccgtgctaaaaatggaattaagaagcccaaagcctttttagttactgaaattcctactactttacagcaggcccttcaacaaattcaatggaacaaagctatggcagatgaggttcttgcattaaaaaggaataaaacttacactcttgttaagctaccccctggagggactgctattggatgtaaatgggtgtatcgaaagaaagaaaatctggatggaagtgttcaaagattgaaagccagattagttgcaaagggatttcaccaacaacctggttttgactacacataaacttttagtccggttgtcaaacctgtcacaatccgagttgttctcactcttgctctcacaaaagaatggaccatcaagcaacttgatgtcaacaatgcttttctcaatggtgaccttcaagaagaagtgtatatggtgcaacctcctgggtttgaagatcccgagtctcctgatctagtgtgcaaacttcacaaagcgttgtatgggctcaaacaggctcctcgagcatggtttgacaaattacatcactacctcttgtctctgggttttgtgtcttccaaagcagaccatagcttgtttatcagacacactcctctatccatgacagtcatccttgtctatgttgatgatattatcatcacggggagtgatcctaagctcataactcactacaccgaagctcttaatgccaagtttgctctcaaagacttgggggatttgcatttctttctaggcatcgaagtgacttctactacaaatggacttcacttatctcaatctaaatatatcaaggacctcttacatagggctgacatgcatgctgctaagccttccaacaccccaatgatcagtggacttacgttgtctgcctatggtagtccacctgttgcaaacccgcatttgtatcgatccattgttggtgcattacaatacttggtcattactcgacctgaaatttcgtttagtgtcaacaaggtttgccaatttatggccaatcccttggaaactcattgccatgcttttaaacgcatcctaaggtaccttagtggcactatcgactatggattacgtcttcaaaaatcagccaatcttgagctcactgccttctgtgatgctgattgggctaccgatcctgatgat

SEQ ID NO: 117678 - DNA, 1973 bp, Cannabis sativa
cagtgtaattacatggtcagacaaacatgtcaaattgtgtaattacctctaattacacacaaatcgaattacattatgattttccaaacgcaaaaatgttcaacatggaaattataatttatatgcatgggtccctggtgttataggagattacatgtacaacaacacaattactatcagatttgaaatctaaaaaaaataattaaaaaaacatcttacgatacaatttagaatagaaaaataaataagtgatataatcaaatagagatgaaaggattgaaaaaaaaaatactaaccctacaaattgagaaatatgtagagcttaccatacaatatcaaattctaattgaagaattattgtcaaaagttatacagaagattaaaattaaaattgataaatctatatataaagacatttataagatttttttttaataaaagcaataaacaatatgtttctagagaaaaacaacaaatatgaaatatttatttaaacggtataagaatggaaagatttaaactttaaaattttgtaaagaactcacaaaaaaataaaatttatagaaaacatatcataaaatgtgcgttatgaaaaaggaaaaaatatcatcaagggataaataaatgttcaagtatatatataatcaatgaaaaataataaaaatttaaaactttgtacataagcaaggccttctattatagacgtgtccatgtataatagatactatatgtatatacatgtattattgcgtgtgtctagaattagatatatgtatacatatcaacaatttatatgaaaaaaagatatattgctaattataacattgagcactaataaaaattttaagagaaaaagccaaacactagaaaaaaaaaaaagctaacaaaaaagaaataaacataacaagcaacaaagaattgcaatcaacgaaaggtagttgtaaatgatgtagcaaatagaaagaatatatctatacatgaagaagtcgttaaaagaataacaaatatcatatattgatcaataaaagaataagcatgatataagtttaggaattaaagtgtgagagcgagtagaaattgctattacttattaatagtaggatttatatagatcagtgataaacaacggcgaacccaaaatttacgttgggagggcgatacttttttttttataagtgagggcacctttttttttttctacattgtataatatgttaaaaatagatgcaaatttatattttagtactaaatatagtataaagttaaaaaaaataacaataaaaatattgggttcaataattaagacattaaatataaatattattagtagaggttcaaaatgtaaaatacaaatactagagtataaaaataattttattaagattagaacccatgacctcctttatatgcatgaaatggctttaccattataccaaagtaatatatattgtaactaactaaaatacatatatattttttcccaattttttttttagggggcgactgtggactgtcttacctcgcctttatgtgggtctgcccctagtgataaacctatcattaataacatcaagatatgtttctagtagaaatcggtcaagataggtttttagtagaaatcgttattaaaaatatctcaattaatttaaaaaaaaatctcaattacattatttttttaattaattaatatttataaatttattaaaaaattaaaaaaattaatagaattaaagaggaaataaataaatgtattttgagtgattttagagcgtcatgtcaccacctcatattttttctttatatatatagtgattattaattaattcatataatttatgagtgaagttatcgacagttttttttcttcttctaaagaaggaacattcacttaaaagtttaaatagataaacgctactataaaaagacagttcgcaagtggctaggttgcgtcaaatcacagatgtaatggacaa

SEQ ID NO: 117679 - DNA, 1801 bp, Cannabis sativa
  modified_base (1746)..(1757): a, c, t, g, unknown or other
actaatcagattgtaaagagtttaatttagggcataaaacccaacaagccaaagtccaccacataattcaacatggttcttgcaagaacgtgtatttttaccttgtttttttttatcttgctggaggataaattttcaaacttttggttaaaaacaccatttggggtttgatacgtctttaacgctccctctcggaaggaggaatttcttgaagtctattgaacgcccaactcaattttcacctttactctttaaagtaaaaccatcgcttaaattttagtgcaacttcagcctgcttccttcgaaaagccaaagcccaccgcatcaacatggttctcacaagcacgcgtacttttaccgtgcgttagatttttcctgtatttccaagcttttggtgaaaactactgttcgaggtttgatatgtcttcaaccctccctctcataaggaggaattgcttgaagtctattgaacacctaacttatttctcacctttagtcttaagagtgaagctgtcgcttgaattctagtactactttagtcttccttcgtgaaagccaaagtctactacataatttaacccgactctcaaaaaaaacatagccaacacattttcaactttgtccttggaaagggaacattgttttaacaattgttgtagttgcttagatctgttgaccatgattggcagatttctcgcaaggagtgggaaaaagaagcatgtttggaagctttttgagtttttcagtagctctcttgccataaatttggcgaaagcctgtcaaaaatcactctagtcctgttgctacatgtaaggagggtaaaattgaggtatcaacacaagtctagcatttgcctccctaagaggagccctgacacgattaaaactccccctcatcaatctaagtaatgtagatttaccacaagctatgctctaaataagtgaccaagaagttggagacgtcgagacttctcagctcacttggagggtactatgcctagctgtgtatgccctcaaaaaatgtacagtgcgttatctttatttatacatgccaggttttgtcactttgcatgataaatcaaaattgatatgaattttcaaccaaacttcctaattggaagacgtgcttgatttccttctcaaagtttagaaattaaaattagcataaacctcaaaatgagatgcgtctttagctaaatttcattggagggaaaaatttgcctgaattccttctaaataattttggtggatttcctaaggtttaattttctcatttggtgcaaagtaagaatgagaaggccttatctaaacccctatgtgtttttagctctgtcttaagcacaagataccgcctaaaatcaatagcgtgtaaagcttgatatatgtgtggctccaagggctaaagaatcttattgataaggtctaggataaggaagctcgcttaagtgttagaacagtttcaaggaatctataacattttcaaccatttctcccaaaactcaacttcatagagagcaagagtcaaggaacgcttgggacgcaaaagctcgcccttccataaagaaaatcatccctgactagcactccatgtgcaacattccaaaaaagtaattaactatcgaagacattcaaaaagcgctaagtatctacaactgtttgatggtccgacaacagtttgaaagccagttcatgatgtcgagatatttgattaaagaagatctgtatgttggaatatttattttaccannnnnnnnnnnntactcacaagtatgttgtttagacaccctaaatatgaactttct

SEQ ID NO: 117680 - DNA, 782 bp, Cannabis sativa
agtgttaccaaacgccacctataatttattgttattgcagtactttctaacaaaaaacttgaagagatcataatttgtgtgtaacaatcgaataagaagaataagttgattatatatatacaaggaaagagatgtattttgggttcgatttttcttttctttaatttaccaaatatatagttaattatactctaatttcaaccatcaattttcctctctttttttttttgtaaaattattattattataattatatgtacatctgtaaaaagattttaactatctaaccgcaaaaaaaaaaatcaaagtcaatattaaatatctaatattaatcaaaaaagaattatttatacacagtaattttataaatatcttgcaactaatatcaatatatttttatctcactaacttcaaacaaaatttaatatatattaattaaaaaataaataaaataactatctcacactaactcttaattaaaaagcctttcaactttctaaacataaccctaatactataaaaagttattttgtatcgtgtttgtcaaatatcaatgaaagatataaataattatgtacttattgtaagttataatcagcaccattgaagaaggtattcttagcaaataccaaagaagtcatccaaagaaaacaaagtttaaggtattcattaatactctatattttgtattgtatttgatttagtagattaattaatacatatgttgtttatttcagtcctaaataaaaccaattaagtaaaaggaatgatgacatggcaag

SEQ ID NO: 117681 - DNA, 3322 bp, Cannabis sativa
  modified_base (804)..(809): a, c, t, g, unknown or other
aaggtagttagggtgttacaaagctggtctaaaatgaattaagaattaatttttaacttaaatttcattttctataaatatattattattataatttgaaatctaatgtactttttaaaagatacattttcaaattacttttaaaataaaataaaataaatcccgataatattattcaaatttatgttgatataaaattaattactaaattaatttttaacataaatataattttttatttaattaaatatcacctaaaattattaatatttaagtatcttgaattaaatcaacttaaatattaattttctatttaattaaatatataaaaaaaaatataatatagtttacttagaaattaattatctaaaatttatttcataaactaagtcttagttttctaattacatattttaatctatttattttaattaatcattaatgaaattacttaatttaaggtgatctaaaattaattaagaaattaattttcaactttaatttaattttcaaactttaaatttcaaaattctaacatttaatttttttttgaaaattaaataaataattattaaaataaaataaaatattttttgaaaatattctaatttaagttgttctaaaattaataaattttcaacttaaaaataatattctatttaattaaatataaaaataaagtaattaagtatcttgaatataattcaacttaataattaattttatatttgaataaatatcaaaaaatacaaattagttcactaaaaaataattatttggaatttatttcattaaactaagtgnnnnnntctaaattaatttcaaaataatctaatgaaattaattgtaatttcaaatcaggcaaatgggccttcaaagttggggttgttcatgtgagtgagggttgggttcagtatgtcgtacccactgctatggccccctaactctcacacaaagcccaaaagagaggaatttgatttttaaataaatatttcttattaagtcaataaacccaatactaaatgggcctaaataaaactatcatggtgatcattttatttttagcaacctagttcatttaaatatccaaagtaaaatgggctactatatgcatcttatcccaatagcaaacatataagctcgcataaacattgatttagattggccctatcatgttattaggtctatggcacaaatgaaagaaaattgtaaaattacatgttacaaattatttatttgatttattgacattaactatgattaatttggatcattgaatccatcaataagttaatcatagtcatttaaatcaaataaataataaatttattaaaaaattaaataaacaaatatgcaacaatttaggatagttggttaaagcattttattttattttatattcaattaaataaaataaatccaattttcaaaaactaggttgtaataaccctaaatatctatttaaaaaaaatcaactaactatcaaaatttatgttattaataaaaaatattttaataaaataaatatctaatgagataaaatggtaaataattagcatatttctaatcttataacttaaatttataatataataaaataatcaaagtttgaaagttaataattatggttagatttttaacattatctagattatttttcaaattttattgttattttagtgtcaaataagaccatttcatatatatatgtatattaaataaataaatataatatgaaaatctctcaccttataattaaaataataaataattaaatttgaaaaaataaccaaattataatttaaacataaaattcaaaaaataggttgaaaacaactaaaatatctattcaaattttaactaacttacaaattcaatttttttttatttcaataatatttcatttaccaaaggcctattaaaataaaatgataaaatatcttatttttttaaaaaaaaatctatatcttttatcatttttctaatcttaaaatttaaataaataaaagaaatttaaaaattgattaatatggttatctaatttaaaaaatttaagttttgaattttatcctttttatttaaaaaatcaaataaaataattttaaatataatattacagtttaaaatcttattttaaacaatatttttaatattcaaaataactgatctcattatttaaaataaaatataaaattaattttaatcaatttaaaataataataataataataataataatatattaattttttaagttcataatatcatgatatctaaatttaacctttaattattataatgaataaataaaaagtaaattaattctaatattttaatttttaacttgaaattgaattttacataaaaaaaactaataaattttgatttttgaatcattaaaaaatgagttataaaactcaaaatatgataaaaataaggtatgcatgcaagaccatgcggggtcgcaaatttcggccgcgtctaagcaaaactgcagtttgcagcctctggcgctgagatcatgggcaattgcagccttgggtggtgcttggaatttcaaaaattcataactttttcatttttcatcgaaatcgagttctgtaaatagaaaacttgcttagaattcaaccaactatccaaataaaatattttcataaacacaataaaattatttctaattgaaaatttcacaaatacacattcaattatcaaagtcacacaaggacaatatgaaacatccaaatcaatcaaaatatcattttaaattcatatttcatgaaaataaattattattgttttctgagtttttcagaaacccaatattttgagatattaaagaagaaaatgagtactacataataaacaagtagatttttacgtggttcatgtgttaatgatccttagttcacgagtttgtattattagcctctttgggtggatgttataagattacaaagtattacagtgcaaagtattatatggaagagaagattgcaagggattttagcagaaggacgaccaatgaaaaaattctccttgccttcaaaagaatgaggatatttataagcacccatggggtaaagggaatacactttacccatctagggtttttctcttccacacgctactaaggcctacactacataagggcgatctgaccatccactggttggaaccttcttcaacgtgtggtgtacagtggctagtgcgtatttctgtattgttggaaaaattctcattacaagagagaataagaggattacaatcaaaacactcaaaatacaaataaaagtatttaatcaagattacaagaaagctagag

SEQ ID NO: 117682 - DNA, 1485 bp, Cannabis sativa
  modified_base (1295)..(1299): a, c, t, g, unknown or other
acccctgtacttgtcggcaaaatcgaataactgaaaaaaaaagaagtaacaaacgacaacagttagattttggatgaaaaataactaaaaagacaaaaaatgaagaagaagaagggtgttttaggaattttgaaagaaagagaaaacgacataaaaatgggaggaactgtttatggtcgttaataaaccaccgacagaggctcttgcacgtgccttttatcgattccacgtgtacggttcacaactggcaagtaaaataagtatggattcgatccaatatatgcgccatcaatttgtaataatataaaacggtgtcgttttagagttcatatctcaatgctttttttaatgttgacttttagatgactattaactaaatatatattttttgaaatatttaaaaagtaataaatataaaatcataaaatattaagaatatctactgtaaaaaatacgtatatgaaaataaaattgtatcattttgaatattctaaatcaaaagaaaaactataatcacttacttggtgttcagcactaatgtaaggtatcaccaccatgcaaataattagtataaataatcagacacatgttataacaatgctcttacttgaaactagtgggacttactactaatgcaattatgcaaggagaattattaaaaaatattattagtatttagtattatttttagtatcatatcattaaatattgagtcttatataacttaaaaacattattattaactaatggaaaaaatattgttaagaaatattgcacactactaacccaataacaatacctaattataacactttacttctcaattatactaataacaatatcagacattacttttaggattaaatgtgaaaatgaataacagtgctacagttacaacgtcacatccgacacaaaaaacaatttaaagtttagcccacactatacttaaatattaactataaccgttaaactaacgtacgcctgaagcgcattaaaaaggtttctgaatagtaatagacactactagactctagtctagtcctatatactacatttcccactgacggcggataatagcgtacttagctattatgcgccagttacgctacaatctatattatatatcccattaattgtggtcccctacctcccaccacttgaaagtaaccaatttcatttcataatttctcatttttgagtattgctataaggcatgagtggtggtgcttaccactttctcgatatgttgcattacgattggttagttttactctctaaaaactattatattaaannnnntgggacccgatacttaattagaccaatatcaatattaacaaataagaaggtagtaggcaccaatagtgccctttgacatttctcttattttcttatgtaaaatgaaaatgtgaaaatgtaatgacctggtgagcgtggcggaggagctcgctagagtaagcgggattagatcggcggaagactatg

SEQ ID NO: 117683 - DNA, 1849 bp, Cannabis sativa
tgctaactttaaaggcccgaaacataggctaattataacctaacaccttcacgacctcgtggtcaagagacaactacaagacccaagtcgattggagtacctgatcaacctggaaggcacatagaactatgtgatctcttgaacaaaagaagaacggtagacgtgggaacttctagagaagaccctatctaggtgatagaagctccatttgggacgcagaccacaattcatggggttaatcgggctgaattcgacaccttagctgctttagtgagcgggatcatggcacctaatttgtctgaatttaagcttgacaaagaatgatgctcaccaatctctaaaagaatcgcaaccttcctattcctctgaagttcaagaacactttttggcatcaatgcaccaagaatgaagatctactgtctcacatcaactacttcgaagtgcagactaatctgcaaggtgtgagagacaacgtcatgtgtagaagcttccttgatacactgacggatctagcataacgcaaaaatatttttgtatcttacaattattatattatgtgtacatcttattatttttttttcttcttagatgtcttcacactacaagaaaattatctttcgccggtgagttttgtcgccggcaaaactatgagtatgtcgtcggcaaagctttggtgggacctttttttgccggcaaaaggtgccggcaatagctattggcgtatcaccttttgctggcacagttggtaaattcgttatgaaaagtatttacaccggcgaatttgtttgccagcataaatgcatcgccgactataggaccgctgactgaggtccccatgatgaggttttaccggctagttaacacgtcggcaaaagaattggcacgaattcggcgccaaataccaatttagcgcttactctttgccgacgcataaactccctgacaaaacattttaataaataaaaaaaattaaaaaataatatttttgccagcgaggaatgcgctgacaaaacttaaaacattaatattccaattctttgccggcgcattttacgccccggtaaaagtatatatagattttttaaaatttaaaatttacaatatatcattaaatttaaaatagaaataataataaatacaatatcaaatatatcataaaaccgaaatttatactgttattacaaaactatattaaacgtcataaactaaataaaagtattttgagttcataaacagtaatattatgtacactgcaaactaaaaaaaaactacaaatcaacagcgttatcgttgtcatcactgggaggggcaatctgtgaggagtacccagcagcatggccaggatgctgaaatggtggaatcggtagaatcggaggcatctccagcatgttaatcttggaacgacattgtctaattggatcatttgttgttggaatgcactcatgatttgattctgaatcatcatcatctgttgttgccactcgttctgtgcttcttgctcttccacccttcgcttcagtgcctcatattcctcttgagtgacagtgggctgcccagatggacctagcctgggagttgctctttttgctcccgtcttaagtcttgggtggggtcgacattgtactggcgcgagacattggttggcgttggttgagtttcacgaatcttaactattttggcctgcaaaaactttcatgaaattgttagagtgaaaaaagttttaaaatataaaactaatgttatattatattgttataatataagatagattaaactattaaaatgtgacatattatatattgatatgagattaatgtatataatgtgattgagagttacatacatctaa

SEQ ID NO: 117684 - DNA, 1538 bp, Cannabis sativa
aattgcttgcgttttcaatttatttgtataaaaccttgactgtgataagttcttgatgctataattgtcggaatggatatgttgattaagaaatatggagtgacaaacaagggaaagaaacgtctttgcctcattacaaatgcaatatgtccaattaaaccttcaaatgaaggaaccgaagatgatcaggtcaccataattgctgacaaaatgaatgcgcacggcatgaaaatggagagcatagttgtcaggggaaagcttattgcagaagcagataagaaaataatggatgagaatgatcgcctgttaaatatattttcaaagagaacacgtgcaaagctggtgcatgttgaaagtccaatctcattgcttggtgcattgagaactcggaatataagtccagttacggcattcaggggtgatcttgaagttagccccaaactgaagattaaggtgagctctttggaatcggcttagtaatttaattatgaagtgttcaactgttcaactgttgatctgtttgacaatgtttcatgtatgctactgtgctgaagttaaaagcatatgtttaattccttgccttttggctggctctaagcacttgatttaaaaccattaaaacttatgtaatctaggctaaaacacaagaattaatcactattttggtacttatctatctgtggtgtcaagtcaatgggttctctcttgaggcatttgtgcttgtatactgttctgcgctagagcaccctctatcaagtgaggattaaatgcattgagctacaattcacttgtccattgagtcctcttcattgcagtttgaacttttttatactcagttgcaacatataaagttgtttttcttctcatttgattacaacttgaacataattagatatgggtttacaagaaaacagcagaggagaagtttcccactttaaaaaaatattctgataaagctccagcaactgataaactagccacacatgaagtgaaggtagattttgagtacaaaagggttgaagatcctagtacagttgttccaccagaacaaaggattaaaggttatcgttatggaccccaagtggttcctatatcatctgctgaatggtatgctgtcaagtttaagccagaaaagagtgtgaaagttctaggttttacggatgctggaaacattatgcggtaataacatatctgctttacttttagatgcatcttgatctgaatttgtttgttcaaatgataatttttctctcactgtcttaatttacatgcaacttcatcaaagccactattacatgaaagatgcctatgttttcattcctgaacctggaaaaacaaaggccattcttgctgtttctgccctagcaagagctatgaaagaagctaacaaggtagcaattttgcgttgtgtttggagacaaggacaggggaatgttgttgtgggggtgttgacaccaaatatatctgacagggataacattgtaagtttgcaagtcttattacacagattcttgtgtttcttcttttttttttttttt

SEQ ID NO: 117685 - DNA, 1318 bp, Cannabis sativa
  modified_base (65)..(71): a, c, t, g, unknown or other
atgcaacataaaatatgatttctgatctttattaattagtcaatctgattatattgaaatgagtnnnnnnnagggcacaaaacccaacatactcctcacttaacatatatgaaagctccactataccaacatagccacactccccgactcccatggccaagctttctgggtcctataattaagtttctcaagttccatgaccaagttccttgggtaccgtgacgaccaaattccttcggtaccatgacacaaagtttcatgggtgccatgaccaagatatcaaagagtcatcaaaaagacataaacgtcaagtccactcaagtgaatctcgaggtccactcaggtccactcatgaccaaagtggaggtacacttatgtccaagtggagcaacatacaaagttatatcaaagaggtcctccagaatatgtactgatcatgaccaaagtcctcaaactgcatgaccaaagccctgaggacttatgaccaatattctaaggtaccatgatgggtcacaagggggaaccctcggtgctccacactagggcaacccacagtgctccatattgggctaaccctcagtgctcctcattgggccgaccttcagtgctcctcattgggtagaccttcaaagtctagcaactaacgtgacttgggtccaaatgagaggcactctcgtgctaagcatgtgccatcaaagctgttacagggatatttacaacaagttatgattttttgaagatatttatttcaaatattattttattattattttatatttcgaatttaacttaactctagttaaaaaaaatatatatctgattaagaaaccctaattaagccctagacgtaaacctttataaaagttattaagtcaattataaagggactcacattcactccttcactctaaaaattcacttgagaactgaagcattgagatcaatataagggggtgaaatactataaaatcttgtgttcatcatcaattgtcaaatttatttttttacaaattaatttattttgatcaacatccacttgtattcattttgcttgtttacgatcttcttagatccgttgacgaataaaaatcgagtcaacaaaagatgtcaattatagaagtgttaaccaatattagattttgatctggctaatagtactagtaaaagataaattagaatttctatgcttaatttagtaacttaattaaaaaaaatgtcaagatatatctctttttataaatatatttaaataaaaaatatctaactaaataaaaaatatctaactcaaactcaattttttttttttttgctaaataat

SEQ ID NO: 117686 - DNA, 569 bp, Cannabis sativa
tttatctctatcatatacttcaaaaaattaattaaagtaaaattaaagcttggaaatggagtgatttttgggtgaatattgtgcttgaggcttgtgaaacttgtggtaagctcttattcctcttttacttgagtttgatttctgagtttaaaggctaagtattgtaagatgttaatggtatttgatgttcaagtgagattttaatgcatgttggtggaattagtgtggatttgatgattcttttggttgtttaagctcatagggttatggaatagcttctattgtactttgtgtgattattttttagagttgagatgtgtgtttgaagattgagttaactctgaatgtttttgggagcttaatttttttttaagcttgtgaagtggaaggatgatattgattttagttcaaatttttgctggttttgatgcttaaagagcttgaattaaattatatatattgatgctattagagattgttttgatgtcttatgctctctgtttggggctgctgtgggtggctgttcttcgtgttcagcaaggtgtgaaatgaggaagtgaggaagacga

SEQ ID NO: 117687 - DNA, 1226 bp, Cannabis sativa
ttccgaatacagcacttcaaacctcctcatccgatacagtaagaagaaacgactcattaatttctggggtaagcattttttccacacaatcaataacgggctgggtagatggtaaagaagagctgaataaatttgtgaaataatcggttatcaccacttccaaaccagaattctaagtgacatctaaaccttgttcattcttcagatggtggatgacatttgttcttcttctcgtattggcagccgcatgaaaaaactttgtgttttggtctccttcctaattgcttcgctctttgtttccaaaaagtctctttttgatcaataattttcagcagctgcttcttcacttccttgtatctctgtatcgaagcattatcccttctattcttcaacaaatcaagatctctcttacaagcattaattctttttttaaaattgcctgtaatagtttttccccattcttcaagcttctcggcacaaagtttctgtttgaaccagaaatcttcatcattattctcctcccaacagccttggatgatttcataacacattggttctttgagccaagcattctcgaatttgaaactacggatgcctcccatttgaaccagagcttcaggttccaaaaagatgggactatggtctgaagttgagtgatgccgattatacagctttgcatttgagaattttcgaaaccaacgtgaatttatcaacaccctattaagccgcacctcaatccagttactgcctcccctattcttctcccaggtatatggatgaccaataatttccatatcgattaaatcacaatcactcaaagcttgtaaaaaaccctcaataagaccccttggatacctatttccaccatgtttatcttcttgactcactatattgttcaagtcaccaatgatacaccaaggatggttcaatcgagtgttgagttctcaaatcaaattccaagttttccaacggaggtgcctacggggttctccttacaaaccagtaattctccaactgtcttggttcccaacaaagtcaatatgattttgagaaaaaccatatatgtaaccatcagattgatttttccaaaagaaagctaagccgccacctcttccttaggcctcaacacaaaacgccccatcaaagcccaaataacgaccaacccaatccaccctactcttggcacacttagtctcacacagaaaaataaaatcgggcctcttttg

SEQ ID NO: 117688 - DNA, 2288 bp, Cannabis sativa
  modified_base (27)..(34): a, c, t, g, unknown or other
cggtcggttataaaattttaaaaaccnnnnnnnnccgaccgattttcacccctaataagaacatggactactccattcattaccaattagttttactaattagtttcgagatagaacatcatgcatcttaaaccacatcttaccaaattctatcatggtatcagagtcatatttctagcgaactttcgatccacacctatccagatagttagccatccgcacgagatccagatagtgcaaggacgcttgagatccgaataataatatgcgagccatacataagaacatgggctactccactcattaccaattgattttgagatggaactccatatttctaactaattattaactagtaacaattatatatgttattctaaattttacacatctgatatggcacctacacgtgacataatccagttgactcttaacatgaaaagggacttccggacataagtgtgcctaagaggttccatatgaggctgatgtccataaattgaagattgacttccaagaagcatccagctcgactatcaatatgttggccaaataagggaagattgtcacaccatacaagagtgtttcataaatcatcccataaaaaagacaagtctcaagaagggcatggccggggtgtcaacatgtcgggcagtatgaacgatgccaggactgtcagacaaggttatataagccttgatttctttttcagcaacttcaacaaatacctctaactacatcctacaaatacggatctgactgttttgtccaagattgtgggatcttcaacaaatcgtaactgtaccctagaatatagaaatatttatttttcagtcactccttttacagagctaattgtaataacctttcaattataaatggtgaataaatctataaagagaaggacctgaaatctttatctcgcatcttaaagcacttagttgaaatatattttctgtaacatcttgagagtcctagctagaattcactttgtctaccttagtaatttacacgacattatctcataattaatacaactaaaagaaaagtaaaccactactcatatctaaagggactgaatctctataatttatgtgttctttctatttattcattattggtgattaatcaacgtttattaaattcctgataattttcccattcaacaatatatttattaattatcacctaatgtttgaacaaagaaattggaaaaaagacaaaatttaaaataagaaaggataggaggagcatattttatttatacaaataaccattgagagtagaaaatttaaattaacacatttttcatacataatattgtgcaattaatcttaactattcaacttagttgaattattaaaaatttaattgtttacacaggtgggctttgatagctggtagactccctggacgaacagataatgaaataaagaattattggaattctcacttaagcaagaaaataaatcaatcacagcatcaaccttcactatcacaacaacaacaattacaaccgccaccgccgccacagccaccacaagagaatgttccaccaccgccaccgccgaaaatccaagaagaagaaagcaaaggaaactactttgaatttaactttgacacaattgagttcattgacttctcagcagaaggtaatttctgtgagatagagtgggtgaatacgtttcttgagctcgatgatgagcttcaccagttaccatcttaataatgctcataattaatgggtgatatttttacttttttttagtggattttattgttttcattaaaccacttccaatgcataatttattttattttttatttttttaaaatgattttacacaaaaatatgaacaaatattacaattttttacagttaagctctaaaacacaatagaattgaggatacaaattgatataaaaagtaactatcagataattaataaactaataaattgatataaacacaatattttaatgataatattgaaattgaaaaatgtacattaacgtctcattattgtttatcaacactattgtaaacaattaataattaaaaaaaacatatttactgcgtattaaatttaacaatgttacgttaaatttgataaaacttttattgaacaattatttttgtaagactacattgaatgctgcattggatgatcttccaatctatatatataaataaaggaaagcataagagcattgatgtggcatcttttccttccatttctctattttctctattttgttatgttttctaatttttttctattgaataa

SEQ ID NO: 117689 - DNA, 1275 bp, Cannabis sativa
  modified_base (1237)..(1238): a, c, t, g, unknown or other
ggctaaaaatagcctaacaatttcctccaaactaaatgcttactcgccctcgagtaagactaaaagctaagacaaaaactagactaacaaaaaattaattaattaagcatccattcaatcaaactgttgctgccacttgtgaaacttcattcaattaatcaactagattttcaacccaaacactctaacaactaattcaaatgctttctttgaagaacaatgtataaatgcaaattaaaattctttaattggataacatcataaaaattttactttttccaactttccataacccaatgatcaatatgcttgcattacgtacatctctccacttatgtcaacaatccttgcttgaaatcaaaaggactttcatagttgtaatgtaatggcttaggcaataggtagataaaaagttattttaggctatattataccataagcacactataacccatcaaacacccacaatagtctaatatcccgatatttgcccaaaaaaatttatgattgagaagcttacaactatattcccaacatcacttttttttttactatagttgtgtttttttctttcttttttttttcaaagaagaaatatattattgtctttttttttctttcttttgttttttttttttcgtttagagatgctggaaaacactattactttttttttcaaactcttctcaatcacccacttttctaaaaaaaaaatcacacacaactttttactccctcaaacttatttctaagcttatggcataatgtaaggtgtatcgaaaataaaaatagtgaatggatacgtaataggtttaaataagtggctatagattttttaaaaaagacttaagcttaacttggtaaactaaggataataaaataagggtaggcttcaaaaggctcaaacgatccaaagaaaactacctaaatcttgttccaaacaggcattgtcaaggattttgcctcaagaaaataaataatgcaagttctatctcattcaagcaatcattttgccaaccaaagtagaacaattatggtacaatccaattattgataatttacattgatataaaattttcaaaaagcatctaaattaatctaaagagtaaaagaatcaagcacacggttcatatttcaatccatcccacagataacaacaaaatcataattgatatcagcttaattaacaacacactaaatcacgacaactaaataactaaacaatcaaacaaataannaaatttaaaattaagcccctcccccaaactaattttt

SEQ ID NO: 117690 - DNA, 1441 bp, Cannabis sativa
  modified_base (1408)..(1413): a, c, t, g, unknown or other
tcgatgccttccctttgactatagccttttaccaccaatcttggtttatatctctccacctcgcctttagcattcttttttttttccttctacactcactttactctatttggcttatatccttatggaagagtagctagctcccaagtgtctttttttgtaattgaattgattcttcatccatcctatctctttatttcttgcttcttggtagcttataggttcacaatcatcaaatagacacataagaaaaatgacatcttgattctcagttacctcataaatttcttgcaagcttctaaagcgtggaatcttttcatttgacctctcacttgaatcttcttgtatatttccagttggcgagattggtggagtagtaggttcttaaaattcttcttccatcctttgttgctccgctacatcttcctcttcaaagtaaggaagaaaatcatatctatgttccaattttaagaatcttcttcatcaaactttacatcgcgactgggggtagttttactggtaattgggttgtacaacttgtagcttttggatcttgagtcatagcctatgaagatgtacttctcacttttttcatcaagcttcgttctcttctgatcgtgaacatgaacttaagaaatacttccaaagactttgaggtgataaattctagattttcttccacttcatgcttcttaaggtgtcttctaatgcacacttattgttggagggaaattcaccaagtagactgcacaagctattggttcagcccagaactccttcgacattcttttgtttttgagcaagctgagacatgttgagtattatttgattcttcctctctaccactccattctattagggggtcttggcactgttaatggatgacaaaattccatgatcttcacagtatttgttgaactcatttgatgtgaactctcctcctcaatcagatatcatggccttaataggaagatcactttctttttcaactagagctttgagtttcttgaaattctcgaacacttctaatttctcctttaagaaataagcccatacttttcttgaaaaattctcaataaagaggagaaagtatttactcttaccaaatgaatttggtttaattgggccacagacattagtgtgtatgagctcaagcggctttgtggctcttgatagtgactcctttggaaaagttctttgggattgcaaacatccttcacaaagttaatctggttggttgatgcatggaagacctctccccatctccttcttctctatgagtttaagcctgtcaaaattgagatgtccaaagcatagatgacaaagccatgatgactcattgtagcagtccattaaacaattcagaacatcatgatgaatatgttgggaattattttaccagaatctnnnnnnactaacaagtatgttgaattaacaacct

SEQ ID NO: 117691 - DNA, 1656 bp, Cannabis sativa
ttgaacaaagaaccatggcacttccaaaaccatctaattgtgcttcgagcgccagatactctgcaaaatgtctctaaggaagatttgattttcaccccattttgggttcaagtttattgtctatcgttcttcagtaaatcaaatatgttggctgaagcacttgggaatatcattggtgaattcattgaagtattcgatgattccactaatgaaggatggggtccttttctgcgaattcctgtcaagctctgtacgaacatgccacttttgagaggccaaatgataaggctaccgaagataaaggatgaattttgggtcgatttccactatgaaaggctgccagaattctgttttgagtgtggccgtctaggccacccctttgaaaaatgtgttgcgttcatggaacgtatggataatggaaataatgacgatcttcaatatggcccatggatgcaaggcgctaaacttcctaccaacaattatgatcgatatcggactgactttgccaaaggtaatgcttggccttttctcacaagattggcccgtacaaccattacatcctctttaccatctttaagaaatcgtcaacaaccccatcctagagttctttttgatggggaatcctccactcaccaacatctcagccatcaacaacatcaaaattccttatctctaccaagtccatcacccactgatgatgttcccatacagcctcctatctcctccacttatgattccaattcaggtatccatcactcctctgccacaacaattcttcctttcaataaaaacattcatggcttccaaaccaacctttttccaaactcatctatctcaactattccccacccgaatcaacactcctcccaaaccaacaatgcttttgtctctgcaacaagacacccatactctcatacctcttcctcctcttccggcaacaaaactacccaacctccaagtttcaactccatcaaccccccaaaccagtcacatgacttccgcaccagcaactaccatccccccagcgaacaaaagaataagcaggtttttcagcatgttcatgaaacttttacccttcccaaagccaatttgtatatacatctgcccactcaatctgcttctgtaccatctgcttcacacactaattctttctctgacctctcccacatttatatacctgacttacataataatacttttaccacatatcccccagtactaaaccgaatctcactcaacaccacatttacctctacctcactttctcaaccaatgaaacttctctctacctacactaatgccaaagtatctgtagcaaaagaaaatcagccacctacaacaactttcaaaaggcagaatgactcgttatctatgcagaaattcctaaaacgatgccgaaatggacccggatcatcatcttctccattgtcacgggacgatgatattgaggcactagtttctgatttagaggattctagtttctccaacgactctagtgcggaggttacaaggcagccccgcaactcatcatgaaaatcttgagttggaatgcacggggtttggggaactcgagtgcattcagacatttacggttgcttgttcaacagaaatcgccccaagttttgtttcttatggaaactaaacttcctgctaact

SEQ ID NO: 117692 - DNA, 3430 bp, Cannabis sativa
ttaatttcatttaattatgcaattttgattaaataaatgaattgttgttaattgatgcttgggatatgttgtatttgtgatattattttgaactggggcagttgggaaggtgtggttgagttttggttcgagtttggaggaggaaaactcaagaatgcagccctgccagaaccggtcgaccgatttgcctgtaggggaaattttttagtttttttcaaggtcggttttagggctcggggtgatttcttgtgtctaatatagattgtttagaagttgtaaaacctattttagagctattggaagttaaggtttgttcgattttgggaattagggttattcctgagattttttatttaaggtatttattgaattttgttgttgtgacataggacccgggatcgtcaagctttgtttccattcaagttggcttgtacgcttgatttctggactgaggtaagaaatatttatgcgccgctaagtagttaaataagaagcgtttataatcgttagtgtacctcgattaagatcgagtttaataatatgaattattgtgactcgattgtgatcgagatgatgagggacgattattatcgtttgtgactcgattataatcgaggtaatgatgagaaataattattgttttttactcgattatgatcgagagaaagatacattcattactgttattgtgaatgaataaagatacagtcattaacgttattagtaattactcgttgaaacagttaggttttcttacttatcgttcgctttatcaggcaacgatagtaacatacacagctcgtggataatgagtggtaagagcgctttatgaagcactgaaattttgtgaatatagagatatatgattagaatgctttataaggcactaagattatgtgaatatcagtttattgtaatgatgaagttgttgactatgagttgttacgactttcttataacgtgtggtatatgtgtttgtatagacgctaaattatatatgcatgctgaatatattttgaatcaggagtatgtatattatgttgtgatgtgattacttacgttttcaatacctttgatcctatagattttcttgctgagtcattgtgactcacgggtgcttcgtggtgctggtaaggaggataggagctatgttcagccgttagtcagaggtctcccagtaatgtagataatcagctgtggtgtcttggcttctgggaagtaggatcgatcctttttctatgtttgagagtgtaaccttactttcgtaatatcggttttgtaactagtcataaaagaattttataattaggggatccctgtattgtgacagtagtttgtatgaaagttttattttaaatttaatcaaaggttttaaattaaaccacacttttacctaaactaatagattagttaataataagtttataaaagcacacacgtaccgtccctatgagtcaggacgttacaagtaatgaagatctgtcatatgagtcttctgaagatgttgagcaagaaatcgacactgaagactcccaatgagagagaggggccctaatgtcgtcacgaaagcattagaacccaagacgtacaagttggctcgctatgaatgtcatttgactccggtgccagtaccaaggtactggaacttggagtgtctgagacgatattacctatataaagcaattgttccctagacggtttgtaaagctctaactcataggaacgacacgtgtgtgctctataaattagtttataataataaactaacggtttaaataaaattgtgatttaattaaaaactttacttattattttgaaatgtaaaatttatggcattataaacttttaagtcgggaatccccttttaaaattttataaaagatgtcgtttacagttttacaacaaaatacacatattcatcaaaggcgccattaaacaaaatctcgacaattcgacattgtgagccagatgagctgatatgtacatttgtcaaggaagacctctaattcaaggttgccccaacatgttattttctcttacatgcaccacaaagcacctgtgaatcacaaagactcagcaagaaatgaaaaagcataaacactacacatcaatacgcaaacataattaattcagacaggaaatcacattatccaatgaaaataatcattaataacaaatttttatctaataagactaactaatgctgctagtgctacttaataaagtaacaattattcatcatttcctaatgagacaaccttaatattattgcctaatgagacaactaatgtcaccatcgttgcctaatgagacaacaaaaaagtaagaaaccaaacaacgatttcaaattagagtaacaactctttcttacactgttgcctattgagagaactaatagaataataactatttcttatattattgcctaatgagacaaccaataaaataataactctttcttataaatggtaatttaccgaattatatattgagatgttatgtggtacaatcgtacttttcttacctcaagtcaaattcaagtgtgtcggtgaacatgagtaaaaattactcgtaaatccgggccttatgtcacaatagcgataaactagtaaataactcatttaaatctgttttaggacttaaacttaaaacttgatgtttccctattgataaatagcatggaaatattctaaatatcgagaaaatacaaaacccgaggcacccaaatatggtcccaattggtccaccataaccatatctcgttcatcgaatttacaggttctaattaactggttcccacccggtgcacctgttcgcatcagtaggcaaaactttgagttttcatactcgattttgccccaaccttgcaccaactaaaaccaacacttcgagaacagtccaaacacactttttaaacatacccatgaactcagaacccaaatgtacacaaaaatacatttccaccattaaagctcgagcttgagtttcaaaaactcaaacttgatgctctcaaccaaaacagtagctactaacctttgaattacttataaactactataatcgaagcttaaaacacaatctaatacatacaactgttagggtttatgccctgaaaagtctataagacatttctgtttataaataagagttgaacattttcatatatgcatgaatattaaattattaatatctaatattaaataatttatatataaaattaaaaaaaaatcgtattcatacatgagattatgacttttattgtacgaagaattaatatcacttaaccatgaataaaacagtcaacattatattaaagttatagaatttttaatcaactattgctagtacggttcattgatgcccgttatcaatggacacttcaataaaactcactcaatatatgttggaaatattttaccagaatctagat

SEQ ID NO: 117693 - DNA, 1899 bp, Cannabis sativa
atttaataattgatttagaaatattaagaaaacactttttacatataaatcatacctcaaaaggagcctcgtaatacctaagaaatcagagctaaatcttaaatgcatagatgagtgtacagctcaccaacaggaggttgttccgcgaagataaaagacatatcaacatacacggaaaacgacctcagtattttataaaagatctaccttgtcatccattgcatccttgtttaaaattgcatccattatccgcctcaacattacagcaacatatatgcattttgggcgaaagttattatcatgcacctaatggaaaacagcaagtgtcaaatatcaatccagttgaaaatactttgaaggagcagaaaaccagaaaagtacccgaacattagcaagaaatacatctcgaaggattggtgttactctaccatcctaaacaaaagtggaaaaagctgacttcattataagttcaacatgtacatgcagatccataaaacaaaaaagtacatacatgcatttgcaggcacaattaaaagaacttaccttttcagatgaagcattagagaacatgaactttttcacctacaagaatcaaggaactgcagtttgagcaaaacaaatatatataaatatgtatatagtgttgatgcagataaacttcaaaaaggttgaataaaaatatataaatgctgcaaagaagaaatcatatagacgtttatacattttccaggagtttagagaaataagaaatctgaatatcagtacacgtattaactaacaaaaattattgttgaaattgtaagattatggacattagaaaacaaaagaaaaatcttctggagattgccaatctatcatgttcaatgagaacatttctaattagttacgagtgggaacaagtagttctagctgctaattaccccatcaacataattcaatatgttgaattatccaaatgaattgaagagtcggctttcatagagcatttggtttttagaatataggcaatagttatttattttgtttatgtaatttaaatatctatatatacaagtaattttttttggaaaagagacagaggtcaaaataaacctcctcccacatatattagggagcctcacttatagcggaggaaaatcgtagtaacatattgttactgtagaaacacaataacattaaataaataagacctagtatttctcaaataaaacagcttaaaaacataaatttaggccaaatctgaattatcttgtcgcagtatgcatccccactctctaatgaggtcttggaaggaaaggccttcaaaacctttggtcttataggcccaagtagcaacccagaatttgacttttttccacacctcatgtgtgttatttgctgaattttcaaaatttctcccattcctttctagcaataaggcctagaagatagctaagattgtcgtcgtccacaacctaaaagtccttgtgcctccttttaacttgcattgcatcacttgttggcaggtctggggcatgcaccactggatgccaaattctctaatcagtctaccccatagtgattggctaaacacacactctaagaatttatgggagatggtttccccgctgttcttgcaacagatgcaccagcccggtgatagtgattggtaaggcctgcttctttacaacgagccggggacgtttagcttacctagagcaaggagccagccaaagactttttgaagcaaaaacaaattcttcgaaagttgatttgcaagaaaatgtccctctaagttatgagatctgttagagtattagctgtatattaggtgtaaaagaattagggtaacttgtatttagtagtttcctattttgttggtagtttcctatttcctagtctcctagctttgtatataaa

SEQ ID NO: 117694 - DNA, 1358 bp, Cannabis sativa
ttccaacaacaacaacattctctttgcacctactgtgagaagccaagccatttgaaggaaaaaagctttaaactgcatggattttcccctggttatggtgataaatggaagactgactcaacacaacgcactacctcagatcgtggtcagtcctccaagcgttctacagtttgaggctaacctaccaagggacctacggtcaactttgctttccctcttgcttctccttcgctgtctgacaaggtggcctctctccagcatatgatagcacaactcactcaattggttcaccaaactcaagatgctactgatgccaacacttcaatggcatcaaacctcactacaaaatctctatcatggatagttgatagtggggctacccaccatgtttgttttgatataacatgtttttgctcccttcatacaatccttgttgcttctcatatttcactacctaattgacttaaaatacctatgcacaactcttgaacaatccttgttcctatatctcctttccatgtttgtcacttagctaagtaaaataattttccttttaaattagctaataacatggcagctagtgattaaagcttaatgtgataatttcatcctaaaagttttctgtttcctctatttcttgctctctcaccttttgagtttgtccaatggcaaaaacaatgtccaagattcatgggaagcagccatctgcatgaaagaaatccaagccttcaaagaaatgtggaccgtcctcttctaaagatgtcaagaaaactaaatcgatggatgttgtccttgaaattgagcctattaatttcacggacgaggaggacaactcacttgatccacaacttgatactgaatcttttcaagatttatcaccttgatcagctctttgtgagctgcaatgttagactgatgttggatctaattttgctcacttcctagacgctaataagcaatgcagcagggacatcactcaaggtaatacctctattcctcctatacttagatcaggatctgtagtttgaagttcaaattcatcgttttcagaatgttgagaaagaaaatgtgaagataataatggatgacattgaggaagaagtatcttactagaattcaacaattgtatgttatgttttgggtgccaatccaccactaatgtttctcgaaggtcttgtaaggagaatttggaaagagaaagtagataaggtcaaccttatctcgtatggtatcttcttaattaggttctcatctgtggcagacagggataatgtccttaatggaggctatacctgttgggattttatgccctaaataaaactcgtttcaatctaatctgatttgttatcaataaaaga

SEQ ID NO: 117695 - DNA, 3006 bp, Cannabis sativa
tattttatttatttttttttaattcaaaacctaaccccatataaatagaatattatagctattattttcataacctaatttaactctttttgtcagataaatagaaaataaacagagctcttaatatttttaaaattcactttcttcttcttcttgaaaaatttgaaccctatagtgaatgactaattgcccacgcaattcaaggcaatactcaagatagtgtggaatattgtgtagtcttttgtcacctaaaggagaaaccaagttcagatcttgattatacttggcaagagaaaggatcaagagttagagatctgaacgaaaagagttatattattctgctgccatttatgtaaggttttttttataactttatgtgtttaattcattatttttaggaaattcatatttaggatgttaaattataaaattatattacaacatacatgttagtaaatttagatcctagtaaaatatatctaataattttaaactatcttttatttaatttttaaattttaaaccaaaaaaaaaaagttgagtgtaaaaaatatctctaaacattttttttaattagggttacgtgtgtaataattttaaattattgagagttttgctactaatattttaatagtttaagtgcaaaaataaattaattgttaaaaaaccttatttagtaacaaattgtaaaaaataataattagtaattaaaattaatttaatttttaataaaattaatcctaattaaatttataaggaaataacgtaacaagttataagttatttattatttatttttaatttaaattaattacaatcattcaatagtaatctaacagctaaaaataaatgtaaccatggtagttgcatatttaatataatcattgaatctttttagtgtttatggtgttgtaatatttgtataatcaatctcttagtcgttatattatattataatagagttataattcttaatttatcttctattgtcattaaaactaatagatatttgtattttagtaaccattagtagtgcctttattggagatcctctaaatatttattgtattttttttttttgttatattaatttaatttctcatcttttttataaataaatgttcatctttttgaaagcgaaacttcagccttttaaaataaaagagctaaaaattctcattaacttcctctttctctcatcattactttcttcttttatttttcttctctattttatatcatttataatagttttataacataagtactaggactgttcatccgatctaatctgtatttttttgattaaacaacatccaattcacattaaatgcaaattttatattttagatccaattcgatctgcatagcagtttaaatctaatccaattcagtctgtaataatgtggatttgatcgattattttaaattggttactttttttaataataaattatttaatatttcatcaaaatgaattctttttttttttaatctccaataataatctctttccatcttcatttacatacaaattaaacaaatatacactaaaatatatatatgtatccattaataaaaaagataagattgtatatatatatatatttatctaaatttatgtgtatatgtctacgtgaataagaatgatttttttcgtctattttattataaaataaataaaatgtaccaactcaatatattattagaaaagattaagaaattaaaagtttgtattttttttaatattattaaaaaattaatatattataatttaaaaatatatataattaagtgtgaattgaatttgatcgattactttttgaggtcaaataacattcaatctgcacaaatacaaattttagatttttcaatctactccaatttgcacaagtgtagatatccgcattttacatattaaattagattaaatcatacggattgaattgaatcaaatactttgccctaataaacataatattagcaattatcgaacatataaaatacaatccaagctttgataataaatggtagaacaaaatttcttctttctattttatatcatttataatagttgtataacatgaacacaatattagcaattctcgaacatattaggaggcaatccaagatttgatagtaaagggtagaacaaaacaagacacaactttccatttaagtaacatatagcttttccttcaaaaaaaaataaaataaaataaataacatatagcttgaaagaggagcatgcatactaatggtggggtcacatacacgtgatggtaaacacacatcttagatacttgcaatttattatgacacaagtcagcgcctaaatctcttctcttatacaaatattggaccactttcttttttttctttttaagcttatgcatagtaacacattctctctctctctctctctctctctctctctcaatatctcatttattacaatcacatgctcaaaatttattattttcttattattattattattattattacctacaataataattatattattacatatgaaatgcaatgaaagaaacctatgatggtcatggactatttttgtttgttagtttcttgggtttagatcctatcaatccaccgcaaaaataaaaataatctaatctataaaaaagctaaaaataataaattagggtggttggcaattttttattttttttttgtgtggagagataggtagttttattaattaaataaaatatatatgagctataaatgcgacaaccaaacatatgcactcacaataaatgtctggctggtcttattgagtcttgtgtttttagatggttcattaattacccacacccaccatttttgtaacttccacactctttctttaacctcattcattacattcccacttcaccataaatgccctttcccaaaaggaattcttttaccgtttcacaaaggaattctttgtcatattcttttattttttatttttatcttttttattttttatttttt

SEQ ID NO: 117696 - DNA, 612 bp, Cannabis sativa
  modified_base (569)..(586): a, c, t, g, unknown or other
tgttagtttgttgaatttactacagcaaaaaatagacatagaccatttaattgagcaaactttcacactaccttcaattaattgtcaactaactatttttacaaatgattctatgcccaatataatgatataaaaatcacaaacaattatatataacttttacctcaacaggcaacttttccacaccctcgagtatcctccatagaaacaagcatgctctctaccaagatctctttgtcttcttcatcgaattttcatagtaatgatgatttttctacttttatttttcccaaatcctttttccacccttctctgtgttttggtggctcaacattaatgtcgattgacagccaaccgtctctcccctaccagttgcgatcggaatcgacatcttcgctgacgagattaaaacaggcgtgtcgaaccattatgcatcccttgcatgtttgatctctttcttgaaaaaatctcatgatgaaccctacttgattttgattaccactgtccttttcaattgaaatagggtttttagtcttaattgttgtgtctatgtaaagaccgcttagttnnnnnnnnnnnnnnnnnnttaattatgtttaattatggaaaatt

SEQ ID NO: 117697 - DNA, 4063 bp, Cannabis sativa
  modified_base (726)..(730): a, c, t, g, unknown or other
cccacctaaggttgcattgcttacgtggaaaaaattagcatcatgtggaaatatagctcacaaacgagggagtcaagtcagcatcttagccaacagggacctcgacactcaaataggacataaagtgaaaaacaagcttccttaaaagagctggacgaccactcctagttggccctatggatggccaacctctgaatagcacaaggccggctagcatgcttcttgtaggtgattggctggccaggtatcgacctgagaggatcctctacatagttttaaacgtagactgcaagcttgactacaaactgggccctaacagcccaataaagtagctggaaaatatctatgtttaagagcattttagtctttcgtaattaatcaatttaatatacaaatatctaaagatttcagttaaaaattagggtttaggctctcttatataaagggccttaacgctaacctaaaaaacctaagtctaattatagcctccaagtcattaagtgataaagcctcattctaagcctaaatctctaagtttgatatctcttcctcactcttacactctcacacgcccatatagcatcctcaacacttgagattttccatcttgtttcctactttgtatcctaaagggagctatatcaaatctcacatatagttatctgaatagtattattcctcgatattaataaaactaaaatggaagtaggtcattacccgctaacnnnnngggtcgaacctctataaaattatgtatgttctttactttcagattctaattatgtcacacgtggcaaacatcagattcatatgaccccactgtcggttgatcactttttgtggtaaccaatttggtgctttcattgagagcgagtggatatcgtatatgatcacatgtcgtggttaacatgagaagaactcctgttgcactgtttgcatctttgggtctccctcaagacccacagagtgaaaatcctgatgttcatgttccaaccgcaactggaattactacgaacactacagatgtggttaatcttgtcaccacaataggcaccacaggtttggccactacagctaccaaattgacacaaacatcctagtggatttgaatagcaggcccttgcctccaagggaggaccctcccctagcgccttccagtgaaggaaggacttatgggagacaaccctcgaaaacaacaattgaatctcgtctctagtgctatgttggagagataagactaggagttggctagcgtgcaatcggtgagccccatatcgacttaggaaaatatcttgagttagccagacttagacaagtcgtcgaccaagctggcctaactaaagaaccatgtgctactaattgcgatgtattcactcaatagagatgctaattcctgaggtagatggatgaccaagagtacatcctttgatctcaccaagcagagctagatcgccacaatagagaggccagagacataataaggtgattcaactagaaaactgattgaagaggccaggatatctttagagatccactcaaggaagactggttgatagattagggagggtctatcaataaggtgacaaacttggttcttggggactacgagagatcttcccttttaagagggaggacaaaccttgccacaaaggtctaacagcgagaacagtcagatcttagcaaccaacgacattggggccagccacggatctcaggctcagcaatagcccccgttatccagcctttagccggctagccacctataagattccccttggccagctagaggggagcacttcctccccgaggggagcgagataccgaaatttcaatcttcaactaataaggaccaagagcgggtggaaacacccaaaacaacaatttgagaagtgaaattaatcactttagacatctagatccaccaaactccaacaacttgtgcgatctacctcctttcatcacactaccaacatcatctagccaagggatggcaggctgccagaccttgccctatgcaggtctggccggccatggacaactgcctagtgtaggctcacctggccagagcaaacacccctacctgagagtggtcggccagagtttgaaatacaacacaagtttggccaacctccaccatacactctctcagagtatggctatccagataatgtcacaccagaacctgcaacccctccaagcaaggccagtcaatcaagtccctacagcaacagatccttttgtgcaaacacagttggacaaactaagagacatgatttagggtataactagtccaaaatctttggatcttgaactagaccggtcaaggggatcaccattcttaacatacataagtgccttgcccttgcccaaattcaagatgccgatatggaagatgtataccggacaaggagacctattggcacacatcaaatactttgagatccagctcaatctctagaaggttactggtgatgttcgatgtcacatattcccacccactttgtccgaaacagctcatcaattgtacttcaaactagcccaatgaaggtttaattcttgggtcgagttctctcaagaattctacacccaattctcgtcctcaagacttgtaccattgcagctagaatatcttgtcaaagtcaagcaaatacaagcagaacctttgaaggattacatccaaaggttcatggctaaggccacaaaggtcaaaggccttatagaagagggtcgatatacagccatacttgggggcatactcccattgagtgacttctaaaaagacatccaaaggatcttaaacaatgatatgaaggagttacttgatagagctgatcactttatcaaacttgaagaagctatacgacaggcccagacggggcatgtcaataataggcagtcccaagacatcttgtagtctcatgacttgtcgaatgatcaggcaaataccagcaactctgtcgaaacgtctagtggaaataacactagaaacaagcctaacaccaatagctctagaagaaatagttgaaaaaaaaaagggaagcttaatacttctcccacgccacaaaatcaaaagaataaggaggagaagaaatatatatgttttaccctcctacaggagaaactcgaggccatcttcatggcaagttagagaacagtcccatatagaaagccctttcccatcaaaagggagttgagcaagagggacatgttgaagttctgttagtttcacgacaactttggccatgacaccaatgattgttagaaattgatgagggagatttaatacctcattaggcagaacaatccccacctgggtcgttatgtgcaaaacaaccaaactaaggcacaaggtcccctagaaaagagatctaatgccaccactagtggtaggacacttaagggtcatcattggcaaacctcacattttaggtgagaccaacaaagctagggagcactatgcttcgacacttctttacgagcctaaaagtgacatcctagtagtaaaagaaaggggctttaagtagccaaagcttggagagcccatgatttctttcacagaaaaaaatgttgctcaagtcagtctcccacacaacgacccccttgtcatcactgcacaaatcaggaacatgattgtggcaagatgcatggtagacaatggagcctcctccaacattcttttcaagtcaacaaatgaaaagatggagttccaactcactgacctggcaccctgcaatcaagtgatgtatggcttcttagccaaggcatcccaccaaagggtataacaaattacccctcactattggagaaaatccaaccaccagaactttgatggcgtagtttctcgtaatcgacattccttcggcgtttaacgcaatgataggccgaccagccattaaagacctgaaagcgctaacatcaatctaccacctattcctcaaatttttaacaaggcatggggtaggatgtatgaggggagacgaacagtgtacctgtcactgttacaacttggccttgtccaaagccaagaaagagaagatgcccaccaagagctctgaagaagagc

SEQ ID NO: 117698 - DNA, 528 bp, Cannabis sativa
attatattgaaattggttttatttagggcacaaaacccaacataagattcgtatgggacctctccaagcagttacaggggaagattcttttaaatctctgctatcttctttagtatgtgtaattaactgcttggtattttctttttcattcctttcagagcttgtcatgcctgaagaagatcattatgacgagacaattgatgaggaagacattattgtgaaggaggccattgaaccaaaacttgtattgaattcttctctgcgggagatggatcggtactagaacaagttccataattatgacaacctccagaaatacgagaccaaaagaggtctccaaactgttccaaaattattctggaataggctctctgttcacgaagagatgcttagtaaatgcgccgaaggaggctttagcatttggagttggggtcacgtagagatgggagcgcatctttcactaagaagttgttggattttatgccctaaataaaactccaattcaatgtaatccattttattcaacat

SEQ ID NO: 117699 - DNA, 1617 bp, Cannabis sativa
atgttcgacaccataaacaattttttttaaaaaaattactttttgtttttacaagcaaaaacttacttcttgaaaataattaagcacgtttggtcatgtttttttttaaaaaaaaaacaattttcaaaaaataaaattttttataacatcaaaatgttaatttctagttaaaaataattgttttttaaaatattttttctttattttatctcacttggtttttctcatcattttctcatattatattttctctcatcattttctcacattatattctctgtcatcccttttttgttctcattttctcatgcgtcactttctctctcaccactatctctctattcaagttgggtccaagattcgtgtctgtgttcgagttcggaccagggtccatgggcaggtctgagtatgggttcaagggccggatctgggtccagggtctgggttcgagactggagtctgggtccaagttcagatttgattttggagtccagggttcaggtctaggtctggcaccagagttcgggtttagggccagcatttgggtcgagtcttgatcatatcagtgtcacaaagtattgaagtgctttaaataataaggttcaaaaactgttttgttcttatttctaaaaataggatttcaaaaaccaaaaagtgatcataagctaaactataacctacctagctaaaaatgtgctcgaataatgctgcaaatttgacatatagtatatattgtgccaaatttgagaaacatttattatggtatagaattttacatcaccagcttttttttttgttttatgtcatttttattattttattagtttttttagttataacattaacttataaactatttatattcttttttttttattgtttaacataataaaattaatgatattattatatgtgtttctaaaaggagacacgtggaatattcagttcaatgttaatcaattatattgggactgctcaaaaagccctaacaagataataggccaggacgattaggaaagatgggcctcaagactatctgagctactaggtagttattttcaaaactggatatctctagatttgggagggcgtctcacccaaataaggagaaaaaataaggatcctccgaatgagtgtttgggatacatcgagaagggctttcgaagagacatctcagaagccaagctgaagctgatgtggcgattctctgacaccaaatcccactgtattaggggttgtcccctatgtcaaactctgagagtgtgtgtgccacaaaaaggaacatctcttttttcctacggacactactctaacactacaatatgtaaaggcagcgcacgcacgacacctatcaacctcaaatggtcctctatcgtacggagcataacagccgcacgggctgggcctcaatccgcatgcccaaagtctgtgtattttatgtatttaccccattagtgagtcaagtttacatgccaactatagagggtcacggatattcccgtacccggatcttagcttataaatactaccttatactgtcatgcaaatggtgagaaaattcatggtgtaaacactatagcaaaaagttaaggttcttaagcttatcaagaacattgg

SEQ ID NO: 117700 - DNA, 1070 bp, Cannabis sativa
atcatagcaaatattgtgccaaatttagcacaaaatttgctatgtgctaaatttacatcactttttggctcaccattggagcacatttttagttaaatgagctatattttaacttttcactacttttttacacctccattggagatgctctaactactcctgtctcaaagtttttggctcatcttgttttccttgcataagactttaccaaaacaacaaattccaattctactcactcaagtgtgtgaacctaggatacagtaattgtcacaaaggatataagtgcttgagttcaatagggagtgtatatatctaaaaatgtcattttgaaaataaattttcctttaaatctagtttttaaacacttatgccccagagaaaaagaccatagttcaaaaaatccactggagtaaactccctgattttcacttcactaaattttaccaatcgattcacatcagaagttgatgataattttaatgatccatctctaccttcccttggagaaccacctgttacactaaatcaataagaggtaagtgaacatactgattcatctgttgataatgttgaacacttgcacatatcagaatgttctcgagcaaattactaagcaataacctatggttcatgcagtgcaatctcatccaatggtgacatgtgccaaagttggcatattcaagcccaaagtttactttgaataagaaaaatagaagcctaacattgttgaaccaagcgtccttgaagaagtcatgatctcaaaagaatggtctttagcaatggatgttgatgttgatgctttaacaaaaaaataaaacttggattcttgcaccaagacgcgatgaatacaatttagtggaaaataaatgggtgtacatagtaaagattaatgctgatggaataatacaacactataaagcgagattgatggctaaggaatttcatcaaagaactagtatagactacagtgaaatattcaaccctgttgtagagacatcaacaattagaatcgtcctcactattgttgtgtctagaaattggtaggtcaagcaactagacattaataatgc

SEQ ID NO: 117701 - DNA, 2082 bp, Cannabis sativa
gtaaaattgataatgtattgaataatgattacatgttatacatgctgaaaaaactaggtacaagtaaccattttagttacacttacaacaaactttaactcactttggcaactagcaaacttaacaactttgaaacaaccccttaagatggaatacatatattctgtaaactgatctttatcttaaactatttaaattatgttggaaatgatgttttcatttgaaggtctgccacatgttcttgagatgataaaatgtgagatgtgtcaatcaacacaacttggaccttttctctagtttattgagagtgatttttaatatgttttttcctcccatggtatgaatttgcagcaatgtgaatcgcaactttgttatcacacaatagctgaatatttcattatggtctttcttcagctcctttaggattgaaagaagcaaaatgatctcacatgtggtgtgtgtcattgccctatattcaccttcaattgaggatctttaaactatatgtggtttcttactctcatctaggatattagagatttgccaatatagatgcaaaatccttgtagttgagctcctcagaacttggccagatccccaatttacatctatataagcacatagcttaacatacttctatacaggaagcatcaatccaggatcagggttacctttcacatactataaccatctacctttcttaataattttcctgtaaaactttggagcagtgagtaactcccttgctccttgctttattttcaagttagaatctatcagcgtgctagctggtgtgcatcccagattaccaagttcttcatgaagttgtaataaggtcaatgagagatgaaaaagtttatgtcagacctcgcaacttcaaggcccaaaaaataccttgagcaacctaattctttgagcatgaacctatgattaagtttgactttgagagactcaatttattccagattgttgcttgttatgataacatcatcaacataaacaagtagtgtaataatattagaaggagattgttttatgaacaatgagtaatatttaatagagtgaaaaaatattcctcaatgaaagcactagaaaattttgcaaacaactggcttaatgatttcttttaagactatataaagatttttagagtttataaaatgggttgataggtaaagtctcccccttaagactatactatttaggtagagtcataaaaaaattgtcatttaggtccctactaggaaaagtattattcacatcaagttgatggagttgccaacaatgaatagatgcaagtgccaaaataagcttgataaaaacaaattttggcacaagtgcaaatgtatttatgtaatcaaccccctcctcgctagattagaaaaaatgtaataagagttaagtataaataagacaaacaataaatttatagaagtttactccccgtgactcgatggtaatggagctacatctatttatgtagaaatttacacacaaatatcaggccacacctgcttgctagattagaaagaatgtaataaatgttaagtatgaataagacagtcaataaatttatagaagttcagtcttcatgactcgacagtaatggagctacatctattttgattttttatttcttacgagaataataagaaactagctgagtgtagggctcaaatttctagagagagaaagtatagagagatgctctgacattatggggacttagaagaatatgtaacatgaactagagagctctcattttatagggaaggtggtcaatttgaataataataaaaaatacaaaaaatgtgaaaaaattacgtttggtagatctacgcaactaatgatcatataactattataattgactcttggtgaaaattatcaattttcagagtttgaatctcgtccgtaggattatttttgggcaatgtgttgaaaagattacaactatattgaggatgaattttacacttgaaatattcagaatcgcaagatgagtgtcgtacaaaacttggtagaacgtttaagtagctatgaaatgcaagttgaattacgtcaatcagataaaaattgagt

SEQ ID NO: 117702 - DNA, 4135 bp, Cannabis sativa
aaaaaaaaaaaaaaaaacaatacctaatcttgaaattgctaagaaaaaaagaaaaaatcaaacaggcagcatagcatgtgagcagcatataatgatgagtttataaaaaaggaagaagatgaagagaggtcaaaagagatttgaccaaacaagttattaatcagtaaagccaaacagtttcaacttttttcttgccctccatctctattcaaattaattcgtataaagtcactttgtttcatttgtggaaattttagagcatggctatgggattttttttatttatttatttttttactcaaattttagttaaaatacatacaatgttaaaagagagtttatttttttaatcttactccaattatgctaattcatttatttaaacttgattgtttaaataatctttttatgatttgaatttgtaaaaaatattgatttaataaataatggaaagataatattggttttttattaaaggaaaatggagagtatgatgaaaggagaggataccaatttttttccttgtttgatattaaaaataaaattagactaataaaaaaataattatttattaaaattattatattgtcctcttcaaaaataattatttatattttatagaaaagtatttatgatatttaatttaatttaatttatttttttaagagattaatttactttattttgtataagattaaatttttaaacgggattaggattgaagctcaaaatcaatggttggaggtttcttggcgacaagcgtgggtctcaccgtcacccgccacacgggaggaagatatgtgtgcataattctggagaagatgtcatgccaagagcacatcaaggctatgcggatcagcgacatcagcaaatacagctcctcgtgtgggtattgcaatcatttggttctctctccctagcaaagaatcctttccatgtgtcacaactattagtctctaacccacctcccttttatttcctagcgctctccttttatttttgtatgcttttttattttatatatatctatacatctttgttagtttgggaggtatgaattattttcttttttgtctcttcatttggaattcttttttcatttttctcatctcttttatatatctatacatatatataattatatatttaataacatggatttgagttgttttattattttttgttttgtcattattcatatgtgtctgttttgttatatttagcttgtgcacaggagttctccgattagttatgtaattgttgtttatctttgccgtggtcggaggtggcaacgacagtgaacgaagtggtgatggcagtacattcattaatggtggctgctttaaatgatcatcacaatttacgaagtgtaagttacaatgtagaagtttttaattttaatatatttttgtaataaatgataatcacttcattattatcaatataatttattagataataatagttattaattgtaatttgatttctttccatatactacattttcgaaaattttaatttaatttttaaggatttttgcatatttttttataagaattttaatatctatttaatataattattaaattacatttttgatttattattttcttatttatttttgattttatattaccatctcatttttaaaattttttagttgtgtgagtttgaaatttttactatttataattttattttatttttgaatttttttttactctatacttttatgaatatattagtcaattttaaattttaattttgtttttataagtgcattcattgaaagagtaatttatttttgattatattggtataatttacattaatatttctgcatttaaattagatttaaaatacatttatggacgattttgattttattgctactttaatgtgatttatgttattgctattttttatttttatttaattttttaatgtgatttctgatattgctattttaatgtgatttagtttttatctcttttagatattaaaagtttgagagaatcttggtattaaatatcaattagtattttgttttaattagtttttagtcaactatttttatagtattaattattaatatttactatattcatattttaatatggaaattttcttaattattaaaattattgtgtttgaaaaatgtcattagttttcatttgaattgctttttttctctttaataatattaattgataatttccttttattctacatttaatttatatttactttttaaataataattatgttttttggtataatatcatttaatatatttattcttgctataataatatatattgaattctaattaatttattaatttaaatttaattattatatccactaataattattaagatttaaaaacatataacaatttctatatataggtattaatgaattatttttattacatgataaataagttaggtataattgattttattttgagccttattttaagagattttattagatgcttttttaataattttatacattactattattattatatttattttcttttctttagttttacattaagttataatagtctttatatttaattatattattattttctgtaagcaattattaataatcaaatagttagcgaattaatattttatacattgtgaaaatttgttgcgctacaattttgttggctttgatgccttttaaggtttttgcgcttatttttatagcttgcccctaattatttaggataatatgattaattgttccttattttcatgagaaatacaagttttcaaaggaatttttgcggtattgagcaccacgagcttagtttggattaggtgttgttatattgttagaagataatatagtccacgttgcgttgagcaaacccctcaaagattagtcatagtactgggtacattaaaaacattattcgttgcttatttcattattttgtttacttccaaaggaaattttatctcctaagttatgggagctttgcaaggcatatttgttgttactagactacatatcaaaatctttttaggtcttaggatcttagtatgagatagtgatccttagatgattatgaagtaaaatgaaagagtttagttgctactagctaaaggttattccctttggctggttctagtaattttattagagatctagtcgtttagttttggtgtttgattgattttgataagcttgataattttctaattattaattttttttttctggttttctaatattttttcaggtgaaacttcagtgttgcaggctgaaactttagtcctgttagttggactcaacaaattaggagcgttgtttgaagttgttatagctttattgtctaaattttcgggggcagttttgtcccatgtggctcgctctaagattttagcggcccatgacttggcaaagcatgctctgctgttagacgatgagctatcatggttcgaggaggttccagcgccggtggcagacgtctgcgtcgtaaattcatgagtgattctaatcactttgtccaaaaaaaaaaaataaataaataaatacaagaattacacgtaaatgttgaatctcataagcaaaggtcatatttgtaacatgtcttttttgtacatggatctctcttctattgagtcttggcatattctatcataagaaaagtcgttgacagataattgaattatgtatcttaaattaatataattttaggatttttaatttttgtgtatcaatgattgtgggttcctttttgttatcaatgatctttttaagtttcataaaattttattatgattttaaatcctacaactttaattttcaattaagaaaattactaaaattaaataattattactaaataaaatacaccgcactaagggtaagcaatgatcgacttaatcaattttttacattaaaaaattcaaattttggtttttgatttttagattataactatgaaaaccgaccgaccattatataaatgtaaaaaaattaactattttaatccacggtttggtcggttcaagcttcattttttttttttaaaaaaaataagtcttaaaattttctataattatttgaaaactaaaaaaaattagagtattgtatcaaatatcat

SEQ ID NO: 117703 - DNA, 1071 bp, Cannabis sativa
ctcagtagttaactttttcaccaatggattaagcaaagcagagagaagtgctcctccaaccacttcagccatcagatcttcaaaaattcagaattgataaaagtaaagattgattgatgtaaaagagagctgagttagacattgtttattatatgatatgagtttgttttgccttgttaattgtgtaacacaaaatttgaataatattatttattaactaatgctaatttactgtaatgttaattaaattaattgtggattagcagtaaattacatgtgctttcacgagtgaaccagagcaaggcctatgaaaacaagagattaagctttgaaatctgatcattttattatatataaaataatagttaaaaggtaacatgcttatatttagagaaatgctaaaaggtaccagtagtgccaagcacccttttacgtgtcaatatcgctattggtgtaattaagtatcgggtcccatatagtttaatataataacttttagggagtatcgctagtcaatcgcaaagcgacatgtctttaagggtgctactaacatccaatagcaatggtctataaatattacatataaaatgttttagtctttcttttattataaaatttagaggttaattggaatcagctttgttattacaaatacacaataatataatgtccactagagactgctttccaaatatttatgctactttaattatcactcttaatatcttattgtttgtcttattatttagtatttttttcattagtttatactattttttatcataacaccaacttagtatcctattactttagaataccaacataaaattaaaaaaagaaaaaaaaatcacacctctctttaaacttttagtaagtgcaaaatcttttcaaaaatctacattaatattgttaaatcttaaaactatgtatcataatatgtttgttaaaaatatcatggccccattgtaaaaaattaacaaaacaaattagtagctatgggcaccaatagtgtttagtacattctaaacgtgttacattgcgtttggctagcgatattctataaaaattatt

SEQ ID NO: 117704 - DNA, 1318 bp, Cannabis sativa
tttattttcattccgtttgtaattaaagtttaattttcgtgctaattttattagtaattccgattaggggatcaaggttcataagtatattgggtagcacgcttgattatttaaggcgttacattattcgactgactcttacagttgatgtatctcaaatgctggggctaattgttgactaatctcgaaaatcaactctgtcgatttttggggtgaacacaatatccacttgctcttaatgaaagcaccaaactcctgaccacaaaatgtgatcaaccaatagcagggtcgtataaatctgatgtttaccatctgttacacaattagaattagagagtaaagaacacaagaaattttatagaggatcgacctcctttgttagtgggtaatgaccaactccccttttaggtgtattgataccgagggaaaatactattttaagcactatcggtgggatctagtatagctctcggaaggatacaaaataggaatcaagatggcaaatatcaagtgttgagaatgcttgtatgtacgtgtgagagggagtgaggaagagcgagttatcagccttagagacttagttatagaactttatcactgggaggctagaatgagccttagagatttctagattagagttaaggcgctttatatagtagagcttaaccctaatttacaactaaaacccttagataattgtatattgaattaattagttaattacaaaagactaaaatggccttaaacatagatattttccaacttttttattgggttgttagggtttcaattcgcagcccaactcacagtccatgtgtggaaatgtacaaaaaatcctgccaggtccttccctggccagccaggcacctgtagggggtataccggtcgaccatgtgttgtccaagggttggctggccataagatcggccaagggtgtccaatcacttctttgaggaagctagtctatcactagatgtcttatttgagagtcggggtccctgttggttgaggtactaacttggccttcttattggtgagttgtattgccacatggcgcaaattttgtccacataaacaataccacattaggtgggcaaaaattagaataataattatagtcttactaatctaattatacgataattagggattttagtggaaatgaataaataatcttagtttattaattataaagattttattagaatatggggggtatcatacatgctgtttatgaaataaaaatattttcaggtcttgcaaccatggagaccgaattggtggccagaaatgccacagtggtactagtttgtggtat

SEQ ID NO: 117705 - DNA, 587 bp, Cannabis sativa
atctcatcagttaaggttatacataaatatacttcaaatatatctcacttcaaaccatatacttcaaatatatctcaatagcttcaaatatactccaacataaatatatatctcatcagttaatgttataatatatatacttcaaataagtatgaaatacatctcatttcaaacaaaattatgtttttctctcacttaaaacataaatatatattatacttttctcttactttaaattagtatgaaatatatctcattagttaatattatacatatacttaaaacaaaacaattaatctgtaaacagtatagaaaaacagtaatattttatattaatttgaatcacaatattcatgtaaataaattattattaacgtgcctgaatgtaattaaatttcccaacaaatatttaggatccaaaatgaaattcttatatcttaaaaataaaagaaggtataaattagtagaatttctagaactaagaaaattcagctatctttaacgaaaactattccttagaaaagtctttacactactacaaaaaccccctttagagacggtttttaagccctttcagcgtcggtttt

SEQ ID NO: 117706 - DNA, 1733 bp, Cannabis sativa
  modified_base (130)..(132): a, c, t, g, unknown or other
gggaagcaagatcaacccttttttctatatttgaaaatttaaccttacttttataatgatgattttggtaattggatgtaaaagaattttctaaataggggatccccgtattatgacagtattttgtatnnnagtcttattttaatttaatcaaaggttttaaattaaatcacactttttcttaaactaataattagttaataataaatttgtaaaagcacacacgtggcgccccttgagtgagggcgttacaacttgttatatcaaggaccaggtgaccaaagccatcttgactgtgatacatcataatggcttgtatacttttggtccaagtcaattcaaggtgtttcccctcattcagtcaagctctcaatacatcatatctaaaaacatcttttattgtcaccaataactcaagtaattcagagttaagttcctgttcttgtactcattgtaataagtctcttatatttgattttgagttatggcgtaataaggtaggtcatccatatgaaaaagttgttcaaattgtcttgaattcatgtaatatcttgtgtaataaatgatcttttgcagtttgtcaagcatgttacgcaggtaagattcataaaatgacatttccaacattttctactattgtctattttgagccattgcaacatgttgtttctgatttatggagtccttcccatactccatcttataatggctataaatactacatgagctttgttgatgcatataaaagatttaaatggatttatctactgaaaaacaaaatcaaggcccttaaaacattccaaacctttaaagttgaaactaagcttcagttaggaaagaaaattaaagggttacaaactgataggggtggtgaatataatgttgagatttatgccctaaaagtaagtatttaatggataatatattatataatatatgaatggttaatataagataaataaatatagtaactataggagtataattaataaatatcttaaaaatccttattcatatggagatggtataatcttctaaggtcgtacaagagaattaagattatatatctagtgtgtatgattttgattcggatcacatatgtggataaacatgtagcaaatgtattatgtataatttgattatacaagactggaccgatatgtaataacatattttatcaacatgttaccatgaaagagttattcatatcacaatgatgatcattagtagatcagtctaaatcctgagtatacatgaactcatatttgtgctcattgagttcttcgattcactcgttaaagtttctcaaagaagataattcttacaactgatgtttttaaagcttaataacatgagtggctagggacatgttatacaataatagaatctaagttttttaaaagtatcaaatattagttcccttatagtgttaattctgagagtgctaacagttggatccaaatctataattacattatagataaactgttcacattaaattaatgatacataaggaatcaagagataattagaggggtaaaatggtaattttgaccaactcttattatgaactaataattaatttgagagtgaactacttatattgtaatatcaatggattaaagtaagaattctataaatataattctatagtgggaaacagtgcaattctatatttatagtggagtaataataaaattaataaactggattattctattaatgagattgat

SEQ ID NO: 117707 - DNA, 1768 bp, Cannabis sativa
atatcatacttgtctaatttttcaggctaataaaaattcccttcaaactattaaaaatgttaaatttaaagatttctatttaattctttcaattttattaaaaaacatttaatataaataaaaatttgagagatacaatttaatacacaattattacgcttctattaaaaatcttcaaatccaactaaaaaaaatatatttatatataaatatataggcaatcaattttgtactcaaaaatgcaaaacacggaatgtatttcgttgtacgataagtacgtaataatgtgttccagggtacgttactattttttaaccttaattacctctaaatcaactctaatcctcaaattaaataactactccatctaacagctgtcgtacatcacagaatacatttcgtaaaagtaaaaaaatcgtgtccctaaatatatatatatatatgtctttttcattagaattaacaagctgacaaaaaccaaaaaaagtttaccataaattcaaacctctcatcactttacctaatggaaaaaaaaagtacctttatttgtcacttatttatttaattaagatttatctcaaaaaaaagatttaattaaaaaaaaaaaaaaacccgataattggtcgcggcgggcttatgacccgacccgatgtccagttatttatatttagggaacaaaaaaacagatttttattctgagatcgaaactgacggagccggagccggcggcggaggagagtgtccgacaagagaagcagcttgtgacggtggcttagggtaatggtcgacatggataatcactatgctctttaatactttcaatataaagattcaggttttgttcttcacttagggttttgaattttctacttcttaatttgattttatttttctcgttgtgtttgtgttcctcaacttaaaaagtatgatttagtcttttttaagaataaaagtttgggtgaaaattagggttgtaatatagaaattaagagtctttactctattggttcaaatccaactccaaccacttatataattgttgttgttgagctactgtgggcttgaaccaagaagaatcaactaatttttctaaattctcaaatctcaactaattaatggcttacctgggatggaatttttctgagaatttaggcttgtttgatttgatggctaaggttttactgtaacaaactgtctctttgactcttaggcacaaatagaagaagaagaagaagaagaagaagaagaaagctataatagggtgtcattgtctgaatcttaacaaccttgttgtcttgtctatacacaacttagatgtttaggattttaattctgatgtttcatgtcttatcactcttccaaattcaattctagtggttttggataatagtgtggtgagaaccaagtaatccaagctcaagaaaacagtagcaaaacagtagaaaattatattgaatatattatgagaaaagctccttaggcccctttgatttgcataccccaaacaaagtgataagactctgtttcgatcaaccaaaccagtagcaattagcacaacacagcagtaagaatagtagcagaaaaacaaactctactgaggattgggtttgatgttgtatttgttgctgtaattctttttctttttttattgattcatcagtatgaatatctgcaaccttttgtgaatttgtgtgtttttttctaaatggttcattgctatgtgcattttcagcaaaatctgataaaaaccaaaaagaacaaaaaaaaa

SEQ ID NO: 117708 - DNA, 1303 bp, Cannabis sativa
cccaaccggtaaaccggttccccaacttgaattccggttcggtagggttttctggggaccaatcggtcgaccgattgctacaggccccctgaaccggaattctggttcaatacaaggaactctaaaaatgtccccaacacctcaaaacaaccccaaactctccaataatctccagaatacctgtatatacaataatggacccaattcaagcaaaagtctaaccatattgtcctgctattggtaaaatcttaaaccatatgaaaatgtgactctctaatggcccaacgtcgtgttttactgttaccgagcgcaaatatagaaaataaggaattcatatatatagcataattagtacatactaaatttaaataaatctccacaattgtgtaaatcataattaataattcaatttcataactaaaacgacagatttttttgggcaatctgccagtaaaaatgggacaccatttccatagaaacagtgagccattttgtgttgtagaaacaaaaaaagtttcatttcgagcacaaaatgacgcaaaacttcaagataacctcttgaacacctaattaagcatcaacaaacatattgcaagtggtagaacctcaaaaaactcataaattcaaaatctatcattattaagccaagttttagttattgaactcaaactttctcaataaccaaaccaacccctaaaaaactcaaataaacaacaaacaacttaaaaccaacccagaaaacaacccttaatcctttagggtttggacataacatcctctccaattgtcaaacttaaacacaacaaaaagcatcaaaaaaataagaaaataagagcttaggattttacctcaagtttactaagcacaaaccctcttcaattcagagactacaattcacaaaatatgccaagaattggcttgattctctttggcgagagagagaggaaaattaaactttgtaattatctaaataaatcttatctttattaactaaataatcttttatttcagctaataaaataacccaagaataaactagaatccactaataaatccacataaaataattggcgtaagacccaattgtcttttacttaaaccaaccttaagtaatctaatagcttagtggtaaaaataatctaacaccaaacccccacctaatctcgaaatttcagatatcaacatatatttaccccgctaaacataaggttttaaactagggctttttcataaatgtacaacaaaaacaacataattacaaaaaatatacaaaaaaaattattttaaaaacttatacattttg

SEQ ID NO: 117709 - DNA, 1214 bp, Cannabis sativa
aatgaaggggtttatataggctaaagttcatgtttgagcatacctgtgacccgtttagggttttttgtaaaaagcccacccactattggggcaaaatacattatatacatgactattgtgtcccttagaagaattcctcccgtggggtgacgattctgtattgttgggaccactgttggtgtagggcacgtgtcaggcgaaagacatgcctgaaagtgctcagaggagccgtcagacagaactgggtattcagaaaaggtgtgcgcacccattgtctgacacaggggacaaaatctaattttgtgtcagagaggtagcacgtcaagggagacgtccggcttccacttcgtagtaggcttccagtattctctatgcacaagatgcccgtctcaaactcttcagatggcttccaattatctctctatagacttagtaggtttagtcttctccgagtcctggaaggctgggaaggcttttgggtcctggaaggttgctttgtcttatggcaaggtgctgaaccttcctgaacctaggtctttttcaggttagcttagtcattctgtgaccttcggcgattaaagagacttaagcgataattgcttaaatcatcatcttatatctttcaccacgtggccctattccggaaacacggataccaccaaataaatacccaatttttaagatttggaaggacgtggaaaaataattgtaatacttcactctaagaaatataaatatttttcttttttcattgttgctttgaatatttctttaaattttcatgttttatcttcattctaggggtcttgtgtttgagctttgatcttccagccatatttggttgacgagattctaccgtcaacagttttccctataattaaagcctcaactaaacccactataacgaggatcacacttttagttcttaagccaaaacgttactgaaattgagagagcatcattgttgtaagcgtcaataacattaataccattgactcataaattagaattttttaatacctgatccacgtaaaaatcaccattttatactttcctaagactctaaaatctacatttttctatatttatttaattgtagaaattctcggtcaacaaacttttataatatgatttttaattaatttagtcttcgtacatgaacaagttgtaatataatttttaatataaatggtaggggtgttcgcggtgcggat

SEQ ID NO: 117710 - DNA, 1795 bp, Cannabis sativa
aatcaaaagcactgtctcaaaaaaaaaaacaaaacaagaaatcactaacaaaggagcaaaaaaaaccatctcagcaactgcgccggcgccggaatcatacgagagtgagttttctggtcaactcattgcgactttggaatcgggagttgggttcggttcgggtgaatatttcatggatgtttccgtgggtacacctccaaaacactattccttaattcttgacacaggtagtgatttgaattggattcggtgtgttccattccatgattattttgatcaaaatggtccttattatgatccaaaacactcaatctcatataaaagcattacttgtaatgaccccaaatgtgaaatggtctcattttgagctgcggctaagatcggtgttggttgtgcgtggagctggaaatggggagtcagttagggtttttgaggatggggactatgatggggctgattttgggggagtcggctagggttttaaaatgaagaagttggagagagaagaaggaggcgtgactgtgaggatagaagaagaagaagaaagaaaaagaaaaaaaatataaaaataatttttttaattttaaatttttttaatttttaaagaaaaagaattttttttttatattttcaaattttatttttaaaataattaatttttttattttaattttaaatatttattacgtggactagttaaactgtgccacgtgtacactgtgtacacgtagacattccaacctggcacttaacacccaaaaatggatgaaaaaggctaagtgctaacacagaacttaggaattgggggttggtggtaaaaacttgaccacttaaggaggttatgccgcaaattaccatttatatgatcatttgattatgtctttaattaatacactgaaattacgtttaaataagttataatttacacgtctagtccaattttatatattcacaaatatataaaaatatcttctctaaagtgtcatacaacactagttatacagacttgtgtcatttatattcataatattagttgttgattcaaaaaattatcaacggtgtgaagctaagactacgacaaaagtgagtacgatatttgtgaagtaaagaacttaaatataaacgataccaattttaacagagatttacgtctgccaatcttcttcttgttgtatgtttcgtggatagtaaaactattagtatagaacttaacatagatgagatcattattggcaagacaactaactatttgaagctagaaacatacaaaacatatgtaagaattaaatgtataaagatagctattgtaccactttgattgaccaagagagtttcattgtttggaaaataagcctagtggtagaagtaggacaaatgaatagaaaaaaactttatatctgagcaaatataccttgttgcccctgagtcaacaatctaggaatcatggtaatattgaattatatatatgataggatgatacttggtttacctgttgaggtgccagggtcttgtgggaggcattatatataccattttgctgtccagctagaaggttaaaaagttgttgatattggttggctgcgatttgaggacgagctgtggagtttctaactgtgttgttgttgctgttttcattgctactttgtacttggtttgcgatagcatctttagatgtgttttgcgtgttgtaacacagtggatagccgtgcaacttgtaacacttagaggatgtttagctttacagtttaaaaactgttttctgttttttaaaactgaaaacagtttttaaaaacta

SEQ ID NO: 117711 - DNA, 615 bp, Cannabis sativa
agcggcaaaggcgggaagatttattcaaagtgatttagccaacaatcgagtagtcgtccgaagaggttttctgaaatttcaagtcgaaattgacactgggcatcaattaacttcaggtttcttccttgatatcaagaggggtcgaaaggaatggatccagttccgttatttcaaattgcccaaactatgttacaactgtggtcatctggggcatgataagaaaacttgctatagatcgattgtttatgcttacccccctcaaggtgaagcagtcccagcatatgggccatggatgaaggcagagacggctgtttacagttgcttcaataccagaaatcagctagagtttttcagagactcaagtgaccggagttccgtacaggcgaagactccttccatgcctgcctcgagatccaaaatgatgggaaagagacctgtcgaggaggacaacagagatcagaacctgcaccagccaacttgcaacaaaccattaaggaaagttatcagggtaaacaacaatgaaccaggttctacaattggaaaaaatttgaaggtagtagagacaaacaagccaaaaccgacggtcaatagaactgagaacagaccttatacatc

SEQ ID NO: 117712 - DNA, 2128 bp, Cannabis sativa
caatgttgagtttgttcctgaacacagagaatctttcactcgaaatcgccttagtcaagccatcagcaatttgatcatatgcaggaacatgtttaatctgaaccatcttgttgagaaccttttcacgaacaaaatacaagtcaagttcgatgtgcttcgttctagcatgaagaacagggttctgtgtcaacaataccgtgcttaagttgtcacaccaaatcgtgggaggttgaggaagctggattttcaattcagaaaataggtaatgtagccaggacagttcagcagtaacgtttgccacactcctatattctgcttctgtactagaacgtgagactgttggttgctttttactcttccaagtgattaagtttgtcccaaagaaaatggcaaagccagtagttgaacgacggtcatcagggtcagatgcccaatcggcatcacaaaaagccacaagatcaaaggacttgggtcttttgaggtgaagaccaaagtttgtggtgccactaatgtacctaagaatccgtttaacagctaaccaatgtgtagttaatggcttttgcatgaattggcagacacgattgacactaaaggagagttcaggccgagtaatggtgaggtactgtagagctcccacaattgatcgatagtgttggacatcggccataggttccccctcataagctgataaacggattgtactgaccattggtgttggagaaggctttgcatccaccatttgggctttgagcagaaggtctcgagcatactttgcttgacataaatgaagtccttgatcagtgtattgaacctcaatgcccaaaaaataatgcagaggacccatatctttgagagcaaactgagagttgagtgtggaaattagatcagcaacagcagcatcatcacttcctgtgataataatatcgtctacatataccagaaccaaggtaacatgggtattgcagtgaagaataaacagagagtgatccgaatttgatgaaacaaaaccaagggataagagactgtgttgtagtttgtcaaaccaagctctaggagcttgtttaaggccataaagagccttatgaagtttgcaaactaaatcagtttggccaggaatctcaaacccgggtggttgaatcatgtacacttcttcttgcaattctccattgagaaaagcattattcacatctaattgcttgatactccatccttttgacaaggcaagtgttaaaaccacccgaattgtgactggtttcaccacagggctaaacgtctctgtaaaatcaaatccgggttgctgatggaaacccttggcaactaacctggcctttagtttgttgacagtgccatcagggttttccttgatccgatatacccatttacaaccaatagctgtcctaccaggaggcaacttaaccagggtatatggtttgttccttgttaatgctaagacttcatcagccattgcattattccactgaatttgttgcaatgcttctttaagagtggaaggaacttttgtgaccaggtaagcttttttcttatgaattccacacttggatcttgttttcatgctatgtgtgttctgttgaggaggagcagcagcatgtggtgaaggtataggaggcatttcagatggacctgctgaagagagatcaggttgaagagattgctggtcagtttgcacaagttgaccagggtcaggttgatgagttcctggtgcagaaacttcacaagcagctggaacatcagaagcttcaatgttttgtcgagagaactctcctgcatcaggcacatcttgttgactaggtagccaactgttaggaatagaaacagatgcaacattttgaatagcaacagatggtgatgaattgtcaagtaaaacaggttgatcaatccttgtatttggagaaagtaaatctgtcatggtgtaatgagttttgggatgagagcaaacaggtataatggctgatacaacagaatttgtgtgtgattcagacaagggactgctatttttgacagcaagctcttcataagggaacacaaactcctcaaaaatgacatctctagagatgtatagtcttccatttttatcaaggcatttatagcctttatggtttagactata

SEQ ID NO: 117713 - DNA, 781 bp, Cannabis sativa
aaaatagcctcacttaacaaactattgaggaatgcattgataagatcaagttgtgtcactgtccaattagaggtaacagatagagaaagaattgttctcatagtaacaagtttcaccattggagaaaatttttcctcatagtcaattctaggagcttgtacatactctatagcaactagtcttgacttgaatcgatccaggcaacatttaactttactctatggacccattatttctaataatatccattccaggttggtagggaaccaatatggggcctgacttttgagggcatgaaattcatgttgcattgaggccaaccattgaggatgcttgagtgcatcttgaatagacctaggctgagaaggcaagaaggactctagcaaagatgctttgtggccagataagcctttggtttaacaataccattcttggatctagccgtcattggatgagatctagcagcaacaggatgagatgtgctacatgaggcaatacttgatggttgaggaggtacataagtgggaggaacatctgtggtagagtgtaataactgctggatgaatagttgattctacagtgattaatgttggaactgaaagaggttgggatagtaatggaatagaggttggtgaaccaggttaaatttctgagtattgggttgtaaaacatgtcaaatttttgagttatttgctggtagatcaagttgaatttctaagttgtttgctgatggaccaggttggagtaatgggtgagtggcttgtggatggtgatccaacat

SEQ ID NO: 117714 - DNA, 1288 bp, Cannabis sativa
acggacacagagagagagaggaagtcgcaatctcgctggtaataaggttgaagtcgaatcgtgcatagttattggcttttggtctcactggttttagggttttctttgtttctatttcaatattctcttcaaaagaaaatggacagttaaggaaaaaagggggaaaggactaattttctttgattgctttagtaaaattacagttagtaggaacttgtcaaaaagtaccacctacttttttacactatctattatgatactttaaataagttcctaaaaaaatttcaatgtcccgcctatatcatttaggctaatataataccgttttgaaattgttagatatttctgttatagaataggttttctcttgtagtgaaacatagtagtttcaacttatatttttttaattatatataaatacacttaataaaaaaaaaaactcttttaattaagttagtcggattagtttgggttggttgggcgggttggtattattttcaatccgcctaataaaaaaattggacgagttatatttttgtcaaattttttagtttgcatttttcgtcgttatctcgatttcattatttggacaagttattagggttggacgattacaaaattatgtacactcttactagtgactatgctagaatttggtggtcagatttaccgagttcgtgaaactctttttcactttttttttttttttttttgcattggcctaataaagatttcatttgatttaaaaacacttttttttcttttgtctccaatagaatgccatccaaattgagcaagagaatgtcacatagaaccttacaatccccaacagaatcatgcatcttgaccctgcttaacttctcagaagatgatgatctgtctgtaaggaccttctgcaccgcacaattagtacatgcatacattacattgacacacacatcaaacaagtggccattacatcaaacaagtgtaactattaaaggaaaagttcttttacatcaagcaagtggccattacatcaaacaagtgtaactatttgtgtaactaatatgtgaaactatgaaaattcgtttcttttctcctataaatacagcgggcattacaaaagaaataaaaatattaattagctacccaaagtataggagagtaagaaaagaattaatgatgaagaagtttttggttatggcgttggtagtgggtgtgatggttgtggggtgctttggtcgactacaaccggatattcatctgaatatggtacctaacaggtgtagggtacctggtgaatatt

SEQ ID NO: 117715 - DNA, 699 bp, Cannabis sativa
atttagttacaatatttacaaatttgtaaaccaataactatcctcatccgaaacttttttaggccaaaagagctcaattctatgtttgacccccaatttcagctccttgatcaatttgacaggatcttgttcttcttaggtccaaaaatacttgtttctcatcagccatatgttgtagacaaggctggctactgcagcaattataaccattttcctgaatttacttatcttggctctcccaatccatttgaggagattagggagagttgtgtgagtggtcctccagtttagccaatcctttagctcttgcaatctgtttctagtcatcgagcatttaaagaataaatgatcagtcgattcattgtgatcacaacataaaatgtatcattgttcagttgcaatcttcattttaaacaacatgtccatggttttaagtttctagtgtattgcaagccacaacataaagttgtgtttaggtgtatttaatctgctccatacctgcctactccattgaatttttgttcgagttggacacaggatgttgtagccttgtgacacactgtactgttgctgtaaatatgttcttccctgcagtgccttcttgaattggtctttgagcctaactaaacatttccaataccagctgcattggtttgtagggcagtaggtgttggaattaatttttaccaggatcttaga

SEQ ID NO: 117716 - DNA, 693 bp, Cannabis sativa
gccaagtaaaataatttatggcggtggaaggattagattttggcctttatttggccaatattctggaccaggcatggggacaattgcccctgcataaataactatgatgacttccttcgtataacatgcagcaacaaaatcatattgattaagattggaatacaatatgcaagataatacatgaccacatggaagacatatgacgtcataggatctgcaagagcatattttggtctctaaatttattgataccacctggccagaagacacggtcacttggagtaattatccaactgactttgtacactgacattttatttccaacctcctattcttctctaggatatcatagatcctcttcgccacttcatacttccacttactcacgctttctctttactttcacattctatccattaaccaataacaaacatactctaatagagttatgattgctttgtcccttttatccaagatatttgagttgaaactctcacaaagattattcagaaacatatcacactgaacaaaagtcctaaagtgagatttggtccattatgttgatgattttttggacagccaattgaaaggtgcttcattagtctccttcaactcattcatttttctcttgaattcctccattgtagtttctctagcacaaaagcataattgttgcttcaacaataatcctgg

SEQ ID NO: 117717 - DNA, 3466 bp, Cannabis sativa
gatgaaatttccattcaaaaaaaaaatcctaccttttcaaaaaaaaaataaataaataaataaataaataaaaactctattcctaatattcttctatagaagatggcatacctttaaataattaaaaatgtgattatttacataattaatatataattaacacgttttattattctttgtttgaattttaaaagtcagggtcccattatatctatatgtttaccttttacactactaggaagagatacgcatgctagcttataatttcttatttcttttcttttttgaaagggagctacatagcttataattaattaaacaattctccaattctttttctttttttctatatgattagttaaacaattctaaaaaattgagtatatattttgtgtccacaatcagctataacaattaaaataaattcaagcaaaaaaaaacaattaaaataataaaaaaaaaatccttgtcttctttgaacgtacgggtacacaagaatttaatatatatatttgtattattctcattaattttctgtgatcggaaacactactatccatcgatattttttttagagcaccgtcgattttttggcttactagttttttttttttttttaagaaaaaaaaaaaccgtttagcagtactataaaaacttagtttgtcataataaacttcaaagtgagtattaattacttaaaaaatgcagtttttcttaacttttcatctttttttattgagtactggtattgaaaacaagtggtagcactttctgtatatattgtcttgtaattaattagttatatactacttaaaaattattatattaattatataggacctctctttatttgaaccaataagaatattaacaagtaaaaagttaccacacaccactaataccttttatcttttttctctatgtattaatttttttttaggaaaataaaaaacgaatttaagtagacaaaatggctttcgatactatactcaaatatgtaatatatacgaataataataattgtgacgattgttgttttaattgttgttctcaaaccgatattattctatcaagtttttgaaatgagacagcactatttagatggataagtcctatttgaataaggccatatgtaatatatcttataattatatatgtatttggtcataatcatagagtcgctttctatgcgtatgtatttatatatatatatacactttaattatcttaaaagataaaaaagagaagaaattgaactaactagctttatcggtccttccatggattaataaaagaatgagagcggcacaattattgatataattttaaaaggattaagtaactagcttttatcaccaagagttttctttctaagtaaatttcttcataattaggccctttcaaacaaaaaatttattggcatatttgggccaactagtctcgaaatctccgagagagagttataatcacaataaccaagtagtagctaagctacttaataaaatcaagtaattctccactagtcatgattttttcttttgtcattttttgtggattgttatgatattacacaaataaatcgcatagcactatcagtctgtcatctcctataaatatatttatattaatatatatatatatattaaatggtcaataaatttgtcaaattatttatttatttctctcatcacaacacaacgtaagatgcgattttttgataaacgacatatgtggcgtgaggtatgcgttgttgacaatgacaaatcatatttgttactttcttgtgggaagccaactgaaaatgaaaccttaattataaacagaaaaatgatgccaaccatataacttaaataataattaaaaacttaaaagtaataatagtgataataataaaaataatgttcattatattataatttaggaatatttatgtttaattaaattttgtttggtgggtaagttccaatgaactgagtcagcaaaaatagagacagtttagagtcgttatcttaaacacgtcacttaaggcccaaattcatttcaaagtctcaattacgtaattccacgtggcacatgcggcgacccgtttgcgttgcgtgttccacccagataaataagcagcgacgcgaggctgcattaactgccacgtattattattattattaatgagaaaataaatataaattattttttatattatttaaaacgatttaaagaaattcttgaattttcggtagtggatgtggagtacctgctttaaaatttcaacagatccaattggttatacgtcttcttagtttggagatcccatttaatttaattaataattaaatttaaaaaattaatatttgattcaatttaattaaatttaaaatttaattcaatctaatctaatttaaattattaattgaattgtatcgatttttaattgaatatctaattacatacctaatttttaatattaaattattattgttacaagtataatgtaactaagagtttaaattattattattatcaatcttcactctacctcgagtctcccttggtgcttgatcggcgacttgaacaacaccaccagccacaatgacaaaaagggcggacgtccctaccctgcggccttaatcaacggttttcaggcagctcttaatagctgcgatttggtggatcttgatctggaaggacatccctttacatgggaatggtctcgaggtactgatcagtgggtagaatttcgtcttgatcgtgcccttgttactcacagctggttgcatcttttttcagctgcaactcttacaaatttgggcttctcttcttctgatcactccctgatctttcttgtaccacagcacaaagcaacagcagtccatattcatcaatttcggttcgagaattcgtggtccagagaacctatgtgtgcccagattgtccacgatacttggacctcaaattctcatcttccaattctgagcaaaattcaggtgtattgtcaaaatctctctgtttggggtaaagagttgactggtaatttcaaaaaaaggttagctcaaagtaaaaaaaaaaaaatctgcataatactagaaggaaacaagatgcgaattcaattgagatttttcaaaaagaacagagtaactactttgaactacttgcacaacaggagatatattggaaacaacgttcaaatcaattttggcttaatggaggtgataaaaatagcaattacattcatgctatggctagctctagaaaaagaaacaatcaaattctaaagctacaagattccaatggtgcttggaaagggtggacagatggcttataattagttattactgattatttcaattagttatagactgctactaacactactacaaaaagtataattcacgtcggtttttaagtgtcacttaaagaatttacgtcagtttataaaaccgacgtatataccgtagtcgcaaatagtttt

SEQ ID NO: 117718 - DNA, 1302 bp, Cannabis sativa
ttttttaacaaaagctatatatgtttttttcgggggctttctgaatagaatgacatgatcaagccagcagtccagggagtactaaacgttcttaaatcttgtgtgaaagcgaaaacagttaaacgcgtcgtcttgacatcatctgctgctgctgtttcaatcaataaactaaatgggacaggtttggtgatgaacgaagagaattggagtgacactgagttcttatctaatgagaagccacccacttgggtaagtaatcgatcctcaactctgttttattattatgagaccaattaatcaatacatttttcttaaggggaaaacttttttatgtgcatttgcaggggtatcctttgtcaaagacactagctgagaaaacagcttggaaatttgctaaagaaaataacattgatctcattactgtgatcccttctcttatgactggcccttcactcactccagatatccccagcagtgttggtctagcaacagctttaattacaggtagttttgacaatctcatatcaaactctagccagatcagatagaatatataggaggaatagccgaataggagtactttttgtgtgtgaatttattataatatgtgaataaacatgttccagggaatgaattcctcatatatgcaatgaagggtatggaaatgctatcaggatctatatcgattacgcatgtggatgacgcttgccgagctcacgtctttttggccgagaaagaatctgcttctggtcgatacatttgctgtgctgttaacaccagtgttactgagctagcaaagttccttagcacaaaatatcctcaattcaaagtccccactgagtaagctctcaaaccaaatccaagacaagttagtgtatataaatgatgtttaaaaagtgttataaatgctaaattgggtcatttcatttgtgttgtgagatgcagttttggaaattttccttccaaggccaagttgatagtttcttcagagaagctgactaaggagggatttagtttcaagtatgggattcaagaaatatatgagcagagtgtggactatttgaagactaaagggatgcttcaggtgtaattaaattatgtcacaaaataatgggtgatctgatcatgtcaaatgaatccagtccatcatgttttaacagcttttattaccattctctttgatgggggtgtatatgcagattcattatataataaaggatcttatttaataaaatataacaatttgctttcacctaaagaaaaattaacacccattcaccaaaaaaaaaaaaaagagagaga

SEQ ID NO: 117719 - DNA, 1845 bp, Cannabis sativa
taaattcaacaatctcaatagttctggagaaatttttaacgaccttaaaagttcaaggcgcataatttaatacatatcaaagttctacagaaaaaacctaattagctttttagtttttaatcttcacacagtaaataataaagtacttaagaagtttggaataatatttcatgtcaaattgacactggcttttctttttatcaaatcaattaggacaactcagttattttttacattctagctactaattcatgttttataacatgaagcatggagataaagaataccctacatataaacctaaaaaatataaaaataagaaattccattttttttaatttattttttttttaatcatgatgagaggacattagtagtacagggcactcaaatatttttatgaaagagtcaaaagagtcgtaattaagagataatgtttagtcagtcttactcttacacacacatcaccactatgctctgctatatctttggtttgcccccaacaacaaacaccttttgccatctccaataaaaatataatgtgaaagcaaaactcttttcaaagtttcatgcacttttagctgaaatgatgctgcaatttctttcttttttttttttttacatgcatgattgagggttttaagtagacccaggaagcttttttattttatttttttggttttgataattatcattacttaaaaataaatgtatatatatattgaaggatattattgagctttgaagaatattcatattgatgaaatatttagctctctttttacattctttcgaaaaggtgttgttgaaggtgaaatatcagtcaaaagtaggataaaaatatactgatcgagcatgatgaggttgatggggcctaagagatataccatgctagcccactatacagtaccgaggaggaggaggagattaaatgggccccaacaacgagcccactaactttatgaggcttttgtaggcccaatacgacacctaaaagacaaaaaactgttcttgaatttgtcgtctttttatgaccaaattagcctttggtgcttggctttcttttttgtaaggggaaaagttcaaagggatggtggatgacggcgattaaagagggttttgttgtgtgaaagtacttttgtgctttggttttgagtttttgaatgtttttgcttttttggtggctgatataagcttcgcctttggatatgctcaacattacatagttttaccaataaggataagtggaagttttattactggtgctaattcatatcttcatcctgaaacattcgtattctatcgcgttatttgtgttatgtaaattagtctcttgaattggttaattctaattcaacttcaagaaatttaaactctaatctcacatctagtgtttgcatctcaatcgcgtgtccaccattcatcactactactaaataactttttaaaaacattatttttgagaaaaataataaaaggtagctaaaacgttcaaatattctcacttattaaaaataaacatttaaatgcgcttattttataaaaattgtagttataaagtttatcaaaatcctatggctacggttatttaatcagaaataatgaactgtaaaatacagcttatggcatcgcttattagaaaataaccgaggacatatgtatcatttaattttgacacgtgtacactatgtgtaattgttgacccctgaaaattagtaagtgtaatttttgaagatctctagattaatgagatagaagatcctaaagtatactaaaagtgtatgggtaagaaaataggaggttgactaataaggtgagacaccacacgagaggaagagctagcac

SEQ ID NO: 117720 - DNA, 900 bp, Cannabis sativa
  modified_base (865)..(869): a, c, t, g, unknown or other
attccagctcattattctatccataaggcacaagaggtactccccctcttcctttattaacaagctttgaaacatctgcctatagttccaacaccatcgacaactgttctatctcttctaaaatttggaaggcatttgacgttgtctttacaacaaccttcataactatttctttatcatgtttccccttgctcaacaccttctaaaagccttcatcatccagaatgttttcttcccttttaagcttgtcctcattcttcttttttggcacccaaattacttttttctcttcttttttcttgcgaattttttaggaatgacccattcctgaacaactactataaattatttgtaaccattcatatttgactacattctcaaccacttgttgcatttcattcttgaacgattttttctcaagaaaaccttgaaacatctcgacctcaatcaaaactcgtgggaaattcaatctctattcgtggtaatcttatctagcatttcgtgtgttctaagttatcccactatcttaaagagagccttttccccctaatacatgaattccaaaccatggagctgaatcaaaattagaatcgaagttacatcttccttatcatagtccgtataaggctcccatggtttcataatgataggttttttgtcaaaaaataggtatcccacaacaaggatttcatctcttgtactgggagcctgaaatctaataataaaaatcccagatttaagcattccaatcttatccacccatttattcttccaaatcttcctagcaaaaccttcaaatggtctaattgggtgattagcccctaccacatatcaaactgtagaaaatagtgaatcgaattgtgtnnnnntttcatagaatagtacatatttatatacaaa

SEQ ID NO: 117721 - DNA, 1351 bp, Cannabis sativa
tcgatcctgaaagagggccccaaggattgttcccagacgagtcatcgtataggacctagaggacttacgatctctctagatgcgaagaagagtaatttacctataaaggcaggccagtgctaaatagccacatagaaagtcgaaagttgaatggttatatgacagtgatattattttgacacagaatcagatcttgtcccatgtgtcagacaatagtggtgcacgtaccacctctaaacaagcctttttactcgacgactctactgggtgatttttccacctagggcaaatctttatctgacgcgtgccctgcaccaacaatgctcccctatgtacggacgattctccacacaaggaagaaccatctcgggcccaatagtcagatatttgcatgcattttaccacgataatgggcttaattttttgcataaatcctaaactggtcataggtatgcacatgcccgtattttagcctataaatattgttttattttcacagaaggagccggatcggaaaatgataaccgaagctctgttaaaatttctctaagttatcttcttcttcaagagaaacaaagaggcagagttagggtttcttgcaaaacactattgtaataacattatacaagcctctcaaggccaatatattgactcgtggactagggctcattaacgcatgaaccacgtaaaactttatctcttttactcattgcacttattatttcttaagctctattttatttagttttaaaaaatttcggtaaacaattattattattatcaaattataagaatttttaatattttgtgcttttcaactagtctatttgtgcttacatactgtgtcttcgggcttgtcatcgtgtcgtatcgtgcctaagttcatactttctcatgcctggtcgtgcttgtgcctcctaaattcgtgctagttttgtgtcgtgtcaaaaagttcagcccgtatttacaactctagtataagtatttaatatattctagtttatatatacacttatatagagccgattctaagggtaggcagaataggcctatgtgaggtccctgaaaaaaatatattttatttataaattgaatgtaataaataaatatttatttattctattataatacacaaagttgttaagcataatagtatgtgtgtccttcgttgggatatattattaattacaacttagcaaaaattaagttgtcattttttttatatcagaacaatattttcttaaatgttcgactatgcagattttttttaagggctatttacaaaaatataggaaaataaagataagttttgatatatatatatatatggcataaaaacttaattacacta

SEQ ID NO: 117722 - DNA, 630 bp, Cannabis sativa
  modified_base (567)..(569): a, c, t, g, unknown or other
atagttcaaggaaaatttttaacgaccaaaagagttcaggaggtataatttggtacatgtcaaagttcggagagaaaaatcttaattagtctttatttttcaatgatcatggattagcgctcagtgcatattcttcgaatggatgaacaacttatttggttgaacaatttcccttattatcttgaggatacttattacttagtttattagttattaggttgttgaactctattttataagttaatgatatattcattgtaaaatattttttaaaaaaaaacctacaacatcattattatttataatattttagtggtattttatttctctaataattaatgacaatctttgattccgagcatatttgacattgcaaaccctaacaataattattgatcgtattgttattgggcacgagcgttaattttttttggctaattaccaattttttttcctgaactttgacatgcactaaatcatgctctctgaatttttttggccgttaaaaattatccctgaactattaagattgtcagatttatattaaggacttttgtctaattttannnaaaaaattctaacataaatgaaagttcagggggtatgaaagttcagagggcatgatttagt

SEQ ID NO: 117723 - DNA, 794 bp, Cannabis sativa
atatataattatatatacactatatatattatttattgtgtcactttttttttttttttataaatttcaacagaaattgtcctattaataggactacccaactttgtagatattcaatgttataaatagttaatataacctcacatggagactttaaaattaattaggttaaagaaaatatatcataatctgaaaaacatgctttggtttctgataaagtcacataacaccacttgttgtacatcttccgtagttatcatgatgtgtgtacgaggtgttataaatttctgagatactagaactttggttgtaccatatttttcgttgatgatcaaatattcatcagatgtattagatcaacttagggagttttcctttcgacggaacacttgttgaaggtgtttgagcaaggtgaccctacaaaataccataatatatcaacaattgtatatatgatttgtaatggtgattttaaagaaagaaattttacctctgattttaaaattaaatgtttaggtcgaagggagaatgtgttggctacttctctaacatatcttatcccctgaattggtactggggtttccacatcatcttgaagaatttcttaagtcaaaatgcgcgcatatgtgaattttcatagtccacggtatgaactttcgttggaccttcgttttcatataaatatgctttggccattgtgatattttgcacatgcaagtgcacgtatcgttacaagtagtaaactcacaaagagtgaggtcgatcccacaagaattgtagttaaatacgttaaa

SEQ ID NO: 117724 - DNA, 1754 bp, Cannabis sativa
gaactacatcaaaatatccagaatgttagttcaaatagcatgcgggtggagtcttcaggtttaaatcagattcaaacagatgcaaatacagccgaacagtatgacaattcagtgtctcctatggaaacatttccctttattcctcctggcactcacttcggggttggagatgttacagataattctattcctagcaatcaaacatcggatgtgatggatagtgacgagacactttcactcgggagaacccttcgtggaggccttactaacctagatacagtaactgttagcggcggtgatggacagtcagaacataaccaaaataatgtaggactcgctgaaccttcacaacttcatccaattttgcctggtggagactatgctcactgctttctgcaaggatggcttatgggccaaagccaagctggtcttccttcaatgatttctcctaatgctggtagtcgtaattcagcacaattgatgggttcttctgcttcgacatctcatctgccaacacataatgtggaaacaatggtagcttctttggcaatggcaggcagcaacaacttatctggggtttcaggaagatctgccatgcaaaatcgtttttcaaatgtacacttctcttcatctgaaccaggtaacggtccttccccaattacccttcgtgagggtggtgatgccgaacccattattaatagagttcaggcagaacttgctacatcattagctgctgcagcagctgccgagttaccatgcactgtaaagctaagagtttgggaacatgatataatgaatccttataccacgctaacttctgaaaagtgccgcttaagcatagcccatgcagttctctgcaggtaattacagaattaagcaatttactttctttcattactcattttacaaggtgttgtgtatcaaataggtcctttcaaaactattttatcgaatttgtgtatgtgattacctctttatcacatgattttgcagtgaaatgggtgctcatttttctccttgcgggagatttttagctgcttgtgttgcatgcttgcttcctaacacggaagctgactcgggatcacaaactctagttcagcaagattcgggggctgcaacttctccaactcgccacccaatctcagctcaccaagttatgtatgaacttcggatatattcgctcgaggagagaacgtaaagcttcaatgcctttcttccgtttttttacctatgaatattcttctgttccgaatgttttgctcatatgcttgtttctttaacttgtacagcttcggttctgtgcttgtatcacgggcaatcagggctgcacattgtttgacttcaattcaggtaattttttacgtgtaaatagaactttgaatctgttctaatcgctatgattgaagtaaatgctgatgcatagatttgttctcttgcatttcaaacctgtatatataacggtgcagttctcaccaacttctgaacacattctacttgcctatggccgacgtcacggttctcttctcaaaagtatagtcatcgatggagaaacaacattgcctatatacactgttctagaggtaaacattagtattgattacttgtatttcttatatgccttacagaaacaaacgaaaatagagcttaaaaatcaccaaaatgtccaaaccatctacaagattagttcatgctattcaaaaaattaagtacgtaaacaagtccattagaaaagaaatagattgctcgatacagta

SEQ ID NO: 117725 - DNA, 685 bp, Cannabis sativa
tgaagctagcggactctagctctttgcttccagtaaatttcctctttgtaaagcgtggcatctaacctagattgcaactagatgagtctaaggttatcttccttagtgagaacatctttgttttgaatatgatttaatcaagcagttattgcttctattccaagccttaagggaggaaatacagtgagcttgtttagcaggaaaactatggaagccattaccagtagagggattggcatgatactctttccaagtagtatccactagggtgtaaaaactcaggtcctcaagccaattattctcaaacctaaagcttttattaaagtttaaagggttaggtttagtactggctaatacaatttttaagactcggtggtcagaaccataaaaccttaaacgatgaagggaattatcaaagtaaaggtcacaccaagattcagagaccacagccaagtctaaccgctctctatccgttttaatagtccaagtatgtttgttaccaacataggggagaggaaacatgaaaaaatcatgaaggaaattggtaaagcaggtcatgaaagcgtgctcagtggtcatgaaagtctcttaattaataaataagacctaggatctcttttcttgacatttaagcccttacttagtgaaaaattcataaacttgacataatctaattttagaatta

SEQ ID NO: 117726 - DNA, 1297 bp, Cannabis sativa
aaatcaaagtgcctttattggtggccaaatcatccaagataatgctattctcggttttgaaagccttcattgtatgaggaaaggtagattcgacaatgggaaaaaattgttcttaagcttgatatgtttaaagcctacgatagggtggagtgggactttttggaagctatgatgtcttgcctggggtatgatgaggaatggatcacaaaggtaatgaattgtgtttgttttgtgtctttttctattctaataaatggcttggttaaaggttactttactccgaaaaaggggttacgccatggcgactccctttctcctttccttttttcgttatgttttgaaggtttttcttgtttgttcatgaggtagagagggctggaaaaatccatgggcttcgttttggcactttggatcacaaactctcacatctcctttttgcggataacagtctcgtcttcctggatgccaacttagaagagggtcatgccttaaaggaggtgctggaatgttatgctaaactttcaggccaatgtattaacctggagaaatcaaaattttgtgtgggaggtaattggtggtgttttggctgatactttggctgccaatctttgagtaaagctggttagaaatcacacaaaatatctagggatgcctacctttgtggggaaaaataaaaaagaggcgtttggcaagatttaggatcgggttgaagcaaagcttcaaggttggaagatgggcctcttttctcaagcagggaaggagagtttaatcaaggatgtgatacaagcattgccttgttatgccatgagctatttttgaataacataagaaatccttcatgagattgaaagcatgatcactcgcttttggtggggggcttcctctaaaaaaatataagatcgattggggtaactggaggaagatgtgtaagcttaaagagcatgggggaattaggttttgggatttaaaagatttaaaccatgcgatattggcaaagcaagggtgaaaattaatgacaactccaaactatcttatggctaaggtgttgaaagccctttattatccaaatggcacctttcttgaggcaaaatagggacattttggttctaatatttcgcggggaatattatggagtagggagctgttgacaaaaggatatcgcttgtatgtgggggatggacacatagtaaggataaaccaagacctgtggtgtaaagaccgcttagctttaatttggaaattagtagataattagggtttaattatggaattatttattaattctaaattattaatt

SEQ ID NO: 117727 - DNA, 1555 bp, Cannabis sativa
ttttgtttggcatgtctacgacgacgctcttcctgtagctacgactttggtcaagagaaagatcattacggaatctacctgctctatttgtaaccaagcgtgggaatctattggccatgctctttttggctacaagtatgcacgagcggtctgacgacattccaatcacgttctagactggaccaactcatcgacaattcgcaagggggattacctagttcatttggtgacaatgtactcacatattgagattgaacaaattttgtgcattctttggtcgatatgaacagagaggaatcgagtctttcatggaaataagctaaatcagctaaagaccttgcttttttgctacaaattactagcaaaattatcaaaatgctcagaccaaatactgcccaaaaaataacaccgaacaaccatcatcctcagttgctaaaccaaatccatgggcacctccaatggttgagaacctcaagttgaacgtagatgcagcagtggatacagacagaataatcacacgtatttgggttgtagtacaagactcctccggcaacgttacaattaggagtgtacgtcgatcggtttagtcaatttatgttacattttattcaacccaatgtgaagatcggattactaaattctaagtgcaacccgcccaattaagaaaaaaaatagtaatccgtccaatgaaattagtcagtttggtcaggttaacccgtccaaaccgaccactaatattttttttaatttttttaattttacattcaattgttatattttagttaattgtaataataagacaaatatatatagattgaatttaaagttcaaatcaactaccataaaaaaaaaatatatttgtttgaactttatatttttaaaatagtcatataaattatataatatataaatatatatataaaaaaaactctcttaatcgggttggtcgagttagttcgagttgattgacgaattggtattattttcaatccacccaatataaagattgggcgagttatacttttatcaagtttttcgatttgtatttttcgtcgagttatctcagtttggtttgaacaggttattcgggttagacagtttacaagaatttatgtacagccccagttacaacggccctttccaaaccaataattggtagtttcaattctcatgaaatggaggcactagcaatgtttcatagctcaaattgggcacttcaacttcaattgcctattactcaagtcgaagcagatgttcttcgagtctcaaatgctttgtgcaaaccttcatttgcaatttcctcttttcaaggtttaattgtaaatatctctaatcttttgtccttttctcctaatgtgaatgtatttcatactaaatgtatgctaatatagccactcacggtttagctaagattgctttaggggtgaatgaaacttgcttttgatcaaattgtattcctccacctatgaactctgttatcgtaaatgacttatcaaactaatttataataacaggttttttccttgaaaaaaaaaaaaaaaaaaatcactgtttt

SEQ ID NO: 117728 - DNA, 1476 bp, Cannabis sativa
  modified_base (177)..(204): a, c, t, g, unknown or other
  modified_base (1433)..(1436): a, c, t, g, unknown or other
tatcaaagcatctacgtaagaaagtccaagtaagatgcctctgagaagcacaaggatgcccataaaaaccagtaaagtgtagggatggtccatcatgactttccaagaaacaatcaatgtgattagcagaatagttattgattgaaagagtaacatgggacttccaaagaagcatannnnnnnnnnnnnnnnnnnnnnnnnnnncttcaatgccatgagggaagtgtaatttattacgaaatctatcgatactaccaatttctaacttagtttccataatgaaaagaacacaggggccttgctcttgaacaagcaagcgcaaatgtctgaatgcgcacgggttccccaatccccgggcattccaacttacaacattcatggctgagcgcggtgttgcggagcaacaaccgctgaaaattcagacaaagactcctctaaatccaaaataatggtgctggaaacaggcagagttggagagacaccagtcgatgcttaaggatccgactgaccagagtttgcatttgatcggcaacgtttgaggacattgcgaagagattctgaatctatttatcttttaaattgcttgttgggattgatattctctgatccataatcagacacaagaactgctttgcctttagagagagactgaggagattgtgatgttgcagaaggagttgtggagacaatggtgctagaggtggagggaaccaaaggaaaagaaacaggcagaagtggagagtgaatgaatgatttaacagtctgagtgatgggtggataagtggcaatcattggtgttattggaaggtaggagggaaaggaatagcagatgcttcttcaattgaagtaacacaagttgtaagtggcatggtcagtggaatggatgcagggatagatgaaggagaggcataaaagggcgagggtggcttcgaggacaaagaatactctcgggtagttagattattgggcaaggggaggggtattgttaatagattaggaattgcaacagtaaatgacttcttagcgagtcgagtcataagaggccatactcctcctttgaaaaaatcagttctataacgatcataaccggactcaggcagaggagaaccaatcatagaaggaccatagtcaagcgagggttcaacaccattgtaaatttactcaagaaatttatgacaagattcaaaaggatgtcctatagttccacactcaaagcaaaattcaagcagtcgctcatagcgaaactctaaccaaaattcatcttgagaatccttaagtttcaccatctttcctctaaggagtggcttggagatgtcaaggatggcacgaaaacacaaaaaaggtccccaaccttcattcaaagagtcctcatggacatcaacataggtaccaagaagattaccagtgctggaaatattttaccaagatctagnnnnactaccaagtatgtttcattaacaccctaatatgaattct

SEQ ID NO: 117729 - DNA, 1342 bp, Cannabis sativa
  modified_base (26)..(27): a, c, t, g, unknown or other
ccactcattgccaattggttttgagnnggaaccccatgattctcaacactcatgaactaattttttgtcaaaataaaatttaacaataatccgatctaaatgtgttatgataaaactgtttacattctctatatttgttggtattaagaattgtctaactatttatatatggtcgtattaattaatattttcacaagtcactaaatgctaaaatttaattattttataaatatgtatatatggtcctagttaaatagaataattatttaaggttcttaaagaagaattaatatataatatttcaaaacttgtgacaaactacacggcaagaaagcaatagtacatgcagtgatttactatatatgcatcatgcatgaatgtttaagtggttaaagcatctctgaggttttgtctaagttaaattttattaattaaaatagttaaaaaaaatttaaaataaatgattatttttgcttcaattatgttctctagttagtattttaattattttaataatattctataatttaaatttactaaatataaatttatttaataaaataataaaaaactaataatacttttgattaaatgctaaaaaaattagcaaaaacactaggaagctctctatccattctttattatagagagctatttgttgtatgattgaagctcatttactaacttaatttttaaatttgagatcaatttacatcttaactcatatttttttaggcataatacgcctaaatcctggtcatgatcaacttattatattatgtcacatttttttttggtgttggtagacattgatgagtgttcaaatcctatgatcatcacaaataattgcaaagaatgcaaaaacatacctggaagttaccaatgcaagtgcccacttgggatgcatggagatgggaagaatggaaattgtaaaggatttcggtttaccacattagctacaggtaactaatcatgtaataaccattcattcataaaataaataaaaaaaacactaatttaataaccattcattaattgtgtaataaacacatcatgtatatacaattatttatcaaaatgagtatttgacaaaaatttctcatcaaacaaaatgtgtattaaactttttaaaaaaaaatcttttctaattaataagtttgttaatgagtgacaaactagtaattattaaaggtagtatttattgtgagttaaaatttagtccatgctatgttttgtgtcaaatttgatacaatttttgaaccaaatttagaatacattttacaccattattgaaacttatttttatcaaaatatttttaaaattgacaatatattatttttg

SEQ ID NO: 117730 - DNA, 738 bp, Cannabis sativa
gtcttgattggtgatgtgaatacagatcgggcttcttaacacgtgccagggccagtactaaaatatatgagacctaatacaaaattatattttgggaccttatacaaaaagtttaattattatcaagtggtaaacatttttaaaattcttaagagttataaggttcaattctccatagctacgcattaaatatttctaaaaaaaaaaataaaaaattagaggttggaaattgatcccgatctgttaactcaagactctttaccacaacactaaacactatcttgttatattttttcttattatttaatattttatcaatatattgataatttttttctgccttgagcgtttgagagcgtaagacgcacgcctatctcaccttacctcagggctgaccctgtccggcgtgtattccaaaatacaagttgagatgcatgcacacatttatagctatagtctggtcttgttcatattgtaattgtcaattgtcatagtgaaataatgaatttcttaagaggagttcaaagagtagtagcacaacaaaaacattgaacaccatgaaagatgagccttgttttcttcctaagtgctcaaactgatcatctactagagtaacaaatgtctaactcaactgaattcataaaatgaaagtgaagttcatcaatgacaaatgagttgcaaagacttaccacccaatcagtgagagcttttcgatcaattcgaccattctctgtccca

SEQ ID NO: 117731 - DNA, 1512 bp, Cannabis sativa
atagagattacattgaaatggagtttaatttagggcataaaacccaagaagaatatatctggcaaagaatgtgaacttttagcagaatgaatgacggctagaatcaagagttggagcaccagaaacctctcttttgctgtgagaatcacacttattaactctattctagttgttatgaaagcctattggagtcagatgatgatactgcctaaaaaaatattgagatcattgaagcaatttgcagggcattccttttgaaaggtcaggctctcttctatgggcctgggtctgtagcatggactaatatttgtcagcctaagtctgcaggtgggttgggaattaaaaaccttgaacattataataaagctgctatttgtaagtatgtttgggcaattgctaataaacaagagaatctttggattaaaaaccatgtgtacatcaagaaacaggaatggtgggattactctgcctcgattcactcaagctggtactggaagaagatggttgctcttaaagatcagataaagagtatgactatttgcaatgtatttcaaagaaaaccttatactattgcagatggttataatctatttcaccttctcaaaccaagcaaaactggagtaatgaagtgtgggggaggttcaatacactgaaacacagtgtcattctttggttggctgtcctcaataggatgaagaccaaagataggctccttaaatgtgggattccggttcaatcaaactgctgcctatgtaattcaaatcctaaaaatgggcagcaccttttctttgattgtagggtctctaaccattgtttaacagtgataaaacagtggttgaattggaatgcacacaccagtagcttgccacagctgattaagtggatcaggagggccaaaatctagagatttagaaggaaggttctggctgcagctgttgcaaccctggtttacaatgtttggaaggctagaaacgcgatcatatggcagaaaacatagtttaatgcaggcagaataattgaagacatacagtggatactcaagaaccagattaacatgtttttacctagaaaaatcaagactatagatagagatttgtttggtgctttgtaattgatttgtaaagaggtaaaaaacaaaaatctgcttgtatatagattttaggcccttgatagggtgctactagcttgtaaataccggtttgtgcaataaaattcattgatttatatatataaaaaataatcatttattttaatctatatattttattagttgatccaaaattaatttttaactaaatttaattttcaaacaataaaatcgaatatccatttataattaaatataaaatatcgaaattatataaaatatattaaaataaatttcttaaaaatatctaatttaagttgttctgaaaaagcaaaatttttcaacttaaataattttttaatatttaattaaatataaaattaagtatcttgaactaatcaccttaatttgaaaaatatccctat

SEQ ID NO: 117732 - DNA, 698 bp, Cannabis sativa
tatctgagtttaagtccctatttatgtgcataaaagcattttcataattttgatttgatgagggtaaaattatattttattatactatgtactaatagataatattattatgtagtgtgtttattttgaggtgttgcaaataatttttgacaagttagcgtagtatagttacaaataaatatttcagccctgaccaagttcaaaatcctgtgaaaaattgtgcaatagaaattaattatttatatgtcattattatgtgagaaattagtagattttttataataacttttacgttcttaagtgttcttttatttgattttcgtaaaaaggataatttgttcatttgactttaatttatgagagaattaaacttatacttctctaagtgatagaatcacatttctcttcagctcaagataaaactcccaccacctctctctttctctctaaccttctttgtgaatttcttgagtctttgttaaatcgaagaagtttttagtgcatcttgagttgaattcttgtttgatttaagtgatgttttctcccctttgatttttgaattgggattttagggtttgagctcgtttttttgaattgagcttggattgatgatgatggtgaataaattgagaaatgcaagtaaatgactttatttttaactttatagatagttaatgtctattttttaaaataataaa

SEQ ID NO: 117733 - DNA, 1150 bp, Cannabis sativa
cacattttattctctctcttcaaaaatcaagtttcggaaagctcttcacttcccttgaagctgacgcatccttgtcctccatctcctaggttttttgtgctatttcaacgattcaaacattgcaccatcttccttaaaagtttctattagttggtaagctttcaaatcccattctttacttatatatttggattttccatggttgccttgaagtttttctttgctttcaacattttcttattcacacattagattgtaatcttttgggtattttgatcaacatgatagttttagaatgcataatgtgtgatttcccaacgaaaaagatttaattttgacatttgttatgatttttaactctttgagtcacgaagaacatgtgttgagtttttgaaaaacacacactttgattcatcatagaccctggctcaccataggggtctggtttaagacctggccaaccataggggttcaccttaaaaggctggctgcccatgcttggtcttgggacccttatctaattcttggctgggtcatggaacccttgccgatcctctcatagcttaggaaccccgatcggcctaggcctaggttccaagtgggcggccaaggttttgtcctcttttgaccttgtcaagaatttcgttaacgccttttaggcatgtacaaccttagtctcatacgtggttgccttagaaactctgtatgaaacttaatggtgagtctattgtagtcgaatgctcaacttaagactcaacatttgcctaagtttttgtacttaagagagtacttcactgataatcatccttatacgattaaatttatctggcaagcaaccttaggtaccattggccagaattttgtctgtaccttattgctttgttaggttgctcacctcctcttatctctatgcaggtgatctcgagtgacctttgggggaggtgaaaacagtgtcaacatagattcagttgatcttcccttcgtggactagtattcaatctgttcctctagcagctattcgagtgatcttgaggcttatattggtccatggtggtaaggatcaaacaaacttgacgcaaggtgccaccttttgaccttcacactactaggctagcaactaagggtagagtcagtgtattggaggaggcta

SEQ ID NO: 117734 - DNA, 542 bp, Cannabis sativa
  modified_base (466)..(480): a, c, t, g, unknown or other
ttcaataattaatagcaacactcagaagtaagattcatgagcattcgatggatactacctctgtagtagaggaagtggtggaatgttgcccacccccaagaactgggctagttgtagcactgatgtttccataggagtggacttctctatgctggttgcaatcatctagaatgatagaggtggtgttgtatgctaatactgttaaaacctaggtcacaaataaaaaacttagtgaaacactagctctttgtttggggttgatgttgcagtaggaaaaggcctacaatttgggttgtttcaagacaatcttgcactagtgaaggctttaagaactccaaggatgcacgatgtagaccatagtttatgggcagctaaaaatcattttctaaagacatgtacaaacatgaaggagtgggagataaatcatatctctcgaatgtgagacatgttgggttttgtgccctannnnnnnnnnnnnnnaatataatcagatttactaaataataaagatcagaaactgcatttatgttgcatggttcaca

SEQ ID NO: 117735 - DNA, 781 bp, Cannabis sativa
taaaacttcaaaatttaaataatgcttagttggaattctcattgcctaaaaaaagattaaatttgctatttttagcttcaaaaagtcgtgaaacataataaaaaattgtcactttacaaaaataaattagagaatgaagaatttgggaaactaccttaaatgtcgcaactcaacaaagaatttcgcggcattcacttgctggaagaagaaaaaaaaataggaaataagaaataagaaatagtgaaaaattggaaacataatagtttcctctaaaaattagtaattttcatttaatacattaatgatttatgtttaaaacataattatttccattttacatataatagtttctatttcaacatatttatttcttacaagcacatttcaaatataatccaacttcatattatgtaataatgtgttcttcaaggagttttccaataaatatatgaatgagtgttggtggaaataagacaaagtgggagagattagattgtatatttgcaattttttttattaaaatgaaaatagaaaaatatctacgtaaatttgaaaaaagaaatagtaaattaacatctacttagtaaatctcctatatctatatataattttttttttggacaaaaatgctaaattattttagtaaaacaataatattttttttttcaccttttctaattgcctatataaatagaaaattaatagctcatttggtaagccgtataaaagtcgtattgtatcaaataataaataaaattatgtttggataaagcaatgcatt

SEQ ID NO: 117736 - DNA, 848 bp, Cannabis sativa
attttaccggagtttggcgagattattttagagttcgtaccacgattaacattgaaaaacctctaaagaaaaagatgcagcttgagaaaaagaatggtcagacatgtgaggtccattttaagtatgaagatctaccaactttttgctttatatgtggggtacttggacactcagaacgtttttgtgatcgtttgtttgataccccaccggggcaaatccaaaaacctttcgatttatctctgaaagcggcaccacgtaggaggcaacataccattggggctccatggttgcgatcaggtgcggccactaaaccgacgggatcatacggtggctcaagttctaccacggctgtgaatgatccaaggagacaaagggagaattctcagggattgaccattacacctacggatttggtggagaatatctccataaatcaagcagtgactaatcctataattgctccaaggtcaatggcacccataataactccaccagatttgattgctggcaattccaaaaataatatggcttttaatgttgaatatatgccatacgaaaagagtcaaaaggaggccttgatgatatctgaagtcaaacgtagaaggacccaaactaatggatttgaggttgggcttgagggtgggcctgaagatgggcttcaaatggataacattcaaaagagttcaatggaaaatgatgataatagcaacagtgggaacgttgatgatgtagaaatgctaagtggtggtatggatccaaaaaacttcttgggggcgggttctgtttcgcaggcccgccaagcattatgaatgtcttgagctggaattgccgggggcttgggaaccaac

SEQ ID NO: 117737 - DNA, 1587 bp, Cannabis sativa
tttttgtaagtttcccttaatatatgtatatatctatatgtaaaaagtttgatgtatatatttgagtgagggcttaagcctacatatagactaaaatccctctgtccctatctatgtgggctcgccctcatctctatgtgggatcgcccatagatgatgatattatttatgattacaaaatatacatttataattaagaaaataaatatatatatttaattttttccttaaaatataaattaattttatatttttttcttggaaatttgttaataaatgaagtataaaaagctatgaaatgtgataaatgttaaagacaccaaggatggtcaataccaatgatgtattaagtataagttttatatattaaaatttaataactaattataaattactcttaaacatgaataaggatcactcctaatgttggagagcataaaatatgggtgccaagtgtaacaataacataggaactattgagaattgagatctgatctgcccaaacaacgaatctcaataattgttgacaattataaaatcctacacttattattcgttttcggttctccacttctcattataaatatttgtattattttctaaaataaactatatttcatgcaagcataaatccaaatatatcattttcaacattttttcttcagtgaaataagaaagaattatggaattgcagacttcttttccatcctgtttttatataatcgatatattttttttttttgctattataattaattgatggatctatggccttgtgagacaacacagtaattagtcagtgacaagacgatgatcacatggagttgtaaaataattatattaatatatatggaaataagattataaatataaaagattaaataaagaaagaaggaaggtgttactaattagttagttcatgcacatgtgtagcttatttttgtggataagatttgctagccaactccatctatatatcgtctcctctcttctcaactcatccatatcacactatatatgcaccaaatgaaaacaaaacaattgtcattttattactaataattccaaattcattatatatttatatatagcattattgactataaatcatggatgagaaagaaattcctaaattattaattgggactattattgaaatgcatagcaatcgtgtccacgtcattattcactattttattttgatatatatatatatatatggattagaaaatttgagaaaaaaaagtgcacataatactaatgttaattacaattttatactagctaaactgttttagacttctgaatttctagtgcttttattggtatgattgatgaaaaatagtaagggtggtttttttttattatattttaataaaatgtaactttcattgaaatcaacacttaaggacaagttgcacaacattgagagttggaattgcaccattcaaaactaactccttctcaaaccttaattaatcctttttagctaaaatatgagagttaacattgttagaatattttaggataaatactattttggaccctttgtttggcaaaagttaccaattggaccctgtattttgt

SEQ ID NO: 117738 - DNA, 2491 bp, Cannabis sativa
  modified_base (1521)..(1523): a, c, t, g, unknown or other
  modified_base (1686)..(1696): a, c, t, g, unknown or other
aaaaaaaaaaaaaaaactcgctagaatatcctggttccagacctgtttagcaagattacaggcacggtcaggtgagttgagaatctcgtagtagaacacggaaaagttcagagccagtcctagacgaattggatgtgtgggagccagctcagcgttagcaatatcctgtagatataatttgtacaagttatagcaagtcatataataaaaatacaagaccacacacttataaaatgacccaaaactcacaatatatcgatgattttgaaatagtaaattgtagatttggtcaatgtctacaaatctcacacagatccacatttttaagcaatgaatgagatcagaagtcaaaactaataaaatgtatgaaatcagcccaaaaatatcagaaataaaccataacaattacagatccactctccaacaggaagatttaacttagatcagtgaatcataagaaagagataactaagacaaggaggaagtcgaaatcccgaatttaaggcttaaatatttcaacttagcacagcaaaagtgatttttatgtgatacctgagcggctttgtaagcggtaagtgtactttcagcggcctccttgcgctcggcgccggtcttgaactccgcgaggtatcggtggtagtctcccttcatcttgaggtaaaagaccttagaatcaccggaggtggccgaaggaatgaggcgggagtcaaggagcttaagaataccgtcacagatgttggagagctcagtctcgatcttggatcggtaatcacggatgacagagacatgttcctcgttaccacggctctcctccttttgctcgatggaggaaataattcgccacgaagcacggcgagctccgatgacgtttttgtaagcaactgagagaaggttccgttcctcgacggtgagctcctcgttatcaacggatgcggagactttttccatgaactcgaccatctcctcgtagcgctcagcttgctcagccagcttggccatgtagacgttctcttcgcgagccgaggccattgctattcggcgattagggtgagtaggtggtttagatctggtttttgagagagagagagagagagaggttgagtttggcaaatggggtttctcttggccttttgttgacgagggttgcgaaagccgtagtggggcgataattgcgtccgagggtatagtgggaattttctatgttacgcaatgtgagccgttggatctaatctcattggggaggacttttaaaagagctgtgcttggccggtggatgttgagatttgagctgtcaattctccagcacggggttctgattttatcatactaaaaagctattcgcttttctttttctattcctccctttttttttcaagaaaggaaaaatggtaaatactattttagactatgtaatttgtaaaagttattaatttgatcttctgttttgttaaatgataaaatagatcttatattttttaaaattatacaaataagatcctgaattgatttttttgtcaaaannnaacttaataataatctaatctagagatgttatgacaaaactgattatattttctgtatcggttcattttaaaaattgtcttataattggttatattaaaaaataaaattattaaaaattgagcttaggggcctatttgtacaattttagaaaatatagggtcnnnnnnnnnnnttaacaaaacagatagtccaattagtaacttttacaaaacacatggtccaaaatagtatttatccaaagaaaaaaaaacatttagagcactcagaagagcttctttattctatcttttagaatattttattaaaattttattttctttatgttgagctcgtttttaactaacgatgttaagtcaattaaagagataaaaataaatggtaattcttgaatgaaattaagcataagaacacaaaaatttatagaggttctaccctgtgataatggtaatagtctactcacatttttcttatattacttgtgagaaaagaaaaatttacgtttcttcatctatctcaaaagcttacaattttagagcataagaactcttttgaattcagattgctgaataataaaatcacttcactatttataaggaaaaaataaatcaattaagtttcccaaagaaataagaataaataaggaaaactaggaatttttcctaatttacaatagggttgttcatataaattggaaaatcgcggtttaaattcggaccgcgactatctgaaccactgtagatcgtaactgggaaaaccgcttttggtggtttggttaattcggaccgtttacggcataatggttcagttgcctttcgtaataaaatagttaacggttaaaccagaccggccatttataattagagatggaaattggtcggttaatgtacggggaatgcaatccccgtccccatccccactacctatttatacccccatccccgctccatccccgtctaataaccaacgg

SEQ ID NO: 117739 - DNA, 3659 bp, Cannabis sativa
agacttgctattggatggaatcttctcctccatctttgtactctgttgctgtaaatgacttaccagtttaatttataataacaagtattttcctcaaaaaaaaatggtagttgcatataaatgaagccctactaagattctttttttctattttattgatgaaatgatgtacgtatgtatagtgaaaggattgtagagagtattgtataaataggcttggtatgaaggcttaattcatttagtattgtgattgatatttgcttttaaaaaaataaataaattattattaataataaattaattaattaataattttagtggtagattgtagatattttttaagtgatatttcatactatattagagtgataattagattcaataaaaaaaattagaaaaaataagaaaaaagaaagactacttttaagtgtttttaaagtgccacatcaccgcctcatacttctcctttatatatatgtatagatatatagattttttcatgagatttttttctgtattaagaaattgatctatataactactgcctcattttttttaaaaaaattatcgattcgattactaatgtcaaactaattaatgttttaatataactacgtagtaacaactagtgctgcaggctgaattttatgacacaacatgaaactggtataaacccgaaaggtacaagtacgattaggcacgaaaaaatacgagcttgggcatgacacaacacgagaaatatatgtcctttagcaagatacgacacgaaaagcacgaaaggcacaacacgtaagtacgaataatagactagcccgaaaaacacgacatgcgacaagcgcaaaaagtacggcacaacatactaaaatacttataatttattattattaatataataataagaacatatgaatttatcaattataaataagttaaaataatacatttaaacataataatgtatatatatattaaaattttatcattaaaactattaaaatatgaaaaacaaagattatatattaatgtatttataggttgtcatataaaaatctgagtattaataagtaaatattaaaatttttaatgatgttaataatatttttatatgattatctgtaaagtattgtccaaaagttatataaatataactaaagctataaaatatacatataatttatgaattgtgaaaaaaatataaatagtctttttaaattagtttgaataaaataaatatatatggacgtgccctgttgggtctgtagcagttttgtatttttaactactcttttgggtttttaactgttttttcaaaagttttcttttccccgttttttctaatttcagttttttttcaacctcactgtgtttatgcgttaactgctattgttgatctgatattttctgttgttttcgtgatggatccttttctgcactttgattcaacattagctcttactgaagaagaaagttctgttgctattttgcctgctgaagtcgcccctgcttcaactgccacctcgagccacatccttatagcacgagttctcactgataactatgttcatatacctaccttctatgataaaatgtttggccattggaatggtagatttcctgctacaatctctgactatggagatggtatgttcaaaatttctttcagttgtgtaagggataagtttcgagttttgaacaaggaaccttggcactttcaaaaccatcttgtaatctcttgatcccctgatactctgcaaaatgtcacagcgaacaacttattgactactcctttttgggttcaaatctactgtttgcgcttcctttgcaagtcaaaaaatgcttgctatttccttggggaacatcaatggggagtttattgatgtccatgaagactctcttgatgagggatggggacctttcttaaggattcttgttagactccctgtggacaaaccactactcagaggtcgaatgatcagtttgccaaggattaaaaatgatttttggattgatttcagatatgaacggctaccagaattttgctttgaatgtggtaggcttggacatccctttgatgtggctttcatagaaagaatggataatggtaatgatgatgatctcttgtatggtccttggatgaaaggtgcaaagttaccaactaatggctatgacaagtaccggactgatttctccaaaggtaatgcatggctactcttgacatgcctggctcaaaaatctctcgtatctacaatcccaaaactgggtgtaagatcacagcctcaaccaaagattatttttcaaggagaatcatctgctgctgcatcaaacatggctatgaatgatatcaatgcctctgtttcctttcaacagaatcaacatcaatctatgaccttgccacttcaatcaaatacaacatcccccataaccaactgtcctccataacaactgctgcatcaaacatgttgatcactgaacactctacatctcctaccatacccttcattacaagcggcatgattccacttcctaacaaccttacacccctcaccaacttaaaccacatttatacccccgacattggctctgctaaccatccacaaattccctttgcaacctatccaccaaatgcactgcctaatatcaccaccagcaacagcttgttgcatgcttcttcctctataataccatctctaatgaccactctgcactcacttccacaacttataacaaaccagaaattaataaagaaaaccttaacctcaacagaatttttaagaggcacactaatgctccttgtatgagagaaatgcttaagagatgttgcaaccaaaatagcaatactctctttccttcctcgtcaaaaggagactgctcaagccagaatgtttcctcggtttccaaggattcaaatggtgattctgacgactctgcggatattgcttcgcgatcccgcaagggattatgaaaatcttaaattggaatgtgcggggattggggaacccgagagcgttaagacatcttcgattgcttgttcagtagcaatctcctcatgttctctttcttatggagacttgactcagtagcaattcattaaaatgcatacgacaatctttaaaattcattcatggtatggaagcaccacggatacgactaagcggaggtcttatgttgttgtggaaggaaaacattgatgttaacgtcaatacctttggctcatgattttttgaatgtttatgactgcaactggtggcccacaattccattttacaactttctacggtgcttctgctgcacaaaatagatttgattcatggatacttctccgtagactagcagatgtggctcctttgcagccatggttaatcattagagacttcaaggagatattgtcaaattagaataaatcaggggggtccttgcgaagtgaaacacagatgagtgcttttcgaagtgctcttgatcattgtcatctttttgatccaccttttcaaggcgatagctatacttgggtaaaaaatagaacagcattaaacaccttaaaggagtgtctagattggtgctgtaaagaccgcatatgattaataccttgaattattaaataattagggtttatgtatgagattttattattattgataataatacaattatgggaatttatt

SEQ ID NO: 117740 - DNA, 1232 bp, Cannabis sativa
tttctttaggctgtgtgaactgtttatgattctctgtcttatttcaagtcataattaaatcaacaattgggaaaacaatgtttgcggctgaattttacgacttcaaggataaccaaaatcagattatatttgactcaaaaaaaaaaaaatcagattatattggttgtactcttcttccaacagcacagagtattaatttaagtggaacaacaggaagagtttttagtaactggctggccatgcataggcaacacaacagcaggtttgtcagaagtttccggtttacggaccatcctaagcaaggggaaaaaaatgttattgatttaccaatcaaatgaaaattttaaagaaatcttcttcagttagtatttaggataaaaacatggtatgaactatgaagagattagactcacccattcgttatctctgcaaccatattcaggaaactctgttcaacattagtggcatctttagcacttgtttccaagaatggtatcccgacctcatcggcaaatgcctttggaaaaaagaaagatcataattttctgataaatatatattagaagatcaacatcacaagaaaagttagcaactaaaataccttggcagtatcataagaaaccactttcttgtcagttaagtcacacttgtttccaactatgagcttgttcacgtttccattggtatatttatcaatttcttgcagccagcttttgacatgtttgaaactttcttcatcagttacatcatagacaatctagcagagagaaaagaacccagaacaaaaaatcgtaaatgtttctttcagaaataagatccaaaattaagaatggaagaggttaatactaatacatacaataatgccataagcatcgcggtagtagctgttagtgattgtacggaaacgttcttgaccagcggtatcccactacaaataaaaataagaaaaaaaaagataatgatttaataagggatgtgttagatttgactcatttaacaaatgccacatcaacattttactacttttaaaaagtatagacagttaaacttaactaactgtcatagtctataaatagacttcaacacactaaacttgagaccaaatctaaactctccttagtataattctgtccgaaaaacaagagtgaatgaggattgtaaatagaacacgtgtgtttgatcatgtgattctcaaggtgagtttgttgtcaccatagccttgaagtgcgtgt

SEQ ID NO: 117741 - DNA, 2279 bp, Cannabis sativa
atattaaaaaaaacttattaccatatctaaaaatacaaattttcaattatttcacgagaatggcttttttttcaccgtttttatattgaaatatatttttcattaattatatatgataaataagaggagcttgagccccaaactctgtctgcctctggcactgatatggatcatgtctcaaagtatccatccgagaattttcaatttatttttataattcataaacagatcactccttattttaaaattttaatgatcacgttaatttattatcttaattcctgtgccattattttttttttaacccatacacattcatgcaattttttaaaaaagtataagaaagcgtgcaaagaaaatgaaacaataaaataataagaaaagttacatgttcatagtgactcatacaggaagaaaaatatttattgactacgtataatatgagcaacaaacaaaacgaaatatattattatacttgtatatattttattattttaattttgtcagagaaaacaccaaattgcatgatatagctagctctgtaattcagagtttcatacaattattcattaatttttgtgaaaagaaatgcactatgtcgacgatatataatattcgaaagttatcatgaataatttagaaaattatttggaaaaagaatgtcgaatatagtgtcatatatatacttgcattacatttattcaatggtataatgcagatacgaaataattgagagttggagatcgaactctttattatcatatacctatatatgaatattattatggatcgttaatatggtgtcccaacaccaaaatttaatgtggcacatatttaacaccttattatatgtacctaatatagtaataaaatataattaaaggaattttagtcaaacgagaaataaacatagatgtatggaaacgggtacaacatagacattaaaatattctttcgattaaaatagtgactctctcctttctaaataagaaaaacagtgccatttaaaaaaaattgttaaaattgggaaggaaagtcaaacatagtcaatattgatttgaacaaaggaactgaaataggaattccttcatttcttgtaggtcttgcctcaccgcaatgaatgaaaatgagtggatatcatttttcccctgctatggatgagggacggaaaaaggcaatctctaccaattttccaactcggttagtattcttatttggcaatgtgcatgtctcttgttcagtagttacattttgcttttttttttttcaaacaatttgcatgatgtaacactaaattaatactattttgcaggttggtcctaaggtatatgagacttaaggcgaaattaaaatttggggtccctatatatatagattaactattataaaaattatagctcaagtgcttagtttaatggtaaagcttttaaaaattttgagagctctaaggttcaatccctcataactacacattaaatattttttaaaaaaaattaaaatgtagaggttagagagaagttaagcattttgccactacaccaatcaatttttattataatttgttcttatttaaaatcttatctatatattaatatatttttttttcacaatttcagggtcctgagcgttcgggggcccaaggcgcacgcctagcctgcctaccctcagggtcggccctgctattttgacactattcaagagtctagacaaaaaatacatatataaatagcagcctaataacgaattgcattcttcaaataatatgcctatatttaattgttcatatttaatttcagcttaattagataaatataccttgtgacttatagtgtcataagcaaattattattatagacaataatagatatctaattgaaccgtaccgaactaattaatccaattcaaattgctccatacaaatagcatctttcatttaaatatcactcttcatttaagtttaatactctattcagatatcatctttacaactaaaaaattaaaaataactaaaataacaacactgaaaaataataaaatagaacaaaatatcatgtaaacgaatacacagaatatcatattattacaaattcaacacaaaaataaaacaaccagttaaaatataattataatgtgtttttaaatttttttattatacaagaaatgtcacttttaccagcacatttcgtaaattgcgctgacaaagatgtcaaagttttaccagtgtatatttgcaatggctaaaatataacttttaccagcgcatttacgcgctggaaaaa

SEQ ID NO: 117742 - DNA, 2275 bp, Cannabis sativa
  modified_base (1623)..(1637): a, c, t, g, unknown or other
  modified_base (2238)..(2239): a, c, t, g, unknown or other
taaggggtattttgggtagaatttaaaaatagtggaattgttttgtacaaattagtaaggggtataaaatttgatatgtgttattttattagggctaaaaagtgaaatttctctttatttatagtgcatgtgtggagttcatattttggatcttatctaaaccaatttgcataataacttaaatttaatccaatctgcaaaagtgcggattaggtcagttattttggattgattattttttaatattgaactatttaatatctattaaaaaaatatttttttgtttatgtaactaacaacaaaagaaaataaattattgttgttttatgtctccaacaaattaaaacaaataaaacaaaaaataatagattcaaagaaagaagaaaaaaaattatgtgtataaagaaatgtttaattttgatttaaattatattttccataataagaatagaatatacatttgatatactaagttttgaaatatatttgtgtcatatgtgtttcatttttaaattactattttttatattaaaatattgaatgtatatataatttttttaaagatatatatacgtggattggattgaattggttacttttacatatcaattaatattcaatatgcacaagtgtggatattcacacttaataaattatattagattaaattgtatagtacggattgaattggtattttatgaatacctaaatatttaggaatatctattagttttatgaatatgcaatatgaaaagagaattcaccaaactactaacatcaaagtttttgaaattcgcaaaataagtacattgaatggttgccttgtgtaaatttattgttgcaaaatgaccataatggtcactttacgacgatgcattttaatttttagttatttgtataaccaaataatattattttgctaataaattttttgaaaaaattattttgttcataaaaaatttcataggactattttgacgaataaaattttcttcttcacatgtaaatagataatgcaagagattaattgtttatttatcatacaaagtttaatgtatccaaattttaataataaataacataaataataaatatttataaattatgctctatataatatacccatgttatattttttacacaatttactcatgttaattttttaataaataatgtaattttattagtaataatcacttaaaataataacttgcaattaaattgcgatatctttcccgtttgagatacgactaggattataattagaaaaacgagttaaataatcagttatctaattcccagatcgtttgacaaaaaaaattaaaaataaaatcagataaaagtacgtgttgactcgacacttattttaagttaccatgatattgagcttcagacggatttgtcatatgaagagcaacttgtccagatcttggataaaaaagataaattgttgtggaacaagacgatttccttggttaaagtaatgtggagaaacaacaaggttaaggaagcgatttgggagttagagtcgcagatgcgggaacagtatctcgagttattcaggtaaattttgagaataaaattattggaatatattttaccaggacctagatttactaacannnnnnnnnnnnnnnatcctaaatatgaatttttaaaaccagtaaaatttaaacacatataaagtttgagtaaacttacattgattgcagcggaatataatgactcctcctctctaacccttgttcctttctgtcgcagagtattaccaagatctgagcccgattctccttcagttgtttagattcttcacagtcttacacactatgattgagtattaacttgctatgggtgggcatgcactcaatcactaaggctcaaaaatttcaatgaagaacactctaggattcgaaatttagaagaaagaaagaggaagaagtctcaagaactctctagttgtctaaaaatatgtatagtaggttcagagtcattagttggattatgagactatcctattctttttatactaattcacttagggttatgattgaattatatgaaataaaaaatgataaaataatagctaaaataagcctatagtggccgaccatgatagtgggccccactaattatatttttgccattctttcaactatttatctattatttcacaaatgacatttttttaaatttcaatcttataaatgtcaaaactatttatttaataattataattanntatcaaataaaatttttatttatattatttattaat

SEQ ID NO: 117743 - DNA, 881 bp, Cannabis sativa
agataaatactgcttggacttatcacattgatacgtcattcagatatcctaattcaatattttccacttgttgaagtgtccttaaatttccaagtaacctagaagcttataactcctagatgtaaaattggattacaatgctcaactgctaccgcgctttgaagcttctgccttgcttgttgtcataaaggattctccacaaccacactgcccttttgagtttggattaataaaaatgaactcggatctgcatggaaacttataaccggttaattcaaagggaaataggacagaaaattcaagagcaagatatatattttaggaaagtattacaaaattgtataataataataaaaaaaaataaataaaaaaacctaccccaaaccaataagtatataacaaagtggatactatatgtttgtatgtacaatcctatgcttttgcttgttttcacaatcacgatcattattattcaatctctaccagaatgaaaataatacataaatgcaaatatatataatttgtacctaagtttatcgtcaacaaaatccatttttgttccaacaacatgcatcagagccttaggttcaatcaatattttcacacctttatcttcaaccaactcatcaaatttccctttttcatctgtatcatataaaaatgaagggaaatcaaactagaaccgtaacgagaagtgcacttttttgctttaaaatgtatcacagaaacaaaaattctgaaagctaccattcaccaagagacaaaaaattctaaaagcaaaatgaataaaggataatactatccacacagaaacaaaattgaataacaaaaaacatatatatttaaaaaaaaaaaacaaacaaaaaaaaaacaaacaaaaa

SEQ ID NO: 117744 - DNA, 1681 bp, Cannabis sativa
  modified_base (696)..(696): a, c, t, g, unknown or other
  modified_base (1627)..(1653): a, c, t, g, unknown or other
ggatcagaaccagtataaatcttttgtgttattgtgtctgacagccatttagattcatctgtgttatatttttctggtttaatgtgtttgctagttttttgttcttagtttatttgttttgatttaacttttgtttgtttaagtgtgatcttgaagctagaattacagagattaattcttacgtatcagagttaaatttccaacagattccatatattagtttagagtattatagttcttattgtttctctctaacttacaattttgtaatttgttattttcctagttgagtgtttgattgtggtacattttgttatagtgaaaatatccataagaaatcatccaaaaattgctcaaatcgcaacatcaatctacataaggttactttcatacatactttgagtcacttcatcatatatattaatataacccaataaagttataattaataataaataaaaacaaattgagttttggacgatacatatcatgcccctactgccttcaccttttcttcacttggtttttagttatgattttatatgtgaaactaaaaataatagagagaaggtttgtaaccaccatctccatctcttgttcttgcttgtgaatgtataacacactaaaatttggaggtggtagatcagaaatcttaatatcaaatcatcatgatgtatgcatatatatatatatatntatatatatgtatatacatattataaatttatgcatctctgattttaccagcctgttaacttcattatataagaacccctttaaaatacgatggcaatattggcaatcaatattcaactgcaaaggattggcttcaagatatatactacgtttctttagtttttgtaaattattgaatcatcatatgtatggaccatatatttataattactagtcttaaaacatatttgctaaatttagtactatgagagttttttccttttggtaaaggattatcagagagagttaaggccaccttattaaccaaaagtatttattatagcataaatatgtataaatagttgcagcgtattcatgaagtaataacacaacatgaaggagagtaatagacatgggtgatctaattctctctttggtttcgaaacctttaaaactaaaacaaagtaaaagagaacatgttgcgaacgttattattgttgaaagagtttttcctcaagaacatgttgttgagggtttgaaattatttgtgacatgaaagatactaaagtacctatacatgcatatactaatccaacaccataagtatatttattaaaatctaggtatcaaacaataataataaaagtaaagacagtgataaataatgttgatatcagtattctttacaaacaatgataaaattaaagcaaagtcttttatgtttaggtatatggttactactacaagtggccaactaccatatgatttataataattttgagaccttgcattataaattgtaatggaaagaaaaataaatagatacttatgcataaatgtgtgtgtcttatcactacaagaaatgttacttttactagcacagttcgctactgtactacttttatcagtgcatttcataaactgcgttggcaaagaagtcaaagttttaccnnnnnnnnnnnnnnnnnnnnnnnnnnnaacttttaccagcgcatttatgcgctgg

SEQ ID NO: 117745 - DNA, 2248 bp, Cannabis sativa
tattactactagtactaatcaactgcttaatctcttcaagaccaaagtactctaatggagcctgctctgaagaagaaccccacaaaccacttccattaacattaacattattaatggtggtgttgttgttgctatcctcatttgacatcatcatcactacttcctggttctcttgttttaccccattattattattattatagtaaaaactgttgcttccatctgaagagctgcaactggcttcaccaccaccattactaaacatgagttgctgaaaactttctctgttgacttggtaatgtggtggcatttgagtaaggtaactctcttggttaagaatagtagtagttggtgagaatgatgatataggttgttcaaatccagtgaaagaccctgtttggctagtacagattagtgatgatggtgatgatgaagatgaggatgtagatgttgatgatgaatgttgaagaagagatgagatagtggaaggttgatgatgatgaggaggctttctcagcagtagtccttgtgttgttggattaattatgctcatcaacttcttcttcagcttggtgttccagtagttctttatatcattgtcagttctgcctggcaactgagctgctataattgaccatctgcaacaacagttgtttggtaaatatatatagatgagtttaataacttcttaccttttaaatcaatacacaataaatatattgatatattcaaatatgacacaagacaagatcatgaggaaaataagtgggatgttctgcaaagtttaaatttctttgaagaggaatggacctttttttcttaaaagaaattattgcagtagattttgaaaattaaggagaaaacaaaacccaaaaaataaaatttatgtaagtgatgaaagtatatgatgaagtacctgcttccaatgttggcaaagaggttaatgataatattatcttcctcttcagagaattctccatgtttaatgttgggtctaagatagttaagccatctcagtctgcaactcttcccacatcttctcaggcctgaaaacaattaatacacacacacacacaaacaaaacaaaaaacacttatcagtctctccctctctctatgtatatctattctctttaacaatacaaaacatgtcaaaacaaaagagatcatcatgttaaaagcctggtcatcatcagctatttataaatgattataaattgaaaattcaaacatgtatacataccaactttctgtgggagagcaatccaattgccaccagttccatacttgtctatgtactctttaagcttagcatcttcctcaggtgaccatggacctttcttcacattagccttgtcacaacaaggagctcttcccatatttctgtttttttctttttattttgaagtttaattttccaagctaataataagaagaagatgatgaataagaacttcttagtaactttttcttttttggtttaataaacaagagttgggttttggagagtaatacaagagagagagagagatgatataattctgaagagcttgtatttatggtgatatatagagagagagagagagagaaggcataagtcaaaggacagactcttaatttcaatcatcatttttaaaactttatattttattttatttttttgattaataatagagagagatgagagaactttccatcataaacaaatccaaacaggacactactggaccctctcaactctaagcaaggattttactctctctttctctctctctctagacacaaaagaatccaaagtctgctcaaaagtaataattatgatgagataataatatactacgtaaatatatttcaataattgattgtatatgaactccattatcatccatgctagagctttcgacatgccaagtcatatacatatataaatgtagtgattcaattatacgatgactgtatagtcgtcttatatatatactataggtatatatataaaatatgttcatttgtatacgtgacaaaagcaattattaattaattattcttcacatctaacttttgttccccatttgagagccatgtttttcacaccccccctcttgaaactctaagtgctcaatataaaattttggactaattatagtcatagtagtgtataataatatgctctatttcttaatatatatatatatatatatttttatacataaaatatttaattatttttctattaaaattaactgtaaaat

SEQ ID NO: 117746 - DNA, 1402 bp, Cannabis sativa
tcttgattaaggcaaaggaaaattttaatgatctatttgtaccagacttcgagaaacgccatggaattgaatatagaagagttttccactgatttttttttctttttctattattttggtcttcccatttcttgtttctcgaatatcaagtcaattttgattagaactcctaacaatgcgaaaaacacaggcataccccccacaaaatccacacaacattcctaattgagagaacattattgttataaaaatccacacaacaagatccaacaacattcctaattgagcacattatcagttattgttacaaaaagattcgggaactttacaaaattatataagaaaaaacattcacttgatgtaatgagtcaccaaaatatgaacattataacaattcatctaaacattattcaacttttaaacaatcttgacacaaacgaaaaaggatagaagtactgacaaattcgtaactagtgacatttcagtcaaatgtaaaagataagaagtgcaacaaaacatttaaacatttgacatttgtatcgtttagtaccacctttcagaagaaaggccaaattcatgtgtactattatgttcacagaaaaactaaccctcagattgcttcagcatccgcaatattgtaagaaacaagtttaggatatccaggtaaagagtgatggcagcccaaatgtactcatcgtatgtgaagcgcttgatcaaattttgagtgtcgtagacaatatagcccgagaaaataattgcaccaaccgcaccatatatagcaacagatgttgacccgagtgggaagaatgcctaaaaaaaccagcaaaagttttacaaagtcagatcaagtatacaaagagatattatgaacgtgcacaaatacactcatgaatggttgagtttcctatgtaaaattatgtatctgatctgacctggataaaactagatagaacaagaattatgagaccagtgaataagactggtcctaagaagctgaagtccttgcccttcttggaagcccagaaggtgtatccagtcaaggatgtaacaacagctgaggttaaaatcaatgcttcaagtacaatttttcctgcaattaataaacactcgaaactaagcatgttagaagacacatcaatgagacaaatcataggactcaagaaaaagaaaaatgacataaagcctagatttccaatcaaaagtatgtgtaccaaccatctgtgttcgcgcagctaacaccaactgttagactaagtgacagagtaaaaagtccaaggaagatgaagttcagaggatgtttttgctggtagacatataatggccacaatactgcacacaaaccacaacgtataaacttttgataagttatcaatatcacaatcaagaaaatggggaaccaggc

SEQ ID NO: 117747 - DNA, 1547 bp, Cannabis sativa
actcatacatatgaggtcagcagaagttttcatgtatttggcttattctgtatgagccccatcacaaaatttgctattttatgcaggtccatgcatgtgagcgagtactgcaactacataatttcattatatatattttatatataaaaatatatatttatgaaggatttgtccttcacttttgatactagtattaatttatctctcacttttaacatagtattattttgctctttatatagcaaagttagtattgttttactccttctaacactattaaatttaaacctcaaattaaaacttttttataaacataataaccttttactgcaattattctcttaaccaatttataacctaaaaacaattaagattatatagcaattaacaagaatatattttatatttatatttttaagataaatacatactttttatataaataatattcaataataatatttgagaaatactattattataatactttatatatatattactaaaatattttatattttaatgaataaatttcttcactttgataattgtactaatcaatttggataataaaatataattatataatttagtaaatattattatttgtatattattatataatgcactcttatatttcattttatttttagaagaacatataatgcactctttttttttagcattgcacccttgttttattagcaagaacaatgtactctttatattaatataatctcaaattattttattttgttacagatttaaaaaaaaaaaatagtgaatatattttcatcttaaaaatatataaaggcaccccattcattataaatattaaagtaatttaattttaattcttttttttcattttttatactattaacttatttttcatattaaatttacgtattttattttttcttttattttttttttacaaaataataaatatttttaattattttttctttaacatgaaaaattatttttagagtaatagattttttttagaataaaaaattaaaaaaaaaagttagtataagtcttaaaaaaatattttatgttaattttaaaaagtggggtgccttaattaaataattatagtaaaaattaatatgtttattaaaaaatattaacttgggttaacaatattaaagataagggtaaaataatacttactttgccacataaggggcaaacaaatattatgtcaaaagtgaagaagtaaaataatacttacttgccacataggggcaaaacaatgctatatcaaaagtcaagaggtaaattaatgctagtggtaaaatttagccacaaatctactaattgttttttatatatatatatttatatataaaaattagcaatctaacttttgttagtttgacaaaatattttaaaaatataagaatattcagttaaatttaaccgtgctagtaaggttagttttataaatatatataaatattaatatcatttattttagattaatttaaatttaaataaatattaatattattttataggttaattaaaattataccaat

SEQ ID NO: 117748 - DNA, 2345 bp, Cannabis sativa
ataaaaataacataaattaaaataacataaattagtgctgcctttactaatccaaattactaaagcggtcattacaaccaggctttccaatggatttttgtagccttccccaaagaactccaccaaaactgagccatgagcttttcaattttatgataaatggacacaagaagtttaaaacaagacattacataagagggaatatcctggattacaactttcaaaagtacttccttacccgctttagagaaaagcctattgttccacacattcaaatgtgaactaaccttctcaaggataaagttaaaactggtcttctttgatcgaccaaaacactgagggacacctagatatttacacataaaaggtttattatctagtcctagagtgatgcaaaagtactctgaaataagagagggtgtattggaggagaataagatagaggattccccatagttaacttgttgcccagtagctaagttataaagctgaagagcatccttgagagcatcacatgaggcataagaagcatcagtaaataaaagagtatcatcagcaaaaaagtaaatgagaaatagcaggggcagaatgaacaatggaaatgcctttgagattaccaagcctttcttggatctaaagggcagaagagagccctttagaaaaaaggatgaataattaaggagataagggatccccctgccttatacctctggaggggaaaattttcattagaaacatgaccattaattgagaccgaggacaaacacttacttataaggttaatgattctatcaagaaaattaagcttattaagaatagccaaaatgaaattccattcaacacggaaaagtattctccatgtccagcttaagaccaacccaaccaagcttgtcatgtttcctatgagtaatggcatgaaccatttcttgggcaatgtaaatgttatcaaagataagtcggacaaacaagaaagcactttgggtaggggagataatatctcccaaaacaaccttaagcctattagcaatagcattggcaacaatcttatacagagtagtggataaactaataggcctaaaatctttgagagaggaatcattagcttttttaggaataagggcaataagagtgttattaatagaagacatactagcattattattaagaatatctagaatagcttttcgaagatcatccctaagggtgtcccaattcttttggtaaaaataggcattaaacccatccaaaccagtggatttatccccaaaaagctgaaacagagcatcccgaacctcttcatcagtgaaaggggcattcaaaaaattatactgcagatcattcaggttggtgttggcaacagaaagagtgaagtcagtagcctccttattaaaaccttgatatctaaaaaaagtagagaaatattggcagacaaccttctcaatatcatccacattagagacaactctaccattatcaaggtggagacatctaatgaagttggttcttttcctagaggaggtcttattatgaaagtacttagtatttttgtccctagctcttaaccaatgcactttggatctttgtttccagaaaatttcctacttatacaggacactatccaagtgagattagagttttgaggcctcatttaaagcctcttttgagacagtgagagaagagaaaatattatttagttctttatcagttttataaatcctagtagcaatactgttgaaagatttattccaattttgaatagctttaacataattactttgcttaagaataaaactatttatagactgatcattacaaatagaaatgttattatactaagagtcacgaacagtatgaaaaaagaagttttctgttagccagtgattttcaaacagaaatctttcattcgtaatcttattcatattatcatccttcaaaaagaagttttaacactctattggtccgaaccataaaaactaagatgatgaaggattgcttgagggtaagaatctagccaaactttattgactataccccaatctaaacgctcacaaatagatccatgtttctaagtgtacttttttcccaacatattgaataaggaataaagaaaatttattaacaaagttttgaaaattaatcatggcatgattggggggaaaatatttactactacaatcactaatagaaagataatcattaaagtctccaaaaatgagccaaggaaaaagaggggcagaatcatagagcctttctaaaagtttccacctgtgaactttatcatttaaataggatgaaccataataagaggaaatatgagtagttatgtaatgttgggttttatgccc

SEQ ID NO: 117749 - DNA, 2312 bp, Cannabis sativa
tattaatatttataacaatttcaatatatttgtttttctttttcatttctgttcaaaataatgttttattgttattattattattttgtaaggaaaacaaagttattaataatattaataaaattcaaaattaaaatagtaattatgtatcttgtattaagatctgataacactaaaatattttcttacaaataattttcatgggatcacaaatataatagccaaaaaaatatttatagtcatcaatcataaaaagatgcataacaccaatagattaatataacaaaaaacatcatagattttacaatcatctcagtaccaagaaaataaataaagatatccataacagcacacaatagtaataatacgaaattttaatacaagtcttaatatagtagaaataaactgctaaaacacatgcatgcatctaaaataagataaaacataatatagttcagttgtttctaataatattaattaatttctcaatcttcataaaacttagggtcactcaagaaagcaaagttattcccaagatcattgagtatcttttgtttctcattgaaccaattacttatagtgttagattcctccttgagaagctttatctcattcttcaactctttacaacccaaagggtcagccttcaatccactaaccatttccttctcatcattcttcttattattattattcataatactcattctcaacattgaacttctactctccaacaacttggctctcttcaacattacctatatatattgaattacataaataagttttaattaataacctaaaatcatttaatatatattgtgtaagtacttcatcacctcgtattctttgctaaaatcattgaaaatcttagttgccatcattgcattcaaatttccaatagctaactccatgtactctgcacttcatatacacacatatatatataagattatttcaaacaagccatatatgaaagtagtttatatatatatatataatgctaaccttcaaattttccttgacattccggacacattttcttagaagcaaaaatctccctaaaatgtaagagaaaaaatagagctaataagaccattttattacattttatcaagtatgttatatttctacttttgctagagccaaacaccataaaattacatcacaaaaaagagtattgatatataaaatggagacaaaattggcttaccttaatgctatagctagtgaaagtttaagagagagagatgatagaaatgatggtgtggttgtttggtgatatagatcacagattttatagtactataaaatggagagaaaagtgaaattaccatactaccctcattcattacatattttctgattcaactagactagagtctagactgtagagtagagtaatgggagaagagagataaaatatttgatgggatggatgagacatattttttcatttccaatatcgtacctctctacgtcttgaagaagaaaagctaaaaacaaaaatttgctttaaaaattatcgtacaaatagtaaaatctcattgaagaggtttgtttttaacactttgagataacctcttacagcaaatcacatcaaatggcaaataggaatgccacatataaaagtatttttctaaatttgcgtgttgggtttatttgtaatttttaaaaaataagttgtgcctcaacaaaatatgagtcgtaccatgtcttgctaatttatttaaaggataggctcgacacggcccgtaggctcaatattttcgtgttgtgctttgctagtatcgctcgtatttcttaaacacgtcagcctatttttatatccaagcttaaattcatgtcttatttttttatatttttttacaattactacattatatgtataattcaaaacttgagttatatttatataattttttaatcatttttaagtgtttttacaaaaatactaaattttgagtaaaagcttatagttttaccatcttttacaaaaatgctcgtgtcgtgtcatgcttaaagacatatttttcgtgtcgtccattttaaacaagagtcaaagttattcttattttataaacttctttaattttttgctattgtaccctagtctaagttgtcatctattggggatgagttaactagatttcctatttacaaaatacttataatacgagatctagcactattaatttgtaaagtaatttgcggcaaaaccctccaactatcaatttacttgcaaaaaactatccaacctcatattttggtgggaaaaccctccaaagtactgttctgtttacatttttaag

SEQ ID NO: 117750 - DNA, 2929 bp, Cannabis sativa
cgacgctcttccgatctatgagttttatttagggcataaaacccaacaatactatgggaccactgtctaagaggaagaagtggtcggagcttcatgatttgacatctttgttctagagtagagttccagaatttctctgtcaaacacatggaaactgtgttcgtgtaagtgtctcaagatgttgctcatctaaaaagtaagaatacacttagcagttagcccctatatcaaaccctaaacaaagaagggaatgtgggtcccctaaccgttgagaaaaggccccctccggatgctagcatgatcataaattataaatttcctaagctaaacatcaggtgctaattgcaccatgcccaagaacaatggtataagggacgagaaagaaaatggcaagttctataaaccctagacatggaagccccgacctaagaaaaaaactagagatgactggggaaaatacccaaattacaatcacagtataaataccatattcatgcaagcaaattgccaaaataaagcaacaataatgaaaagaagtgcattcttacaaatagaagtttgggcgattgcagggtttggcacacgacgtcgataaaactaggcttgacaacgtcaaagaaagagatgtaaaaaatttggggtgtttagaattttggctagcttgaggttctgagaaatatgagaacggaaatttaaaaaagagaaatgtaggacttttagagacctcatgaggtgactcggattgtcaattattcgttgtttccaattcaaattatgaaaaatccctatgatccaacgattaggacacatctatcagaagaacaaacataaataggcaaatacactactcaagcaccaatctgacaccctgcaattaatgaggacatctaaattaagtaaaaggaaaattgaatcgccttcaccaaaattgaaaaaataataaataacattaaaatttgccacacacagcatgatgtcagcactccaagaggcaagtcgcaagccccattttcacattattacaaaataggactaagggataaatgttgcctagaattttttcaaaaatacgtagtaatttaggagcaagccatgtggcaataggacccacactacgggatgtgccatatcaaatcacttctagagtctgttatttcgcgagaattgtgaaggattggtcatctccaagagggtctacctggatgatagaaaaattttggctcttcctctccgcgagtgaactcaactcggagaagagataaagggacaatcgtagcatggcgcactgctcgaggttaagtgattgtatacacatttaatgcggcatgtggaagaacatcatacacattactctgaaaagacgtgctcaagggtttaaacctaattccttgatttcacaatgccccatacatcaattgacgactacattatgaactatcaaatcataagcaaaagaaaaatctagtcccaccaaacacctatagcaagcctaagcacattataaaagtagtcgatcatgctctatgatcaaatttaggaaattgtgcaaagcatgactcatacaacacacgacaatggtgaccatttactaccattatgagcctataaataccccaatgatgtatagaagaggaaacttttgagaatactctgtaagaaaatactcattaataacagtgactcgtggactaaggctcattaatgccccaaccacgttaaaagttctcttttttaactcccattaattactacaaatagctctaattaatagttgctgaaaatctcgatcaataggtacttttcgggataacaattatatataaatataaaataataattaaaaaataaagaaaattatcctatatactattttttaactttttattttcaaatttacgacttgggttgttctggtggtttctatgtgggttgctaggtaaattttagttgcgatttaggttgctccgttggttgctataagaatttttatgtggatttctttaagggctcgtttggtacgccgtataagagtcgtattatattaaataataaataacactatgtttggataaaataatgtattgtattaattattaccaccaaaatttttaatttaatgtatgttgtattatttaatacataacaaatggttcgtattagcttgtattataatatttataaatgattcgggatcaacaccaatctcccacctgaacctgaccctgaactcgagacccggacccagacccgagactcgaactcgaacccgaaccccggacctggaccccagacctgaacccgaacccgaacccgagacctggacctagacccgaacccgagacctagacctagacccagacctggaccctagacccgtgacctgtactcggacttgggacccagactcggactcgggacctaaacccgaacccgaacttgggacccaaacttggacccggacccggacctagactcggacccaaatcgggatccagaatccagacctagacccgggacccaaatcaggacctaaaatatagacctggacctagacccagacttggacccgtacccgtgacccggacttggacccgagactagtgacccgggaccgggatctagacccgaatccggactcggacctggacccggactcgaacctagacccaaacctgcaacctggacctaagactcgagactcgagacctggacccgggacccggacccgacccgtagtttgtgttggggccgagtatattgaaaatatattataactttacacaatctattaatataatactaatgtaatacaatacaatataatacaatataatacaatacaatatagcttaccaaaagagccctaaaaatatataaaaaaaaaactgttttaaagtttaaaaataaaaaaaaaaaaaaccttagtata

SEQ ID NO: 117751 - DNA, 1017 bp, Cannabis sativa
aaaaaaaaaaaaaaagaaaatggacgagtacaactcaaattggcaaactgtatatatattcaaaaaataataaaccataaacatattattgattacgtgaaacataactggatatatatatatatatatacaattcaaatttacagtgcttttgaatatatacactcatagcttcatctactataacaatagaatttattgtatgttacgaggcattcaaccttagtatatgactaaaaaactttattaacgtgctgcacattgtatatggaatagaattatcacttaagttatattatgacaataaattaattgtattgtattctaataacaacatgagttttgataccaaatgttaaaatactgtaaatttaaatttagccctaaataatttatgagaatcaaacaatagaagcgtaccggaatccataaactcgattttagaatggtataatcttccaattttcacatcaaagaacttttgaagccttattttcctaatgataggaattcaagaatctagaaaaaaaaatatgatacaaaaaaatagagaccattacccgttatgttaccaactgccaaaacagttagtaatatttattaactatttttaatttggtccctcgtctaattagaaattgtctaattagtatccacgtattaaaatcatgataatcatgctcaaaatttataaattttatttcaaaatatatcacataaatttaatttatttatatgatgaactaagatatattttttacatatacaatttatttattttggaaaaaaatctcaattcatggtatgtgtagtttagattacctttgtatatatagatcgtttgtaataataatattttgattatattttagtcataggttgttgataattccttgatagtggatattatactcactaacactactacaatattagcctttagaggcagttttttcaacctcatttataaaaaaggaagctaaagggtgtgaaaatacccgctatgttcgaaattga

SEQ ID NO: 117752 - DNA, 2536 bp, Cannabis sativa
atagatgatttacatcaagtaggacaaatttaccgttctacccctcaaagtattttatccttaaaatacttagcttcctataaatgatatttcaataaactaatataattactgaaataaccttcaagacaagtgttagtggagatgaaaaatgtgtcatattcacttgggagctctttgaaaatggtagctatgtgatctcgatcagttaaaacttcaccaacagatgctaatagatcaattgtttgtttcactttgcaaagatattcattcaaagaaagatgtcctttcttgaggttctgaagcttggttctgaactctaggattttaacaaaaaccttcaaggtgaagtattttttgagtgttttccagatctgtcttgaggtctcacaaccaaccatgcgagttagaagattctctgacatggaggataggagccatgagacatgaagctggtcttggacatcccactcgacaaaggcagggtttaggttgtttgaagcttgatcttgatcagaaagaaacttaggtggtggagtagtgtgttgaatgaattgcaaaagtcgatttccacaaattgcagcaagcacttgttgcttccatagaagataggtatgatcattaagccttactgaaagagtgttgttgaacattattggcgaagagtcatttgtgtctctatttttagcttttaaggcaactccattgttggagttcgagattccagtgacaatgttcaccattaacggcggaagatgctctgataccatgttaaactttcttgattgatgaaagagaacaagaaagaaaagaagagaaacaaagagaagcaaagagaggtaaaacagaggacaaaggaaaagaaagtgagttcaattgaatgagctgagcacaaccattatatacaacattaactagaagcaatctctaatagaaagtgaaactaattatagctggaacagccaagtaaaacaccaactgtaactaacactaacgaactctaacagaattctaaccaacttctaactgattacatgctttaacaatcaaaaattggttcaaagatagtattaatgtacaatcatttactttttaactatattgaattgatacatgatatgtaaagttgaggtaatcacaggttaaagtgtattggtgttcaagtgtttgagaaagattaagtatttccaaacataagctcattctctggttagctatgcttgacagaaaactgaccaaaaataagctacttaaatgcaatataagcacggatgattgttaccttatttatggattaaatgaataaattattacacatttatttattttgtatccgtgtagcagcgcctatttaacaaagctcaaagcttggctaacttggagagtttcaacaaccaatgttcaaaatttactcaggtggattcgaaggagtaaggtgtgaaaatgtaggaagcaagtgtattacacagtcaatgttgtagctgtcactaaaaaaaactgagtctgtaacgagaagagatatatcgaggacctgtcatagttattagtacttttgcaccaacaggagaaatttgtagttttttttttgaaaaaatttcctgtaccgtggacatgtcctcgtaatagttttatcggggatattttatttccttttatttattagcttttctttgtcttctctaagcccacaaattaaaatacccaaagtagcagagaaaatcctagatcgaattgatgattatcaaatccatatcagaccaaattgactcgtgtgtcgtacctgctcccttgttgactatgtcttccttctcaagcgtcttccttcacctctggcaatatggtgactagtcagtgttctatctctttctctctttctgttccgaagtagccaatgtgtttctttggtaggtctttctctaaatcaattagatcttgaacacaatataattttaattcttcatcgtgtgttttatgaaaatctaatctctttttcatagcttgaagaagtcatctaaaagtaatagaccaagaaagggaggcaattgattctttaagagcgtcgattcgagatttaaagtattattttcttcactgtagttggattaaaattatggtttaattttataaatcatgtaattagattgacaccaaattctaaattaatttgatgtgatcaatacatgatcactcacctcgcaaacaacacaagacaaagaaaatgatcaagaacagaacaaagtaattgaaaatcaaatagtgcatctatgaacaaaagcctataaaaccagtaataaccagtggcaagaaccaaaatttaaactaacataaataagcaattaagagcaattgaagtaggagaaagaaatcaaacacagtaaggttttacaaggttcgaacaagtgatgttgattcactggcctactcctcggcaagaactgtaaagaccgcatatggttaataccttgaattattaaataattaagatttatgtatgagattaactataattatgaaatgtatattttggaaatatatt

SEQ ID NO: 117753 - DNA, 1833 bp, Cannabis sativa
  modified_base (1808)..(1808): a, c, t, g, unknown or other
aaactaagaaaagagtaatgttaattacaattaatggtaataaataaaagatttggacatccacataattaataatatttataacattacaaaaataaaatatttattatagttgtagcaagcaatacatgcctagtctactcaaataaaactttaattattaaattaattaattctagaaaaatatagttgactagttttttttttctacaaaatttattttttagttatttaatagtcgcgggtctgagtctgggtcctttcagggtttgggtcccaagattaagggttggagtcagtataaaatattgatgaaagaaaatataaatgattataataagaaaattattattttttataaaaaaaatttaaaagtgattttatttttcaaaacttttaaatttaaaaagtaaaaaaataaaaatagatttatagaatatatatatattttaaatattttctcttttcaaataaaaaagaactaatttaaataaagtattataaaacccaccttaaatatatatattaagaaattaggtaatttgcgttcaaaactctttaaattttgagttttgtactaaaattttgggagtaaaactctccaaatttcaattccgttttagtatccactttggtttgttaagtgtcaagattgactgtcattgtatacacaagtgtacacgtaataaattttcattaattcacctaatattagtaaattaaatattaccaaaaaataattaaaaatgttttaaaatttaaaaaaatgaagactgataatttttaaaaaattcttttttccctttctttttgttttcttcttcctctttcttttactggaacctaacacacccgtcttttgtctcctaccagttcaaccttcgaacttgtgtttcccaatgacttatcttcctcaagtcactcatactcaaatatatactcaagtgcttgctcatactgattctaacaccgctagttcaaatactgctaattctgttttggccataggaaattagcagcactggaactagtgcaactgttcttcatcaacaaacaccttatctagtccatctagcttagaatgtgtcgtctgagcctcaaccagttccatttgagctacactaattctactcccaattttaccagaacattgcatgcatctgcttatactcctgcaactcaatccaagagagtttttcctgtaactctctagtaagcaatcacaatcagggctggtcctaaggtatatggggcctaagacaaaatcaaatttcggaacccctatatatagtttaattattatcaaaatgatagttctaatgctttagtgtaatggtaaggctttaaaaaaactcttaagagctctaaggttcaatcattcataactgcacattaaatatatttaaaaaaaaataaaaaagtagaaattaaggattgatcattgatctcttggcttaaagtaaaatcttttaccactacaccaaataatatttgttatatttttttcttatttaatattttatctaaacattaataatttcttttttcacaatttcagggccctgagcgattcagggaccgaggcacacacctagctcgcctaccttgatcacaatatgtagataagatccaagtcaggcatctataaaccaaagtctacatagttacaaaagttctttcttttctacttgaagctctgcaacaagagcattggaattgtgctatgagagatgaaatcttagccttagtcagaaatgggacttggattcttgtctccttaccagaggtgtgacagtcagtagtcccgngatccgtaaggggaaacaccgggta

SEQ ID NO: 117754 - DNA, 1839 bp, Cannabis sativa
ttatatgtaagccttcaaagtctcagacaatttttgcttgattttagccaaagtgctaatttccatgtcgaatatcttggtggtaatgaactgcttttggaaagttttttgtagcccttactagtcttgggttgatcctagctttgatctcttccatgactcttgtacacatccaactaacgtgatggaaaacacaaacattttttgtcgttgcagaagtgggccacaaacattagtcgactataataggacagatgatctttgggatctatagttcctctatagttgaaaactctaacatcttgaatcccttaggctaaacaacgttcagtataggcatggcatctctcaatcttccttccacactaggtaatacgtgaccttttttaagtagaccagtttttccctgaattgtcgggtcatttcattgtcaacgatttccttgttggaaactaataacaggctcttattttatttttcatgcaaaaattatttaacgtaaataattattttctataacatgcaaaactataaactgagattatgaatacttacagagttgtagcaatgaaataaattatcctttcatttagtactctaacccttcattcttgtctcacatagaatatcaccaagtactgagctcgaattttcaatttgaacatgaacaagaaatttcttcacagtcttatgcagtgttcaaggtaccaaatagaatagtgtgggctatttctcaatatgctattttcaaaaaaaatctagatggagaatagaatagtagtggacagctaagacttaatatttttaaagagaattttccaaagttttacctatgtaaaaaagtagtttaatgaacgtctctcaaagcctagtatttattcgcaaagagaaacaaaagtaataggaaaataagttaatttccttcaaactaattaaataaataaatagaaaataaaaaataaaaaataaaaaagacaattccttggctaccaaggaatgcgatagtcgaaatcccctagagatctttagttatggactttgctcttcatttaactaaagtttattagagataattaaaatgtatttccatttgtatttttaccataactaatataatataaatgcatttcaataaactaattataattactgaaatgagctctctattatttattactttagtaaactcaaaagaaactattatttcacttctaacaaatagaagttatagatgttcatatctatgattaatactcctactcaattttgttactgagtttttaaaatacaagtgttggctagaccttagggtaagcttgtaacgaacaaatcaaagataactcaaaataactgaactagcttaaagcttaatcatctccggattaagatgtaatcactactacagggatttttgcttcagtttcttaagtgacataaagaatttgttttggttggtgtgattgacattatagtcgtagatgcaaatagtgatattttttgctttagttatgaaacgacgctaattgattctttacttttgttatgaaccgaagcaaaaaaaaattgcttcagttcataactaaagcaaatattagtgcaccaacgctaattaaactaagcacaaaattcttaaaaaaatatcaaaaatatgaaccaccgcaccaccaccaccatcacactactgcaaatcgtccaattcacatatgcacagatttaaaccaccattcaaacctaaaatacacagatttaaaccaccgcaccactatcccaacgtaccactacaaccctaaaagtgtcgacatcaaataagaaaaaaaaaagagagagatcgaaagaggg

SEQ ID NO: 117755 - DNA, 1425 bp, Cannabis sativa
aaccaaaaaaaaaaaaattacaaaaatacggttgtacagtattttaaatatttttacaatttttatgattttaatttacagaaaatacaaccttttgatgtatatttatatttgataatttgttgttgaattttcgttattcgcatgatattttttgttgttattttgatattgtttagattttattttttggttagttttatatagttttctttttatttttattgaacatcgtaaaaattaaaaaaaaatctttaaacataaaaatgtaaaaaaaaattacaaaaataagtactttaaactttgacaaataccaaaattttcaattcttttattcaaaaaaattattattaaagaaaaaatattaaaaatcccattaaatgcttaaaataaataataagtaaaagtgaaaacattaaatttacttaaacaattactctttcaaaatatatttaaattttttatacttacaaacacatcttaaaaaacaaaaaaaaagtttattcaaaattcaataaatattttaaacaacaaattgtaaaaaaaaaaaacaacaacaacaacaacttttgtttacatgaaatcgacacttttttcttttccaaatgaagttttaaatagaaaaacaatttactttttaaatttcttaattagtttttcaattttgatttctttttaattttcttaatgatttaaaatgttttatttttgattccaaaaaaaaatgttttattttattttagtttttaagatttgaatcagaatacattggataatgggataattacataaggcaccgttttttataaaaaaaaaaatgtacatttttacgttatatggattttgtttttatatttttacggttttccgtaaaaataacacgaaaacaataagaaattacataaaagtaatatgaaaataacatctaaataacatcaaaacaacaactaaaaataacaaccaattaacatgaatataacataaaaagaccctattttctgtaaataaaatcaaaaaattcgtaaaaatgtttaaaattccgtaaaactgtatatttgtaattttttttgttgtttttgtgtatttatgaaattatcccttggataattgttaaagttctagagataaaaacactcatttacaatgacacataagtatttaaatgatcaaatggatgaaacataagataataattaaatttgtgtaaatgttaaaatttggaaagaattttaacgaactagatattttaataacgagcacgatattgtaatataataactttgacaaaactacaaagtaataattattaaaaaaaaagttaattaggataattttttccccaaattttgacatgtactaaatcatgttccctgaactttttttgtcgttaaaaattggaataattacataaaaaatataaattga

SEQ ID NO: 117756 - DNA, 893 bp, Cannabis sativa
agtgtgataccattaccattttagtcagaaaatatggccaacttatatacaacaattttatttttttaaaacttattatttatattattaaaatgttcttttgaaagaagaaaaaaaaaagagagaactatatttgtgtaatagttttcaatgaagacatattcttcttaatgtgtctatttcaaatttaatccacattaaaaaaaaaggaacaattaggacaaaataaacgattttggcaagcagctattgcagacacgcatagcgtaaatgggcaaagggaaaacgaaataaaatttatatttgaaaaagactatgcaccaaaattcttcaatatgacataataaatataattaatttgaaaatgaaaattattaaaaacccaaaactagtaaatatatagtttcttaatatatctgatttttttaaaaaaaaaaaaatgtcttagcacgctgtaatatttttttgtgttagttaaacgttctaattggttagattaaaacttgttatcttaataaatatactgtaaaagagtaaactttttactaattaataggaaatggtcttttaacaaaacttgtaatgtatgatttaatagcataggatcgtgtaatttatggtgtattgtaaaaattaattgcacattaattggtataaaagagataatcattatgactaaaacaatcactatttaaattttacatgaaaaggatccaaaatatgtttatatacattacatgaaaaggagcttctcccggcctcctaatttacttttaagaaaggttaatagaatatattatggaataattacatcagacactattttttgtaaaataattgcatttttacgttcaaagaatttttttttttacatttttacggttttttaaaaa

SEQ ID NO: 117757 - DNA, 1260 bp, Cannabis sativa
  modified_base (1000)..(1016): a, c, t, g, unknown or other
atggtgtttaggatctggaccgctcggaacagtatgtttttggctccattttgaccaagaacttggtgggattccaccatggtgtttaggatctggaccgctcggaacagtatgttttcggccccatcttagaccaactctttttgactcagatatttgtctaaaactctgagcatcactttcgcgagcttccaaagaagacacgaacaaaagagtgattgctatcgtgaccaaatagatcttaaaataagaatccatttttgtttttctcttctattatgtttacacacaattgctttttttcacttcttataatgttgattggaaaacatgtgtatttataggtagtgagctatgttgatagaggtcaaaaaaaaaaaaaaaaattacaagagtattaatatttataatatatttctcgttttgtgattttaaaaaatctaccatagtaaaaataataatgaaaaacaaatgtttttgctattctttctatataattaatgagatagcatgcattagattttttatttttagaaaaaggatatgcatagattttgaatgtactaatatgataggtttttttttcttttaataagtacacttttttttttcactttgctaaaaaaaaataagtataacttttttttttcataaaaaaaaatgagacctagtaattatctctcaaatgtatcaacatttccatatgttaatggcactttttttcctttaaacatttctctcctttgtaattaatgaaaattttacaaaaaaattatgtttttccatttgtgttttacttagataatgttttttaagttttttttctttttaagattttttttttaagataatgttttttaagtttttttctttttaagatttttttttttaagtttatatatttcaaatataattacttgtttgtatctctcttttcttacaagactcttttccaatttatttattttttccactttcacatttattattattattattnnnnnnnnnnnnnnnnntattattattatttaaaatatttacagtaaaactacttaaaagttaaaactataatatttaaataattagttttttacggcaaatattgttttacttttattacccaaataattttttgcaaattattaaaaatgtattttaatttataaaaatcattaatatataatagcctaaattgtgtattagtttatattttagggaaacttacaaaaatactgaagtttgggttaacttttacaaaaa

SEQ ID NO: 117758 - DNA, 1690 bp, Cannabis sativa
  modified_base (1505)..(1514): a, c, t, g, unknown or other
ctatatagtcttaagcgagacaaggataataactattaaactgatattaacgagacatatgcctgcttcagaatatacagacaagaaggggatactcatctattcgagcagaataaatgtaacaatataattgcctcgcattacacataacaagaagatcacctcgtactattaatgccaataaaggaatatgacgagacaaactatttctcaacacttagtattttttcttattaaaacggacaaggaggataactaatatcaagcgagatgcaatcttccaagtcagcaataattgtctaaaggataaaagtaaagaatggttaggtagttattagatattattccacgtgtgacaagaaacgtggggattgaccacgtttcattaaccgttatatttaaatcaatcctaaaatgagtaactgccaacctatattcctataaatagaggcagattccatggaaaaatggatgacaagtttgagagagaaatattattattcaaattatgatattgtattatgtactcaataaatatccctaataaggactcatggagtatgtaaattttaattacaaaaccacgtaaaaatatttggtgttaccttatcatttattacttatctattttctgtagaatatttattacaaaaatactatttaatttgattaacgaaaatctgcgttaacatgtgtataattataaaagtttaaaatttaaataaaaagtttaaattgacacgttttttgtaaaatcttttgattagcgaaggtgagcatagtaattataaagtcactgtagcatgcctaagtaatagggtgttacaagtgtcgagttgtcaggattttgttttatggcatttctgacttatacatgtattttgacatattactgtaatgacatttcttttgtaatactttaaaaggggtttcccaactttacaagtttaaatgccatagattttgtatttaaaaataattagtgaaattttaatgaaaacacaattttatttaaattgtcagtttattattataaactaatttataaatacacacgtgacgactttatgaattaggacattacatcttataaggtaatattcctttcaaaaaggtaattccaaacattaccttccacagttgtttggtatgaaataatgtttaatagggatgtcaatcttttctattcccatgtttggtatgagattgttttttatttcaaggatatgaatattgttactatggaaataagattaacctcttatggggtaatgttaaatcctttcaaaaatgtggattccaaatattatcttaatcttaataccatgaatttcatatagtaaatttatattctttttacaataatttattagattcatccgttcaaccaaataatttagggctttttttaattttaaccaaaaaagataacaatattataaaaatacttctagctggccaaataaataaatatacaactcaaataaaaaaaaattacacaaatnnnnnnnnnnacaccttcaacccaagattcatgcttcctggacaaccatcgggcaaccacgtagcaacctaacgcaaccgaaacgaaaattcaactagaaagagaaccaccattaattcccgcaaccttacctaagaagacgaccagaatcaatcaaaacagaggctgtttcgaattcatgaaaaa

SEQ ID NO: 117759 - DNA, 1147 bp, Cannabis sativa
  modified_base (1113)..(1115): a, c, t, g, unknown or other
ctaacagaatggctaaatttctgtgtatgtaaaagtttaagggagatttttaactagctctatattttaagactaaaattaatattgtctaaaattcaggaaacaaaattactaattattcttctaaagaaaatagatcatgagtcgccaagttagaaaattactgagagctaggttagtaggttgtgaatttttcatatgaaattaatgatttaatttacttttttgttaaaaaaattgtcattattggaaatccttatactcaattccatatcaatatcatgagacctagcatgatgatcatggttttttctttttgactgtgggaatttttttttttaaaaaaaatactatctatttttttttttgtattgtgtactatgttaagttttaattgttattttactgttgttttttagttgttccactattatttttaattgttctgttttgttgttttacagttattttataaagagacagtatttttggaaaaatttccgcgtgggtaaaattgtaaacttttgcccaaaaatcaatatttttgtaaaatcccttaattttaagaaaaaaaaagtttcaattgatttcattctatcatgtttgaattttattaataaattaacaactatatatataaaaataaaataaaacgtcacatatcaaatttatgaaaaacattttattttatttcttctatatttcctcataaattttttgtttgttataatcaaagactcaaacagaagcaatatataattcataatctcaagtgaacaatttatttcacacgttaatatgcatgcatggctatgaaatacatattgtgttaattttattagtgtattaatacagtttttctttgtttgtgtgttcaaacaagattagttttaacaacaattcaaaggagagagaagttgaaacttgttttctcacatacagatttaaagcattataactttagggtatatagcagcataagtatccaaaattttatggttgtaagcggcataaatctaatgtttatttgtacataagtactcaatatttgtaaactgtaattttcttttggtttcgtcagtacaacttttattttgaatttattaaaagaannnttggaagtaactgatactacatatttctatct

SEQ ID NO: 117760 - DNA, 2771 bp, Cannabis sativa
atatatatatatatatagatgaaaattctgcagaactataatattgtgaagaaccaaatactattttcctggaaaaatcctccaagttgtatagccattgacaaaaatttaatttacactatcatttaatttgatcaaatttaaattatataaatgtcaatatttaataggtataaaaataacacactcctgaatagaaatactcttttatttatttatttatttattttgtaaggatagaaatagtcatttaactatgcataattaacaaaaaaaaatattttacagatccaaataattttaatttgagaaagatttttttgtttctctttatacattttgaagtaaaaaatacaagaggtcatacttcttttatcattaatatttaatacatacatataatagctataaataaaatgttaatttaataatacatctaatacaaaaaataataaatttttacctttaactcataataatttccataaatactttagtttagaataatgcttactttttatgttaacaaaaaagaaaaaatcaaaacatcaagagcttgtttttactttttttgaaaaaagagattgtcttagactgacccctatctgttatatattgaaatccctcacttgtggcggaggaaaaccaaggttacaagaatcttagcataaaacatactaaaaacacgcacaaaaacaagaccggaaccgataaaaacacaacttgttagttctaaaagaaaattgcatcaaatttctccattctctaattaagtctaagaatgagaagtgatcaaaatatttagtcttgaacacccacgtggctgtccaaaaagtaatcctttcccacaaatcatctaccaggctttcagatccttcgaaaattctattatttctttctaaccaaacagcccacaacaaagccatgattgttgttctccacaaacagacctgagccaactgcctcccaccttactcactatcatttcggggactcacacgggcatgacccattgaatttcaaattccatcatcagcttaaaccatagcttttgagcaagactacagtttaggaacaggtgtgccacctcttccccactcttggtctctttttttgcaacctctcatgaatattaattttgcctagagccaccagccacccaaaaactttaactttcgatggacctaagcttttccataaggtctttgtccagaaatattcacctgaagcatggcctgatgtataccagccaaacgctgatttacacgaaaagatacccccccgcatcaggtagccaaaacctgctgtcatctagaatgttaagcactcagacatgttccagctgttgtagcatctccaacaaacttggtattcatctgtccatcaagtttctcctaaaattaagattctaacttcccacagtttcctacttcgccctcatcttcaatcagctcctggatactctcatttttagctctaaatatcacagctaagttcaaaaaccggttcttcaaagatgattccccaatccagacatcaagagcttgttttattgctaagttttcctcctttttcccttttttaagaaacaaagagatattgaaccctccatccatatctacaactaaattttccttcgtatagtagttttatttaattttttaataatctgatttacagtctaaaatgctaatatagtaccacatgcaatcagggttacctgtccaagatctactgcagggttgagactttgtccacagtcataaataatatccgatcgcaaaatcgaggtttctcctgtcagaagatttatctcaacctgccatgagatgtattcactgttcagtaacacagactaaatatttctcattagctaaagactggaacaatcatgctgataatcagatttttagtaagataaattaactgtttgatgtttaatagtgaagaccagttataggtttaattgagaaattatttcatgcatgcaatcctgcaacttaataagaagtttcttgcaaaagactcacctcagtcactgctatgccaaagttcaagtatcgcatggaagacatatctgggatgaagaaagaacttgatgataaactaatggattgtgagtaaccctgcattgaccaaagaccaaggaaaattgaagattgtgattaaatttgagaataacacaaacacattaaaaataattccagaaagtttctgttaattgaggaaactaaattaataatagtaccatgattagtaagttcataagtcacgaaaatgaaacaatgaaatccaactagatacctgagcaatcagcatcttccatttgatagaatcagagccaagtgattcctgtaacttctctttaataggagttaatctctcaaccaagacatcacagcatagtctgactgccgcacagcttgactcagatgtagtgctccctgctgtaaaccccccttggatcaagctcaaagtatcagcctgtatgactcgcactttatccagaaagttttcagctccatcagcaatgattgaaccaagagcaaaagcagctgtctgtttcacctttgtccaaagcccttggccaagctcaattcctcctacttcaacagtgacagatccatctgatagaatgcttacttttgctggagctgctctgaccgtcatctcagccataattggtactctagatattcctcgttttttccatctattacacatattaaactcttctatcatttgagccctttgactaaattttgaagaca

SEQ ID NO: 117761 - DNA, 1204 bp, Cannabis sativa
  modified_base (1099)..(1101): a, c, t, g, unknown or other
  modified_base (1158)..(1158): a, c, t, g, unknown or other
tttttttttttttgaatgaatgaactcatttgtgctttctaatttgaaggcccaaaaccaaattttcgctcgtgtcctttcaataatttcctatgtaattaatttagagaacttaaaaataactaatgcagaaactgaattttatgtaaaattatatatttttacgaataaaaaaaaaacctcaaacttatattatttgaaatatgaagggtaattagtgatatgcaatattttgtacattgattttttttttatcaataaaaaaataattttattaatcaaccaatctatacacccaacaatccaaactgctacaataccaaattcaaacatatttgtcactgtatcaaaattttgaaatcaatatgggagaacttcctatactatacattttgtaatctatacaaaagaatcatattcctcttttactgtaacagaataagacaaattattataaacaaactcatttctaattctccacaagtaatagagagtagttgctcagaggacttaaagacaatatcagctagacatgtcttcttattctctatccacactagccaattcgaaaacttcattggccaagcatcaaaatccaaccaactaaaaaaatgtcgaactaccctttttgataaaggacagtaaaagaataggtgttggtgactttcgttatgcccaccacacacatttgggagtcaatctttaaattgcacctaataagattgtctctagtaagaagatgcgaataagttgcttgctacaagataaatttatgtttggacaaactaagacgaccccaaattgtatttgtgaaggccacattttcatgtggaattctactattgtacagctttgtggtgtgaagtttccccttgtaaccaatggttggttacaatatcccacctgttgaaactctttcgaatattatagagcttgcaccagtaccaactcaaatcagccttggtactctcaaaaatcctgctattttaagtacaagttatggacccactttacccaaagaagatcttgtttttctgaaatggctcagatgaattttgccaaaatggctctattccacttaggtggcgtttggttggannnaatgaaatggaatggaatggaaagaaaacaattttcattccattcttttatttggtngcattttaaagtattggaatggctattccattttttttaaaaaaaa

SEQ ID NO: 117762 - DNA, 1977 bp, Cannabis sativa
agacagagagagagagagagagtagtgtggtggtggtggtccatcgatggtggtttgtcggaaagagaaagagagctaagggagatcgggagggggttggcacggtgacgagagaaagagagatcaaaaaatttggtccgtcgatggtggtccgtggtccgtcgatggtggtccgtcattgagggtttgagatcgagagagagtatttgagaaagagggtttgagagtgtgtttgagaaaaaagatcgagagagagtgtttgatagtattttccagttgggggttttatttttttatacctattcccgacggttttgaactgtcaggcaaagtatgggccatagtttaaaatcgtggccaatactttgctcgacggttcaaaaatgttagaaatagtgcattattttttttaaaaaaaaattctcagcacttttaaactgtctcctaatctatacgagtgttaaaaactgtcgcctatagtatagtattggcattggttttcaacactcagataatttttttagcgacaggcccccaaaaaaagtgttttttggactgtcgcgaattctaccttttgtagtagtataaggtgcctccactaggtttggttttggattaattaattaattaattaatttaaaagataaatatttacataaatttgaattttaaaaagtaattgagatattctctcatgtggttgagagatgtagaatagaatttggttatattatttattaaaatatttaaatatgatttaataaaaatatttgaatttaaataatttactaaataaaaaggtttatttaatataccgtataaaccaaatcaaattaaatcattttttgtttgtttttcaaaggttgtaatattagaaatacccaattaatatccatttcatcatcattgtttatttattgcttttaaataaattttcatttatagttgattaataacatgctcgtgattatgcatttaaaaataacaacagtggatggcttatttgacagttttcttactatggtatatgcttctaataatcgtattgtgaggagactcctttggaagagtttatgtgaagttgctactgtggaaaatttgttcctcatgggaaactccaatgacatgctaactaaggaggaaaggatagggcacaaggtaaaattttaccctgactttgattttttaaattgttttaattgttgccaattggaagatgtaaaagcgagtgaaaatttcttcatttggacaaataagcaacaaggggaggatataatattttcaaacattgataggataatggccaaccaatcctagacaacaaatttgaattcgccgaagcaatttttctcaatagagggttgtttgatcactcacctggaattctaaccctttatcctggtttagtgtgtggaaagaagcctttcaaatactttagaatgtggaaatcacatcctaagtatgaaagtggcttaagaaagatatggtcacagagaatagtaggatcttataagttccatgttatctccaagctaaaacaattcaagatcagacataaggagataactaaagaagggttttctaacctccagccaacagtaagcaggattaagcttgaacttgatgatttgtagagtagtgtccagcagcagccatttgatgccaactttcacaaataggagtaggaaacaagaggacttctgatcagaatatagagagattatatttccttttgcaacagaaagctaaagcaacatggttgcaagatggagattgcaatactgcattttttcatgccagtatcaaaaataggctgagatagaatcgaattctctctgttgaacaacaagatgggagtaggcgttgggttttgtgccctaaataaaacccatttcaatataatctgatttactaattaataaaatataagaaatcgcttttatgttgcatggttcacatgatttatttcaaaattat

SEQ ID NO: 117763 - DNA, 3074 bp, Cannabis sativa
aaaaaatataatataataattatattttagttaagattaaggttgtctcaactttaagtaatttgatttgaatcaatactataaaactcttacaaatggcctatatatacatagttctcttcctcttgtttctcttcattgattttttcaaacaaaaaacaaaagaatctctctgtgtttttcaaatatatatataagaacacattgatttgatttcttcataatcatcattttgtttctattattagtgttgttaaatatttgagatgcaaatgcttaagttctggattgatcttggcttgtttgattactttctttcattaaaagcttcaaaatttatcaaaagaaaagatagtgatgttggagaagcaggtatatatatatatatatatatatatatttatataatgtgaatatgaatctgggtttttcttaaaaagctctgttcttttctgggtttggtttaaatttcattgattttattgtgtgatcttaatgtgtttgacaaaatgtctttgtgaaaaaattagcaggaagagcccttgaagagcttagaagtactctttacaatgatattagaacatcagaaggtgctaaacgccaacaacagagattttgtggacctattgtggcaatgagtttcaatttcatggtggctgttgggatcattttagctaataaaatggtttggttttttaagcttttaaacccctttttgtttcactcttgtattgatcttgattatttggataatttcgggttttgtttcggggaaatttacacaatacacctaaaaacaaatatcttcacatttctaaggatttgtgtttcttcaacattgtaaacaacagtcttttttagaagagttggatttttacattggttctttaagttttaaaacacctttttgtgtcactcttgtatttgatcttgattgtttggataatttgagattgtttcttgttttcaggtaatgggaagagttggattcaattttccaatatttctaactttgattcattacacaacagcatggattttactagcaatattcaaaacattctcacttttacctgtatctcctccttcaaaaacaacaccattttcttctcttttctcattgggtgctgtcatggcttttgcctctggtttagccaatacaagccttcaacataacaggttttgatttttggaatctttctgataaatatacataataataaccctttttttgattttgataatgtttttgttttgatttgatgatatgatatgatatgatatgcagtgttggtttttaccaaatggctaaaattgctgttactccaaccattgttttagctgagtttattctcttcaagaaatctatttcttatcaaaaggtaagtataaagtaattaaggaagaaaaacatatcttcatatgaaatttttttaacagattctttccattaattactctgaaaatagtgagatattactctaatcctatgtttgtaagttggattttgtaggggaagaaaaaaataaagaacttggtatgaaaagttaattcttttatattacacaacttttttctaagttttccttacctatttctttactcgccgaaatccaattttcaaacatagcttaaagaatcgtcattgctgtaaactctcatcaactgtaatacaattattctatttgtcgagtgtgaaaaaacttgacaaaaagatcactttacaacactgtgaatagttcagggaatatttttaacgagctgaaaaattcagggagttgtataggtcataattttaatatccgaaccacttgaaaattcttgtgatgtcttattattacatcatttaatctctcttactttttctttatcattagttaccgaaaatctctatcagagctaaattgaatttgatttgattggttttcaggttgtggctctagtggtggtttcagcaggtgtagcagtggcaacagtaacagatttagaattcaatttatttggtgctattattgctattgcatggataatcccaagtggagtaaacaaaattctttggtctaatctccaacaacaagccaattggactgctttggcgtaagtataaataaatattgttattattatgagctgagattattgttacaattaaacacaaacaaacaaatatttatatatatatttatatgcaggcttatgtggaagacaaccccaataacaatcttcttcttggtaactttgatgccatggttagacccaccaggagtattatcattcaattgggatttcaataacacttgtgcaattatgatctctgctttacttggctttcttcttcaatggtctggtgctttagcacttgggtgagtgaatatgacttttcaacacacttttcttcattcttacttttcaatttcattctcttctttttagactatctccgcctaaccttacaatattttaggtcggccttcagaaattggaggccgtaaaagtgtagtttccaatgtaaaagtgtagttttagaaattttaagataggacggtaaaagaatttcaacaaagtaatgattcacagataaacttaacacatttacgtgataagtaatttcaactaatcatctttatttaagataagttccgcctattaaaactgacttaagcttatgtgtgatttgtgtaacaagtttgcacccgaaaatcatcccaaccctaacatttaacggtttgtgcacaagtttacttacctaacaagtaatttcaaacaatcatctttatttgagttggtctcgcttattactatataagtgtgtgtcaagcttatgtgtgacttatgtatatgtatgcacccgaaaaccatcccaaccctaaaatttaacggttttgatacatgaataggaacaagaacgagaatggtaaattcaaaaaccaacgttacccaatcccgttaccatctctactttgtatctaggtttagatacctaagaaatactcgaaatccgagctagctacactctttttttgggaaacttagagcatgtttggtattgttttctgttttttgttttaaaaaat

SEQ ID NO: 117764 - DNA, 2900 bp, Cannabis sativa
  modified_base (2853)..(2875): a, c, t, g, unknown or other
taatgagctgaatgctccttctttcttgtgtgacattgttcaggctgaggcctgattttaatgaaacttttttattcaaaaaaaataaaaaatgttacctcaatttatataagtttctctatttatttatgtctattcttttacgtgttcatttattataaaatgttgaatttttaaataaaatttgatgtgttttatccattaaacttaattataattaaatgaacattaataatatatataaaaatacaaaattttgtgacgttaagctattctcattataaattaaatttttcagttttgtattgtatccattaaacatataattaaaaggatatttaatattcttacaaaaatagatgtaaacaaaactcaatataatattttatcttctcaaaaaaaaaaatcatatgtaataattttattttaatttattattattatttatggggcgcctctcagatgcctcaatatatgttcgtggtatgttctggttcttaatgttatttacttctatttagcattagtaggtgattttaatatgatatttccttctatttagcattagtaggtgattttaatatatatattttttattacaatattactactattttataaaaggcatttatactttattaactattattattaataataataattttttacattaattgtcaatgtacatatcaattttactcttttttgtgttaaatttaactattttttttacatcattggatatggtgttatagtaagctgtcttgactacttctaatatttatccactatgggtttgtttcgtaacttgtttcaacaatgtaatgagcatcttccctttaattgcaactgaatgactgaaattcttatcaataagcggatggaatggtgagagtgacgcgaggactggggcgagtgagaagagtagcgttccggtattgtatgaaaaagtcaaaggaattcaacaaatatcacgtgagattcttacaggctggagtgggcccattcgacgtggaagacgttgaagtcatccttaacctgactatttaaatataaaaatattcatcttttttttttttggtaatttattcatctatttttataacccttaattcaatcaggttttgctttttgcgaaccaccatttcagccgttgattttcgagtgactcaaaaaaagcctattgctgtacaagcggatttggagtcttacagctgtaagtctaagctatgctaaagttagtcaaaaggcctttgggtccacttgccgttttaaaacgttttctttattatttgtgttcaacagctcggcctttactgtcatgttttaaacgctcctgttatttaagtttaagcactgcatcaaaattaattcaatctcctagaacaataacgatttacacggataattataaaacattactactagattaggcactttaatcatgtttaatagtttcgtaagataaaagatttattaaattaaagtatgaaaatttatactcatcaattacattaaatgattgtcagggtacgtttctactttttaaccttaattatccttagatcaatctcagccgtcagatcaaataactctatcatctgacggctaccgtacatcacggattacaatccgtgaaagtacaataacgggacaaaatcatatccctaattatatatattaacactttcactagtattatattagaaagtttagcattgataatgttcagaaaaaaaaaaaaagaatatataagatttatgacctatttttctcgtaatttgttagttttgagatgaaatttcatgtactttattccgaattctaacatgttattgtatgaataatttatatatacgtttctcttaaaaaaacaaacttctatatttatatacataaattaagaggattacctgaaggtgaccaacattaaggttcgacatctgattcaatccaatattttatttttctaatttgatcaaatccaattagtaattgaatttagaaaattatcatccgatccaatttaattaggcttcaaaattcaatccaatccaattactaattagattggattagtttttttaatttgatatattatacactaaatttttaattttaacttaaacatatgaagaaaaatatgtaaaagctaaatatttacaccaaacatagtcttgatgatgtggacatcaatgtttgacaggttgcaagaaacaaaatatttcggagttgagtagagccaaatcatagcaagtcgacttggaaggggttcctagccctgcacccatattgactttaagaactccggaatgggtgttaagatcttgcaaaactgtttccagttcactatctttaagtatattatgtaccgtgaagtcatgaagcatccaagtctaggccccgagagctgaatacacacgaaacaacacctcaaaaattaactcaggcgcctagggtttcaccctgcacctacgttgacaacctaattagggtttcagttttcaggaccctcttagtgcaaatgggtcaaattttgttgagacatgaactacacataccacgaacctatttgaggcatctgaatcatatttaaagaaccttcattttgagcaactaaagcccaggcacccagtgcccaggttgacaatttgtcaactggggccgcttccaaaagtcagatatgttggttgcccaaccaaagtcccacattggctagaaatgagtaggatctttggtatataaggatggacagtatctcaattggaatgaggccttttgggaaggggcctagaaacaaatccctcacggcttaggctcaaagcagatacagtagaacctctatttaannnnnnnnnnnnnnnnnnnnnnntctaatttgttataaaaaaatcaag

SEQ ID NO: 117765 - DNA, 745 bp, Cannabis sativa
agactacaagtatttgtcaaaatacaataattaaaatctaagccggaaaaaactaatagagtctgtattgataaattaaaagaaaattatagtttactaacacaataatccattgttaaacataattcatttcacaaaaaaatcgctctaataatgtgacaaaaattgatctaaatttatctcatattaaatttacatcacaataaataaagaacatttatatttatttttatatcattttgaatgtttgattattaaatttagttattctattaaattataaaacttaaacattaaattttaaatactacaaattgatacaaatatatcctaaaatcttttgttttaatcaaatatagcacaaatatttttgcattaaaaataatagatttatactatctacaaagttacaaactcaaaactttccttatacccaaaatatcccttatataagataatgcatacaagtttctctattattctttattatattcttctcaaatatatcatcatggttgaccgttgaccgtcaatatagcaactctcacaacttgagcaatacccctactttcctcttatacccatattcctatattttattatgattatttattttattgagaaatataaataattatttattaaatttataaatactaccaaaaaaaaataatttgggatatataagggtgattttacaatacacccccttaaaagagatataccgatacacccttgacttgtt

SEQ ID NO: 117766 - DNA, 2092 bp, Cannabis sativa
tacataattagttatcaataaatgaatatataattatttaacaacatcaaccttagattaattaaagtaattaaatataattaattaccttttctgcatcggcaacgagaagctgattgttgaaatggtcaagaacgattccaagcggccgaccacccgtgttgacccacttctccaccaccaccgactcattcactctcactcggctcacccacccatcctcgcaccccgtgtaaatcacacccgccttccagtcataagccaagtcttccggtgccaaaacatctccctccccgactctctccgacccacccagcgcctgtccgttacgcgccgctgcggttgctgtgggcccaaataactcgtggatgggcagagcagccgcctcgaacgaagactcgactactctgtacagaaccaccgctaaacccaccggaaaaacgatcagaaaaattattacaagacgaggccatccatgactattgtctgccattttcaattccctcaaaaatcaaagtagatatttcatatgtagtacatatatagattagagacgtgtatattatatattatattatattttagtgttattatcactatcataactagtcaatctcgaaaatataatttttgtgtgtaaaaatatatgttagaatatttatttatttatttatttttaattattgtattctttatgattacaaacaaatatcatagatgtaaattttttaaaaaaaaaattaataatttacaatatcgagaataaattaaaaaatttttaacaaaaatattaagaaaaatgtttgtactgtaaattgtttaaaatgttttaaaaatttactaaaataatattataactataatacattataaaaaaaaaattgatttcaatgattttaagagattataataaaaaattgtaatgaaaacagtaagatgaaaacaataaaacaggttttttagcatgatgagttgtgtcattgtgtgtaacgtgtaaagttacaaaattacagtttagttgcattatatggttttatctcagtccaatgacagaagagactattataaagagtagaacatgaaaattggtaaaaggttttaattaatttcatcagaaagaagaaaacccagaaattttcctaaacttctcatatgacacccagaagacaaattgccaaggaccaagcctagcccatgtgggaaagaaacctttccaaagtgctttaagcccttcaattttaacagtcttaaccaaacaatcataagaattcctgtacacaacaaccccctcaatctgattcatcattcttgtcttgactacatcagcaggacaactcaaagcggtggctgaaagacctgacattacagaggctaaagtatgagcataaatgttatcctcacaaatcctgttccggataacaaaatgttttgcactgtcataacaagccaattctcccatgtttaccaagaatgctctttgaacatttggaaagacccctctccaaagtcctccaaatccttctgaatgaacaatcttgtttaaagcatcaaagggtcccgagtacctacgcccaaggccttcactgaccaaacgaccatcggcttgcattctcaccttaacaagatcagcagggcttgctactacctgtactaaaaccaaccacacaaaccaaaccaaatcttatttttcagacactcaaatgatataaataaaagttaaaaaatagagactttatcaacctttgtcaatattaagattcactgaacataatattcttgactgatatgagcattgaaactttttgtatgaattcatatccaaaaacgtttctcaaacacccaactaaatcagatgatcaaccacaataaccaaaccaaaccttatttctcaaacactcaaatcatagaaccaaaattaaaaatagatactttatcaacctttgtcaatattaagattcactgaacataatcttcttgattgataagagcactaaaacttcttgactaacttcatatccaaaaatatttctcaaacatcaaactgaatcaaataattgttagacttttatttgggcttacattaaattttatt

SEQ ID NO: 117767 - DNA, 4370 bp, Cannabis sativa
  modified_base (3384)..(3388): a, c, t, g, unknown or other
aacataaacaaatgaatgaaaaatacttctgttattttattgatattgaataatctggattgcattgaaatatagttttatttagggcataaaacccaacaacttgggggctattttggataaatgtgttgaaatcctaatcacctatgtataggatttttgtcatctcaaggaggcgaccgaaagcatgcccccacctccccaatgaggtgcttatcttggaactgtcgggggctccgtcggccttctacagaaaggacacttcgaagtctaatttgagagacagatgttgatattatctttctctcagaaactaaggtgagcacggactctatgactgctgttttaaatagaataggctttttaaatcattgttgtatacctgctatgggcattgccggaggattttgtattgcttggagaatgggggtgaaactaaatataatggatgtttttgaattgggctttaaagctaatgttattttgactccgggttgttcatcttgggtcttactttgtatttgtggccctccttatggggctctgaaaaaatcttattgggactagctcctcaccaaagttcaggactgctctctaccatgggctgttatgggtgatctaaatattattatggaggcaaacgaaaagataggagggcgtcccttccatcctaatgagggactcattttgaaggaatttttgctcattttgggcggtgtggacctaggttttgttggttccccttgcacttggaaaaatgcgagaaatgctacttaccatattcgtaaacgcctggatagagctattgttgattcttaatggtggatctacttttctaatgctttggtgaaccacttccctatatatggttctgatcatgcaccactttgtcttaatgtgtggtgcaatagagaaaaattttgttatccattccgtttcttggaagtctggactacaagtgctgaatgtggtgatgttattgctctggcttggactaaaaacacatcaggattctgcggcaataaactctgtaaaaagttacagattacgaagcaggacctcaaaatctggaatgtgaacaagtttggcttttgtgataaaagactgaaagaactcaagcacatccttggactgatccaaagtgcccctgtcttgcaaagtaatcttgagaatgaagcagtcattcaattggaaatattggaaatggaggctaagattaaaaggctttggaaacaaaaatcaagagaaaactggagtaagtatggggacggtaacacgaagtttttccatgcttcgacgattgttcgacaaagacataacaaaattagttgcattgaaatatctcctggctcatggttgcattagagagaagatattaggaattattttcaagctaagtttcaagatctgtacaagtcaacaaagccgatgattaatgacgaattagattcacttttgtggataaagttgcacctgaggagaatatctttctgtgtaacatccatgatgatgaggagattcgcgaggttgtgtttaaaatgcaccccttaaaattgcctggccctgatggcttcccagggattttctaccgcaaatattggagtattgttggtaatcaggtctgtcaaacggtgaaggatttttttgcccatggaattatgcccagcgaaatcaactagactttcatttgcctcattcctaaagttgcccatgcaagctctttcgataaattccgtcccataagcctttccaacttttgttacaagagtatttctcgaatccttactgatcgtttgaagagtatcatggataggctagtttctccttatcaatcggctttcatcccgggtagatggattatggaatgctccgtcctcgctcaagaagtgcttcacgcaggcaaaaacaagaaaggcaacgaaggaatcatggcagttaagagtgacatgagcaaggcctacggcagactcgaatgggtcttcttgcacagggtcttgaaagctaacggattctccgacaaagccattactctgcttatgtcgtgtgttacctctgttagttactctattcttctcattggagcgcctcttactccgttcaatcctaatcggggccttagacagggagaccctctgtccccgtttcttttcatcttatgtagtgaagtgttatctaagatggttctaaaagcagagcatgacaatgaactaaaaagcatcaagatttcctatggagctaaaccaatatcacacctattatatgccgatgatgcaattttcttctgccaggcctcaaaatcaaatgcaaagtgtctcgtggacatttttgataagtatgaattgtggtctgggcaaagaatcagcaaagataaaagcgggattgttttctcccccaacacgcaaaacaataagaggtctgatattttgaagttactgagtatgcaaaagctaaacactaaggagaaatacttgggcaaccctttcttctttactggtagaagaaaagatgactttcattttctcaaacagaaggtgcttaatcgtattgagggatggaaagctaagtgcctaccgcaagcctctcggactactctagtatgttctgtccttcaaagcatccctacgtacttcatggccacgactttggtacctgtatctatatgagaagagttggatagattggtggcgaggttctagtgggcgggttcccaggaagataaggctcggtattgtgctctaaaattttggggtgatatctacaaccctaagaactgtggtggcttaggtattaggagatttcatttcatgacatgaacatagtcctcattcctaaactttgctggatggttctccaacagagagataaactatgggtgaaggttttccgtgataaatattgttctagattcgatgcttgcacagtggaaaaaaacgaaaatgattcaaaagtttggaaaggtattcttgaaactagagaagtatttattcaagggggtggttttgtaatcgcggatggtgacattgacatttggacaaaacagtggatcccgtggaagactattcaagagactaaaagtagctttagctacaactgggttcatgctttccataaagtttcaaccttttcatggagggtactcgccaatggaatgttgctctcatccattcttgttttgatcaggatattgcagagtcgatccttagaattaaacctccacatgatggtaaggatacactttttggaaagcctcaaaatcagggttgattttagtcaaaagtgcgtactgtgtttatctacataggaggttccttggttctaaaattgtaatgccctaattcattaggcacgctacccaagatacttacaaaaccctaatcccctaannnnnattactaataaaattagcgcgaaaatttaactttaataacaaatggaatgaaaataaacttttaataatttaaactttacaaactaaaagttacaaaagtcagggtcccaaaaatatttacaaaacattattacaagtccttttctattggccgacctaatcggcaaaacagagtcacaaaatacattgctggtagaccccaacctgctctgtctagtgtgccctgaacatgtacattcgtcgttcagctcccatactcatggctgatcagaaacagctttaccctttcctgcacagtagagcacctgtgagccaagcccagcaagacagtaataagatattgataaacatatttatcacactatataaacagtaatgccattctcatatgcctgtatgacacagacccgcatgttacgctcacatgcctatttatgtccacgtaacgtagacctacatgttgcgctcacatgtctaaatacaacaaggccttagaatggttcatctcagttctagttaccgagtccaacctggttatgccttgaacacgtaaccctaaatctcaatttacacaaatattcaacatggcatagaatttacataacatacatcactagggtaataaccctaggctattaaccgctcatgttagggtgataaccctaatctcggttactaattactcacatatatcgtttccaatataagtgccaccgtgcataaatctacgtgctaactactgtcttacctgatgtcccacaatagcagagattccaaatccgcaggtgctcctgaccaggtgccgataatcctagtcacaatactgggatttacacaaatagggttaacccctgattccacattcataaaagatactcatggcatttaaaatacagataaccacatagagctcggaacgagctttccaacgatacatagaactgttaggctatttttagcctatgttttggatccaatttat

SEQ ID NO: 117768 - DNA, 3670 bp, Cannabis sativa
  modified_base (3637)..(3640): a, c, t, g, unknown or other
attggggtccacaaataattaattcataaattattataaaataacagaaattagtgctaattgccttttctaatccaaatcactaaagcgatcattacaagttttgactttgcataaatagttctggttctctcgataaatttttgatgggttatttatataaatgtggggaaaaaagttagtttgtatatttatgggtatgaaatttaatgcaaaaaatatagttgctgacagagattttcggtaactacttaatctttcttaaatataaattacaaatgtgtttaagaagggtatttttaacgaggtggtggcattaatgatctttaattcacgaataattgatattatatgttgaataaggttacaacaatagtgtctttgattattgtaggggtattttggtaaatttttctctcttaattttctaaaattagatcccttttaaagtgggtttattcccatatttatagcagaagtagatgggcttttggagggatctaggctcgttccctcttccagctttcatgagtacgtacactttccttaacaaggttacacttcctcttcgtgggcttgtcgactaggctcaaaataggtatttggtgagacaagactgtacctgtctgtgacggatgggactgtaaagatgtgtgtcgtcagtcggtgttagagtttatgccataaaaataagtaattaatggataatatattataaaaaaaatttaaaatacaagtacaagataaatgaatatgttaattatagaaatataattaataaatatataaaaatttcatattcatatagagaaggtatgatcttgtaaggaagtataagaaaattaagatcatactatatgaataaaataagtaggtaatgtattaaagtatgaaacctttgaaatagaaataccaagtatggtttactaagcacgatactttagtggcatgtggatagatattaagtaaatataccgtgtataatttgatttgacaggatcgatatgaactaactgttggattttatgccttaaataaaaccacaattcaatgtaatcttatttaagtatcaataaaagatcaactatcattttaattattgtctattgcttggttcacatgtttactttatgattatttatttaatatataaattctgataaatcacgaacatatagttattcacaattatagtgttgtcactacaacaaaaaataattatgattatatgttttaaactatttaagtcccataatttatcagtgcactgaatttacactgatatgataatcaacgatagggtttacttacactttgctaagtaaatttttttttcaaggcattagcaaagtaaataaggatcagatgtataggttttacatcgaactagaccaatattgatactagaaaagatatcataaacttaccgttatattctttctagtacaatgtaacttagttgatcatagatcaactgatctcaatcttgagatgattaagatttaagctgattgtatcattagagttctttgatttgtttgttaccaacttatccgtcggactagctcatacttatatattgggaattcggtagttcaattgagtggaactattaatcataaatatggatatctatagcttctacacttatttagaagtgaaacaataatctcctttgagcttggcttaatgagatcaaatggtgggccatgtttacataaaaacactagcccataaatataatgaaacatcttcatgcaaagggttcgtaattcatttcttacaagttaaggctgaaaatagggttcataaacagtgcaaaaatacttgtgtaatactcgaaggcctttctagccaaataatattgaatcgtggactagagttcattaatactcaaaccacataaaaatccttgtcttaatttatatatcttaatcattttctttagatttattttattttatatcagtttttgaaaaactcggtaaacgattagcactttctctagaaacttatatcgataatgcactagaaagattcttaatggagaattctaaaaaagaacagttatcgtccaaacatagaatttttgtatgaaaagatcaatgtccaaagactttgcaaaagatggaggacatgagaaagtactcttctgcataagtagttggaaacttaatgtatgaaatgttgtgtacaaggcttgacatatgctatgatgtagggattgttagtcgttatgaatcaaatccaggtttggaacactagatagctgtaaagcacattgaagaatgagagatctcatgcttgcgtatttcacaggagagttgaatcctgttggatatactaattctaattttcaatcaaacaaagatagttgaaagtcgacatcaaggatcagtattcactcttgatggtagagctgtagtctagagaagcattaagcaaaccagtattgcagattcaaccatggaagctgaacatagcagcttgtgaaacaactaagaaagcagtttggttgaaaaatttgtacactgatctggaagtaattccagaagtagaaaaaccactagttctctaatatgataatagtggagcggtggccaactccaaggaaccaagaagccacaagagaggcaagtatatcaagaggaagtaccatctactaagagatataatagaaagaggtgatgtgatggtcttgaagattgtgtcagagcataacctgatagatccattcataaagacactactagcaaaatcttttatgatcatgtaatgaatatggcattaagggagatgcccaatttactttgatggaaagtagaaaattgttagtgtttatgccttgaaaagcttgtaaaggcattttgattatagatagtagaaattttttgatgtatacttgaattttaaagttattaatattttatatttcatattcatatataaatatatataaaaaaatccttattcatatatgatgtgtaaattgtacggagaattatgatcacttaaacatgaataaaatagtcaacaacatagtaaagttatagaatttttaattaatgattaataaacatggcaaaaaggtccatttattcggatcgggtcggagttctgatccgacggatcacttctaatctgaaacattcaaatacttattggaacttggatctgattcgacctgccccgcctatttttttctggatctaaatagattcgcccgcctatttttttttggatctgatctgacccgtactgcctattttttcaatatatttaacaataaaaaaagataatttgagatctgagtctctatctcgactcgatctcaaaaacttcctaaagccagagcccgcagcaacccatcccccaaaccaagtctttaatcaataaccaaccgtaaatgtcaattctcttttcctttgataatgttatctttagtgtcacatcaccagatgttattctacttgattattattaatgtttatcattaattgaataagcaaacaaatgtaattaatataaataattaaaacattataaatccttcgaagcatattcttatacatataaatatatatacatattcttatacatgtgcactcttaataggtattacccatgaatgggtaannnnagaaaattttgagtttttatgcttgatttt

SEQ ID NO: 117769 - DNA, 2474 bp, Cannabis sativa
  modified_base (467)..(468): a, c, t, g, unknown or other
cttcatcttaaattataaattacactataaattacactatatatatatatatttatatatatgtttcattttgaaaaacatatatggaaatttatatagtcgataatttttactaaatataggtttcacaataatatttacccttaaatatataaaaattatttgtttaattataatcttcatgcactttaccataagaatcattacattgatcacgcacccaactcaactatcgtgtatattcaaaataaatctgaagatgtttttttcttaaaaaaaattgataataaaaataaaataataaaagattttacgggtaaatattatatattttggaccttgtgttttgcaaaagttatcgattggaccttattttttgttaaatgacaaaatggaccttgtattttctaaaatagtaaaaatatgaccctgagcttaatttttgacaactttttttttaatataannaacttgaagacaattcctaatacaaatagatacaaaatacataaacagttttgtcatagcaattttaatcaaattataattaaattttattttgacaagattttacataatcttcgatcatttatttttctagttatactcaatcaattttaacatcctctcaaaccaaaaaaacttagtatttatatgtacattttaaaaagttgatatcatggaatctcttgagtcatttttatgtgagccaagagtttctacacaagtattttctttaataaagtgattcaagatttctattctttttttttcttctacaacttttatagccatgaaaattactagtctagaactttccaagtggctttattttgaaccaatcaaacattaatttgttcaattcgtggctcacaaacaatcgacctaatttgctttggtttttttcgatcgacttctttagatatttttattattattttatttgcatgggatatatatatatggagtttttacgtattcttttttaaaaagttaggattgggatgaatattatataagtggatgaaaggtccaagaatattttgcttggtttttttagttaattaaatcaatgttattgtcattgtgaaattgagatataatatggttcaatttcattactttattcactttttctgtgtgcttactaataattctaacactaataataataataataataaatattactatacgtacagaatataggattattttgcgtcggtcgtcgtcaataataaataaatattgctacaaaataaattttgcgtcaccttaatgcgttagacaatgttgttgacgtcataagaaaagcaaaaaaaaaaattgatattaatatatatatatatgtcacacataatgcaaatatgtcataatatggtccaatattaaaaaaataaaaaagggagaaggggaatcgaaaccccacgtgatagacgtcgaaaaccaaccactaaccctaattcctcgagcatgctatcaggaccttaaattatccaacaccacatgagatggcgccttataaattaatagcatgcacaatttctcatataacttattaaattaaattaaaataaaaggaatatgatattatatttacaccaataataatactaacactttttttatagtgttttagcaattctctaacccctcaccctcaccctcacctttttctctaacttatatattttacttaatttttgaaatgatctattattcatttaaaagtactataaatgaatgtaaagtgcctgataatttccttttaaatttctaaaaattttgtgtttaataattgaaaaataaattacagaaattaatttatagtggtttcgcttaaatagtcaacctagagattgacaaagagtatatgtggatgaccttattattatgataaaatttattgaatttttttctcaaaattaacacatgttcttaaaaatagttcaatattttaacatttatttacatggcataatattaatcaatatctttcatcaagatggtggttatttttttttttctttgctcacccaatcttgattaccgtatcataagtatagtcatttgctcgcttatattttattcagatttccgaatcgcactatgcatatctcatgcggtgtacttttttttctagctagtcttataaactggataggtatgaatcaaatggatatggctctctgatacaatgttaaagtgagtgtatagtaagatgcataaagttccatttcaaagctaattgacaatgagaaaagtagttatgcagcttatatatggtgtcttgggtaagagaaatgatgtgcgaccaagtttttttataaggaattgaaaatatccattattgataaatcacatatagtttattcactgcaaaaaaaaaaactgttacttttagtgacaattttgtaatcacaacataattttttttgtgactaaatgtgatttttaatcacaacaaaatgtta

SEQ ID NO: 117770 - DNA, 2792 bp, Cannabis sativa
ttaattctcaattaaaaaattgaaaaatgaaaacaattttatataatatatttttttaaaaaatatttttacttttccaattttaacaaataaaaaatgttacaaaatgctacttaaattaatggtattgagatttaacaaaaaataagtaaaataaaaattcagttttatttaatttaatttaataattataatagaatacgaataatttttgcagttgtgctttgtacgacaaaactcatttaaaaatagactacttacaaaaatattaaaatttaggttaatttttataaagtactaccacatgaatttttttttaaaagtattgtgtttttatagaacaacagtgtaacacaaaacatagcaaataaaaacaacagtggaacaactaaaaaataactgtagaacaacagtaaaaacttaacacagaaaaaaatacaatattttttaaaacaattctgtcccacaataaaaaaaaaaaaaattcacgtggtataaataattctttaaaaatcatatatccccaccaagccagtagggaaggccgggacagagctgaagtgactaaagtcacttttttatttattttggaacaatgctaaagtagctttagctaacatatttttatatgaaatatctatattttattaaaaagattaggtcactttatgccttggactgttcttattgaatactggaatctagtactatccatccattattgatattaccaatcgagagaatccaattccattcaatccattgtcatttatatctgttaataattcagtcaacaatgcagttcaatttgctcttgctaatataggttcttaactcttgattaaaaggttaaattattgtctctggattttcctctttttaattaattaatcacctcaagggtgtgttccatcaaggaaaaaaaaagttgtgtgggtgtctatatatcactataaatatggttatgaatttattttgttgtttgtaatatgctgtttattatttagttaagaattatttgaatgacctagcaatgctaagtgttttcattgttctaaaatcactgctggtgagtggtgaatttgatttgggagaactgtcccccattgaggttgccttctctattcttgaatgaatcttctttcttagtgaaaaaaaaaacaaatgattaacatgtatttacagtataacgtttgtaaccggcatggacttgatgaattttttgcgggtaaataatgttttgtagtctgtattttacaaatattattaattggattctctattttgataactaacaataaggattttatattttttaaaatggtaaaaatacgattttgaactcaattttcaaaagtttattttttaatatactaactttaagatcatttttaatacgaacagatacaaaaaatttaaccagttttgccataacatttctaaatcagattattattaagttttattttgaaaaaaaaaatcagttcaggattctatttatacaattttagaaaatatagaatctattttctcatttaacaaaataaaggatctaattaataaattttacaaaatactgagttcaaaatagtatttattcatttttttttgcagcaaaattacttaaataatagtgtaggaataacatgtttttgcgcacaaataataatgtaggaataattgagctaactaaatatttatttaattttatattaatacatctaagttcattaaaaagtaaataaaatatgattaaaaaaagtaacattaaaataaaataaagggataatttgtaaaaatataaaaataataaaaaaaattataaaatacggtctgtacggaaatttttataattttgaccttttttagattttacttatacaaatggtattttaatatatttttatgttgtatttttattattttgttgctattacttttttgttatttgtattgtattttttatgttattttgatgttgttttttgttactaattttttttttattatttttatatatttttataaaatattgtaaaattatataaaaaaaatataatttgtttttttttataaaaattagtatttgatataattattaaaattttatcataacattttttttttaaaaaaataatcttatatcattattgccttagtgcgattcttcattattgcctcagtgcgattcttcattattgcaggtagcttttctttttaataaattattggtgtctttactatattcactttccacgaaaatattgaactttgtcatgaagctaactgtccacatttgctagagtttcttttacaaattgcataagtttaattattgtaaatgattatttaagctagtttaattttttgcgataataatacttaagttatatttttaaaatataagtatttaatgttaaatgtcaagtcattatttatttttttataggtatatttaaattaattttttttaaaaaaatataaatttacataacacttaataatcaaatattacagaaattttaaaattataactgaagtattattactgataaaaattaattaaatatttatttataattaaaaattaaacttatggcaatttttaataatatttgtttggacagattattatttttagagtttctctatgagctttccatatatatatatatatgtatatactagacgagattacgtggcgagccacgtaaatattagttttatataagttctagtgatttttgtttaaaaattcagtaactaagcaacgtcaacaacaatggtagata

SEQ ID NO: 117771 - DNA, 1384 bp, Cannabis sativa
  modified_base (194)..(209): a, c, t, g, unknown or other
  modified_base (1330)..(1333): a, c, t, g, unknown or other
atctagatttatcaccaatcttgattactttcttgctgacgacacaataaacaagaatataaatgtgctacaggtttggatgaatttataaatcaaataaataagtaaatgataacatgaaccaaatgacacacaaataagtgatgaaaatacttcagtttctttattgatatttaaaagataaagattacatnnnnnnnnnnnnnnnntttagggcataaaacccaataaacacatcagagagaatgtctgtatcccactccaaagcttcagtcttcatcaaaaagtatattgttttaccaataagagctggatcagaagatttcatatacaaattctcatcatccaagagccacagattagaaagaatatttacttaagaaccactacctataattcttcttgcaccagcccgaaccacattttgagattcgagaacacttctcaaaatatagcttggattgttacccaacgtagcagttagggaaaaacttgaagtaaaatacctaattttgaaaatttttcccatcaagctatcttcattagtaagaagtcgctagccttgtttagctaataaaactaagttaaagtccttgaaatcacaaaatcccatccctctgttacttttgtgagaggagagtttgtcccaactcatctagtgaataccattgctcttggatgactgccacaagaatttacttatggagcgctcaatatcttaacaaataccaactgtgataagaaaaacattcatagtataggcagggagcgcttggaccaaaaacttaatcaaaacttctttacctactttagatcaaaatttattatcccaactctagatttgttttcgaactttatccttcaaaaagctaaaaaaatcacatttttattccttccaatagtgcttgtaagacccaagaatttacaatgctcatctgcttcatgaatccccattctaatacaaatgttctatctcatctgaactagagtataggagctaaaaaatactgaggacttgttaaaattaactttttggcctgaagcggtagaaaacacatcccagagcttaattatgtttgtaacctcacctttagtggctttaaaatacaaattatcatccgcaaaaagcaagtgagacaccatatgagctccattggccactttgtagccatgaatccatatcttttcctcaaaatgacgaattagagttgagagaccttttgcgcatacgagaaaaagattaggagaaattgggttgccttgccttaactgttggaaatattttaccaagatctagatatactaccatgtatgtttcattaacatcctnnnntgaattctaaaacaataaaataaataaataagagtttaagaaaaccataca

SEQ ID NO: 117772 - DNA, 1395 bp, Cannabis sativa
ctggtaaaatattcccaacattagtgacttagaggaaatttaggtttctaggctagggttaaggcctttatataggaggcttaaattctagaatgcaagtttaaatcttaaatatttacataggttgttatataaatataaaagactaaaatgctcttgaatctagatattatttagccattttgttgggctttgggggcccaattcgcaacccagatttgttgtccacgtgcaaggctgtccagtaaagcctatagtgcactccttggctggccaggcccttgtgatggctagggtgaccgaccagggtgctatcctaaggctggcaagccaggggtggcaggccagctccagagatggagctagtttgttgcttgatacccgtttaagtgtcagggtctttgttaacttatgtgttgacttggtcgtctttttagtgagttgtactactaggtggcactatacctgtccacgtaagcatgtcatgtcttaaggacaaaacttatgataacagagagaaaataactcagagatccaatgtaagagctttagagaggaagaacaatttatgtcttctctcaagtcaatacaaatataagagaagtaggctatattaccactcttaatggaccaaacctctttaaaattcggtgttctttttactttactattttttctttctattatttactttatttattcgctttattttgactcactgtcgttgagtagaagcgaggtcaacaaaaataaagtttgaaaatatttttttaagaataatttaagtttttttaagtaatttaatatttttattagattttttaataatttttattatttttttttagaattaatagaatattataattgttttaaaaaaaatagaattataatttttaaaataaattattttaatagaagggggaaaaatttatattagtcaaagtttagtgggtaaaaatactaatttataacggtaaaaaaacgaaacttaacagaaagggtataattatgtaagtgttatattttagaagaaatttttaaaaattatatattttaaatagtaaaattgctaaaaatttaaaaggtcaaaatgttaattttttttttttagtagaacatgctctaacttgttggaatgtgtcataatggcatcttccatttaaaataaattatagctattatagattaagtgaacttaatgattagaagtctaaagtcccttcgttgactccattttctagttcgccactagtgaaaatcatgttatactctaatgattaatccctcgcaacccaggctctcccacaaagataatgaaatagataatgggcggattgaaaccatgtgagtgagagtgagacgagtgttcgcggtgcgggtggtgcagttttt

SEQ ID NO: 117773 - DNA, 1357 bp, Cannabis sativa
aaaacaagcgcgtaattccgtcccaacacagctagaaatgcacataaattggatccaaaacataggctaaaaatagcctaacattagaattgagtattgggaagttacaagaagtagcttttgacttggtcaaaccatgttgtttgcagagtagtgtgtaatacaagcatatgcatagtaaagaatgtaatacaagcatatgcatagcgaagtgtatactatgagaaaatgtatagcaaaatgtgtattacgagtagatgcatagcggaatgtgtaatacgaccaaatgtataacgaagtgtgtaatacgagcaaatacataacagagtgtactacgagcagatgcatcgatgagtgtatactacgagcagatacatagcataatgtgtactacgagcatatgcataccgaagagtgtaatacgagcagatacaaaaaatttgtatttcgactagttgcaaaatttttatattacgactagctacaaaattcttgtattacgaccgaatacaaaattcttatattacaaccaactacaagttcttgtattatgactaggtacaagatcctgtataattagctagaagatccctgtattatgaacaactataagattcttgtattacgactaggtgcaagatctttgtattatgagtaagtgcaaaatctttgttgcatcttgttgaatgtttgtcgaaataatatcttgacaatactgaaatacctcagttcataaaccttgtgttccttatttagatgatcttgcctcacaggtacttgaagtaaactcgtcaaactctccatcattgttgttactatcatttttgcatagtctacaatgttgaacattttctcaatttcatgcgtattttttagttgtgtatctgttgttgtttttagtatgaattgtttattttcaatcatgcgaacttcgttggtagcagttctttctctttttgcacaaagattatatgtatgtggtgttgttgccgtgttataaattttgtttatgtacagaggatattttctgaagtttggttcttttgattttagctgcaagtaaaattgaagactttcaccgtcagttatttcgagggttgggtatccttctttcacctaatattggatttgcatatctgttgtttcattgttgtgtaattgtagtttctgcaataacatttctaataattctgaatatttgcagcatttgtctcttgatcatccgaacaattgtgtattttttgttgtcatctcaacatttgttgctgtgaatgagaattagtagtacaattacctgcaaatcatcatatttaaaaattagggacttttttatttttatatttcaaaacagtttttt

SEQ ID NO: 117774 - DNA, 1282 bp, Cannabis sativa
agattaaaatattatcattattataatagaatcttaacaactcgcaacactttaaaatttataatttaccaaacactcaggtcagcttttttgcacaattctactacagctgctttttcccacagcacagttatatttgctttttctcacagcacagttacaactgctttttcctacatcacaactataccaaactagcccttagttatttagaagaaataaacaaaattttcttttcatataaataaatttatttatgagaatataatttcaaaataagaaacgatttatatttggtttaaatatttggaaatgtaatcaataatcataaatctaatggtagcgagcaaatataatttttaggataacatttatgtggcttagttccttccaatgaaaagatcttcaaaagttattttggttatgaaaagttagatgacatctagaaaggtgccccagaagtctaacatgtccatcacaaaagatgtctcgtggaatgataggtaccatccggaagggtgttcccggatgtctatcggcagaaggattctcaaggaaagctagtcttcctccaaaaaggagtttcagggtggctagctgctccctcctggtagggagtcctggatagtcgactccagttgtgtttttcctatctgagaagtctctttagcatgggctttggtctttagtcccgaaagcgtatgtctcatccgaaaacacgtttcttgtgctaatgtggatattctatttaaaggagtttgttaagtcataactaacttgacaacttagcacttgcaaccactgaccttaggattcatatcccgcacctataaataccacccacacttactattttttagaggacaaagaaggacaaggagttccgacgagttttgagaggtgatcgcgagagagaaagattgagaggtacagagaaaagtgagagattggatttgagttttgtatgaggaattttctctgtagatgaagaagattattgggtaaaagtgtgagagataaacactttgagaaaatctaacagagaatcggtctcaactgtattgtacattgttcttcctcaatcaataaagaggatttagtggtgttctataactggagtcactactacaaaacaacattatagaggctatttttctgcaagttttatagtaagggaagataaagggtgtataaatactcacctattgaaaattgatatttagaggcagttatttataaaaaaaaaaaaaacgtaggtatagaattggactataccatttag

SEQ ID NO: 117775 - DNA, 939 bp, Cannabis sativa
  modified_base (896)..(913): a, c, t, g, unknown or other
aacacatacaatgtatgtttatgttgtgttggatgattttattaatgcagaactttaaattttacaggacggttcatgtaacggcttgcagcactacgctgccttggggagaaacagtgtatgctttctccatctccaaactttgtttcttctgtactatacatttttttcttcattatattacttcattctggatatagtagaatatgccaattgaaccatttaatgtaaaaacttcaacgataagattctaatctgtaacggtgaaaggttgatagaaaagtagctgcccacgaggatcatatcttttagtcaaattgaagaacgtctgtcatttgcacatatatcttttagattgtattattgatagggatttgctaattgccttgaattgcattcatgttgccctttctcagttggaagcagctgcagtcaacttagttgccggagacaaacctgctgatgtttattcagaaatcgccagaaggtacactacaattgttttagtatataatatcaaagaagttggaccaatttttgttgtgctatctaaaataagcttttcttaactttaggaagcactaatttgaaataccaactgcttagactaagaatatccaaggtagaaatgtctaaactccaacaccaaactgaacaagtttcattatttctgcccattactcaactttctatgctcttttcaagtttattatcaaaacaaaaaggtaagtgaagatagatttggtggtttatgtacagaattaagaactgaagaagcttgtttattttcttgagaaatatgaaaagagaagttaaattccgaaaaagaaaacatccgagaagcgtgttgaaaatatagtttgccacataaataatataggctaattaggattttnnnnnnnnnnnnnnnnnnatgtaccaaatcatgcctcctgaact

SEQ ID NO: 117776 - DNA, 923 bp, Cannabis sativa
aatgtgaatagtcatctaatcaaataatttattcattcatccaaaaaacatacacaattaattcacgagtaatacaaattaaagacactttgagaaatttacataacaaacttgcattaacttctcttaacaacgaaaatcattagaatagtaacttattattctttctccaaaaatttaaatggataaacatgttttaactgtatataaacaaattatacattagtcaaattaaaaataaaaataataaataaatattgtcacaaatttttatcaaaatgccaattgaataattcttcattcatattataaaaattgtgactaatgtcactacaaatttcatcactctatataataagttgttatcagggtcaatttttaattttagtgggtataagaaaaaaaaatatagttttattaaaaggaaaaaatatttttttgggtgagccctataaacagaggcttaacttgtctatgttcaaacttaaatgtgattattaatgttatgattaaaataaaatgatatacttaacataacgattttcttgtgtcttctgtcattaaattggtatctctgcagcttcataaaggttcaacaagaaatatgaaatggaattgataggatttttgttgtttgccgattttattgtttctaattctatgatacattaaaattaaaaggtttgattgatacaaaaggcaaaataaaggactcattttagcaccctttttgtctccaaagagaattatacactaatacacaactctcaaaactagacactgttttttccaattatcataaaataaatatacatataaattatcataaaataaataggaaaattctttatataaaataaataggaaaattctttaatacacacccttcaaagagacatatccgtacttctcctagaaagcaa

SEQ ID NO: 117777 - DNA, 1006 bp, Cannabis sativa
attccgtgaaaccgtatttttgtttttttttttttgttgtttttttgtatttgtgaaattaacccttttaacattgtattttcgggctagaatactcgtgctaacgtaaacgatatgtctttcgaacttattgttacgtatcttgcttagatctatattttttgtgtcatgttgtgacgatttgtagtatatatattgtgtcatatcatgcctgtccctatattttaacaatcaggctcataccgatttcgcggcgtgtatttacaacattaaatttctgttaactacttattagttgttaattagtatatatattactaatttttttcttaattgtatttggatagattttttttggaataattacacaagatactatttttgtaaaaaaaaaaaaatacatttttacgtttaaagaattttttattttacatttttacgtttttttttttataaaaataacatgaaatcaacaagaaaattacataaaagtacatgaaaataacatcaaaataataacaaaaaataacatacatataacaaaaaatcaacaacaaattaataagataacaacataaaaagaccgtattttctgtaaataaaataaaaaaaaccgtaaaaatatttaaaatttcgtaaaatcgtattttgtaatttttttgttgtttttgtgtatttgtgaaattatcccttttttttctaagttgatccgttttgttattcgtgattccatgacacgtggaccttcacagatgcccattacggaaaccaaacccctttactggccatatgaaaataagttatactcagcccatctatggaggacagaatatattcgaacagacaattcagttcccgtatcagtgatgattctagacaatgggtcacgaatacggattctacatttaggtggcgtttggttggaggtaatggaatggaaaggaaacaattttcattccattcctttgtttggttgtattttaaagtattggaatgacattctaat

SEQ ID NO: 117778 - DNA, 1538 bp, Cannabis sativa
  modified_base (1507)..(1510): a, c, t, g, unknown or other
gttagttaagttagttggtttaaatgagttggataataagttggtttagaggatcaatttccacaatatatatgaaaattaacattaaatttttactcttattttctttgatttgatggatccaatcaaatacaatacatattggacctaaaaaattggatggaggatctaatccaattcaaaaaaaactactaagtctaaaatattgaataaacttaaattaaatcaataaatatatatgaaatacatgtcacagatagaactgatccaatctaacatctaatggatgttagatcgattagatgattgaaattaattaaatcagatcagatggtaaaatctaacatccaatacataattagatccaatctgaatatacctaaaaatattaaatgtggtccaataaacacccccatacacaactaaagcattacacataaatttaagttcaattaggagtgatcacatgcatttatttacgtcatgtaaaaatgtccatacaaacttagaaaagcaaatcggttgctttccgtaaaccgctcaacaattttgtttagtatgacacaacatacatacaattagcaaaaccatatgttatgtttctttcctattgaaaacacaacaaattaggccattgttaaataaggtatccctaacgctaaatacatccaaataatcccacatgacagtaccgtgctcctattgttaaccaaactccaccatatcatataatctcttataaagctagtccaattagtttactatactacacactgaaataaaaaataattttttcataatcaaagagattcaaaatatggcagcagcagcagcagctttggtaccactgaaccaacaagggttgtcggtggggcggccggttcagcgtgcactagccaatgcagccaacttggctaaccttctcccaaccggaacagtcctagcctttcaaatcttctcaccatgtttctccaacaatggtctctgtaatctctccaataggtacctcacagcgtgtttagttgtcgtttgtgccttcttttgctttctttcgtcgtttacggatagcttcgtggacgagggtgggaaactacgttatgggatggccacattcaaaggattctacgtcttcaactgtgatgatgatgatgaagaacataatagtaattacgagataatcaatagtaataataataataataatgatcaattggaaaaatataagctacatttgattgattttgttcatggttttgtgtccctaattttgttcttggtgtttgcggttagtgattcgaatgtgaaaaattgttacttttctgaagctgggagtgattggaatgttttaataatgaatttgccgattggagctggggctttggcaagcttcttgttcactatttttcccaccacccgtagagggattggctatgcagatctctctcataatcatcgtccttaattcacttttcattctatgtgtgtaatattattgtttttttttttnnnnttttttttttttattttccctttttttt

SEQ ID NO: 117779 - DNA, 2280 bp, Cannabis sativa
ataaattggtcaaacttaaatgtgacatatttatcataagaacttttaaaatcccatagtaagtgtaatttcctcttttaaataaggtttgctttgagttgaaatggatcataggcaaaaaaaaattttgagcccttactataaagataaatgatatttttaaaaattattgaaaaaaatatgtatattttttaaaagatatttttttatttgggtccctaaaataagtgagccctagacgcggtcctaacccgcctatgcctagggccgaccctgattttaaagttgacaatatttctccaatgaccatctcaatcttttagcaattacaaatctctacaataactattaaaataagtaaaaaaatatgcaaaagaattttatagagagcaacctttaaatcactactatcctggagaggccatggagtctattggttgggatttgagtgtgaggagattttaagggttcaagttgaggatgaagaagaagaggtggtgttagggggaggggcggaggaagaaggaatcgatgcacgttggtgtttagggggggcaatttttatcaaacagagatgtggattttaagattatgcaaaatattttagcctctttatggagaccagggatgggcatgtttgttaaggaattaccaccatataggtattcattccaattctaccattaggtcgacatacagagggttatcaagggaagcccatggacgttcgatcaaatgcaatattggaacgtttaaaggaaggggaggaaccaaaggccttggttttgaacaaacttaatatttgggttcaggttttcaacctccaacccagtagcatgtctgctagtgtgttgaaggatattgtcaatgttatgggggagtatgtggaatatgatcctaagaacttcatcagagtgtatcaggattatctttgagtattggtgaccctagatattaataagttgttacgacgatagatgaagctaacgaaaataggtgggtcttctttccgggccaagagcacccactttctactttatatgtggaattataggccatttagagaagttatgtgctaaactctttgaaaagccattggaggaaatcgttaaatcgcatggttctttatgagggcttagtttcagaagagaaaatagaatattggtgcccgatggttgcgtagaaaagggtgggttcctggaatggtggccggcgacaatagcatggcagagcagatagagaagatggttggaccaatatggtaagtgataatgatgaagagttgatggggggatgtgatggcatgattggtggggatagggagatcggtacgagtgacggtgagaaagtcaaagatttcccaaccattaatcactctaaatttggaaagtttgcgtttaatgggaataaagagggtagagaggcaggtcaaaacaaaaatattcaaaaaaggggtgtgattattatggataataaaagaaaaaggtctattgatgtattggaaaaggaagcttttgaggtagggttggatggagttgggctctcaaaatactcagacatggcgacccttgtgaatggggtcgcccaacattatgagtatattgggttagaactgttgtgggcttgggaacccacatatcaatcagttcatttatgaacttgtagttcaaaagaggcccaatgttatttttttgtgagactttatgtgttgaagacaaggttatgagtgtgtgtaggtccattcgctttgagggattctttatggtggagacccagggaagaagggaaagccttgcattgatgtggaaaaatgaagatgatatttgttttaatagtttttccaaaaatcacattgactgtgagatttcgtgggaaggtagtagtaagtttagactaactggcctctatggtgagcctaactgaagcttaaggaagaatacttggtacctcattcacaccttgaaggaggaatctcagctaccttggtgcctaattagaaattaaaacaatattttggtgcaaagtgagaaaagaaggggtaatagatatccagagtggcttattactagcttccaagaggttatttctgagtgtggtttacaagacttaaagcttcttggacacccttttacttgggaaaaaggaagagactcgccccattggattgaatctgaaagtacaacttgttaattttaatgatccaaattaccaagttgattatctttagattgattgatttcaagatatgaattatagacaagaatcaataatcaagcagta

SEQ ID NO: 117780 - DNA, 634 bp, Cannabis sativa
ttctcttataaaaaacaaattgctgtaaattggtagaataatataacaatttaattagaatgacacaaatgtaatttagttataatattaagatatgtaagcattacttaaaaatgatacgtacttgtcattagaatataaaaagagtacaaaaaaaattgtaaaataaggtgtgattagcactcatcttttctgttcttattttcacatgtttaaagtatttttaaaagtaacaaatttaatttagtacattgagttacatgataattaaagttgtacctccaaaagtcattactatcaatggtgagaaaaatattcctatagttgaataaaacaagagtacttatactagaaattttctatatatataatataaaaatgatatctagtttttttttcttgactaaatgatagctagttttattgtggagaaatggtacatgcagcctattttttttctcaaataattaatcttattttttataaatatgtttaacacatcaatattcattattcgttgcttagaaaaaaaattgttccaccttttcaaaaagaagagattaattattttacttccagggagattccaacttaagaccacattataatatattaattattaattaataataat

SEQ ID NO: 117781 - DNA, 2614 bp, Cannabis sativa
  modified_base (454)..(471): a, c, t, g, unknown or other
  modified_base (2447)..(2470): a, c, t, g, unknown or other
ggtcccataaacttaaacacaacctcctttgatctccgaaacaacttaaacgcgttcaaattcgggtctgtttcaagaacggtattttcgaacgtaagcaatgatgtctgtcgaaaggtgcgattacagaccttctaatcacatctaaaactacttttggatgaaataaaactcaaagaaataatctagagcagcccagaaactctcaaactcaacaaacccgaaatctcactttctcaccactcagttctgttcgacccacagcctctctcttagtatctcaccactgtttctaaaccctaaacgatcatataaacatcttatatatagttctaaccctaatataaccctagagcaccaactttaaattttaaaaatataatgtatatatatacatatcgtatatactaactgataatactactactactactactactactactaataatannnnnnnnnnnnnnnnnnataataataataataattttaataataataataaaataaataatatgctataatatatttactcatattattattattattaatatacctataataatattcacaaataattaaatattaaattatctccaataatttaattatttattgagcattgcacataccctcaaaataaaaataaaaagaaaataaaaaaataaaaaagtgaaacaaattttattgtcactaaaaaaagaaaaaagaaatctcatacttcactaagctaataaatattcgaaatgataaattatccccattgacaaacaaaataaactaaagaaaaataattacacttcaaagaaaacggatattacacaaataacctaatcaaggccaaattgagacctttagaaaaaacgattcttcttaacctcagtagttccatgtctaaccttgagatgcttggtcgggtccttgtcaaaacccactaatcaactccctcgttcgtgtgaagctcaaactcgcatggtagtatcgggggtggaaaagacttatggcataatgataatgtttgagattgttgtcttatgggattgagtcgcgaatggtgcatgaccatagatcatttcgtagatgaagacactatacgcccactagtccccaacattgttttgggacttatccttacaatttatttactaactgttgattgagatttttagcaactgttaattaagtatcagtaagaataatttagaaatcgatgagaattttttacgtgattgagacgttaatgagccttattccaccagtcacttttatcgagggttggaatgttccctagtttcaaagaacattcaatttacaacacacgaagttcaatgtgttcgtaaatcctccaaaagtcccctttacatttactgtcttcaaatatttataggggagaatgagtttaaaggagaaaatggtacatatctgttttacctctagacactatctagtctttgtagtaggagtttagtgagacaaaatttgtcttatatgtggctaatgtgaaagtgcagaatataactgtcactttatttacttaggaaaatgggttgtaagaatagcatggtcttttaatgatgttaatcttgcagtgaattatagtctcgtctatgatgatatactttggaatttgtgttatgcgaataattagatcccggatagcctatgatttcggagctcgtgacttcccgaacggcaaaagtcatcattctcttaaccaccctcctaaaaggtgcgagactcctcctagatgtgtcttcacacttcatgattttaattagaggatttatacgacagtgaatattagtctcatagcaggtgggctcctttgccatgtggtgactcgtgtgctcgccacgttttttggtaaaaagtatgctcaaaatttacccccaagttccagcacatatattttgaggtgggacatgcttttaatcttcaattcttcaattcactcttggaggactctcaaggcgtgacgtcgggggtaagcgaatagtgtccactcgtacgaatgagcaacatgttatataggggctggcccgtctgttaatgtgtcttttcaccttggttttgatgatgccaatttttttccctaacattaatctctgagaaggtcataaatgcaaggtgttaggtggatacttgagtacccaaacgtctactcataaatgtgcttgttatgagttatctctggccgtcagatttaaagtgtgtttctttggaatcaaagagcattgtcagatcattaaatgccccggattgtggccttcggactataaataaacattccttctttaataattatggtttatatttatattatgatttaattaagtaataagtgagattatgatcctactaatttatttcagcataaaattgaaattttgctataagtgagtaaataatcgtaatttgctaattacggagatttatatagcatnnnnnnnnnnnnnnnnnnnnnnnngtggaataaaaatattttcagattcggcgaccctagagactcaacaagtggatatataagcgtaatttattaattacggagatttatttgaaatacatggatataatatgagttatttgtgaaataaaaatatttttaggtttg

SEQ ID NO: 117782 - DNA, 2036 bp, Cannabis sativa
aactgagaattaattttaaatatttatgctacgaattattaagtatttatgctgtaaataattacacattatatatttgtacattgttatagtgacaaactaaggtgtgatgtggggtattgtgttggtagtgtctagagtctagacacacatgcatgaattggtgttaaatattggactttttattaatatatatattctttgagaccccactaattaaaacttattaaactcaatctttcaactttatttaatcattattctagaaatatctattattataaaaatcgtagttaggaattaagctcaccttcatataaaattaaccttgattactaaaatgcatttaatataaacacatttttaacactattgtacctatgatgatcactttgaattaattataataatttcattaattaattagtgcgatttaattaatggaatttgacagaacaagattttcttctaattcttttaatatatatgtaccattcaagatggtagctattacttggttcactaaatttaaattgaagatctttttatacttgatagttaattattaaatgtatatgctatagataatatcaagatttatgatattaattctatttgtataaaaatatatttttcatgaatatattacaaaatcagtagtattataatgaaaaagaaaatcatttcatttcatatattacaaaaatcaaattctttttgagagaaaattaaaatttttataattaattagtaaatcaggcaaagttcattagattaggatatatcttatagagtataattaacaatattaggctcaccaagccgtttacaataaaaatgaaagaaaccctaatagcaatctcgactaaagatcaataaacctccaacgatcaagcataaaaaaagtgtgaattagaaaactaaatttccaaaccaaataaacatgtgtatgagtgtcgttcatgctatatatcttgattttaatatagaaatatttactaattgaccaaaatttatgaaaaaattacaaaaatatacttttacacagatattttttttttttaatttttacgttttgaattttttaatttataaaaatacctcttaagtaaaaagaataaactatttttgttgttgttttatagtttgtttatagttgtattatagttatcatgatgtagttttatagtttatttatagttgtcgtgagtttaatttttcgtttttttttttttattttttgttgagcaaagtatattttgtaatctttaaactttataagtgtactttgataaataaaaattttaaattgtaaaattataaataaacataaaaaacaaaaaaaaaattatgaaaattctcgaaaaatatatatacaaagtttaatgtatttacactagaactttagaaaataaatacaaataataaatatattacacaatataagtaaattatatttcattatatccatatatatttaaatcatgttgcctagttatgggcaccgacattgaatgagtgtctgaaaatagtaaccaaagttcatgctatttatcttgactttaatatatatacaaagtttaatgtatttacacttgaactttagaaaataaatacaaataataaatatatatgtaaattattcaaatatgccaattattgtgaaactaagaaaataaaataaataagcatgtgatttttgcagtagccaatcaattttgtaaaagctacaattttgcatacaacttgatgccactaactaagtactattttgtcctacctcttaatttatttaattatttattatataataataataataaaaaatatttgctacatttcaaaaaatatatatataattgctagatattggtgatggtaattttatggcacataatgtggctaactgggctttttctaatctgagatttggctctgtgccgatctcctctttgcctgaaactatatgttgtaatgaccgggaggtctaacaatttctaatctaatataagtacgcttttcataaaaaaaaaaaa

SEQ ID NO: 117783 - DNA, 1500 bp, Cannabis sativa
tgggctactagtgaggcctagttacggtattgtttggtagaggccagcgactttgagcgaagttcgctcaatgtcgttcttgtcgccttgtgtagctacaaccctagagttacatcagaaggaagcaaccagagccattaaaaactagttggggagtccttgggacatgtcacatgtgtatcctgctgggaatctgggccttgccagcaggatgatgatgatgataatgagtatattacagcagagagaaaggaaaataatgggaatgaatgagagagtgatacagagagtgagctagagagtgtaaaattgggagggaaatgtatatcgtgtatagtgattgattgatgacatgagagagaaatgtgtaattattttccttaatgacatcacataaactgtacaaagtgtaattaggttaaacaataaccgtattttagtttaagaaattggtaaaaatgaaaattgaaacatgaaaccatataaatgtttaagttatagaaaaagtggtaatttgtgtaaaaatccctttattatataataggtaagttatataaatatatattaattgacctttctaaatttagagttaatattatttttaaatgatcaattggacactaattttcaaaaagtactaaatactaccttgaaataattttttgtcaaaataaaacttaaaataattcgaatagatgtgttattacaaaaatagttacattttctacatttgttcttgctacaaactatctttaagttagttatattaaaaaaaaaaaaaaatagtgaaaaattgaacttaaagtcctatttgtattattttagaaaatacaatattatttcatgttatttaagagaataaaggatacaatcaataactttcaaaaaaaaaaaactatatttatttcaaaacaatattaaattgtggtgctttagaattgggcagtacacaatcaaatctgaatgctaaaagggaaaagatagtacactggtcctgaactgatgtatgaatggggtaaaagtgatgagcctaaaggcagataaaagagagtcatattggtaggggtcatccattataaaaaaaaaaggaaatacattgtgggaagctccttgatgaaagttatacatatatgtagataataagatctgacattatagggtaggatttcaactctaaaatcagatagccatttatgcttgtgcagtgcaaagcaatagattgattcatagtcatataaatttcaactctaaaatcataaaagttcatagtcatataaagtaaagtcataaatttcaaaataaataggatttttctccctaaattatgatatttgtaaagttttgctctttaaattttattctgttgcaaaaattcttttggaattgcgtaaatagttacaaatattcttttcagttacattctactcatttttttaaatagtttcctatttaattgcactggaaacacttatttaataactttaagctatttaaaattca

SEQ ID NO: 117784 - DNA, 854 bp, Cannabis sativa
actatatagatccacatatataccatatatatccagaaaggtaaataaatcaactaattaaaaataattgaaggtatatatatagatagatagatatatagtaccaagaagaagccccattcctggcaagctttttggaggtcatgaagaatcttggaacgttgttgaggtgagtcagaggtgaggagtgagaaatcaatgatgggaattgaatggtcaggatcattcaagtcagcttcatcatcattatttgggttcctaataaatgtgtattctgaaggaactgatctaacatctcttgattctaccaatgctttgataccgttggtaattgatccaatattatcatcatcacatctctgctttaatgaagccattgaaaaaactatacaaaatatattaaagagacagagagagagaaagagagagagacaaaattatggttatggttgagagagtagaaagctataggtttctatatttaaagagatgtacgtacatgaatcatgattgatgatgaatataattaatgtgtataattagtagaatgctaagtctccaaaacagactataggtggagttttttttactaaaagtaaaataaggtaatttcttctctgtagtgtaaaccactaaaccagtcggacccacgtcaccggccaacacagaaatgctttaaaacttgagaatagtctttctttttgactacaaaaaagctaaaaattactttttaaaaaatttaaaaagttgtcacaaaaaaaaaaaagtttggtaagcatttaaaaaacaatttattgaataatttatgaaaaaagatacaattaaaagttaaattgttttgattaaaagactct

SEQ ID NO: 117785 - DNA, 1307 bp, Cannabis sativa
caaggaatatctgtatattaacttattagaaggagaactgatgatttacaatatggtaatatatatagtaagtattgactaaaaagttatataggagtacttcttcaaattatatataatatccttatataacgtggacggtggatcggtgattatgttctttaatttatttatttaacgtgataaatgagaaatcagtgaaatgttattattaacacattaaaaatagctgtacatgaacaatattgaacagcaatatattatttcttttatttcctcttaatatagccagatagatcacattatattaatatacactaattcattagttatttttaattaatttattatttttcaaaatggaaagactattatataaattatattataatataaaaaaagttcaagtcatgcatatataataacagtggcgtgtaaaggccatatatatattttttgaaaaatgtaaagggttgttgtctctccaaagtcttgtaaagtcagtacttgttgcctgtacacggtttttcgagtacaatatattcttgatatatatacgtgacaaagatagagaaccttacaggaatgtatattaatttggaattagttgtacttgtcacgctgcatgccgtacaagttaattgatgagtttgtgtatatatgtaaatgcttattattctttctccatttaatgcacacttatcaccataatttattttagttttttggaacgttgagatttcaaaaggggtacttggaatttctaatggggtggtgggttaatcgtagtcccacaggtcacccattgaagctgacatttcattgatttatataatttaattattctgaagtttttgttggtacaaaaagtcgtacgtaatgagagtcagcaaaacgtacatgaattggtagaaattattatgcctagctaatattacatgccaatttcttagtaatgagtccggaagttaattttattaataatgtatatatctcacacactactataataatatataataattaattgtaattaatataattgtcgactaatatcattgcaaaaataatgatgatcaatccacggtgaggatctattaatggggtgtggttttcccatataataacttgtagtaactacttgcgcaataataaaacgataaaacataaaatcgatagagaaacaaattgtgtatatattataacttgttataaatattaataattatgtggatgtctaaatcttttatttattaccataattgtaatcaacattcctcttttccttagtttccctttttcttagt

SEQ ID NO: 117786 - DNA, 1090 bp, Cannabis sativa
atatttcaattctttccaactaaacactaccttaatttatttctaaggctaagaaattggattatagtaagacaatcagctagttgacttctagcaagtacatgtggcatttgtatctgtttgtgaagtatcttatcccaaagaaagtatagatatttcaataagctttgtactagcatgtagaacaatgaattcaagttgtcacaacatatggaaggaaacacaatggattgaaaacatagttcttgtagtagagattgaatccatactatgtcaaaaaccacatctacaagacttctaaattctacctctcagttgaacgggaggatggttctttggttcttggatttttaggctatgacattacaccaagaaagatatagaagctagtagttacctcttattatttggatttggtacacaggttgcatcatagtaggctttaattttgaaattatatactctcttaatcaagtgcaaattgtagtctagagttccaggtaggtacttgaatattctcttgaatgttacccagtgagattgtaaggggttgtgtatgaattgacacactttattaacactaaatgtgatgtcaagtcgagtgattgttgcatattgcagtgcacctacaacgccgaccttgagatttggtgagccttaagaaataagaaattattataaaagaaagtttggtatatgaaaacaactagaaaatgtgtacttttcaaagaaaattaattattttaaagcctttaggtttggtgggccctaggcacaagcttagcccaccttagcccaaggtgacctatcacctacaatggaccagtataggaatacatcctctattggattaatttcatagttggaaagtcttagacaattattcattagactactttgagttgtagcgccttagatttgatcttacatagatatttttattgggacaataaaatgagatacgggatgttaaacacttgtataaataattcaatatactacaaaaaaaaatatatcttttagctataatatttttgtgatgaccgcatgcagggccggccttgaaatgtagtgggctatagggtaaaaa

SEQ ID NO: 117787 - DNA, 858 bp, Cannabis sativa
aattaaaattgatattgtgtcaaattttaattaaaatttattttaaatttttatataaaaaaggcctcatttcaaatttcgccctaggtctttcatcaccttaagacgggtctgcagtaaattatatatatgaaaaacataaatttcatgtttacaataccaattacaagagtagtcatattcgttttgttgtggaagcaaagagtaagtagtactactaattaattttgacattttatacaaacaaattaatagtagtactacttactctttacataaatatttgatgaaaaggagattacattaatagtggcagcattagcttaaaaagtcacaacacaacatcgaaaaccaaaaagaagccaaataaaagacacaccaacaaatgtatatttattagggagaaaaagacatattaatgagagagaatattttttttttcttaaaagaaaaagataaatatgtatttgagtgcctctttttttttttttttccttcggctaaggtttggatccttatgattacacacaatgtgctgaaaatacaaaacttcaattagaaaaatgtgtatatgggtcccatatatattaagaaaaaattgataatagactaataaagggtaaaaattattaaaagctgttaaaagagtgaatgagggtattaatgttaaatgatttggcttgtgatcagggccgggccctgggcgggctaggcctgtgcctagggcccacctagtacaggggtcctaaaaaaaaattacccttttaaaattatacaattttttggctgattttggaaaatactatttttttttctaaataagagtccaaaaaataattggggtaagttgaaaaatac

SEQ ID NO: 117788 - DNA, 2458 bp, Cannabis sativa
  modified_base (30)..(33): a, c, t, g, unknown or other
tactccactcattgccaattggttttgagnnnnaaccccatgattctcaacaatatagtactacaagagctcataataattgagcacaagacgcgacgaaaaaaatatgaacttagacctagccataaatcttaatggctaacaatatgtgaataacgtggccataaaaagcacaataaataaagagataagttaaatactttttttttttttttgtattcatcaatcaaaaatatcctcaaattatatttcattaaaatatatacacttttatgagtatgttgctcaatacactctcaccttctacttaagtctaacacataatttgcattaatctaagagtataatacatcatttattaaagtgggtacattttaaaaaaatatagaaatataggtaaaaattaaaacatataaagtaaagtggatataaatgtaatttcctcgtaaaattataaaaagaagaggggctaataggtaggtagactttaaaagtgcaaacaataaaatataataaaataaacaaccaaggcagaactgctcaatactatcattctcatttatatttaggattttcctttctacatgtctatggataaattctgtaaaatgatcaattgtataagaaattaactagatgtgaaattattattattattatagatcatgtcatcatttctatcaatctatgctattattttcagtatctatgttgttcagttcgctgtaattagtgccactacagctccctcagaaggtcttcttctctcttcatttattgctatatattgtttttacttcacttaaaaaaagttgtttttttcccattaatgctttctattgtatgattacaacattcttttgtgaaataatgattttggtaattaatttggttgagatgcatgcatgcagtgagagcattgaattctatgtttgagcaatggaagataaaggctgacactcaaaagtggaacataagtggagaaccatgcagtggtgccgccatagacgactccaacatcgatgacttggatgatccctccataaaatgcgactgcactttcaataatggctctctctgccacattactaaactgtatgtacaattatatatatctttttatttatttgattaatcttgatgatattttgtgtttttctattttttttttaataatttacttcgtcattaagtttacttttcttcaattacatattctttaagtgtcatttgcttttattctctatttaattattttactattattatatatttttttttgaaaaatttacataatacatcaaaattttgaaaaaattataaaaatatgtcaatagagaaatttttttatttttacgctgtaaacttttttatttataaaaatatctttccagtaaaaatgataaattattttttagttgtttgatagtttacttatagttgtattatagtcgtcataaagttagttttctgattattttttgttattttatagttgatttattataaggttaatttttagttgttttcttattttttattgagaaaatttttgttattttatagttgatttaaagttgtcgtaaggttaataatattttgttattttatagttgattaaagtgtagttttgtaatttaaaaccttacaagtgtatttttataattaaaaattttaagtcataaaattataaataaaaacccgttttttttttttttttataattatcgatgacagaacaactctataaattttttataactcctattaacagcaggtccaaggagattgcatttatcatatatagcgtgcatgtttggtccaacgaagatgcatttgttgcaacattttgaggttttatctacaatacacttatctacagtacacggcatatatgccatgcactgcagttattgcatatatattttataatttaattaataattatatatatttatattattgtatttataaaattaagaattattttttgagaaattttacaatgcacatttttaaaagtaatgtacgaatctactcctatatgcttcgacacccaacagactttttaagtctatttatatatatatatatatatatatagtagtgtatattatagatatttaagacatcctacaaattttaaaaaatttagaaaaatttaatacgctgaaaacaatgcgcttctttaaaagtggcgcactgatatactcctacctgtttcgacattcgagagatttttttagtcttttttttcatggtcgtgtacataatagttatttaagacatcctgtcaaatttaaaaaaaaaaaaattaaaaattaatacgccgaaaataaaattcaaactttatgtcgtatgactcttttatttagatggatatattgtaaaagcaccttataatatttttttgtgtaaatttaaatgtgaataccataaattatttttatttttaatt

SEQ ID NO: 117789 - DNA, 2019 bp, Cannabis sativa
  modified_base (50)..(54): a, c, t, g, unknown or other
ataaaatgtgatttctgatctttattaattaaatttgattatattgaaannnnntttatttatggcacaaaacccaacaaaatgttcatattataaatggttctgagtctcttgattcccccactccctatgctggaactgaaacactctctgtaggtgatggtaagactttgcgcataattcacataagatccacttccttatcttccaacaattctcacaatttatacttaaaatctttttaaatgtgcctgctatgaaaaaaaaattaataattgtgtctaaagtaacacatgataataatgtgtatcttgaatttcacaagaattgttgttttgtcaaggacaaactcactggagttgttcttctcaaaggaccaattaaggatgacttctatgtgcttggtgattccagtcaaccctcacataccctccaatgtaatctcacaacagtgtctcagtctaccaatgttccaactgttcataattgtcaaaattgttgtaataattccattgttaattcagtgaattcttgtaatatgacaaatattaataaagaaactcattgtggctattcttcacagtgtttaccatcagcttctttaactgtctttaatcaagacattaatatttggcatcaaaaattggggcatctttccttttctactttaagcagaattttaaaaaccataccacattcacaaacaaccttactccttgtccaccacccatgcttcacaatcccttcagttaattcgtactgatttatggggtccatttcatatctcctctaaagaagggtatcaatattacattcacttaatttatagataaccatactaggtacacttggatttaacctttaacacttaaatctcaagcctttgatgtctttctaaagttcaaaagcatggttgaaaataatttaatttacctattaagagtgttcagtctgattggggaggggaatacagaccatttgctagatttttacatgatcaaggaattcattttcagcatccttggcctcatgatcatgaacaaaatggaagagctgaaagaaaacataggcacattactgaaactggtttggttcttcttgctcaatctggtcttactttgtcatattggtggtattcttttcaaagtgttgttttcacaattaatagacttcctacaattgttcttgacttcaaaaatccctatgaatgtttgtttggaagtcaacctgattacaagattctaaaaccttttggttgtgcttgttttccacacttgagaccttacaataatcacaagcttgagtacagatcatatcagtacatattcctgggtttctcatctcatcacaaaggctatttgtgtgagaattcacaaggaagaatctacattgcaaggaatgttgtgttcaatgaaagttgtttttctgctttcacacgtccctgttcctcacaggtacattcttcaccttcaacttcttttccttgtgctacatataattttccctctactgttactccctctaacacattttttggttgtggtactgcttcatcacaacctcccatgcttaatgccactatcaatctgtcatcacaagcacccataactaccctgtccactcaaccaattgtaccaaaaatcaatcaaccaatctgccccccactgagatttcatctatgcccttaccaacctcagaaacagccatacatacatccaataataacactactccagcaaaaattatcccacctgatacacaacatccaatacaacagcccatacaacattcaatatagcagcctataccaatacatgatttacaccctaatacacaacatcctatacagcaacctacactatctggtgcacctgctacaaatcacaatgtattcaactctagagagcagcctattgttgggctttgtgccctaaataaaactttatttcaatgtaatctttatcatttaattatcaataaagagacagaattattttcatcacttatttagtgtgtcat

SEQ ID NO: 117790 - DNA, 1475 bp, Cannabis sativa
  modified_base (42)..(48): a, c, t, g, unknown or other
  modified_base (1425)..(1425): a, c, t, g, unknown or other
aaatattttcacttttccacttttaaaaacagaaaactgatnnnnnnngtgttaccaaacgccaccatagctaaatgcatatggtacacggttttcttcatcaatcagaagtaacatggtctaattactaaaaaaaaccatttttaataacgactttttttgtcataacataaattttttatgagtaaaatatagtatttagatataaattatccttaatttagttctagtcataataagtattatgactaaaaatacatttaatcacaacaaattataatttttataattaatatttctggccgaagacattttagtcacaacataaaaataataatatataattagttacaatttttttacttttaattataatttttatttttattgggactaaaataagacttttatagtgaaaattacactctttaataagaaaaaaaaaataaaagttattaaagaatgtaatatttaagattgaataatgttaccgagaatcgtatgtattgatattgaaaaacaatttaaaaaatgaaaaattaattaatgaaatacaagtctagaaccagtttaaattacgattatgatatttggttatcaaatgagaagagcatcaatgatgcttaacgctagaatgaagagatatactgttagtataatttaatatataagattataaatattaatttaatttaataattattttaaaaaattaattaattactcataaaattaaagccactataatattaataataatttgcatatatacctgtctgggtgatttaaataaagtggatttacgtaattaggattaggatcaggcacataaaattcagcagcagagcgattaggaatgcctatttcccacagtgttggtccatctcttggaggttcatacacaatctcacccatgtcaatatcacaacctgtatcagaattattatttattttaatcttataattaagctctatctaaaacattcatcacagattaaaactaacaagtttaatttgttaaagaaaaagctgccaaccagctttaataacaccctttaatatttatgtggaattctccaatacattttctaaaatccttatactttcttgtagctatatatgtatagagttatttatcattttttaaaactttacaaaaaagtattggtatttaagaaccaaaaacacaaaaaaaaatatactacacaccttttaaggtgtattggaaaaattccatatatatattttacataaattaagtaaaattcttgtgcttatatatatatatatttatatactagatagatggtatgtgacttgcaagtagtaatagttttttttaatatcataattttaaaattaataatattcagtatattagtaataatcaaatttgaaagcatagtgatttaaataaaaacaaanattactattatactttgtaataataattaaaaaaaattattattcgtcct

SEQ ID NO: 117791 - DNA, 1166 bp, Cannabis sativa
aaaaaggtaaaaaataccgcctggcagtatttttgtaaaaaaaagacaaaagttagtataccatgtaaatttccctttgtttttgggtacctttacaaaaagcctcatactaatagagtagtgtccatccttatatacttatgatctcttttaatttctatttttaatcaatgtgggactttacttgcacatgcctaacactatacattctggcgatgatttgcgggtgactatagttgtttgcagtaagttaaaatagaggataataatggttatgagatatttatatagaggatgaaatccaactaattgatagatctgttaattatgtaatttaatagatcttaattaattttttgatctctagaaaaatattctgattgcttgagaaggagctgattttgggactagcatatgagatagaacgatgttacaatataattgagtcaaacaaagaaattgcatacgcaggattattctaacaaaaataagaaagaaaaatggcttaaaaaagattaaaagtgcgaatttatttttaagtaataattttaaaattaaaaaagaaaagtaatatacgttaatagtataacttttaacagctcgcaataatattcctgaattttcctaaccaagtgaggactagagtaaactcctatagtacaaaaattatatatataatatataaatgattgattaattataaccgtactataacaagttggtaattagaatggtccaaagagatagggttcgaaatgcaaatgagcactagtttatcaatccttaatataatttaagtggtgtttgtatagataaataaatttatattatataatgaaactataaaatataataagagagtaagtgatgaatatgaatatggtgagaacaaagacaaagaaagagacaaaataagggagcaaggtgtggtggccggcggtcggaaggtgtggggtggcttattgggtggggcacacactgtctcagctgcattagacacacttgtcagacccatttttttggctgatttataattacgactcattgggtgctcaacccacacaccacaccacaccaccacttccttcatctctctctctctctctcttcgaaccagctaggaaccaagggattacttgctgaatttgtgatttctaccaagattt

SEQ ID NO: 117792 - DNA, 1561 bp, Cannabis sativa
atatatataatttttttaagcatatgtgaactttaagcatgctaaaaaaaaagcaagtctaacatgatttatgtagaattattgtccaattttcgcaaatgaattcaaatgatgattacattaaaatataaacaaaatccaacatgagtaaatgataggtgtaagaaaagaaaatggcttaattcttcctcccaaatgatgattatttatttagttatttattttaaataaaaaagaagacttcattttgctattatactttttcctactttacgttaataacaaataatcataataataataattaaaaaaccaagctaataaaacaataaatgaataaagatgggaacaaaatccagagatgatgattggatagagagagagagagaggaacatgacacatgtcagggaccaatgtgagagtataaggttagagaatatttcagacaaagaaatgaatttgcagctggctgccactcattttctcatatttttatttttatttttaatgattattacattacataaaatgatcatatcacattatccaaaattattatacgaataataaaaaatcacttcattttgggcgtcaatccacaactaacttctccaaaatagtatctgattcctttcctttttgttgtcccatccaaatccaaatcaaataaatctcacccccttactaattaccttaccttattatacccattattactccaaacatgcaagtgtgtatgtactttctaagattcttgtcttttaagtttatatattttgaagaaagaataaaaagaacaatggtctcatattctcaacttttggaaaatgaaatttggagttttaacaaaatgtagcttaattaaatattgagttacacataatttaatttaaaaattattataaaatatcaacaactatttaaaagaggacacttataaataatattcaactggtacctaataattatattctttgccaaataagattatttgttaagggtaattaaggagaaaaagaaaactagcacttcgataatatttcctactattgttgttacaatggtttggatcccttgatgtgtgttgttttggctaaggggaaggttgtgcgggcgatttttaagtagttcttgtttttcaatcctttcattggccaatcaattgcttgtaattgacacttgagactgcagtgtttaggagttattattttttagtaatagaaagcgactcgaaaataattatcaacgctctaaagagaattttttcaggtagtagtattaataattatatttgtcattgtactagattttctaatctgtttttggattgtaatttttctaatatttttaaactttgtaattttttatacataatgtggttaaatgaacttttatcaaacaattaactggtgtaatcaagtttacatctgtaccagcaaatataatttgtaatgatcaagaggtctaattttattttaaccatataaagattagcttttataaattcttttttagcttttaaaattaaaaaaaaacccttctaaaagtgtttaaataaaa

SEQ ID NO: 117793 - DNA, 4240 bp, Cannabis sativa
aggctctcgaattcctggggtgattatcaatacagaataccatttttcttttccttcttctcttctactcttacttttgtgctgctagtttaattaaattgataggaaatcctatcacgtcactagttagtgggaaaggaagatgtgaatgaaaaacgactagggaaggaatgaagaaactaatgaaacatactccccttctaaatactcaccataagcaggagggtttgcaattattgcctgggctttaaatggaacaccagtttccaaatctggttctgtacatgcgggaagaagagattctataattgccttcagttgcttcctttgaatcaatatttctttcggtccagatgggatgagacctttgtttcttgccatatctgaaattcataaaaagtacttgggtcgtaaacttcaaacatcgaagaaataggttggatattcaagaaacatgtcaagcatatacacattattcctctttctcaatataatatgttttcaaaactttaaggttcaatatttgtaattttgtatatgtagaaatataaattaaagatgatgaacttgttaccgttacaacagccattagagagcacaaaacaaatcgaatattaaattctaattaacaaaccatgtatgacactaattcgtacttttttctgagaaaaagagaaatggggacaaaaacgaagaaaaaaaatgaaagaacactccctaatattaataagatacgaatgcattcgtataatagcctcctcaactccacaaataattgacttgtgactgtgtacaacaaggggtcatataaaaaggtcaaacaacaagatcaaagatcaatacataaatttaaattgcatttttcaccaagtaattgaagaagaagaaaaaaatagttccagagcagggactgcttacatcctgccaaaattcgaggatcaccacccaaaggataaaagtctacgcctgccgattttacaaaagttctgaagttagtatgagttgccaacctaacatgatgaccaaactcctgcaattacaagttgaagccgaatcttaatttaaggtgaaacatagaatagctaactagtaatggagtatactgtcctataaacaaggggtagaaacatgagagaaatttatctttctgatttctgtagaatgtagcataggcttactaattactaagaaaagtaccatatgacaatttaataaacatcgatattaattatttgcccattttcacaaatattatatgatatactacacttgacaagaaacagagatctattcgcaagctctacttgtaattgtatcccgttgtcaatggattataaatataagaactaacaacccactccataagattaacagatgctaactgggattttgtatgtttggacgagcccactatcaattgagttagcatataactccgaaatttaagatagaaggcagaggaaaaggtaataacatgtgaaacctaaatcctagaagaaagttacattgtacatattctcccaaaatatcatatagataggatcaatgcaggtttatatttgagaaaaaaaaattaaaaaattataattacacgtacttgaagtctctttgccatagccaagaacggttgtacatctcctcttgttccaaccacaagtatgacaattttcaaccttggaatcgatttacaggacccagaagtcttatcatgaagagtaataggcggttcaatattgtgacgctctaaccactcagaagcaacaggtgtacttttatctaaatcgacttctacagttccatcattctggatcttcactagattcactataagttgttgctgacaagcacaaaatagtactagattaatatataagaaagaagcaaaactcacaatcacatgcatgtgatttgacacaaaccttttccctctcagaaagtctatctagcttttcagtcatggaccgagaaaatgtaatcccataatcatcattcattagacttagacttctatggtgttcaataggagcggtgctggaatgatccaagccttcaagagcagatgattccaatatcagtgaaaagatcacataagtttcccaatacaagcatacatgaaatattaaactaaagtaatttctagcaaattgtagaagcattggcaagatttgagaaaggccaaaggaatttgagttaagttaatttggaaaacaacttcaaacaaatgaattaatatgtagcactgaaagtacaccctgtaagccaatcaaaagaagaaattctcaagggggttgctcattctcctttagtttttcgtactctgtttcaaagttctagtaatttggacataaactaacactttctaacctcaactttcatagtgatattccttgcaaaccacaatgagatcaacaccttagtggcattccccacaaagttcaatgatcaatttttgctatttttggtaatacacttactgctactggtttccattgttcctactttctaaaagtacacacaacactatagttctagatacataagaatcttgtgattgaaaaaatgagacattttgtcaagtctaaatctaagtaagaaacaagactaaaacaaagtaggcatagataatgtcatatagaattcggaaataacttttactcaagcgatctatatcgtaaacttagacagtataaaagataaagtctcaaaattagactacacaaacaagtagtagcaaaccaacaactaaatggttcaaaagttcgataagagccttaaaagttttgtttttcacttacagtcttaaatctttcaaatgccaaatgatagaaaactagcaataaaagaaacacttgaattttcacattaggggccaagttactaacctttcttaggtgaatggctgatatacaactcctttgaccgagaaatctctagtaaaggagacctccggcccgaattcgctctttgattacctgcaatacttgtacccaattgttcatgtccactgttcttatcatctctatttaccaattcaccaacactaccaatcttctcaatatcatcatcacatggctgtttactactaacaccttcttccaaatgtttcactgattgatcaaccccattattccccatttccaccaattgaaactcaaaatcagcacttttactggcctagtaagtaactacccccaaaaaaatcctcaaattcaataaaaaaaacagattaacacaaacatatgatcgaacacaatcaaaacacaaaaccccactactctaaaacccttgaaaaccagttcccacaatccaaaatctcaaaaaacaaatgaaaccaataactcaaaaccctcaaagctcaaaacccagaaaccaaaatcattagaaaacgagtggtgtgaaggcgaaaaaaacaacaaccaaacggtaaaagggtttttaatggtaactgactttttgaccaaacagtgccaccccaccaattagtcaaacgcatagaaagtttggtgtgcacaaagtttaaaaaaacgcttcttttaactctctcgaaaccaaaagcaaggaaagtttgagtctttgacagcaaacaaactaaatacagaaaagggaaatcttcaactaactgaatattctgaaattctttatcgaaactaagaatatccttcaatggaaaactcaatatagaatgacactgtgaaagaagcaaagtacagtcagaagcttcgttctgtctgtgtgtggattgaagaaagaaacaacctagtttaattttcttatgtataattctataatgttttttttttccctttatgtcggttaaaagattataataaatgtatttagagtgatattatttttatacctttaacttatattattttttatgccttatagaaagacaaatgagatattgatagatagatatatagatttataatctttaataataattaatgcctttgataataatttaagacaatatttgatcttgtttaaaaagaaaaaagaaagagatatttgttcaaattttgcattattttcctccttggttttcttttttctttttgtaaaaaattcatcatctttattaattgcaattcaaagtgattacatgattaaaatctagagtaacatcactcctgataacatgatcagcaactaaataggatgctcgagctaagaaatgagccactatttgcagaacgtctaataaaattgacataaacatctcgcaagtcattta

SEQ ID NO: 117794 - DNA, 1877 bp, Cannabis sativa
  modified_base (1295)..(1297): a, c, t, g, unknown or other
gatccgaatgaaatacactgaaaatgtcaccactgaaattgcgcgaaaagtataaaataaaaactaagaatagacagtagggttttcggggtgtggctctagtcttgggtatctatataaaagatggaatcgacgtgattagatcttgaccattgatcttgtccgttttatccgaagctgaggctcggtagcggaaccaactattcgaaatttggttcggataacggcgttaggagttaacggggttcttcttttgtgatgctcttattccacgtggagggcaggcttattgggcggtggagatttgagaaagtaaccgacctgattgaaaagctggggggacaggtggcgtcatctagtgtatggtgggtgggaccagagagatgacgacacagtgtgtttgtttctcgtcgtcgttgggtccactgcttttgtgggctccacgtcaaggttttagaggtccattctcaggcggatacttcctatgttaatttacgatgccgatgttattgttttatctatttttttttttttttaattatttgtggatttttttttgtgaaaattatacaaatcattattttggtaaagatttcaaaattgtatgtttattttttttagtgggcgttacagcctacggagcatttctgcatagcagtaagataaattatttttataattacttagtaattttttataatattattaatgtaaaataaatgaaatttaatattaatattaaatcacactaataattatattatattttataaaagtactaggtagcatggtgtctgatatctcttatagaataatacttatagttatcaaaagacattggtgtctgatttttagtggggttcttaaaaagtaatcaagagttgcatctgaaagcttgggataagttgtgtctctctaaatctcttagaggacttggatttcagaaaacgaaagaaatgaacttggcttttttggccaattggggatggaacatgttgaatgattgtcagtctttgtgctgcagagttttagaatccaaatatcttaaagggaaggactttctcaagtgcaagtataatgactcggactcctgactttggaaaaatattgttaaagtcaattcaatcttacaaaattttgagaaattcggaataatttacaatatagaaaacaatatttaaacagtctattttacacgcgtattaaataaaatagtcacgcatacaacacactatttgaatgcagttttcggcatgttaaactcttctgaattttttaaaattttacagaatgtnnnaaataactataatttacatgatcatgagaaaaaatttgactaaaaaattattttagatattaaaatgaatagaaatgtatgtgtacatcgcttttaagagagtacattataaaattttccaataatatatattaagtttgggaccccattaagtttttgttatttttcaatcataattttgttaaattttattagatctaactaaaataacaggtgtcaattaattagtagtccactttaataataattatttaattataaaaactaactaattaaattaattttgttctttctatccatatttcaaattctattattatttattttaagattatttaatgattttgtaaaaataaaaaatgagttggattttgtatattaatattaatatgtgtcattttacctagctaaattaatacttaacgaaattaatagtaacaaccgcaatatttaatgttcgtttgtaacgttgtattaggtcttaagtcgtattgtattttattatattgaattgtgttttatacatgtaaaactatatgtgatattaatttttataggcacctaaatatataatatttta

SEQ ID NO: 117795 - DNA, 1249 bp, Cannabis sativa
  modified_base (1221)..(1223): a, c, t, g, unknown or other
agcccaattctcttttgatttgagcagttcggcccaagcagagaattaatcgacccaataccatttcgcacgtgctgcgtctcgtgcaacgactcgttgaccgcctcaaggattggagcttgatttgaatttgaattttttgaacattagtaagctatatatgttgacatgtgatttcagacataaaaattaattaagagattataattagcactactcgaatactaattatacaaaattctatggtgcactctcttaaaatgaatgtattcactttcagattcagtagaattttttagtctattcttttatgtttgttaacgtttttttttttcaggaaaaaatactattatattaaacaaagaattataatacaatagatattagaggaagtggtaattcgtccaaccataagcaatcagcgtctacccaaagagtatacttagttagcacgtgagcaactgtattcgtagatctataaacatgagaaatttgtactctaaggaaattggacactataagagagatatttactaacaaacaatgaaagtcggagacagatgcttgatttaactgcaatcctttaacaaccacaagagaatcagactttatgtagtgaactggtaaatgcagatatttaagccattgcagactatgcatcaaagtcaccttccatcaattctgatcgaaaacaacatcgaaaatgtttaaacattgcagcgatagtatcacccctacagttttgtaatatcacaccaaaactagaagtttgagtcattgtgttaacaaccacatctgtatttaattttagcctccccaaaggtgggtttaaccattgcagagttgatggaacttttgtgaaagatacttggtgttgagaagaaaccaaacctgtaggattttgggctaaatggaattcatcaagataaaaatttataaaaatgtaagacgtcgtgtgatttttttattttatacgcgaacattattttcaatattgtaaattattataaatttctcaatgagaacttttaagtaaaattataaacaaatcctccacaccgcactatctatctaaaattattttttattctcaattatttgatccttacaaagcttttatacctacactttcctcaatcaaggagccacaaacatagcaagaagtcattcaatttgaacaatggctgaaggtaatgcaatatgtgttgggttttatgcccnnnataaaactctttacaatctgattagt

SEQ ID NO: 117796 - DNA, 931 bp, Cannabis sativa
atctaatttataaaaatttatgcagatgtatggttccgcatttaatgtggattgtttgatactgtgtgtgattgatttgagattgaatagatcatacacataagcagtaggagtatttgcttaaaaaatgtccgacaacctactagctttttcaaaaaaaaaaattatttttaaatattgatgttatagttgtattattagttcttttaagtattcattttttttttttcattttttcttgattcttcttagttcactcaacgacatccttttctcatttttttttcatctcaatcaatagtgtagagaaagcttaaagggtcggaggttgaaattaagaagcacttggaagttaaataaggcaaccttcctaaaaatatccccatcatctggtaatttatgctctaatttttccaaggattctcgggggttagggtagttcatatttattcagaattatatttcgggtgtttctaagaattgtatagaatttcgttgattatgatttatgagtatgtgctacattgtttttctatatatttaaaaaatatggggctttcgattaagattataggactttgtactatattgtttttcttttaacttattggaaaatctaagggttcgattaagattttaggactctgtactattcattgatagtttgtcattagagaaatatttcgtcaatatagatgttttgaacatgaaacattcatagttgtgcaatagagagacaaaatttggatctcctaaacaattacttttatattgaaactatatataggtatctgagaataacattctgcttttagacaaataatataatttattggttaaattgattatttatgataattgttgagtaaaatccacttataaccagtccctgtacaacataaatatccacatcagcaacatacaacagaaa

SEQ ID NO: 117797 - DNA, 1443 bp, Cannabis sativa
  modified_base (61)..(70): a, c, t, g, unknown or other
ctggtaaaatattctcaacaattcgttatagttacactatcatccctgtaaatttttgaannnnnnnnnntagtttacagtaccgaaaatagagatcctgatattttactctaccacgctgttcaaaaaacttctaacctattttcggcattataaactattcgaaaatttttaaaaatttacatggatgatatgttgtaactataacgaacactacggtaaaaaaaataaaaaaaaaatatcccgacatatgttttgaggcacgaaggttagactaagagattataatagaaagttgacggtaatattcctcttctttttatttttcatcacaggtaggtgtgtgtatatcaatcatgcatttatttatcataaaagacatacgactttgttaagaaaagaaaaaaaaaagcataagacttttaatatttagtttcctagttttttttttctttatttttatgtaaagaacggggattatatgtggtgcacattctttttttatctctttatagcttaaacattctaggtaccaactatagaatgaaaagttcattaggcccttgcgaaaaataatcaaaagactcacacaaagtcaggtaccctccgccatcgaactctcacatcatctaaaaataaagttatttttgtgagcttatgagaaatacaattaattagcattacggttacaagaactaaacaatctaattgcctaattattagttataatataacaatctaatgatacttccatttacttcaaaataataataataataataataataattcctttgagaatacattaattataaacaatcatgccactaagtcatcgacccaaacttaaagacatattaatacagtagcacgccgatggacaacaaaagagaaagactttatagttattgctattaagatatgagggagagccagaggggcggaccaagaataaataatattcttagtaagtgttaagatttttaaaagactcaagaaatacaaataataattgatttaatcatatttcaaaaagtgttctaatataaattatcctaaattacatttctataaaatctttactaaattaaagaagaacaaaatatagataagagaaagcactaacttgaagtcattgttgaagattaatgctcagaaggttatgataattctttatgtattttctcttatggggaaggagagatcaatacaacaacctagctagtatttcttgggtaccactacttatttatacactcatcatagaatgagttttaagtattattattcgtcccctcaacaaattatcaattaactgagtggaatgatattactgaatgaaaactctgtgttgagtcgcggactagatcgccactacaagaaatgtcacttttagcagcacatttttgtgttggtaaaagttggtattgcgctgttaaaata

SEQ ID NO: 117798 - DNA, 1752 bp, Cannabis sativa
aaaaatacttaatttattttttaagatactacatttaatattttatttttttaaaaaaaaactaattatattttcaaaatgttatattttaaatttttatcactaatattttttgacctaaggcctccaattggcttgagaggagctcattctactctcacctcatgttaacaaaaacactcatttgctcaaatgggaaatttggtaaaaatgaatgaacaataatattgaaattaatgatgcctttggatcagatgaaggtttgagcacaggagaggcagtatggaagacaccatggcagcccatgatagcttcatcaaagcttccttcttccattaaatcagctttaaccaattcaagtctctcctttgctccttctagcttccataagtgccccactttcttctcatttcctgcccatatataaatataatttatcatttattagataggataaatactattttagataataatcggtttaactaaatttttacttttgtatatagttaaaagtataatataagtataaacttttacttatttttagagtttgtacaactattatattaagatcattttttaatgaaaaattacttttcaaaatatttggatatcattaaaataagattttttgtgattaaattaaaaattatgtaaattattttaattttaaaaataatttctcaaaagttcttttaagaaaagctataaatcctaattttttccaaaagacttttaaattaaaaaaaaatatatatattttttaatccacactcttaaaagaacttttttgattttaaaagctaaaaaagaacttatttataaaaactaagccaaacggaacaaaatttttgaaaaaattattgattgaatcctgttagtcttgtcttgttaaataataaatcagatcgtagatttttttaaaataatataaaatagaattatgagctcaattttcgtcaatattttctttagcccaactaacttagagtcagtttctagcataaacagatacaaaaaaatataatcagtctaatcaaaagacaccaataatcaaattattattaaattttattttgataaaaattacaaaataatccaatcgttaactcatacaaaatacagattcaaataatatataatagagaaaaaagatagatatataaacctggatctctaacagttccaataacatggtaaccagacaagagcaatctcttaacaagccaagatgcaagaaaaccagaggcacctgttacacatactctgcctttcaattcaactactttactatccattttttttccttcttaaacataaattttctagcttcatacaacttttgagctcatcatactatattataggttggaccatgtttatatatatgtatgattgtatcaaccaaacttcaaagtaggattagagaaggtaaaccatccaattttcatggcatgtaaatatgaatatatttatatgtttgtatacaaattgaatgtatcacaagctcaactatttgttaccaactccatgatgaagaaggtgataatattatattacaagctttttcttttttgaggtattttattgcaagataagatcaattgggatttaaaacaaccatttaactacttttacttttcataaaatatctatggtaaatatcattaaagtctctgtgttttgtaaaaattaccaattgaactatctgttttgttaaatgacaaaatagaccatgtgttttttaaa

SEQ ID NO: 117799 - DNA, 1285 bp, Cannabis sativa
gatcaatctatataccttaagtcaaaaccaaaaatggcttccaccccttttcgtttgaggggaaatgtacactcatcatagttaggtttttagttaactatcgttagtttgttagctaagtttgttaaggtagttatttttctgtttttgagctaattgctctctttttgtgtattgtataaatacaatgattttcagtgtaatatagtgagcttctttgatttcttttctctctaactgttcttcttcccttgtttttcttctatgatgcgcaattgacttaaaaaaaaaagtgaataaaaaatgattaaaaaatagagagagaaaaaaacttttttgaagttttaataagtacaaaatggtaaataaaaaattaagtagaaaaaatataaatgtaaaaattttctttttaaagtataaatacaaaatttggaaaaaaaaagttaatatttagtgtaaatttctcacggatagtactcccatagccccataaaattaataatactgttgaattgaaatatcatcatgattttaatcatacttttgttttgctattaagaaaaaaaactgtttaaaaaaaatattgagagtgatttttttttttttgtttgtttttaaaattttgatttacaattaaaaaattgaaaagtgaaaacagttttatagaacaagtttttgaaaaatattttcattttttcaactctaaaaacagaaaactgattaaaaaaatgttactaaatgccacctaatctaataatttattatataattaaaatatgccaacaattttgacaaaaaataaagagacttgttcatcacaaaaatttaaaataatcaaattactattgttatctgtatttctggtaagggacacgtggattctaagtcaccatcaaaaacccactagtggatttaaagaagacaattttggtcaagtccaagtcaaacaagaccttccaagaaggcaccttagctctgcgaccagatgagcttccaccattgacaatttgtatacagaagcaattcaagtatcgtgatgttggagggccatccaacgtattcctagaagacaagtctagtttttatttttgtcatgtgtctttttaaaattttataaatttaataaaaaccacttattaatttattcaaataaataaattaatattgtatattgaacaaatatttattaataatgtatattcaacgtactcccaatattaaaataacaataataatacaaataatatattaatatttatatatttaaattaatttaaaatttata

SEQ ID NO: 117800 - DNA, 2325 bp, Cannabis sativa
tctacacattaataatgtgagacttaggggtgtgcataaattgatccaatccaatgagaaccgaccgccaaacattggatatccaattgtgattggatataattggatgttatttttaaatatccaattggatcggatcagatgatggatagcgtgtctaaaaatccaatacatccaacatctaatcgaactaattagtattttcatttagtttggatgagtaattacattttatattgttatacataaaatcaatatgtatatatgaaaattagcattaaaattttactttttttttcttggattgaatggatctagtccgatccaatatgaatctaaaatattggatggatccgatccaaaaataatagttctaaaatattgggtaaacccaaattaaactaataaatatatatgaaatacatttaatggataaaaccgatccaatcattaattggatgactgaaattaattggatcgaatcggatttgaataggcctaaaaacattatatgtggtccaataaacaccactgagagtaactctaatactattcaaacataataaaagatttaatggcacacaaagttaagtaccttctttatcctgtggcctatcacaccagtggattcaataagcacttcttccggccccatcttgagtagctgcaggtcaaatttcatagttgctgaaaatccacttgactcaaacaacaaacttaaaataatcacataccttagcaacggcattgacacattctatgacatcttgataacctgcatcaccctgacatcaatgcagcaaatcttagtcacataatacataccaagtcaactccaaaagttacatcatagtttaatgatcaccgttgcagcattggcttgaccagcatttattaatacagcacgtgcctaaaagaattgcaaaagagttattagcaaataatattatatatattaatgcagccattttttttacaaatattttttgtatattgtcaaattaaagaatggtcaagattatgagaggtatgaccttgactcaccaagtacaaaacgacaacatccttatcctatctcatataattgtatatatatataatggatttgaaagggtgaagtttatagatagagcagcagaaaagaattagcatgatgattaaccataccgtttctgaaatgttgagggcatttttgcaatataatacaggtgcagctgcaacaacatttgtagtaaatgaccctgaaatagaaggagaaaacaacacaagaatcaaaaaagacaaaatcttcagaacaataatatgttagtgtattataattataatcaagtaaaatgaaaagtagaagggcaaccagcagaagtagcatcaacatcacaggtgacaagtgcaaggtcaggtttatctccttttgcacgtaatccaccatagatgcctgcagctttgaacccttgtgcagcagtaactccaccaggaatctatgattgaaaaataatagttaatacactttcattaaatgtccttgaagaagtgaaaagagaatcacctgtgtccaaggaccttcagggagataaatgggtgcagctggaatgacattggagactgatacaacacaacatttaaagtccattcgggcagaactccaaagctgaaaatgaagcatatttaattcataatgaacacaacacaacatatgaaacctgaaaaagaatacctttgactttgggccctgaagtggtattgctggaaatcttagacactcatacatctgtgccaatgaatagcactgtttgagatataatgggattaattcacatgaaagaaacagaaatttttgtattcaaccaaaatgagaaaattattatgaaagtttctttggctctgtagaatggcaatgtagaactatttagagagaatgattagcagcttcaaaaccctaagtagagtaccttgttgtgagtgaagtaattgtgtgatccggccgatgactgaaacggaatcccaactctctgatctcgacctccgacgtgaagaaggttgatactatttctagggtacctccatgagagagcaaagaagttgctatcactttgggtatataattgggcctgggcctgggcctctcttgaataagttgagtaataccttcttttttattcattaattaaaaatactttcgtattatatgcacacccttaaaagggatgtactgatgtatccttcacttgttaattttttttcatattcatgtacgttatagctatttaagataacctaccaaattttaagaaattcagaataatttataatatagaaaataatgtt

SEQ ID NO: 117801 - DNA, 1786 bp, Cannabis sativa
agaatgctaaaattggataatcgaggttctatgtgaaacgagagtaattgcatgacttatgtgacacttaaattattacttaatgctgattacatgtccgtttaattaagagattaattattagagaacatgtggtttagaacctaaaagatctgaaaagaattaggttaatttataatctgtcattcacatcaagaaaaggatagcaattaggcattaacaattgggtagcaggattctcctccttattttctcatcttgattaatattcacttgtttctttaagtttcgtgggttacttttattctttttaaatcttaaaaaatattgatttgccaaatagaatcataagtataatttagtagtaattaatctactttcctgtggttcgacctcacttgcgtgaatttactacttgattgcgtgcacttacgtattgcttaacaatttttcgtaacaatagtaccattacattaattactattttttttttctttttttcgtaatttcaaataacgaaaaagattaatcgttttaatatatatatatatatataaataaataattggaaattctaccattcactcaaatgaaattaccatctccactttcccatcttattattccaattgatacgatagaattaatgcatcccagaaaataaatgtaatattggactaacaagaactttcacatgaatgggaataggataagaatcatatataaatgacgacagtatatattaatatattgcatataaatatataaatataggataagaatcatatatattgcatacgacaaagttagttatacaatatgatagaaacaaacatgacggcagtatatataaattacaggagatttatttatatatatttatacaaatatataatataggtcaactgtgttatccgcattacgtgtgaaatatattagaagtatattcaaagcaaaaaaatgtaaaagaaatggattagatgacgcaaagatgagtatgatatattaattattacgtaatagatatataggttggcgaaatatatatcttaattatctaataattattattgtcttatactaacgttgcatttcaacaacaccagcgcccaacctaatttggtctcttttgacatctctgcttactcattaatttgtatatttcatgcatttttgaaggcttgcatgtcagtttcttaaaattacaagttatccatcgtttaatcgagagggacacatgatctcctctctctactattctttttcacccttaaaaataattaattttatgattcttataactattgttcataaggattaattgttacaatttttttttggtaaattaactgaaacttgtatttattcaaaaatataatttcaaagtactaatcaattaattacaatttaaattccccacccaatctctatcacttttactaatcttttttgtattcacaaaaagcattatgataaacatctttctttatatccccacaattgaggaaaccattggtacatttaggttccaaaacgcttcatttccaacctttcaaatataataataattgcacatatatatatataaaaatatttagaggagtttcaatagttacattaaatatataactatcatggtggtattttttttagctattagattattggttttgattagtttgaaaattaaataaaaataaataataattaacttataacttaataatcacctaataatttattttcttataaaactttaatgaattttaataaagattaattatat

SEQ ID NO: 117802 - DNA, 1822 bp, Cannabis sativa
atagagctttattttgaagtttccacccaatttctatctaccttattcaacttttttagactcacaaagtctattctattacaaacatcatgtttcaccatttcgaacattacatgaatagtaagaaggaaaaaaattcacaaaactttgtttctacaatgccaaatactatacatcaaagcattgattacaccacaaaaatcttccttttaccccttgaggctttacaattctgaatccactttaagatttgatgaagctctattttaaggtacttatcatatcctgacttcaacagtttttaacagtgttataaaactactctaagtttttccaaaaagaagagtacttgaatggcttcctggtactttttttttatctccagataaaccaaaatcaacatgggtgaatgattaaagtccccttctagcaagaaggtaacttctccagtttcaaacttcgataaccagccagcatttgcaaggacacaatccaacttggcataattcctgtcattttcttcttgcttattgttccaagcaaaataattacgattttacttgacatattctaaactacaaaagcttatacaattttggagcggaaccatctttttaatatttcctctatagtttacccttttctccattgacaaaacagagttgaaaaccccacaaacaatccaagggtccttattactggcagtaatggaagtcaaagcactccacaaatcttgcttgcctttgctttcattaaaagcataaatcacagtaatcacaaactttttttctcttttcggagtcacaaattaatgaatcactagctagaactattcctaatgtccacatcaaagatgtttgggttccaagtaataacaattttaccattaggatgattagaaatgttggaagtaaagcaccaccattataacatattaaggtataagacccctaattcggaagccttaaccattgtttcgaggagacctacaatgttcttataatttatcattcacatgacatctttttgcttattggctttgttatccctcaaacattccatgtgaacaatttacccaattattagtggagggtcaccctcgccatcaacaatagaattaaaattacaattaacatttcctactagcacttcttaagcaaaaatctcctctaaagcttcaaaaacattacttgtttccactttataaagggctactataacaacttcttttccttttactaccttaaaaccttggtcatccactttggcttccttattagtttttccttagttataggggcttttggctatcatcttttagaattgttctatcttttttcctttctttcatacctcttttgtgtgcccaatttctttgtgattctcacatttttctgggttctattcataagctacattaatgtataccatgtttcatttctcatcttcaaaactaagattgtatggacttccttttcagatatccattccaattaagacctgagcataatgtaatttgtctcttttcattgtagcttgatcatattttagcattttccctaacatactgactatttttgacatagattgttctccccaatatttcaatttaagtttccacaactgtatccacaatggaatttgccaaacttcctctctagtaaaacttgtgtccggatcccaagctttcattatcaaaggttcctataaaaaaattgatattctactttcaaaacactatcccttgcctctaagtatggaactgaaccaaaaaaaccccatgagtttgcaaactcactttatgttgggattttatgcccta

SEQ ID NO: 117803 - DNA, 1687 bp, Cannabis sativa
  modified_base (1659)..(1661): a, c, t, g, unknown or other
aaaatattttttttattatatctatttaatgttaattatatataaaaataaaataattattcattaaaaaaatatatttatgaattagcaaatattaaattttattgtattttttattaattcaaatgaatatttctatatattttatcactatgtacgcataaaatttatgtataatgaatgttattgttaataatatagaaataactcaattaaaaaaattgatcttacaaactaaatatatatcgtaatattttgtttataataaatgataatattattggtatttaaatttatttattaatttaaaatgatattcagattaatataatagaagataataattaaaacctacttttttttaaaggtattaacattactctctttaaggatagttatattactaagggaataacattccaaaggctagatcttcaaaacaaagaagataatagattccaaacagttgaaatagattcttgtttgggaccccaaacaattctcattttattatgaaatatatttgattaaatagttctttattatttacgatttggaatgtttttattcaactttataagagaagatgtcaatttgcttttatatttaatccatatatattaaaatttctttaatttgtaatactcctatttttcaacaataggctaataaaatcgtttacattagaataaaagtcctcacaacaatgatttataggtcgccaattgtgaattgcatcaaaagaatacaaagaattttagatttctatcccgaataaatacgtaacagatcatacttatcaaatattaataaaaaaaattctaataaaaattaaatagagacatcctaatattattcaaactagaataaaagaaaataacataaccaatcatattccgatattaaatatctatgaataatcattgtaaatcaatggattacatgaaactcgttttattataagtttgaatatgtgtggggcattgaaaaagttgataagagaaatgagaaagtgtattaagtcttgatgatgaagctttttataaaattgaactaaacaaaactcttcaagcttaacaaagtgatatggtcaaatcaaaataaagttgactacttttattttgcttttttggttttctctctttttcatctacttgtatatatatatgtatatacgcgtggtagactttggcttttttaaaaattgcaagaaacttcgattatatttctataaaaaagataatcaaaaagaaaagatagatatatgagaaatattattaaattaggtaatgttaagttggaggtattaaaatagaatgaaataaaaatgaaataattttaattttttttttttttgtttagttactatttaaagtattggaatgtcattctaatggaatgattttttctttattttaatagaatgactattctaattttgaaattgaaggactgatcattaaaaataaaattaataatttttttggaaaacactacaacaaatatgagtattacgtatggagaagacttatgtcttcaattatttgaaaataaccgaggacataggtctacaatttttttttctttttttttgggtaaacaccattttgaatcctgtgttttgcaaaaattaccaattggaccatctgttttgttaannnataaaatagaccatgtattttctaaa

SEQ ID NO: 117804 - DNA, 683 bp, Cannabis sativa
aagcacaaggtattctttgaatttagataacaatacctttaggcacttctgtcgcactaaaccctaaaataaaaaagggtaaggagatgatctaattaaccaggactgggtgctccctgaggtaaacgatcaatgtccggagggaaagacatgtccattgagctactgatgggaagactactaaaggaggctactcgagtatgtacttttcctttggtttttatcttaatcttttacctgtgcagattttaacttttctttgtgcgggtcaacttgaagatggcctgcacctactcccaagcaaagtctatggctttaaagactataaaaaaaccaccaacttgaagagggaggtggaggatgccaagaaggaggtcgaggataagagtgagaagctaggtgaggtgaataaaaaacttttggctgccaacaagcgagttgaggagctgcagcgggaaatcaaggatatgtcgtccactgttcagctcgaagcaaatattgacgctctgaccaaggatcttattactttgaaagatgagagggaaggtctctggactcttctcgctaacttaaccgaagagaaataggatttggaagagagtctcaactacgagaaggccaagcgggaggtactttagaaggaggtggatgttgggttttgtgccctaaataaaacccattac

SEQ ID NO: 117805 - DNA, 1090 bp, Cannabis sativa
atactacaaataatcactgaactttattaattcaatgctctaatcaaactgtcattttttttggggttcctcctcattctatggcgaccaaccctaccttggccactttcaccagcaactacgtggaagctttggagatcgtccattgtcctatctggtgtattggacattttcaacttcttaagctcaatacctgcaggaacacaccttggcacactgctgtcacagagctctttaatgctagttgttccatcttttatggatgctacattgctccatctccttcgccttttctcttggcctagtttggctttacttccatgttcccctattttcccatttaggaaaggacccttgtgagttctggagtcggagctcttagcgcaatggtccctttgcagcctgtgttcatgacccatgttctccttttctggttcatatctatttgaacttcctcggcaaatgttaggagaaatgcagggcttctctacccatttgaggatgccatttcctgttgggcatctaataggaatctgattacagtgactcacaggaactggtggggccaaaaccaaaacctgttccgggttccttgtcaccccacaaaatgccatattcgaaacaatttcacgtcgaggtttcccattagaatgttttttgatgctgccaaaccacacattcaagatcttagtatgttttcatttacataagctcagtaaaaacaagtattcaaaacaaagaagtgagagaagtacctgtcagagaatggtagttggagtagaccttgaccatggtcaataactctccaatcaatccctctctccttgagcacaacttctctaggccttgcagacccaaaagggtttggtttctgagtttttgtttgacagaggaggtcagcttgagcttcttcttcttcttctttctcaacctcatcagcccatgaaagtatgcacacgcttttccttcggctttctgtcatttttctatcctcaacggttatctttcgaaaaattggtaagcttgaaacatggagatgtgttataagctactacagctaagttgtaacggctagtcacccagccgtcat

SEQ ID NO: 117806 - DNA, 2714 bp, Cannabis sativa
catgatgttcttcttcattgttcaattatgcagaggaaaggcaaacttcttcgagagaagagtgggtgattatcagaaggcatctgtaatgccaagccttcaaggtggcgaaagaaacttcgtcttcaagctggacgaagacttttagtcgtcatatcacagtgttgcaagtttcacaagtttcatagagaagctcaaatcagcatcaaattttgttacattcctttccttatgtcaacaacatattatctaccattctacctcagatctaaagccattcaaaaggtgtcatatcatgccataatctgaagtgagtatctataaagtttagtgtccttaaacttattatatacacataaattttggatctatatatactactgttcttgtatcaatatataataattctttcttttgtcctaaccgaaaagggtctttatctacttcaaaatcataaccaccaggtggaaacttgggggtttcttcagtctctgtcattagttcattgattacttgattactaattagcattgcttaacaaaatttaggtatatatgtacttccttttcaataagatatgaaattaaaatgaagaataatttgcttacctcttggtatgtttatggaaagggttccaattatgaactaaaatgatggaatactacataatctgcaatataagctttttaaggttagtaggttccttgtcaaggaggtggttatggagattctgtctggtagtggtagttgtaacaggcttttcttacttggtacccttttcctttcattagttaacataacttactttgatcttaaatattgacacttgttttatttagtgttcatctccaaatatcatcagattacaatacttgcgtgtagattaatgattgaaatgaaactcaagatttaccctcaattcttactcatgtgacatcattttaactaatcatatttctctaaatcaaatttgtgtatacacaatgagtcaaaacttggaacttaaatgatcaaactcgtgccatggtgaggtgcttacataacgattgttagaatatttgggcttcaagaatatgtatttgtcactgtatatggtatcaagtagtagtattgatagaaatatatatttcagaaagaaagaaaatatttgtgattggaaaatgagtagaaaagcttaaaactaaatatgtatgagtaaacattttctgtttggttgtgttggtgggaaaagaaaaagaagaataaaatggattggctattatccaaaatatggtcaatcttccatcaccacagaagctagtttattagagttaattggtaatgaatgtctaaaccgaatacaaagactatttgtaatatctttacgtttatgtttatgactatttgtaatttttcttgtgtagtcagaaactgtaattatgtggtccataatatggttaaatgggcgtttgctaacaatgttacgggcatagtaaaaatatctactatacctattaatattttttgtaacgatcatgaggtctaactttaatttaatttataaacgtatttttttaaaaaaaaaatacaaagacaggccaattgaaaatcaaaacatgctttctttctagtcacttttaaaccgtaataattatatttattttattttaatttttttaagaaaaaaaaaatgtgggtcgcaatcaaagaaagtaaagtaatagttgttaacccttttgtataaaattattctaataaatatatcacgttaatctcataacaattattaataataataataatccacaccataattacttattgactatgtcaggccactcattatatttatagttactcaaactgtattatattattctgccatcttcttccatttggttaaaaaaaactcttatcagaacaatcttatcctcttctactatataaaaatattattgtttagataatatttctctcttttttttgagagagagagagagaaagtatctttctcttttcttcactttacttttctccacactttcattgccaatttatcctaatggatatgctatttgttgtctttggttaggcaacatatatataggtcttagcagagtttatttattataatcacaaaaattcatgctaatttgttttgttattcaaatgagatacaattaggtttatatgataacataataattcatgataagatatagtaaagctttataatgaatgatttttttatcttctactaatttgtcattttattattattattattattattaacaatgtcaatcatgtttgcttgccttggccgttttgatttttggtggctacacttctcttatattaatctaatataaaaatatatatatatatattaaaaatcatctgtctctttctctttctaaaaaagaaggcaaagaaaatgttttgtttttcttactgaaatacagggaggagttgtgcacgctaatattataaatgtataaaataaaaatttatttttgtgcacaaaataataaactaatattattaatatataaaataataatttatttaaaaaaacatataaaataataatactacacttacacgttataattataacgaacgcgaaacattgaatgtccaattgtgattggatcgggttagatgttaatttttgaatatccaattgtatcagattgaatgttgaatgatgtgtccaaaaatccaatacattc

SEQ ID NO: 117807 - DNA, 1237 bp, Cannabis sativa
tatgaactcaatgagtttcattcatcaacaagttgaaaggagaccaagtgtggttatatgtagcaaaattcacttagtccctaaactacttcttaatttcggttagtgtccaatcaaaagtaaaaatatatgtatatatattatatacacacacaaacaaaaccccatatcactttttaattgttagttttgttaggtagaaagtgaagaagttgttgttgttgttgtaggctttttcttatgtcggtttttggatcgcttcttcttcaatgtcccggtgcaaccattttcaagccgtctcttgacattgccgccattgctaagagaatcaccgagttctgagagtttagcggttttgttgtgcctaacaatgttggtgacaactgcgtatacagtttcttcactttgcggtgttaagatttctcttctcactataactgcattttgtccacaacacgattcttggattgcagtctctttcagctcttcaaatatggcgtctttgtcgagattaaaacaatcgattggaacctgcacaacccgaaaattattattaccatttgtgtgtgtcaattaagctaagaaaaagaaaataactgtattaactgttttttgtttttctttctaaccgtaaagtcaataggaatgttcatttcgatgtatggacagccacagccttcgctgaaattcagcttcaaaactaattcaaacgattttgttgaaacggttctcctgcaacatgtcaaatatgcaaaaaatcacgagaagataacgacggtttcagatagtacaaaaaaggcgttatgtaacttctttaacaacgaactcgctatgcaaaggaatgggacacgaaatacaacattcgcagcatttataacattcccgaatttgtacatttgtaacacctattttacaaaatttattactatcaatgaaaattcgctattatgtcgcattaggataccatatttcgatgctcgaaaacaaacaacatgtgcgagcgaggaaaaggaaactatcaccgttaccttttcagctgaaacggttctttttccaagatagcgcctttatagtcctccctgtctaagaaagaaacctaggatacaaaaaccgaaaaagaatagactcaaaaaggagttagttattgaaaaacgaaagacgacacaaaacaaagatgatttcccaattggctccttgcctccattagtattcaaaatcagaacttgagagtggtatt

SEQ ID NO: 117808 - DNA, 1497 bp, Cannabis sativa
ttattcaatacaatattaaattgactctttaaactcgtgacttcgtggtcactagttacatgtatatattatttgtttggtacaacaataacaactatttccaattgcttttttttcttttattttaaggaaataaataaataagtctttttccaattgagaaataagtatttattgggtctctttattgttggtatgcggttgatgttctttgactaaaaaacatgttatgattatataatttaattaattaataataataataatgcagctttgtcacttggattgaatatcccacctgcaatcagaagcgttgatttcaaatcatacgattgtgatcatggttttaattatgcttcttcctcttctggaattcttcctgatacaggcaccaatatggtatttatataagaacattattcaaattaattatgttattatatctttatataatatagattttattatgacattaattaattattaattaattcagaaaggtgttatgagcttgggagaacaaacagatatgttcaataaaacagtccatgaatttttgagaccaagaatgaaaaatccaaccgatctgaagaatcacttatcaaaatccatattctttttggttactggttccaatgattttactatcaattttcttatgtccaaaaatcgcaccaatagtgatcgtttcaacttttccaaacacctcgtccaaaaatatgctactcaattacaggtacatatctctctctctatattatatatatatatcataattatgacgtactacatttatattgtagttttcttttttagaataatagtcggtgcaaaacaaatagatcattaaatgagttatggtggcattaagtggacatgctcataggtgcagaactgataggattactctgataccatgttgagaattatgggttccatcttcttttatatgacttataaatattttaccatttattccatatgggacaatgtgctaaaattaatattgatatagtcttcgggctagaaagattttgtcaattaccattaacataattaaattgtagttgtttatatatgtgttttgagagtaagaagtcaaataaatatataaagttatctagatgcagtatgaaagaactatatacgtacactcaatataaagctatatatattttgtactttttaaattattattttcgaataatctttttcaattaccattgaaaaacaatgacataattaactaacttgtttgtagctgtaggttttggataagagaatattcaacaaatataataattgtaaagtttctagatagaatggaaaagaaatgcatgattactttgtttttgacatttactttcatttggaactattattctcatttaccatttaccaaattaattattaattaagttatacaaatataacataaaatattgattgtagttttttttttttttgggtattaatattacaataattaattaatta

SEQ ID NO: 117809 - DNA, 4272 bp, Cannabis sativa
tatgtatttgattctcatttagtggagatgtatatttgttgcattttcaaattaaattttgtattcaaaaagaaagaaaggaaaaagagaaacttaatttgaattattgtgatataatttattgtttttctattgatgatacaatttaaaatatttttagtccacaattagtgaactccataatagaacactctaatacataattttccttgaatctaaaatattacttagcaattgtaataaatatataggtatatagctatcaacttataaaaataaataaatcataacaagaaaattgagtgatatatctttaaattgtaatccttaatgtttttaaactcttctgaagagctttaaaagtttaatgattggagttgtcccttttgccattattcacgcttaaatgccttggttttgtcaagtgtatttattttttaataattagattcaagtgtatctatctcacttatctctccctacattttgtttattttcttagtattatatgttatttcattttattaatgtgaaagagagtttttattaaaaatccaactgaaaattactttaatatttatggtctattatcgtttatgtatttgattctcatttagtgaagatatatatttgttgcatttttaaattaaattttgtattcaaaaagaaagaaagaaaaaagagaaacttaatttgaattattgtgatataatttattgtttttctattgatgatatgccatttaaaatatttttagtccacaattagtgaactccataatagaacactccaatacataatttctcttgaatcaaaaatattacttagcaattgttaataaaatatataggcatatagctatgaacttataaaaataaataaatcataagaagaaaattgagggatatatctttaaattttttttaacaagaataaaaaattggtaatattaataattataatagaaatgttctattaaattttttcatttttacattaacaaatcagtgttttttttaaaaaaaataaataaataaataaactttgtttgaatgtttgattataaaaattattttatttattatatcttttggaatttttaagagaagggagaaattgatttaaaaaaaaaaaggggagaaacataaaggactttaatgccttttgatattatatcattttcaaacaagatcatctaggagcgtacatgcgaacctattcaattgtttctctcaatttttcaaattttataagcttctcattaattagctttaattttattaaaaaaataataagtaacagaccaataaatatgctaataataaattcattaactaatgactttttattgctcttcaatattttaatttcattaagttacttttgtcatgatgctcttttatatttattttttgttgctttagtttttagtgaagttacaaactattaatatacaatttaatgagttaaacctgaaaatgttattcaagtgatgtataataaatatgtagtctttcaagtttacaaaagaattttttaagttaaatttcaaattgtataatttatgtgtttaatagtgattaataaactattttaatgtgtattaagtatattaaaatgattgagtttacaaatgtaatatttaaaatatgttgagagagaaatatctgtaataaaagaagttttttgacatttttcattgattatgtgatcatgatactcatctttaacattaaaaaaattaattaaacaataataatcatctccaaaagaattgttaaaaacaaaaaagatactctcaaaagtgaaaaagcaataataatacagagatgtgagatgatattttatttttctaacatattattttctataatttataataactccaatttttaatttcacattatttatcatatataaataatttatttgtctaataataataataatattttaattaagttaaaaataaagttacatcatcattgaacttataatatttatttaaaaataaatgcaacaataatttgataatattcccccacaaaaaaataaataataattaaagaggtggtcgtatgttcttttttttctctaatctctttatttttgtggtaattttaaaatttaattacaaattatgaatagtgctaattaatcaatctatttaaaaactaattatttaagtaattgtaagtccattgttaaaaaagttaagtaataattgatattaatataattgtaagttattattgaaagctcaaataaccttttatacacattttttaattaattgattgaaaataatattatgtgtattatttgtgtttattaatttctttttgaaaagtactaattttcaatttttaagaaaaaaaaatatccctcaataatttttgtcaaaaaatattttaataaattaattgttgatgattaaaaaaattaatttatatatttaagactgataagatggatcatatttttttaatgcatttttattattttttgaaaactttaattttttttacaatctaacatatgtaaactgtaataaagtttttatttattcaataattaattactaatctaaccttctttaaaaacgtaaacttattttaataatgtagatagcttaagatatttaacaccgcgcaatgtagatagcttaagatatttaacaccgcccaacgcgcgacttttgtttcctagttgtatgaataaaatacactttgaaaaaagaaattttatttgctcccaataaagttataagtacactagaatattaaaaaaataattaatttaaattaatttttaaaaatcactattaatattttttttagaattttttttcatattattttcttttcatcaaactttatataatttttttgtcttaaaatttataatatattttattttttattttataagtatatttttaagaatatgataagaggaaaaaaaattaatataaattaaacatatgtatatttatataaaataaaaaatattaaaatgatctgtaaataaaactaaaaaaaatggtaaatacctttttagatcccgtgttttgcaaaagttatcgatttgaccctgtgttttgttaatgataactgtattttccaaaatggtaaaaatatgatcatgagcttaatttttgataatttttttaatataaccaacttgaagacaattcataatacgaacagatacagaaaatgtaaacagttttgtcatattacttttagatcggattataattcaattttattttgacaaaaaatcaatttagagtcttctttgtactattttagaaaatagaaggttcattttatcatttaacaaaatagaatatgcaatttgtaatttttgtaaaacacactttaaaatagtatttaactaaaaaaaaatatatataatattttgtaattaatatctaaagtcaaaaccacgactatccccctgtacattgattttttttctctctttttatatattagtaaaaaacaaaaaaaaaaaacgatagaaaaccatgtgcggcggtggtaactcaaattggattgagtggtaaacaaaacaagaatgggcaaattaaaataaagaaattaagagtctccgaaaggttgtaaactgtaaagagtaaagactaataaagagggaccgccgcgtccgacctaagccctcccctttccctttgagccaaacctcttgttttttggtgtcctgaaaggtcaactaattattaatttcttatattaagaagaaaaataatattaatttcttattaataactctatttttccaaattcttaggaaagctcccactattgggacccactatctgcttcactaatataattgtatttttaaaaaaatttatatataaattaataaaatagtaaagggaatctagggaaagaatcaggccaccttgtccccacctaagcttttacactttaaaactctttggcatattttttttcttaataaaaaatgtattccaagacacttttttttttttataattgtatttgttatcccaatttttgcactctgaagtggcatcacatgatgggaacacgtggaatcgactctaggcacctactcgcaagaaacaggccaaacagggcacctcatacatcagctcggacgagggcctctagaccgagcagtgagcaaaccgagcagcacgcaaacacttagcaaattcagctttcacatcgtgagtcatcaaggaaatccctataactttgggatcagattacagagata

SEQ ID NO: 117810 - DNA, 2030 bp, Cannabis sativa
ttgtcatttaacaaaacacagggtctaaaatagtatttgccctattttaaacgagtattttgtttgatttttttttttatctgtatcagtatatgttggagttttttagttaacttttttaaaatcgtgtacgttataattatatgtgatatgtaaatttaaaaaaaaaaatcgaataatttacaatatcgaaaacaaaatttatatatattttgtaacacgtacgactattttttttatacgcgtggtaagtaactgtataaatttaattttcggcattataaactattctgaattttttgaaatattaactagtggtcttaaatagctacaacatacacaattataaaaaataattagactaaattttttctctaaataccaaaacgatctttagtatacacattagaaagggttaatagcatcttgtaccttttatatatatacatattagaaagggttaatagcatcttgtaccttttattttgcaaaagctactaattagactttctactttgttaaatgataaattgaattgtgtatattttttttaaaatagtactaaatagtacattgaactaattttttgtcaaaataaaacttaacaatcatctaatttagaagtgttataattcaactggttacgttttctgcatctattcgtgttaagaattatctgtaagataattatattaaaaaaattatcgaaaattgaatttaaagtactatttgtactatttttttttttttaaaaaaaaaacagaatttattcttatttattatttaataaaataggaagtctaattagtaatttttataaaaatataagtttcaaaacattttttgaaaaagaagttccaaaataatattaatcgtgatagaaatgaagtataaattgggaaaaaaagataaatagtaaaggtcataattaccgagagtgctgtcacttaattaacatgttcttggttgttcaaaacatcaaaattaatgtaacacggacgacaacaacaattcaccctttttgcttttctctttctctcttctatgtgtaattattataatcacaataagtctttaatatgttggtaagtatatttttgcttgattggtgtctggcctttttgaagaatatttaaagctaataattttaaattcttatgctctttctgaacatttgaatttgaaacttgtaagaaacatacaaagctaacatagtttgcttatacaagaaggctctccaatgtctattcaaaaacttgttgaatttgaattaaccttctttccggcttactcatgaaggagagggttgaatccgaatccactcttctgaatttgttcatgagtcgggccatcacttctcctaggctcattaaatgggctcgtaagcttattaggaacacttgaaaataaatgtgttaccttgtcagaaaatggataatatttaccttcaagttttcgagacttgagagtcacggaggcttacaacattcatccaaatttgttgtggtgtgttgggccataacgacacgaaccctttgatattccaaagagaaatgttgcggaagcttgctaacctttcatattccgtgagtagagtacacatgtcagttgctctatggtccgtgtattggaatttattttactatgatctatatttactaatatgtatattgattataaatctataatctaacaaacttgaagcttaagaaatcaaagagaagtgagtttgggagtttaccttggattgaaatcactataatcttgctaagatactcaaaattgagctgaaaaatcccaacttgctgctggttttcttgagaggtcgagagagagagagagagagggagttagagagagagaatgatgtaattttgtctaaattctaacttaactaaattgatatactttaattctaactaaggaaatagatacaatattcagcaattaaaataaaataaagagaataataataaagagaataaaataataataaaatagatgttataaatattaataattatgtggat

SEQ ID NO: 117811 - DNA, 2055 bp, Cannabis sativa
taaattgatgaaaagaaaataggggtaactctaatacttaccctgtagaaatttcttgaagatgaaggtacctagtaatacttctctgtaaattttggaagagttttttctttctttcttttctcctgatttttttcttataagctatttttttacgatacattgatatgagagtggaaagatgagtagtgggtagttatgggttagtggagagaaaagtggaaaatattaaaatataataatatttatttttccctttttttttttgaacgagtcccacttttttgtattattttttctaatttattactattattttattaataataataaataaaaaaaaacgattcaacactctccacgtaattatttctaagatcatactttacctattacactaacagatataacaacaatactaaagttttaagagaaggtgaataagtaattaactataaaattataaaatggaaagagccgtctgttgaagccggataagtttatgtattgagtgacagtagtatatgagctaggtagtgaggtggcaatgttaacctggtaagtatatgatatctaaaatttcattgagcgagagcctttcatattctggcagccatgtgtgttttttactttcttttgtatggaaccaggcaagagttggctaccgacctttttgtccaattattcttcttagagtacgactagaggtgtagttaagttggtgaagatatttgagatttttttttttaatcagttgatggtagttacgaagggagctacctcactccaagaaagaaaacggcacactagtggaagccgacatagcagcaagaatgtgctggtttattccaaattttaagagattcaaaacttaaaaattattttcagttttaaaaaacagaaaacatcaaaatgttatttttaatttttaaaaataatttttttttgtctaacatattgaattttatatttttgctcacttacttgaatcttagacctagaattaaactcgaacccgaatttagacttatgtcatagtatggtgttaaaatattgattaattttttagtaagaaaaaatctaaaaataattttaaaaaaattgtgcaacactactaaatttttaaattgacaaaaaattattttttattcttacttctataaatataatttaaaaaaaaaatacagccaaacaaactccaaatcatcttgcaatagatctaaaagcaccaaataaattagtcaattgccataagggagctcttctagcctccacaacatcaaccaaggtcttacaaataaatataatggtgcaccaatttttaaatagtcataataatatatataaatataattagttgaaaaaataacaatgcactataagtaattttctttggatacagatgtggtgtacatatcatattactcttgagatttttgagtatttatataataattaagtaaatattagagcaggaagttgatggtgaattaatgcgttatgcatgtgttagaatatttaatgggaattaaaataattaagtgttgtttactcagtatcagcagtggtggaacttggcatcactttaaggaggggccaagtataatttttttttttacaaacaaaaataataattgggtatgtatagtatacttatatttttgttggttctctatttgtttgatattttagagtatttttcaatctatttttttaatgatcgtgtacgttgtagttatttaggctcatcggtaaatttttagaaaactttgaatagttaataatgccaaaaataagttttaaaaattttattgcaatcatgactattttttttatatacgtaataaacaactgtttgaactttattttcgacaatacaaacaatttaaaatattttgaaatttacaagtgatcctaaatatctacagtgtatactatcataaaaaaataaacttaaaagctctcgtgaatgcctaaatagataaggggtctaccaaaatatccctttaagaatgtcttattgattcttcctaaaaaattcagtatttcttctta

SEQ ID NO: 117812 - DNA, 1173 bp, Cannabis sativa
tcacaattggatatccaatatttggcggtcggttgtaattggatcggtcgattctcattagattgaatcgatttatgcacacccctaagaagaatacaactaaaacaaaaacaacaattatgatagtttatgttaagaaaaaaaagtatgatagtgtattattagtttatttattttattttatttttacagtactatcatttttagagtttttattattacttaataccaattaattaaaataataatttgctttgaatgttctttctttttcatatttttataaattgaataaaatagtttattaatttaatcaaactataaaaatattttgaagaaagttagtattatctcttgctaagttcagtttttatcgtgttataaaatcattaattagtaacgaataaaaaaggataattaattatttattcaaacaattacatagtatcaattacatactatattctttaataattattacttaatatttagtctataaattactatttgatatctaataaacatttgatcaagtatgctactaattaaaatttataatttattctagtggtatacttatattaatatatagtgtataattacataaagctaataattactatttactccacaatatagaataatcatattattataactagtgatatacttattttttgaaaacgagcaacaattaacacaaattatattttatacaaacaaaagtaaaaacagaaaaattctaaaaaataccactgtcaatttttttttaaaaaaatatgactaaccaattataaaatatcaccccttacaaaatgttaaattggtgtttactaacaatagttacgaaaataataatatgatcgaataaacaattttttcaaacaataatcacatggaaattcaaataaaatgcatatatatatatatgttgagctctaacaaacattgtaaatgtaatgtaatggcagagccaccattattaactatactatctcttttctatttatgtttattattatgcctctactttatatttatacactactcatttattattataatatcattaatgctcctctctctcctttgaatatatatatctataacattaacatgtataataagaatggatattaagaaaaaaaaaaaaactatgagcatgtttggtat

SEQ ID NO: 117813 - DNA, 1381 bp, Cannabis sativa
attactaattagcctaataaaaaaaagtcttaattaattatactgtatatacatcaaaattaatagttatacatataaatgattctatatgcattcacttgtgccatcactgattattcatgtgatagtgatactcattttgtttattcaatttagttacgtatgatattaatttcaaaaggaaaaaaaaactaagttgcatttgatgaccaattggttgtctgacccatttttttttgaatgatttatcccaaaatatcggaatttgacgaaagtcaggcccaatatgtatatacaaattgataatacaactaactatgtattttcgttcaatatatcgctgaaacattgaagatatttgtccagattttttattagacttctacaattatcgagactatcaattttccgatatatttctgaaatcgaccgactttgtcgattttttcttcattgcatgtatggaagaataacactctgatttatatgttatgtgttattcttaacacatgttttgagagaaaatgtaagaaaggctttaatttgatttatatattatatgtggtattcttacatacatttgaaacaggtgacatttcttcataaaggatttgacgagacacggcgacttggtctccaaagtgaaactgagcaggttaatcatttcattcctttactacccttgtttattaataattttttttcaatatttcagtttcctttataacttgtttgcttggtatgttagatggttcgacatgcatcaccacctggtgaaactggaatgcttgttgttgactctgttgtgagtaattttgtgattctaattttattataagactagtgacatatttatttcaagaactttttatatttctggagtttcttccaggtgcctgggggcccagcttataactgtttggagcctggagatgttcttgttcgtatgaatggtaaagtaagtcactttgttactctcataggaattgaattgttaacagaagtgcatgtgtgtcataggacccaaacccagagaaacatcaagcagagaaaatattattgctgaaaaggaaaacacagaaaataccaggttcttgagggacctgaaaatctctaagaacttaaagctcaccacatttcactcacacttttcatggcccttctctcatccccaccctctcacttatataatagtctaaccacgtaattacccttacaaacgaaccaagttattcccatccatgacagctgtcctacctcaaccattctaacagtgtcctagtgggactaacacgaaaagtgatttgtggggtggaaagagggtgcctgcgtgtttttttttttttttttttgagagtgatttgaatcatactatgacaat

SEQ ID NO: 117814 - DNA, 811 bp, Cannabis sativa
atggaaatattaaactgctaatagaacacgaatttaggagcttttaccaccaaaattttagaattgggggttattacaataaataaaatacttatggaagttatatcgcaaattactcccacaactttaatgatgtcggcctaaaacttatattccaatgggtcgactttttttcggccctatagtggtcgtgcctgtaccttaaaattgttgtagtggagatcttaaaattctacttttgtgaatgtgaagaattgcctttctgtgtgtgggattctgtattatttttctagcaattttgtagtggtcaatgagagacattttcaaacacaacggctagaattggagattctaaaacccatataaatgtgctaaagaactggttttggattataaaggaccacggtcttagctagaagaaagagacacatgaattcactttttatttttggtgtatcaattatatttaaagtttgagccgcgtacacggttttggatatttcttgtatattacaaagaagactaataaagattcaaaatgctctccatataatcccaatgggtattttgtatatttatggaatattaaagcaatatattataagaacatttacagccatcactacaaaaagattaaacgtatttctttcaatcacatcaaaatttatataaattatatatatgtatgaacgttaaaagtgtaaaatattttttatgtaaatttttcttaatatatatatatataaattctttagtgaaaacttaaatctttatatattaaaagtgcctatctaactgcaattcttggttt

SEQ ID NO: 117815 - DNA, 1012 bp, Cannabis sativa
ccctccccacaatctgaaactctccattttagttggtctcaaattaacaccttaaaggggatgtgccttcatccatgcgaacaatgttcagtaattgcttttaacaatcatcagagataccaccaaaataaacttgggatttttccttatctgctaagagatccgttgtagcacaaaatctatcaatagcacattgaacaattttgacggtcttcacattacccttacaaaaaatcacaaggtcgtccaaaaagtaaaggttaaccaactttaacgacttacacataagagggacgccaaaccctttcaaggttgaggcttcgtgaagaagacgggtcagataatctatgatcataataaaaaagcaaaagaaaatttgggtctccttgacaaagctcgttttaccttggatagaaccatgtaaccgaccattaagcataagagtataggaaagacctttgagataaaccaaaacccaattaataaattgagagggaaagcataggcctttaagaagatcagaaacaaaaaaccaatcaacgatatcatatgccttgttgaggccaatcttcataatacacttagctgaaatattcttcctagtatagcccttaagcaaatcttgacaaatttgaatattgtgagaaagaagacgatttttaataaaagccccttaattactatgaatcaaagaaggaaggacttcagataatctagagcatagcatcttagagatacaattgtaaattgtattacaataggcaatgagctgaaaaatctacagcagtggttagattatcaatcttaggaatgagagataattgtttcattaagctcaactactagaatagagacctcctggaagaactagagaatagccttaaagacttctgatgggttttatgccctaaataaaaccctatttcaatgtaatctctatcttttaaatatctataaagttacaaaagtattttcatcacttattgtgtcttttggttcatgttatcattta

SEQ ID NO: 117816 - DNA, 2528 bp, Cannabis sativa
  modified_base (30)..(49): a, c, t, g, unknown or other
  modified_base (98)..(116): a, c, t, g, unknown or other
  modified_base (217)..(224): a, c, t, g, unknown or other
aagagatccaggtttagatcttggtgatgnnnnnnnnnnnnnnnnnnnnaagggctagagatctgaacgaaacgagtcattatattccgctgcacccnnnnnnnnnnnnnnnnnnntttatatgtgtttatttttattgtagtaaatctagatctgaacggaaagagtcattatattcaaattaggatgttaatggaacatacatggtagtaaatcnnnnnnnnggtaaaatatatccaacaatatggacatcagttctggcatgggtttgcctgattaggcattgtaatatacgtgcttgcctgattaggcgatgtgatgcattggtgtcaggctatggcacagctcatctaattaggttatgcagtgatgcaataaatgggtgccaagttttggcatgggctcacttgattacgtgatgcggtgagttgatatatgagtgccaggctatggcacgattttgcctaatttgggcaatgcaatatatggttaccaaattaaagcatcgactttcctaattaggcaatgtcgtgtaataaagatggttactgtatgaggtaacaaatataattaatattattaaataagtattggtatatcattaaatacttatactaatgttaattttgagtgaatgtttgtattgacttggacttgtacatatgagtaatgtgtgatcatttggttcttattgtctgagtataaatattaatatttgaataatgaagtatataatttctattattactcttcttgtcgagtcctcgtaactatcaggttctatctggtgcaagtaataggtagggatgtttggacaaccatcagtcaagaatcttctctcgtaaatgtacatatcagcttattcgaaatgtggtgctgagttgtcaggaactgtatttcaaatgttctgaacttttgaatgtattttgtaataatattgttatggcatgtctagtaatatttaaataggggatcctcaatcgtaaaaagggactatgccatgattttatgattaaattagttggtaaagcttttattaaatcacattttgtttaaactgctagtttatgattataaactagtttattaacgcacacatgttgtccttaatgattagggcattagaggtctctagaagccatgtggtgtcctctttcaagtcaatgcctttgtggtggtagattgttcaactacttacaacatcatgcttagacaaccatttttagttgattttagagcagtaacatctatgcgccatctatgtcttaaattccctagtgatactagaagtattggaatgatcataggtaaccatagaagtgcaagaagctggtacaatgtttcaaccaagactgttctcacagtcctaaaaggaaacacagcagaagccgaaacatcttctcatttagcactatggattttcgacaaagaggataaactagatccacgagtgggtacagaacgattaatttagcccatggaagaggtagaagaagtatgaattgatgatgaagatcctacaaaagttatgaacgtgggaaagaatattcctccagctgttaaagaaaagatggtctccacagtcaaagcaaatagtgatgtactggggtggaatcattctgacatgactggagtctgtcctcatgtgatttttcatgcactgaacataaatcctaaggtagatccagctcgatcgaagtgaagacctctagatccactgagagcagaagcagtgaaaatagaagtagacaagttggcaaatattgactttatcagggaagctttatatcccatatgcctagcaaatccggtcttggtcccaaagcctaatggaacatagagaagtgtatggatttcacagatctaaaccaagcttgtccaaaatactgttatccacttccacaaattgattagatggtcgacgcaacctcgggttatgaacatggagaatgtgtatggatttcatagatctaaaactgagttgttaaaattccaaggtttagaccattggaacaaagttccaaggaataagtaagaacaatttgttaaaaagaaaatttgagtctaagcagttggttgaaatcctaaaggcttaaactgttggaactagaaattcagggatctagaagttaaactaacttagcgtcaccttagtgcgagaaaattggagggtacaacttcttgtgtaatacataagtaagatatggttgggtctagaatccatatatctaatgatggaaaaactttcctatttcttgttcatcgctacacagaagctaagactgtacttttaggcccatgacataaagttgctgatgaatcaccctctctgccaagtgttagagaaaccagagtcatccaaaagattattgaagtgggaaatggagctcatctagttcgaaattcactatcaacaaagagttttaatcaagaaccaagctttagcagaattcatgatgttgggttttctgccctaaataaaacccatttcaatataatcaaatttactaattaatataagatcaaaa

SEQ ID NO: 117817 - DNA, 3164 bp, Cannabis sativa
acatttccctataattatattctcttttataatattccctataatcagattattttaaacacctcataccaaacgcccccttactattctcacctcgcatgaacgacaaacgacatgtctcaatgtctcataacactctcaaacgacaacaaactcaaataaccataaattagttatagaaaaaaaatggtaataaaagacgaagaagaaagagagggaaaaatagttccaaaaatggtggctatatcgctctacagaggaaaccttcacagagttcctgacgtccctcgccgatggcttatgccaacccctcaaatctccctcaaagacttcaaacttctcttatctcgtcgctccaaagccctctctcgcctccattcccccaccaccgccacaaccaacgccacaaccaacgccactgctacctcctctaaccctaatcctagccctaaccctagccctaaccctaaccctaaccctagccctaatcctaatctcaacattaatcttaatttatcttcggatcagcaaaatacagcatcgaatggggctcctggcgattcccttcccgaggctcaagtgaatttggagaaggtttctgttgatttgggtgaagggccgtccgatgaaatcaaggttgaagtaaatccgaatcttgatgggtcttcagagaaacttactgaaggtcctgatacgttgtctggtcctaaatctaatgagcctgagggaggttgtgatccgattgacgaggatggtgccaaaccagagccaattcaggttgagaaagtggatgatggttccaaaacagaggaaattcaggttgagaaagtggatgatggtgtgaaaccagaggaaattcaggttgagaaagtggatgatggtgcgaaaccacaggaaattcaggttgagaaagtggatgatggtgcacaaccacaggaaattcaggttgtgaaagtggatgaagttgccgaacccatttctgaggtatgtgaaggtgtctatattttaattgggttggtgaagttcttttccttttatcattgaagaggttaagaacagaagccaaagcttcatttttaagacttggtatgtatttgtgaataagtggaagaatattagaggtgttgcagaatttgaatatgagatagtaagcaacttagtgcacacttgtgttattttggaatcgtgatcggaatttgctgtgtttcatgtgttgctggttgaatagttgtttcggattggatttagttttttatattatgaaagagtgacaataatttttaagctgatatagggtagagatcacaaagttttaagtgaaactgaagatgggaaaatttcaaattacatttagtagacatcagtttcttcatttcacttttcaaaagaacttttgtaagaccaaattttcgttcatgatgctcactaattgatttttgtatgtttattctttagactaaaaagaatgaggatatgccgaatgataaacttaacaggaagaaggaggttgaggagaagttggaagttttgaataacaagaaacataatctggtacaagtactcaagcaggtatgtgttagattcgtgtaactttgattggaacgcattttgaagttttgtatatcttgtagatttgtgatgtttgaagacttcacgttaatctttctccatttaatagtttttaacttggggactgttgttattggttttcagattttaaatgcagaggaagaattgaaaagacggattagtttgcaagggtcagggactccttctcgtccagccgcccctcttcaagtggatgtcaacaatgattctgtttcgatgactagaaatgttgtttctaggacaggctcagagccaaataatagtggtgaagctgaagcaggagaaactgatgctttttcgaaccataacttccctactcgtcagatatcccgtatgaacagtatatcaccatcgtctgagtctcctattcgaaggcctccattcgttcaacataatgtggtatgttatttgattcaccattatcctcaatcatattataaagtcttttgacacccgctatagtgttttgtcatttgaagacaaccatagatcaagaactttaaattacatgaacgctcccggcattgtgcctatgctcaaaaaagtctattcattttaccgctgaaagtgaaattgtttgtcttttcatttcattgtccccctcccctctaagctggagaactacaatgcatgtaatctcatattctgctatctgcatggtctgattattgggtatgttattatgtccaggcaccttattcaactcctcgaacaagtttaggaccaactagtagtccatccccatcgcgcttttctcccattgtacaccagggtcctcctacaaatcttcctacactttcagttacaggtactaattatatagcatcatccccgtctcctgcagcatctggtggtacttctgcctttaaagattctcggttgccaagtccatggaattagaataactatgcttgtttctttcttgaagaatgcctgataactaggccaagtgtgcttagatccttcttcctcttttgagtaaggtaactctgagccattcatcgtatatctgtaggagattcatatctccctctcccagggtatgattctgtaaagtgaagaattataaaaacgttaaactgctttgaaaaattcctcttcatttatggtttgaaaattcatttttataattggtaactgaagcagtagctgtgattgtgacatattaaagaaaacgttatctgctttgttcaaaataaaactgtgtcggtcgaaatttaatacatattctcttctatcaatcaattgtgtataattttctaggtacttattttgcaaagccgacaacccaatttattgaaccgacatgcaatgggttgttttggtcggctgcttatctgaacgtaaactaatttaaactataacaattttagttaatagtcatccatttcttcaatttcatgtaagagattgtgaattgtttttttgtcctatgctacaatagtcctcttctattgagaaattaaacaatttagggttcgtttaacgccgtattaggttgtattgtattgtattgtattatattaaattgtattttatgcaatatttttatgtaa

SEQ ID NO: 117818 - DNA, 2617 bp, Cannabis sativa
ctaatctttctgtttttgtgtgtgtggttgtgtttagatcagatcattctagatctgatctttggtttgtgtttaatctgggatttctgggggttttctgggttgattaaaacctagcttcgagtttctcagagagaaactctctgctagggtttcgagaaaatcagagagtgagggagtgaatgagaaggttctcgattccttccttggttttgttcaaagacaaaacgaggccgttttgggatcagactttgaaaagtcaaagggaacagttaaaggtcgaaattgaccttggaaattgatttgtttgttttgttggtgtaggggcaagatagtaaaagcctatcttaaatttcctacattctggttagtgagatttctcttgacgtgtttaccgtgcaattgattctacaaatcatttacaatcacttcattctgccatctgtacaatggtcccaaagagaatattattctattattgtttaatcaatagaattgcattctatacaatccccttctctataaaagggaacgattacctctgtaatggattgagttgagcaatttaatattagagaagatttttacaccttattttattccttttatcttggtatcagagccattgacttgtgttaatggatccttcaaccgaccagtcctcagccacacatacaccacctgcaaccattgctgaaagaacccctgtacctgatccttctatttctgcaccttctctagctcaaactccacctaccaattagactcattttaaaagtttagctcttctcaccataaaacttgacaaagccaactatacctattggaagtctcaagtactccctgctctaagagcccgtgatttggaagattatactcttggaaccaaaacctgtccaccacagtttgttgatcacaccactggaggttgtatcccaagtgaaactcgctaagttaatctcggctatgccatgtggcgtcgtgttgatcaggccattctaagctagttgctgaactctatttttgagccaatgtttggtcatgttgttcaatgcgaaacctcctttgatctttggactacccttgatcttctattcactactagttctaaagctcccacccttcaactaggttttcaatcttaatgtgcatgactatatgctcaagatgaaaaataccgctgatagttaatctgctgcaggacgcttatttctgatgatgatttgattttgtatattcttggtggtcttggatacgaatatgatcctgttgttaatctaacatctagacatgatcaagttaccttgcaggaagttcaatacatgttgcaaagtcatgagatgcgcctagaacaactcaacacctcctctggagatctctctttacctactgccaatctggccacacagatacaaaaatccctcactatgggcagctcttcaacctcgcaccaacaatcaactggccgctctttcataccctgcgatcgaggtcgtggtaggaagatataacaacatcaattgtcccatttgttagatctgcacgaggcctggtcatgttgcttcaaaatgctaccattgttttgatctatcctttcaagccaccaactcttcttcttcaaaccagaaccagcatcaaaacactaaccaaaataccttcatcatcaatgaacaaaacaatcatcaacaagcttatttcactactaccaacaacctcagtgacagtgcttggtatattgatataattgaattaataaaattttaaaatgaatgttaattaagatataaaataattataaaataatgattaatcactatattagtaattaaatggtttattttctggaaatagagaaaaaatatatgcttcttaattttgacatgtacacattgaaaagtatatcatagttgtaattttttaagctgattcgagtaaacacgtgaccatatattatttgtaaaatttgagagaaaagagagaaagaaaaagagagaaagggagtaagtgagagatggaaaagaagagagagagagagaaataaacgtataaataaaagtattaaaatataccaaaataaataaaaataaattgaccaaattatttttgacaattacactccaacggttaaattccttaatatttattattagtttttcaaaaaaaaaaaattgctaaatacaagtaattctataattttttctaaaaaaaagtaattctataatgggtaaattgcggcataaatacctaatgtttcagattttatacacttaaatatctaatatttatttttggaggcaaaaatacctaatgttacaattctctcacaccgttactacaacttgcgttaattcataaatatggagggcccaaatacattacatttatttattttattttaaaatttaatattcttaatatcaaaaactaaatgctacttatttttttaaaaaaataagagagatgcattactaaattaccatagctgagtgaaccggtgcagtatatggaacaggttatcgaattgaagtgccaatatcatgtgaaaaattgttatgagagctagtattttttttttttttaaacaagtaacatttagtttctgatattaagaatatta

SEQ ID NO: 117819 - DNA, 1807 bp, Cannabis sativa
cccgccctggcctcgtggcccctcgcggctcagctgcagccacagctggaattcgccgccgccgacctggagcaattactgccaaaacaacctccaccggtcacggcggcggaggagctaccaatttgctgagattctacaccgaagacgctcccggttacaagatcggtccgactatcgtcctcgtgatcagcctctgcttcatcggcttcgtttcggctcttcacgtcttcggtaagctttaccggtcttagattcgatcatgcgaaatcgaatcatctcatcttctcatctctgggatcgtataaggtgtttcagtcttctttgctctgtaaaaatggtgttagggttttaattttagtttggtgtttttagatattttgggatattttgatctgaagctaattaattaattaactaatgagttttgtatttgggttttattatctttaattaatttatatatcatagttttaattaattttctctttacaattcttctgattatttcttaatttctttttgggtaatgagttgctttccaattaaacttaacacagaggaattaaagattaattgataattttccatttttaaaacttatttatttttaaaattgatataaaaataggttaattacttccaattaacaaccaattagcattatgtgttaatctacctaacgcttctaatttccttcaaaacactgataaataatattatgttgtggtaatactctatccattgttaatcaattttttattttataaattagggtggttttttttagtaacattttgttttttaattttttaattagaatagtagaattattttttttaaaaaaattattttttaaaaaaataaaaatatcttttataattacttttgttttttttttttttgttttaaataaaaatatattttacaagtgtaaaaattatttttatttaaatcaggttgaagtctgaggttagtttttaaaaataaaaactaatgaaaagagtgttgctaaaccacacctatgcctttcatgaacataatatttactttgtaaaataatttaactagcattgtcttgaattttgatttaaatgtctaatgattaaaaaattatttaaataaattttagaagttttttatttttaaaattttgattcatatttaaaaaagattaattaaattttcttgcctcttgaattttagtatataccaaattatgaatattttaaactattgagattcttaaatctaagaatatttatcctattttatttaattttactaattctgtgattgttcatctattaaatcatagaaatctgttaaattatgaatctcgaacattgatatgtactaaatcaacttctatgaactttcatttaaattttctttactaaaactaaaaaaaaaagtctttagatttaacaatttcataatttaagaagattttgaaccttttaaaaatttaaaaagtatgatttggtacatattaaaatataaggattaaaaattctaattagctttaaaataattttaaatatattttttctaattttattaaacatgtattttaaaaatattttaccatttcaattagaaaggtagaatgcaaatgtgagtacattgagtacgacaccaaaacgagtgataattcgcaccaaataaatatattagatgagttattattattttttttttttttgaaagaaagtatgtcattaaatcaaagcaaatcagctgttacaagaggaccaataaatctaggacaagcatctgcccacaaatgaacccctgaaggactagt

SEQ ID NO: 117820 - DNA, 2370 bp, Cannabis sativa
atcatgaaataaatcatgagaaccatgcaacataaaatattatttctgatctttattagtaagtaaatctgattatatgaaaatgagttttatttagggcataaaacccaacactcttatcctaaggacgaatttgccgcatctcgtcagttaagtggcgatcgactcatttacacgaggtaaggtgaatcccacagtgaagcgagctattttggagacagctacttttgttggtagtgccatcgtagatgcacctcattccaataccttggtaccagtactggattcaagttgtagtcataacgtgccaacttgtaagttctgggttctagcacttcagccaagatatatggtccttcccaattaggcttgagtactcctgctgctgcgtcttttgtatttaggaatacccattataataccatgtctccaggcttaaatttcctatctttaaccttgaagttgtagtattttgtgatcctttgctgatacgctgcctttctaagctcagacctttctctgatctcttcaattccatcaagagatttagccagcaactggtgattggtttgctggtcgtatgtatgtcttctatgggatagagatgtgagctctacgagtatcatggcttcatacctgtaggtcagagcaaagggagtgtgacatgttgctattttttctgtagtgcaataggcccatagtacttctggcagttgttcagaccaattcccttttgcttgctctaggcatttccttagcgtatccttaagattttggttgactgattccacttgtttgttggcttgtggataggcgatggctaaagaactcttaatgatttcatgtctgatgtagaaatcagtaaagaggttactgtcaaattgtgttttattgtccgacactatcttctatgggagttcaaatcggcaaatgatgttcttgaccacaaaatcaagaaccttctttgatgtgatggtgactaagggctctactttggccaactttgtgaagtagtcgatcgcaaccacagaatattgaactccgcatttccccttaggcaatgagtctatgaggtcgattcccccaaacaacaaatgaatagggtgtttacatagcctgggtattttggaaaatctctaacatttgtcacactttatacgtagtccattgagtcttctgtcaatatcggccaaaagtaccattgtctcaagatccttttttagaggctttgcccctagcatggtttctagaaaagccctcatgtaccttgaccatgaagagtttggcttcttcctttgtgacacacctcagatgttgcattgagaagcttcttccttcggttccacactgtagttaaacactatcacaaggcctacctagtttatcaattactctaaccgccatattcaagtgtgtagctccaaagttacaatacaaaaaaaaaaaggagttattaatgagaaaagttgacctctcaccaccgacggacaagctgcaacgtcaggctgagtaatggaaaacaccaagcaagagcagattttgcctcttccctagattcttcttgtttcaattggggacaattcctcttaaaataccccataagtccacactgaaagcataccttacaattacactctcttggatgatgtttgttacaacgaatgcactcagaagaagtataacgacctccaaggccaccctgctgaccaccctaacctaagttctctcagaacctcttgttatgactcgagcccaccgatgtcgattgagctttcctcttctaatcaaccaatgaatcactgcacccctaccaaaactagaagtaggagtagtagtgaccccactaacaactagagtccttcaagcctcctaaataaactctacaacgctcttagtccgtagagcttgcatcacatctaggtctcctagaaaaattagaggtccttgcatccaaaaattttcatactttgattccattcggttaccagcaatacatttattatcccaatttccatacagggtgacgtggcaattacatgaatgacacaaggagaacatgttatgatcttgacaggcgatacacttcatgatgtgtcgtccaaggtgatttatcattcattaacaatttttttgaaaaataagccagaatatccgaacagggtatatatcaccgttcaaaaagcatcaactttacagccagctcgcatacataagccatagtaaatgtggctggaatatcttcaaagacacattccataaatgttcaagcatctgaatcttgatcacatccctaattttgtgggataggttcacatcaataaggaataagaggaaacttcctaattttccccccccccccctttttttttt

SEQ ID NO: 117821 - DNA, 2269 bp, Cannabis sativa
gaccgactttcagcgactaaatagtgactaaaaataatttgtcgcaaaaaattttgggtgactaataaatgagttttaatgaccaaaaaactagtcggtgaaaataagtttttttgtagtgcaagttcaagatagaaaattaatgtgtatgaaaagatatgagtaatggataatgactagctatgaaactctatctagaacttgaatgaaaatgaaggtaaactgatcatgcatttgttgtgaatatggagctgacaaaatatgttttcaaaccccctaatttatgaaaagatgttttatttactgaaactctgttggtcctaggctacaagtgtcctaaaagtacaaaatacaccctaacttgtacccatgaagtcaacattccaaggggtagtgcaggtagtggtcgccaagtgttagttcgtaattacacctgtagatctggtctttgttaccctttgtatatccactgcttactaaggtattgcagtgacatgggagcccttttagttggtccccctcatgtacatcgtatggggtgtcccttgcaatgcatctttgtacctggcaccttagcacttagtacctagatgttttttagatgttaaattggagtctcatctgttgaacccttggtgagaggttagtagcggtgataaaatctctcttgtttgcttcaaccttgttcatatgaatatgagtacacaaagaagaggtctcgttccaatggcatcatcaaatgagaacccatagctgtaatagttaatatagtaactcaattattttagaaaagctaaattggataattaattgtaaaatttcttttattacatactttatacgtatagtcatatgaaatatatatataaattaattatttattatatatagtccggtttggtttaaccattagttacttattatggaccacaaccaaaccatatgaatatgagtacacaaagacgaggtctcgttgcaatggcatcatcaaatgagaacccataattgtaatagttaatatagtaactcaattattttaggaaagccaaattggataattaattgtaaaatttcttttattacatactttatacatatagtcatatgaaatatgtatataaattaattatttattatatatagtccaatttggtttaaccattagttacttattaccgaccacaactaaaccattacacggtgaacggtctggattaatcagaccactaaaaatggtatagtcattatgatctatagaggttcaaattgtcacggtctgaatataaaccccattttttagtttcgttgaacaaccctatcctaggctccaaaagcaaaggatcccccctcgtgatggcccttgaatctgaggtcaccattaacaagcgatccccctcatgagggttgctcgcatttaaggtcaccaccagtgggggaccccccacgtgaggggacgtcgcatttgaggtcagcaccagcgagaggcacctccttgtgggggaccctcacgacctgaggccttcaagcgtaagggagccccttgtgcgagttcctcgcatctcatggtaatgctgtgcgaaggagggtcccttcggggacctgagtattcaatgaaaggtagatccccacatgatctcgtgtgtccgttcgaccaagtatttttaagtgaagaactaaattgtctagcaatatgacatctcgtagtaaacctgagcacctagagtaccttttattataggaattaaaaagtctatcctaactgagcaacatatttgttaaatttgagtgtatgagctacattttattactctagtttgtaactataatctttgtgattgagtatagatattgacgacctcaattattcgaggttgggcgtagttaatttctataaattttaacttttttttcctatatttctttgcatatttttcacttcttggtgaattatgccaaacccattagcatttctcaaatattacacatgataatactatttttcaaacgataatctttgtgattgagtataaatatagacgacctcaactattcgaggttgggcgtagttcatttctacaaatttcatcttttttttttttcctttttttttcatattttttaactcttggtgaattatgtcacaaacattagcatttctctaatattatacatgtaggaatttactgttttaaccctacaccaacaaagataacaatatcagtattaaggtcaaaattgacctttccttgtctaagtaaaacttagacca

SEQ ID NO: 117822 - DNA, 955 bp, Cannabis sativa
gatgctctaaataaagtattgattttggttttaatgattatgaacaatgatgtttaatgtatatttagatagttcataatctatgtgaatgtttaacagtcaatactaaaactttgtttggcactatgtggtacactacctttgttacaatgtttatataaaatgtgttatgttcctaagcgatcggggtttggatttggattcgggttcaagcctgaatttgggtttggtttcgagtctagatttagagtccaaggttcggatctgtggtttgggttcgggtttggtgtttgggaccgggttcggggtctgggattgggtttggggtccgacgtccaagtctatgttggggtttagggtctgggtccagggttgacatctggggtcggggtccggatctgtgtctgtgttcaagtctggggttcgactagtccgggtccgtattcgtgttcgggttcgggtcgagggtacggggtctgagcttggggttcgagtgtgggtttgggtcctagtccggagtcctagtctaggttggggttcagtatacgggtctaggtcggggtctgaggccgggacctggtccaggatcccattctaggtccggggttgggatcgagatccaagatcgagtctgggtccatagtaagggtatgggtcctagtccaagatccggggctaaggtcgttgccgaaattgaccctagaccctttttaaacattataatataaattattacgagttatttgttatgtattaaataatatgacttaaattttattaaaatttatggtcgtaataattaatttaatataatgttttatctaaacataatattatttgttatttaatacaatacgatccttatacggcttattaaacgagtccttatagatataggtggcgtttggtaacatttttttaatcaattttctatttttaaaagtagaaaagtgaa

SEQ ID NO: 117823 - DNA, 616 bp, Cannabis sativa
  modified_base (545)..(587): a, c, t, g, unknown or other
acaacgaatcacaagtggctttgataccatgttagaatttgggataagatgaatgaggttccatctcaaaaccaattgcaaaagagaagagtagcccattcatcttatatatgtcaatttatttccacacattagcaatgtcggactaactctaataatcctctagctttgaatacaaagagaaattatcatgctacccatgcgaagacaccaaaagccaatcgatatcacaccagtgacccaacatgaaacataagtaaaatttctcactgtaaacaaaactaatcctactacaataacaataattgagaattgttgcaacaccattattaaaactaaaaatgacaaaaataatatatgaaaaataaactaaacgtgaacataaaccaagatccaaatgttagagccacaaccttattgagaactcaaaaaccccaaaacttcaatggtgaacttgaaccgttcaccccctctaaatccaaagggtaaccctgtcgatgagaaccctagtcccgcacccttggatagtgttgggttttatgccnnnnnnnnnnnnnnnnnnnnnnnnnnnnnnnnnnnnnnnnnnnatagattagaaataacatttaatgttgca

SEQ ID NO: 117824 - DNA, 2095 bp, Cannabis sativa
  modified_base (1387)..(1393): a, c, t, g, unknown or other
  modified_base (1436)..(1437): a, c, t, g, unknown or other
atttttgtttttcaaaaacaaattttttaaaaacaaaaattttactttcattttgtgattaaaagattaaaaaacaaaagtgttaccaaacggcaccaatatttttgaaaaattaactagtaaagataaaaaaaaaattacgagtcctaaaaataaattaacataaaaaagaaatatgatataaataaactcctaataaaattaacaatattttttgctaaatcagcaataatataggaatattatttaagataaaaaaaaattattactttatttttattcattcattgatttctattttctactacacagtacataataatacccatatagccatgtatagatcaaaggtttagttttgcagcactaaaattaatcttacattaatatcttattttacttattatttatgagtagagtaggtaagtactgttataatcatatatatcaaacacaaggcttaaggcacatgcaacgacgtcgtatcttggagcatttgccgtatggaaagccctcactttggcatatttccacacaattgtcgcgatataggcaaagtcctgagtatttttcactttccacttcacatgtttttgcttcagttccactcagtgatatttcatctgttacaataattaaattattatacaaacaatattattagtagcctacacataggctaaagtccctccgttcctgattattactaacatatttatataccaattacttgaacaaagcaagatttgtatttatatatatataaacttacgggaaataagaacaacaatgagcaacaacactgtcaagaccttcctctccatgccttattagttaattattttagtcaagtttgaaggttcttatcttccttcttctgtatatatataaatatatagatgggttttatactaactagtaaataggtatcaagcgtacgttatatcttgtttaatgcatattatgaatgtgaacatggtgaaccataagtcatgtagaagtttatgacaagtgtcaatacttgagatattttgtaacattcaactttagcattaatgatcgataatattatattttcacatctatatctatatctccctctatgtaaaacgtgactatcatacgtttttttttagagaaactatcatactttagtttgtatttaaaattacattggtaaaaaaagttatacaagtgggaaatttcttctatttaagaaagttcattatctattctagaggtatagttagttaatctataagtctcaacattaaagtgattgatatgaaagagatgttttagaaagaaagctagacaataaaactttaatatcaaaaagataactattagagttaatcttacattactaatgtgtggaaataaattnnnnnnnataagatgaatgggctactcttcccattgtcaattggttttgnnatggaacctcattcatcttatccaaaactctaacatagtatcagagccacttgtgatccgttgtgagcccaaattgccaccagtccaaaaaagccatttgtgatccgttgtgagccaaagtgctgccagtccaaaaaagatacttctgctatctcccctttaacctccatttgggacctttcagccaatgtgtgccaattttcagtattggagtctttgacctctttcaaaatctacgaattttccgacgtgtacacccacaaattttccaatatttggcattgtgggattctttcaaatgtcacgtttgaccttgtggtttcttaaaggtcgttcgttatatccacactttccaaacccaaacgtgaggaaggtgtattagagttagtcccacattgctaatgtgtgaaaataaattgtgatatataatgaatgagctactcctcccattgtcaattggttctgagatggaacctcattcatcttatctaaaattataacataacccctaattcattcatgtacattgtctcgccctctaaagttgagaacaaagatagtgaatctcactacaagaatttggattaataccggcggtattattcccggcggaacagacccgcctctaataatgggggtattaccggcggaattagta

SEQ ID NO: 117825 - DNA, 825 bp, Cannabis sativa
gatatatattttttctttattgttaatttcatgaaggtagatcatgtgtgttatattctcaccccaaaggggagtttataataaccagttcattatacaatattttttaattgcttggctcatatagtttgatgaagttttaatttttagattatattaactcatgtttttagcaaaacttaagacaaattttacagtatggattagtgatggtctaatgaatgatgatccttctttcttttattttgtacgaaactaagatcacacgcatgcgcattacttaattaaatgtcaaagtttgcgactaaatacaatgacgatgaatataattgtaaaaatgatgagaagatataggagaaaaaatgatatataaaaaaaagctagctttaaataatctgatttagtatatgaggaaatgaaaatacatgcaaataaatcttttgtttttctttcaactttaatgatattggaagtggaagataatggaattcagatatcaaaaggtcttttaagtgatgattaatagcatatatatatacctaaaaatattgaaaaaaaaaacctagtggttcccaaaattataacatgtacttgttcgttcaatgaatgagaataatacacatatactgtttttagtctaatacattaaaacatgtgatgaatgacattcacaatgaaatgttattaattactgttttcaagagactaataaccgcaaaatgcatgcacgcagtgacgaagccagaaatttagttgagtgagggcttgaataaatattaagtcaaaactaataaaaataatgataaatgtatctttcaaattttc

SEQ ID NO: 117826 - DNA, 1083 bp, Cannabis sativa
  modified_base (55)..(65): a, c, t, g, unknown or other
ttgtaatttttgtgactaatacatttagccacggactttttagtcacaaattttnnnnnnnnnnnaagtaagattttttgtagtgttcgtagtgcattgttattgatgatgcacttgctagagtgcaagctgccaaagtttccagaataataggaaatgtttgctcacggtgtgatttattatacaaaatgaaataggaaaggtttcacttgataatatataatttcaatggtggctggatgactataatatatagtcttgagaatatgctgcaattgtcatttggtgccaataatatagagtgatgaaagctacatttgtgtttttaaagactctaaacatgacctattttcttgtggtgggtgttctatgtatcgaaagtttctgtcctttttggctgagggaatactctttggccacagttactaaatatggttagattgtagtttcattaaaatgattctttatttttgtttgctgagttaactattcgatagtgccaccagttatttgaataaaaaaaattaaatttaagtttgatcaagatgatggattcttgcacttaatatatacaataatgttcttcgagccagccaagtttttatgaagtgaaaagttaaatttagtattttctgacataaaatatgataaagatatgtcattcttggtgtgaagatgcagggaagccaagttcttcggacaccatcccaaaatttttaaggcttggttaaagagaagattgcttgtttaggagagttttaatgattgaagattccttaaactaatgaaatttaaataataataataatctaacataaaattaagtatacgttcattacacgtaacttgtaatgtagttagttaataaatcacagaaccaccacgggaacattagaacgattggaaaataactattaattccagtgagattgagaaaaacaatgaaatcgacgtcaaataaataatcatggcaaaataactgtataaaaacactaaaatatatcaaacaaaagaaaggaaaacatgataaaaaaaaagtaagaaatgttctgcacaacctcaatacccaatgcaatagcagtt

SEQ ID NO: 117827 - DNA, 1113 bp, Cannabis sativa
accatatacacactcataataatacatcacaaataatattttaatacacaaataatttaaattatacagagtaatataaaaaaactacctaatttccttaccttaaaattccaaaagtgagaataattgtgtaactatgatccttgaaaagttaggtgcagcagtatcgctaactgaatattgtctttcactaaaccaaaaacaactctaattagaagatgacacaaaatcaaaaattattctggacaatgagctttgattaaacatacctcacttctcttaaaaaaaatacactggccgtcaactactataaacttcaagtgaagatgcgatcccaaagtttggctctatatggtcaccgagaccctcttttcactttatcattctcttccactataggaaggaaaatagttcaactatatataactaatttatagtcccctgactacatctattacctatccctactccacatagatctattttaaaatttaaaacttgctaaatatcatcaacaacctttttactttatctcgtaattgcttataggttaatataaataagcctactaactagcagtattctccctcatcttacattatctagaataatcttataatttgaaattcaaaatactaactttctaatattattcttaattttaatatcaacttattccttatttctctctccttcctatatatatgacctatatatatataaagcataataaatacgattattatcattaaaccaataaatgccacgtacctatttatatgtataacaaatttggacttctattttaccttacatatagtagcataaaaaaattttactgctttacacactcaaaactcggtacacgcctaacacctatttcataacattatttagtgtattcctagaagaattaaagggactaaaatctggtacattattaattatcttttatatattctatattagttcttttgcattaagaaaataaatgtatatctggagtcttagctaaacaatatctttaacttgtaacaataccaaaatattgtatttggtaaataaagcaacttttaacttattttagagaaatagccactatactttaataat

SEQ ID NO: 117828 - DNA, 1381 bp, Cannabis sativa
gttgaatcttcttattaataaagttaccattttccttcaaaaaaaaaaaaatagtgcacttaaacgaaaaaaaaatatatattgagatgatcactctagtgactctattgttatgtatgccttttagcattaatgtttataaaagtaataatgtatatgattttttttaagaaaatattatccatgaagtaataaaaattattgaaaaaatgtacaatgataaagttgaaaatagttttgttttcttttttatatttttctatattgatgaggtttataagtattcttatttatactaaaagagacttttcaagtcatccactatttactattattataaaaataatatataaagtgattgccaaaattttgtaatattaataaaaaaaaaattataattattattattataattgaaaagtaattttttcaattttataacaataatgaatgtgaatgactatcaataaatacaataattttgtaaaaatagttatgctaggaaggttaaatgtgctaataattactattactattatttagataaatagataaatgaatgtatacaatgtaaatattggttctactatcaagattatatatatattttattgattttactataaaatatttaaatttaaaaaattccacataataatacatggataatctgttttcttttaaaataaaatctttttatttgattttagatttttcaaagcatgcatattaaattaaaatcattgacttcaattttattttagtaagaactataaacaaaacaaatatataatttcaataatataaataaataaattatacaagatatacatatttaaaaaacttatattcctcatccaataatatatatagtttatatttgttagaaaaatcataccataataaaattcgaaacccatgaaaagaaaaataaaaataagtataatacaaaatatggtattgctgatcttcacttcatacacctatacatatagttgcttcacttaaattcttattatgaccattttgataattatttttatgaaattacactttctcacaaatttaccttaaacattggtttgaaataaagaagtgacagaattgatagccatttctcacctaataataattatgtgtagatataacatacaaaaatagtacaaaaatctgattagtagattaataaacatcatgttattattattattattattattatgcatacataaaataaaatattattatatatacatgtaaaaaagttatcttgtgaagaatacatatatatttctatactaggtgaatgtacgtgccgagccaagtttcatttaagattttggtctttttaagattgtgaatgtattttatttttaaagat

SEQ ID NO: 117829 - DNA, 1487 bp, Cannabis sativa
attccaatactttacaatgcaaccaaacaaagaaattgaatgaaaattattttctttccattccatttcatttcattacctccaacaaaacgccaccttttttctcttctctttttgtctttttcttttggattgaaacctatgaattaatttcttgttgataaactaattctcttttatagggatttaattgaacctatatttataaataagtttttcttctaattctttatagtttatattaatattcgaaagaaccatatgaataattaaatccaagtgttcgtattgatttctttggaattttggatttaattttctaaatttttaaattttttctaacttcaattgaaagaacgataatattttagtatttaacaacttaaaattagtttatgtgggattgatattaaatattacttattgcgatacgtgctcttgcatactggttataaaatctataataaatacacatatattttaatattaagctcatcaattataataaaaatacaaaaatatggagcaagaatttgaacttgtattagaaattatgttggtctatttaagaaaaataggttagtccgaataaagcacgacacaaaattatcggacttgcgggccgtgttcagggtcggcccaagtattgggcagcttgggccattgcacaagacccctatttttttaaggcccaatttttttcttttttcttaaagaaaaaacctattttttttttctattatatatacataaataaaaaatttataattgaaaatttatgaacgatttttttttttttttaaaaaaaagctagtaatagaattgtagttttaattatgtattttttttaaaagcccaattttaaaattttgcacaaggtatccaaaatgcttgggccagccctggctgtgttgggcctaccctataaaattattacacgacacaatacaacctatattttttatggcacgacatgacacgacccatatttttttatgggtcagcacaacatgatgtgtattttaaaaatccaaaaaatatgaatcaagctagtacgacacacacatatttacaactacgattctgacttcaaacaacctctaatcaacattcgaatcacttgttaaatagaaacaactatctaattgttatcactctctcaccatcatcacaccatcaccatctcgacccaaagggagcctcacccctccatcatctcggcccaaatggggcatcatgcctccatcacctcgaaccaaatggcgatcatcacgcctccatcacctcggaccaaaatggtcatctcgacttcaacgtcatcttggcccaaaagggaacctcgttacctcgacccaaaggggcctcacacgtccatcaccttggcccaaagagggcctcaacatgtttgtctttacgacgtaaggaaatgtaacgccctaaataattaggcacgctacccaaaaagcttatgaaaccctaatccccta

SEQ ID NO: 117830 - DNA, 4621 bp, Cannabis sativa
gtcaactaacttgccaaaaaaagactttacagtatggattctcagcctaagagaaatagtcccttgtatcgttgtgtgaatactttctttatatcttaacgagtcaaaacatgcatgtaacatttccatgctgtattacatatatgttgttgctttttaagattgataaatgcgtactttacaaactagaatgagtaaattcattgttttgttcctcaaaccttctacggtcataaagtgaagaacaaaataaaaatgctattctcatgattgaagcattttagatgtacaaatagtgttcatgatatgcaggaaatcgatgtacaaatagcattaatgattgaagaagaaagactgttttttacattacaattgaaagacaaaccaccaaaatctttctatagcttaaaaaaatcaagaaagagaagcctaaactcatttctatttccaaaattttgatatatcactcaaattatctgtcactgcacacaaagttacaagaaacaatcatatctcagtactataactagcaacaaaaactcacaactccactcaactttatgtcggcctactgtacttcagctaggccatgtttgcttgtgttaagagatcacaagaatcaaaatttcaacttaaactggaaaatgcacagaagatggcatattctctgtcatcaatttatcaatggagaaactgagcaacccttttcgacgaattggactccacaagtgatttgatagacgataacaatctaagtgatgctcagggtagattctctcctggagcggctcacaaatttttggagatactaagttggaatatccttgaatgttagagcagttccaggaagatgtttctgaggtggtggttatactaagatgaatgttggataagcagatgttggcaaaagtgtctccttgtaaaccttcaaggattccagcatattttatgttcactcccactacttccttgatagtaatcctttctattaaaggaagagcctttgggtcataagattcttttgggtgctctccgaactgactgttgaaccttatagctgtctcaacatcaaccaagttcagatttgatacatatatatctcttacatatccccctcttccaggtgatgtctttagtccaatgcctgttccagaattgaaaatttggatgttctctgcatgaacttgtgatacacctccagacatctcacttccaatcccaatgcctgagcctctaccgctttctccaatgagcctgtggatgaaaatgtttgtactcggacgcccatacgaaataccatactcgtcccatccacttttgatggccaccaggtcatcaccagtgctaatatagcagtcttcaatgcaaacattgtcagaagagtctggaagcattaaaaaggatcagttaaagtaacaattcagccgcgaaactttgtcaatcatagctgggaaattttcaaaatggtagagataaaaacaaacctggatcaatcccatctgtgttaggcgattcccgaggagcaaggattgtcacattttggatagtaacttggctgttcatccaagaaaaactctttgaattccagcacacaaggaagagaagctcaattcagccttattttgatagaaaatagttacctgcagtatactggatgtatggtccaaaatggggaatttatgaatgtcaaatttgagatgactatgcctgttgagttcatcaactcaaccaaatgcggtcgagtataattcaaggtcttgttttcaaaccagtcccaccagatgcttccttgaccatcaacagtcccattatcacctacacacaagatcaatggcttcaaacacacaaaaaattgagcatggaacacagcggttcgaccatcttaccaacctgtaataataatatctgtcaaattgcgaccatagatgaggcttctatgtcttctaccaggcaactccctacctcggccataggagggcaggggttcagtgagtggccagtcatcagacctctggaaaaagaaaaaaaaatcataagactgctaatgaaataccacaatgattaataccatataagacttgattaactcatcctcttttgtttactaagtgaaatagcaatgtcagtggaaatattagtcatatgcattaggcatagactcatagattgtaaaaggaaaagagaaaacaaggtacttggcaaccataattattaatttgaattgtttggatatgtttatacattacctgtgaaccaagaattacagcatccttatctaaccagacggtaagatggctgatgagatcgaagcttcctgtcaaccagcgtccggcagggacaaaaagcttggccccacccttgtcagcaaatgaattgaggtagaagatggcattttgaaaggcttttgtgttgagagtgaccccatctccaacagccccaaattctgtgatggtaacactgtgaggtcttatttccccagacccagagtaatttcctcttttgcagtagcatgactgtaaactctgtggacttccattgacagcccatgtagcatcatctctcaaacccaacaatgtattaataagaagaagaagcacttccactatctacacattttatttgattcaagaagaaagagtcatcagatcaaaccacattttttattttcccaagaaaaatgtctgaaacaaatataaaatcaacaaaagtatttaaaaagaaaaacaatttgggagtcagccagatcctaaaatttctgccaacaagatgaatcaagttttcatgatctctctctttcactctctatagatctttgagtgtgtcagttcaaagctcaaagctcacagctcagagaattaagaatagaaataacaacttttgaatgtaaaaagcaaaagaaaaaagtaatataagagagagagaggactcacataaaaagatctcttcatatgagtgagatctgttatttccagttgcgcaaaaacaccccaagaaggaagaagagtgttgggttttctttattatttgatatttgatatgaacaaaatatgagcatcagcagcagtaagctccaagctccaagctccaaactacacacacccacataaaaataatggatgatggtgaccaaccgaccgttgctgcccgccaaaatatgagcagtagtagtaggagtaggaccctatttccacctttgcttttgctttgcctttgtatgtaataatttgtagtatgtatattctatgtatatgtatcaaatctatcttctcatatttcaatttccttttccagaactcacacactctgcagccttcttcctattcctatatagagaacaaatagtagcttcacccagattaatcattatatatatacatatatgggatctctctgtctcatcatggcatgtcacattcaaacatttcataagtttctcaaaaaaaagtttctttttttccttgttatattcctatgctgtaaaaagaaaaattacagaggctaggccaataattctcagagactaaaaccaaaaccaaaaatatccaatctttttttcttttacttcttcttcttagtttaataattatgttttttcttgttgttgctgttgtgagtaataataataaataatgataggatattaggatcaagtgttaaccaaacattttggagtggagatggggctaaactaaactatatatgtttgtaaagagaaaacggtaaagcattagatttggacattcaaatgggatggtggggactccccattcacatgatccaactctacttcctcatttgtccctctcctctagtactactttttattaattttccattattacttgtactactaccactacttttttctattagggttccctattccttaactttaaaactcatctaattaactctctaaacaacaacaacaacgtccctctttgagctgtttattccttctatcttttcacaattctgtgtactaaatattattctacattagactacttgtttattttaataaagaagtagttttagttttagctgtgaagcataatatatgcatggtttaaagagttgtttgaatgaagaagacaaaattagaagaatgggagagagagatgggagtggggggacaagggacaaggtccgaggtcgatcggacaagagaagagaggtaagagagaaagtgcggtcataatctttatgcatagcataattgaaaaacactagttataccagtcatctctctacatgtagtattattgatattctaaacctctccaaactcaccaactactatacatataagggtatccaatgttaatccctcacttttcacaaaatatattattttattcagcattgttattagatactagtggtgcctaacacgtgtcgccttgcaattggttagcgatactccctaaaagctattatattaaactatagaggacccgatactaaattagactaataatgatattgacacgtaagaagatgtttaacaccactaatactttttagtatttctttattttatttatttattttttttttgaataaaaagtttcattaaaatcaggcctcagcctggacaatgtcacacaagaaagaagga

SEQ ID NO: 117831 - DNA, 985 bp, Cannabis sativa
agctatgaatcaaaggtttaacattctcgaattcatagaagatgagggccaccccgcgcaccctagatttggcatcaagcgcatcctcttcctccaacaaagttttcgaaaaaccaaaacacaaccatttacctcttcatttaaaaattgaaggaagagccgattgagagccataccaagaggtagctaggtgcctcactagtctcgagaaacatcgattgcacacgaaaaaggatacgaacacaccatcccctctcggtcaaaatgggaacgggccatcctaattgagagaagaaacaaatatcaaaaaagatcgtgaagttgcggctaaggtttgtgcaactgcgcacatttattatagttattattggagaaatttgcggcaaaattcttttatgttttaatttttatacacttaactcttttatatttttctttggtagcaaaatccccttaagtttacttttatttgtaaatttaaggtttcagttagatattactgttaaataccaactggattactactgtatcgactttaaagttttactattacatatacacaagtgtatacagtggtcatcttgttaatatttaacggtaatatttaactggcgtgtcaaatttgtaaaaaaaaaaaaatataaaggggttttgctaaaaaaataaaataaagagattaagtataaaaattaaaacataagataattccaccgcaaattactcttattattatatatttgcatgaaaagaactttatttacttctagatgatataattcacccaccaccattaaaaactagcttatgtacaatttctactatttagtcaagtcttttgctttagtgacaagcttttgtttactttgaatagaattattgttatatagggtcatatactatacatatccattttttataggtatatatgtgacatatctttatatattaaaagtgtctatttaacggcattttttggtttaacaga

SEQ ID NO: 117832 - DNA, 1593 bp, Cannabis sativa
  modified_base (32)..(36): a, c, t, g, unknown or other
  modified_base (67)..(71): a, c, t, g, unknown or other
  modified_base (155)..(156): a, c, t, g, unknown or other
  modified_base (316)..(331): a, c, t, g, unknown or other
tattatttaaaataaatatatatcatacaatnnnnntaaaataaatatatatcatacaattaaaatnnnnnaaaataataattaaatatatgtactatgctaataaaatcatatacatacatgaaaatatttgtattatgctaacaaaattatannccactattatacatagcaaaataacaaataaatatcatctaagaataataatatactatataataggctaattaggatttttttcccgaactttaacatgtatcaaatcatgccccctaaacttttttggccgtaaaaaattccccctaaactattgagnnnnnnnnnnnnnnnnacttttgtctaattttagtaataaaattatgacatggatgaaagttcatgggcatggtttagtacatatcaaagtttgaggggcatgatttgacagatattaaagtttggggagcatggtttagtacataaacaatcacttaaacagtaaaattgaatgaaattagacaaaagtctttaaatcaaacagtctcaatagttcaaggggaattttaacggtaaaaaagttcagggaacatgatttggtacatgttaaagttcgaacaaaaaaaatcctaatcctatataacaaaataaaaatatactgtataacaaaatttatataccaacaacccacaataaatcataaaaattaaaaaaatcgatataactttcaaataaaaaagattttcacaaaactaatatagatatatatagcataatttaagtaatttactttgaatttttaaaaaaaatatgaaaaatgttttaaaagataatataaataataaataaagtaaaaaaatttgattttgctaatttaagaccatttactattatttctttataaatatctttagtgtataagccctactctctccccttatcttatttgatggttaaattttacaaccaacccaccaaaaatagtataagtagggagcatgaagcggacccttcattcttcatatctgaaatttgatagcataacaacagtcccaatcccatcacagctggatcacaaacaaaccatcgattttatttgggaatttaggtataacaatttttgctattttaatgtaacaatttattagtcaaaaacaaaataaacgttttaagctactttttctattttctatgtggggagggatctgtgtcacacctttcatgagtcatatttacgtaaagattaattaattaattatatatacgttgaaaattacttagttcacatttcttacatgcctagctagctatctaccaccactcaattcgagtgaaaatataacaagtcacgttaaaatacttttaatttttattttttttttcaaattacagcagatagagttcggatttaaattgaattttcagatgatgatgatgaatcatgtaaacattagctagatatgaagggagagagcaaatcattattacacatagctttgttggcatactaatattaagaattattataatatatacctaaacacaaggatataatattacactaatcatggtattggagtagtggctcgagatagtgatggacaattgattgaagct

SEQ ID NO: 117833 - DNA, 1611 bp, Cannabis sativa
  modified_base (1536)..(1539): a, c, t, g, unknown or other
aagcaattgataagatgaaccaaaacatacacaaatgaactaaaaatgcttctgtttttttattgatgttaaataaaatggattacattgaattggatttttatttagggcataaaacccaacaagatcccccatgacaattcaagggcaagaaaaatcactcattgtcacacataactccttccagaaatccaaacgaagagatctacaaggaggggcataagtgaaacaactaatccactccggggcattcctctccataccaaaacgaactatgatcttatggaaatccgctgtaataacttgaagatcccatccacgtctccaaaataaggctaggccaccttaattacccaccgcagacacagcaatgccttccagaaaacccaatctttgccataaatcttccatatcctacgaatttttcttagtttccatgagaaagattacgtcggggttggcactccgaataatactttggagcgaattcactacctcgggtttgccaagccctcggcagttccacgagaggattaacatgtcaaattggggggcatgattcggcctgccttcttggccatggaaaaattctcattaaccaactcaatgcacttttcagaacttttagcagcaactgaaggtaattactcatggagatcacatacaaatttagaagagctttgtagtggtaggttgttagatacctcccccttatttcccagacacccaccatcttcgcatcccagtttaatatcttttttggaagaactcagtttttttgaaggttcagagcaaagtttctttaagcccccattaagctctcgagcactagtgggctcagaaattatttccaaagctgggtcatgaaggccctctaatcttcttttctttcctggcccagaagctccagaaacagaggcctttttacccacttcttcattagatttaatgataatcccacacccctttcggttgggccttgaatctttatgggccaattgggccctgggatccaacacaacattaaaaaccatagccaagtgagaaaccttactctcttccacgtcagcaatttcctttcctttttctccagaatttgaaaaaataatgggaccaccaaccttcatgtcagaagcaatacgtttgcccactactacgtccttctgtccttccatttcatgcacatagagacctttttcctgaggaccagaatgcccctgagccggaaccaccacatttttctcgacgagagttcccccagccgccgcttttatagcaagggtatctctatcaaccccctgagtcttctccccccttgtttacttgtctccgcctccaccaaggcttccatatgaatctcagtaccgattaaggccggttcaaaatcttccaccccagcacaaagattttgctccaccacctcttgggctctgatgtccgttacttcccgattgaacctttcttgtttatattgggcataatcagagaaacaatctttctttcgggacccaagccgctgttgggttttatgccctnnnnaaaactcatttcatataatcagatatacttattaataaagatcagaaataacaatttatgttgcatggttca

SEQ ID NO: 117834 - DNA, 1987 bp, Cannabis sativa
  modified_base (214)..(216): a, c, t, g, unknown or other
  modified_base (412)..(413): a, c, t, g, unknown or other
taattgaaataaagtggcaaaattgtaactagtgaggcccacatatgtggccggccacttagtgtatttttgccattattttatctttttttaatttgtataattaaatcataaactctagctgaaatactataaaaggaacatgatgctctcattttcatccaaccccttcaaccaatctaaacttaattttctaactctgtcagacaactannngatgagagactcctttcatagtgatttcgacccttcttgttgttcttcatcaaatttgagcatttagtgatagagtatcatgctcacacatagctagtcaagtattcaatcatagtgcgaaagatggtggttaaccaaactgaaggagaaggagatctaggctcatatattgttattactctacgacagaaaggannaagggttagagatctgagcagaatgagtcatattattctgctgccatcaatgtaaagttttctaaactttatatgtgtttattttattattttagagaattcatatttagggtattaaattaaatatacatgttagtaaatctagatcctagtaaaataatccctaacaaagtggtatcagagccagatcccaacattagccacgcaaatgaatcctctgaattctcttaaggtgatgagcctctgtataacctcgctattgaagatctatatggtgccttgtatcaaaagtctacttgataagtcaaatggcgtgtcccattggtgattgcaatggtacaagatggagatcttatttggtgtcttatgtcaaaagtcttcttgaaaatgaaggtcaggcggcatgttttgtttggtgatagcggtggtgcaagatggaggatcgtttgaggggaggctatgtggtcctataatttaaggggaggattgttgggtgtgcaaccaaagcgctccacattgattaggaatgggaaagatcgtgggtatataaggatgaacactatctctattggtatgagcctttcagcaaggtgcccatgagcaaaactgtgagagcttaagctcaaaacggataatatcatacttggagtagagatggatggtgtccaaagatcattaacaattattattattattataagaatttttaatgtgttgtgtttttgtgctagtctattcgcgtgcttacgtattgtgacttgtgtcttcaagtttgtcgtggcgtgtcatgcttatgtccattttttacgtgtagtgtcgtgccaattcacatcatcgtgttatgtcgtgctcaagcccatatttatttgtgatgagttgtgcttgtgcctctcggtcttatcccaattatgtgtcgtgtcaaaaaattcgattcgtatttataacattatttctaagtagttatcccaagcaccaaaaatgccttagtggcagtttggatgatgttatggcattactgtgctaataatttgtgtataatttaaataataaataatatttttgcttaccaattatcatcattattaaggcacgtcctctgaattttaaaattataaaattaaacaaattttttgaatattaacataataaagtagatgatgagaaagatataggcacagtctggttcccggtgacattcagctttccttaagatgacgacaatcattagtgtaataattaacgtcattattgtgatatatgatttttttttttttttgaatcattgtgatatatgattttaattaaatctagctatttgcatataagattatgtgaattaaagttggctacaaattaaaataatattagatgtattttttttaatttattattgtgagtaaatggctttgatagaattgaataattagtaattttattacttgaattttaaacaatactgattttgtcatttaaaataggaattattacatagaaaatataaattgatattttatttacaaaaatacctccataagataaagacaacattcataccttttatgtgattttaatta

SEQ ID NO: 117835 - DNA, 1966 bp, Cannabis sativa
tcagtcatcaatccaggaaccagccagagtggcgtactcgtgtataagagctattatttcgtgggtgtaaagacccaatggaagcttgaagcagggacgtcacatatattgttatacacaaacactgcaaattgaataattatctcgatttataccaaatttaattacagagtgtggtttttcaaatacacccttatagtttctaatttgtttaagaagtgatttttcaaaatcttaaacaaataaatgagtttatattctttttgaatttgtattttgatcaattactattttcaacaatatatttttaaaaattctatgttagacctcatattttgttagaaaaaacaaaaattacaattagccctgatttatgtttatatcatcggccatatgtgtggcacatgtataattaaaattaaaaaaaaaataagatatgtatttaaaagaagaaatcattaggctaaaaatttattaatgataaaaaaaaattaagtaaaaatcaacaacttttaaattattctcctttctaaattttataatacgtgtggtactaatgtatcaaaaatttgacagaactattttacgtgaatagttgggggattatttttaactagctaaaaaatttagaggcacaataatacataagtcatacttgagatacaaaaatcctaaataacttgtatttctatatactagtgaagaaaaattatgtgttgcaaatgggagaatcaaaacaaacgcggtgcagtgaggtgcggtttgcggttttgaatttaataattgcggttcaaactgcaccatactatatattacaaagtcactaatttttacaacataatttttatttttatttttatataagaacaaatatacataatatatgtatctattactttattttttaaagacaattcaatataatgacttaatgattattatacatgttatgatgttaaaattttaataaaattttttgttttgtattgttaagctttattagtttgatttttaaatttttattataatgtttgataattatgatagtgtaaatcgctcaaaccgcaccgcaccacactgtatttttgcaatgtggtttttgcagttttaagatctcgcagtgtggttgcggtttgaaaaattataaaaactgcatatgcggtttgatttaaaaaaagaactataacttatactacccgcaccacaaacaccccatgtatcatttaaggtcgaaagatctcattttatcaacatccatgataagtggacttgttgacacttgacagtgtaaatcattgtccaattatgttgaataatagtgtgataaaaatgtatttattcgtcacttaaacttaattagagcatagtatatactaaatttggtgttacactattattaaatttggcattaaaaaatatttttactccaaccataacattaaaaattatattaaaaaaatatttcttattattatattaattttttaataaaaaaaattaatatcatattaattaacaaaaatgacaataattattatatttaactaataatttaaataaacttactaattagattaaagataataatactgtaaaatctgcgaaactcgataaattaaaatatcatattgcaataaatattatattactgaagaaaaaatattacattcatgacgaaagaaattacattaaattaaatcaaacttaaaacacacacttgaaattaattaaattatattaattttgtgagttaccatattcatctcacaagtattcgattaatgcatttcgaaagggcacaaacatccaaagttggagaacaaggagaaggatctcaatatcagggatatccatatcacaaatctcaatatcagggatcacaatatgagggatcacaatatcgagcatctcaatattcgggacatggcgttgaagatgaagaccaacaatctcaagatcaaggtga

SEQ ID NO: 117836 - DNA, 4969 bp, Cannabis sativa
  modified_base (1129)..(1136): a, c, t, g, unknown or other
aaataattggaagtattggaattaaaaaaatagtaattgttgtggcttacgacacgcatcaggtatggttgggcattttaagaaagatttcccttagacaaataaagaagaacaaaagcaagaggcaaagcctgtacttgctcaggtgtttgctattactcaagttgatgttgcagcaaacccttctgtggtcactggtcagcatcttgtcaacaactcctattttactatactatttgactcttgggtagcacattcatatgtggatttgagagtgattaatcaattgggtagaccttgtgattttattgagataggatttgaaccctactgcctagcagggaattagttatctccaaaatgttgattaggtctatgcaagttagtattgaaaatagggagttgagtgttgacctagtagagctagaactaacatagtttgatattatacttgggatggactttctatccaagtattcaaccagtattgactgtaaacggaagatggtaactttccagcctgagggagaagaaccatttatttatgttggatctgttcaaggttcttgaatctcgattatttcagttttaagggctaaagatttacaacacaatggatgtgtaggatttttagcagttgtaattgacttcagaagacttgaaacatttgggcctgatgatgtcagagttgtaagaaagtttcttgatgtatttcccaaggagttaccaagattggcgccacattgagagatagactttgtaattgatttgtcacctggggcagaacctatttctaaggcaccatacaagatggctccaacagaacttaaggaactaaaaatacaagagtaatttgcggcataaatacctaagtttaactcccagttgcaaataaatacctaagtttagtttttggtggtaataatacttaagttataattctagaacttttataggtacctggttattaagtgttaagtaaattgccacgtggtattttttgattggtccaagtcattaattttttattttttaaaaaaaattaatttaaacataccaataagaaaatgacacatggataatgacttaatatttaatggtcatgtacctacagagttctaaaaatatnnnnnnnntattattaccgccaaaaattaaatttaggtatttatttacaactgggagttaaacttaagtatttatgccgtaaattacttaaaatacaactacaagggatactggatttagggtttactcgacccagtgtatttccttagggagctccagttttgtttgtgaaaaagaaggatggatcccttcgaatgtgtattgattatagggaactaaacaagctgacaatcaagaacaagtatcgtcaactctagggtaagactatattctctaagattggcttgcgttcaggttatcatcagctaagaatacaagaggaagatattctgaagactgcaatttggacaaggtatgatcattatgagttcttggtgatgtcgtttgggttcacaaatgctttagcgtgttgaaggatttcctcgataaatgtgttatagtatttatcgatgacatctttgtatactctcagacagaagaggagcatgagcaacatctctgaatggttttgcaacgactgaggggtcacaagctgtatacaaagttaaaaagtgtgaattctggttgtcagaagtgtcctttttagggcatattgtcgaaaaagatggaatcatggtcgacctgggaaagattgagtcagttaaaagttggccaaggccaagaacagatacgaaaggatgaagttttctcgggttagcatgttataatcgatgttttgttgaaggattctctaagatttcaatgccactgatggaattaactaagaagaacaagcaatttatatggtctgacaagtgtaaaatgagtttttaagaattgaagcagcggctgatcacagcaccagtgttagctttaccatcagaccaagaaaagtttgttgtttattgtgatgttgagatatgttttgatgtaagctgacagggttataacttttgcttcctgacagttgaaagaatatgaacaacattttctaacacatgatttagagcttgctgtgattgtgtttgctataaagatatggagacattatctatgtggggaaaaatgtgagatttatatggaccacaagagcctcaagtatttcttcactcggaaggatttgaatatgaggcagaggtggtggctggaattagtcaaggattatgattgtgagaatctgtatcatcccaagaaagcgtatgtagttgcaaatactttgagtagaaaaggtcccggacaagtctttaggaccacaatgatagcatcttagttggcctcagatatagttaaggctagaatcgagtttgtggttggaaagttacataacctgacaattctgtcagatttgttggaaaggatcagaaagacacaattggaagatgctgagttagttaaaattcaggatgaggtattggccaatcggcctaaggacttctcgatctcgaatagtgaaatgctactttacaaagctcaaatttgtgttccaaatagcgttgagctcacgaaagagatacttgatgagactcatactataccttattcattgcaccagggaaccaccaaaatgtatcaagacatgaaactctattattggtggtgcgaaatgaagagatatgtagtggattatgtgtctaaatgtttactttgttagcatatcaaagcaaaacatcagaggccggtagggttactaattttactgagacaacttatataggaaatatgagaaaaatgatttacaacaaacaacatagaaatactaatttttgacacagaaaaattccaatttagtaaaatatttcttcttgggaattataagaaattaaataagttttatgtaggcaccaagatcatgagaattagatgagtatttagagatatatgatagttttactgagatatgtttctttctgaaaagactaagaaaaggagacctacaaatattctcctattctgatcaataatgagtaaacatagagttttttacctcaaatacttcaagatatttggattaagaggcacgaaatgatgatgatagaagatgagagtgaagagtgttataaatttggctacagatgtaatgaaaatatgacttgaaaacatttagggttggaaggaatagaaagatataattttaggattgtttaaataaagcctatagtgactcctaataggtttagttttattaataataataatataacaaaataaattatcaaataaactaatatctaacttttaaatttaaaatgtaagctctccattccgtaactttaggacttagttcagcatagaaaacttctgaattatgatacaactatttctacaaaatttatagatctttgaattgtctttctaatgccactagaatcaccttaatcagagttccataactctagacatggtcatttaataaaaaaaaattctaaacatgtaatatttatcaaaacctacaaatttcttaaccttaattccataatatttttatttaaaaccaccaataaaaattattaagcccatcaaatagtttttaaaaccccaatagacttttatattgggcttaactaaaaatatatttgtttttgaataataatgcaagcttcattaattcaaatcattcatcattaaggatgcaattacaaatagtagtagagcaaaaccattattaataaaagtacaatcagcctcataaagagaagatcgcgccaaaatatgcacagccttattcgcagattgtttaaaaagttgaaagaaatagcagtgatatctgcaaataatgccttacaatcagacagaaacaataccttatagtcagacagaatatggccataaggagaagccatatatttaaaactttgtaaatctctaatgactctaagataatctgactcaacagcaatattagtccacccattattcttgatctaacttaatgcttctttgattccaattgcttcaacaacatgaggttgcaagaccccaactttattcattatcttagtttccagaaccagaccagcagttgtccaatccattaagccaactccaaaccgtcgctcattagagaaaagtgctctgtaaatattaactttgattgtatgaaattctgaggggtccaatactccacaactaccacattcgaaacaccatcatttgtagcagcaaaaacttatttttgagcattataccattcaacaaagtttagtttagctaaggagatcatctctattacaacaggttgtttggagttccataccagattattcctgagtttccaaattgcccaacatatcattgcatctcctaggaaattagctttgttccaaaattgcaaaccttcttcaagccatcctgcaaatgtcattgcatcagcagcaatcgcaggcacacaagaggcaaaccaccaactttgagcaaaatcacacctcaccaaaacatgaagggttgtttctggagctgctaaacaaaatgggcaggtagttataatcggcacattcttggtgtgtagctgaaatcttgttggaagacagtttgtggaggccctccattaaaaaatttggacttttgggaggaatcttaagttgccataaattcctccagaaactagagttatcatgttgaaagcggctgcctttgaaaagctgcaacagagaataagcacttttaatagtgaaaaaactagaactttctttcaaccaaaactaagaatcactcccgaagcttttgctaataggcattctccataccagttcctaatctctgtcacttaacactgttggaattattttaccaggatcttagatttactaacgagtatgttatttaacatcctaaatatgaatttctaaaacgatatgaaataaac

SEQ ID NO: 117837 - DNA, 1495 bp, Cannabis sativa
tgttgtaactaattaaaatacatatacatttttttctcgattttttttttcagggggcgactgcccccctcgctacaatgtgggtccgcccctagtcatgaagcgtataaaaataaagacaatttataaaaaaaaatataataattcaaaattaagaaagctgttatgagactatatgttgcaaaaatcataattcactataagatcgatctagtttccaaaactgtgaattcagcagtagtataaatatatagatcaaccacggaggcggatgttgatggttgcagctggagcatagtcgtagtctggggcatcatcgtctccgtcgccgtcgaagggggtgaggcaagcagctggggcatagtcatagtctggatcatcattatcatcaccgtcaccgtgcttcttataattgtaagtagtattgttgcatggagtcgacgatggtgaaaaaatcatgagactagtcatttcaacaaattaatattgttctatagtaactaactacttcactcaatctatcaaaaagacgtaactacttcactctctcttgaaatgactaaacaaatctgcagctatatatgatgttaattacactgtactctctttttgaaagctaataaggtactatgtatatgcaaagaacacacccctatatatattgtctttttggtcaagaccaagtacaaccttattagtcgagttgtacaaattaatatatgacaaaacgtggtttcaactctttaaagaatataaaaggtgtggaagacacgtgcgtgagtaatagaaagatatattaaatgtgtggtattcattctgagaattgcaaaaggtatcaatatttttttttatattattatcactgtaatttttttttttaaagatataattaatctctaaagatgtaatagttaatactaatagcaacttcgtactatgtagtagtgacgtggtatatatgcttctaattaattattatatacaaattagggaaattaagaagtaatagcattagctgttagcgcgttgtagcgcacagagtacaggtggaaaaagcacgtagtggtcgtcatgccacgtggctgccacaaaatatatgaccggtatattgttgttaattatgtacacattaataaaactttagccaaataataaaatataattaaggataattaatttgggtgtaatatatattacagtcatcatgattacttcatcacataatcgatctcaatctcaacaatttcaacacgttttcaagaaaattacggtcttattagaactttcaaataattttgcatatatttgtctcgcatgtttattgtggacatgaatatatataataaattgatgatgaaattaaggcagggccggccctgaaaatatatgggctcaagactgggccctcaaaaaatacattaaaaaaatatcaaaaaaagagtgttatgggatttgaactcatgaccttgaatattatggcttccacctcaaccaa

SEQ ID NO: 117838 - DNA, 1674 bp, Cannabis sativa
ttaattacattattattatgttatatataagaaaatattacattttaatattgttataatttattaataataacaattttttaatgttatcattcatcttatgttatattcatttaacgtgcatgacatatatagtagagataaattatattagtctaattaaaatttttgtccctgaacttttacttgtaccaaatcatactctctaaacttttaaggccgttaaaaatttaaaattcctcctaaacgattgagattattaaatttaacgacttttgtcaaattttaattaaaaaaatctaacatgaactaaagtttaggaaacataatttggtacatgttaaagtttgaagggtatgatttgatagatattaaagtctagacatcataatttagtacatgaacaattatcgaattagtaaaactaaataaaattagacaaaaatccttaaatcgatctaacaatctcaatagtccaaaaatcttaattaaccattctattaagaatattcatcaacattaattggcttatattactatttcgcttttacttttttttcccaataaagattcatggttagaatatcttttgatttttatgtataaattaggcaataataataatggttaccaaatattgttattggtggatgaaacgatcgatgtgtcatgtgtgagagcataggatagcatcaactatatgttgttgaagaaaattatatagttgaaaattaaaatcccacctcacaaatatatatattaacattaatattaattacacctaaaataaagtatatataatacaaaagagcaatttatgaatacttgtgtcaatgagattgttcaccaaccatttttattaagcagccgaaaaggtaagtgaaaagagagaaccaaattaatatgaataatcatcattattaattaatcaacttttattaatttctatcaaatcaaaccacccttattggaaaatcatgcattaatttgaaatatgcatgtgaaacatagaactttcattttttgctaacgcaagaaaaatagaattatgaatatatatggtccaacactatattgatgatactattacaaaagtggcatatatatttaggaattttgttcatattagggacaaaaaaatttatctagcataaatgtaggaaaaaaaaaaagagtataaatgtaaaaaataaaaaaaatatataaacttttgggtggggtgcaatattgtcttgcaaccatagaaaatacaataattaatgtaatttaatattgaatttttcatattctattattaattatagtgctttaaacaatttaaagttaattagaaacaaagaatggtattgcataagaagtaggtagtcatttgaaatagtagtgaagtaaaataaacttaattggtatgatgagataatttaattaagttattacgtaaattattagattgaaaattgtaatgaagtttctggattattaaatttggaaacattttataataataataataataataataataataaagattttgttttggtacgctcgactcgattgctttggtttccagattcttccaattcgtgcaagatttggactttggttcagctaaaagcgtgttgaaactttatcaaactcactattatattatatcactataaatatatatatata

SEQ ID NO: 117839 - DNA, 907 bp, Cannabis sativa
ttattattaaatatcgttaactatttataaaatgtcacatttaaataatagtaggtataaaaaatgtagcataattagattaatggcttgatgttaactaatataggagtagaatttgaatttaacttttacttataatatacaaattgtcatcctatcaactaagtttaaattcttaaaactaagtgaaatttttttaaatatgtgtctattttttgaaaatcttcataattattcgcaataaaccatgacagatgacataaattgataattattattaaagtaattggtaaaaagaaatctgattcatatcccccaggaccaccactttatatggaaagttggactttttggacttgtcttactaaattctcattagtcagattatgctttagcattatttttagcaaaaatgatattttagtcttcctcaaatccagagcttcccaagtcagtttgaatacctttcacattaattagaaaaaattaactatatatttacaatttattaatattaacacttacaaactttaaaattaaaaatcacaaaaggcaaagataaatttaactctagattaaaataaagactaaattcatcaccattcttatccgattccagccctttcaccaaacttacttctccggttggaacaatttttccttggagaacatataaaccattgatctttttacctttcattactatcagcgaacctttagtgatcacttgtatatgtaactctcatcttcaagcacacctagggaaatgaagttttgtcttaactccgaaatgtgtcttacgtttgtgagcactttgattccaccatcatgttgtttaatggcaacctttcggttccaataatcttgcatgaatagtctgtaaagtccttttttggcaagttaggtg

SEQ ID NO: 117840 - DNA, 3367 bp, Cannabis sativa
tttccagtgagaaaaaggccttgggaatgtggaataaacttggcacgatttacatgaagaagtcattagcaaataagttgtatttgaagaagaagatgtatactctcagaatggatgaaggcaaagatttgagaaagcgtcttgatggctttaataagatcactcttgatctgtataacattaggtcaagcttgaagaaaaggatttgacaataatcttcctcagttcattgccaacgacttatgagcattatgtagacccagtcctcaatggtaaagagacttcaccatgtctgaggtgaaagttgcattgagttctaaagaaaattcaaaagaaaacagatgacaaagatggtgatagtggtgaaggcttgtttagcagaggaagacacaaatcaaaacctaaaacctctcaacataatggtttagctaagatgatcaatagaaccattctggagagagtaagatgtatgttgaaatgtgctaatttggaaataaagttttggggagaagctgtcaaaactgcctatactactttattaacaggtgcccttctgctgcaattgagttcaagactccacaagagaaatggacaggtgaggttattagctagcctagaaaaacttaaagtttttgattgcttggcctatgctcatgttagacaagataaattgtaatcaaggactataaaaaaatgcacgttcttaggattttcaaatggtgtgaagggaaacaagctatgcttgaatacggtttcaatgagatgtgtgactttgaaagttgttcctacagtggactaaatcggggtttgaaaaacttgcagtgaaaccacttaaaatccttaatgttattgtgtttttgatttatttttcggtttattggttcatgttaagtctatttatggtgattgagccttgatgttcggtgatagttttcactacaatttttatattttatttttctcaagtgaaaaataatatggactttttctcaattgaaaaaagaaatattgaaagtggggattatgaaaaaaaaaaaaaagtgtttaaactagataataaagaattgtaataatgaaaaagatgtcttcaaaattttatttcacatataaaatatgtatacctagatatcttttttatttaataaaaaaacctacttgatcaacttattgcatgcactaattaaagttttgatgctaacggattccataaaaatgagataaatcttcttctattctattatattctatatctgataaaatgaggctgggttagaagtgtaaagatacttttttcttttcatctaacaatgaataattttattgaaataaaaaattataatatcatacaaactttaagaaatataaaaccaaataaaagaatgaatttcattataccatattaatttttcatctacccgaagaacatgtcgagctaattcatgtacagtcccattagtttttcaatatacatggattaggatatttcagaaaaattgaatttcaaactagctaaatcttttaataaggaatcaagctcattgaggaagaaagatcgttttgaaaatgtatttacaaccattaaataatcggactcaacaaaatgaacaaaaaacctataataaaagtccaatctaaatctacaagtagagttacacactttacctaattaactgagaaacaacccattaatggtttagaagtataaagatactattgattctatttatattcatatactagaaagagatagaacagatcatagaacgtggactagtacatattattcccaattaattaattgaaattaaagattttcatgcatggtcattcatttattatataactcaaacttgataaaaaatttaagaaagtgaactttttagttttcatttattttttttttaattaagattagtgatgatttcacatggtaaaggagctggagagcctcttcctataatgattgagattgggtaacaaagtttaaaagctacacatgtataaaagggtcatcttattaaatatttcaaggaaaagttgtaaaatatatagaggagtgttactgtcaacctcctactataattttttaattaatttttgtgctcgaaaatatatgttgaaatatttttttttcaatttttttgtggcggtgtttgttattcttacaataccatacttgtaaagttttaaaaaatttcaaatagtttacaatatcgaaaatatgtttgaagtttttaaacacgcgcgtagtaaattgaaacatcaaaaatcctgttttcggtactctaaattatttgaaattttttcaaaaatttacagagataataatataattgtaatgaataccgctataataaaattttgaaaaaaaaaaaaaaaatctggcatgcagggacagaccccccactaataaaaatattgtcttttaataaattaaatgtaaatttttcaacttaataattataaactaaaataatagaaaagtctcacaaaattaaataatattataatataaatataaatgttttttttatgataaagtaaaaattttgaatcagtcactaccgtcatgtcatgtgatacatatgtgaaaaatgttggaccacatggttgggtttggtggtggtgggcaaacaaaaaatggcgtgaagcctagacgccgcctgctctttcatcctaaatagtaaatcctaatcatatttcatatgatggcttaaaaaacttcttttatgagtggctgtctagtagtgttatggccatgggtttcatttatggatattggagttaaggccatatgtcatttttggcaaagttttttgtttttttcttcttaaattattaataataataataataaaagaggaggcttttgatggggttcaaacttctatgcattctagttccataatcatcagtttcatttggctgatattatatatatggcctttttttagacgtgttgacaaaagtcacaataaataaataaataaaaagttacatttttaacgttattccataatatgagtttgtgttaagggacgggggtatccaacatcccaatatacggaacaagtttgcaaatttgtagggaacttaatttcaagtcaaatttaggtaaaagtattatttttggtaagagaattgttgttataaaaagagttaaaaaaaaaaattattaaaaagtattatttgtgtttaatattctttttagtgttatattataattagtgttattaaatatgtggtctcacatagggatggataccctgatccaatctaactttttttttactctgatctattttaatatatatttattctatataaagtgtgcatatataacagaattcttggtttataagaaatt

SEQ ID NO: 117841 - DNA, 1465 bp, Cannabis sativa
  modified_base (1430)..(1433): a, c, t, g, unknown or other
tgcctgggtctggttggtctcggtggtgcgaggtagaagaaaagaaagagacaaagagaaaaggaaaatgaaaaagagggtattttgggtagaaatttaaaataataacatttaaatgtataattaattaataatttaaattttactaaaggatatttttttaagcatttaaagtgaaatttccctaataatatgtatcactttgagaactggccggctgcaaatttggaataatttttttataagctaaaaattggtttcataaagaagatgtaattagttctgtgtttggaggctttgtctttgtttgtttgtaacccgttgttgattagtgaatttcttttctgataaaataaaaaattggacaccaaacccaacaatatattattaaatcacactaaaaaattagaaccaaaactgcacaaaaataatgtatgtccaagcctttctttgtgatataagaacatctcagtcatttttattgttgttgctccaatcatgttctctacttttattagtgttgatttcacttttagctagcaatagtgatttaaattaaagcgattaaaaataattagttataataataaaaataaagtaaagagaataccaaaattttatagaaatttggccctgtaatagtgataagaaaagcaagaagatcttaatctctctcaaaagctcttacaataattttttagtttttctctcttgaatttatgattcttctctctctgatttttcgtctaccctgaataatcaaatggttttgctatttataaggaaaaattacatttaaattggtttcccaaacttataataattaaaatgggaaacttgtttactttccttaaacaaatacaataaaatgagaactaggtaggtttcttttattctttgataatgtgaatccgtcccgtgaaattagggatacaatcgtagcttgaatcttgaggattcacgagacatatttttgaagatattttattcgcattctttggttggtgtatggatactttgtccagacattcttagcttcttttatagattgattattttcaagtgataaatcaccctgaatggcacgtcataaggggaactgaccgtccggtcatgaaatctacttcatatgtcacctagatagatgccacgtcacctgatgcaaaaattaggataacagttagtatttgattattttaataatgctttataatttaaatttgtcaaatataaattaattttataaaatgataaaaaaaaaatagtagagttttgattaaaataatagtaaaaaatttagcaaaaaaatagatagcttcttatatttatagtcatttcttgaagcttattatttaagtttcattttaatttagttaaaggagtctctttagagatttacttataactaacaaaaaatatatatatatatnnnntagtaaaaaattacgtgcgaggcacgtatact

SEQ ID NO: 117842 - DNA, 884 bp, Cannabis sativa
aggaggaagctgaggaggataatggtgaaggtaaaggtttcttattcttgagttctcgcaacaacaaacgaggaaaaaaatgatggtgatcagagctttttctttgctgccctttcagaacatgtacatctacgattgaacacacaatttttggtgaatcccactcagtcattcagagttaccagtggtataaatttcaagctttgatatgcccttgtgagaaattaaaaaaaaaaaaagaaaattaacatctatatagatacatacaaaagggctgttttagcttgtgctttgttttgcctttgtgtgtctctggattttaaatgctgtgtattgatgagtatgatgataattgctgttttgttcagttaacaaaagaagagaatttgacatgaaatttattattgatttgcttgggaacttggttttcgaacattgactacgcaaagagagccattataaagaccaagtcctacccctttatgctaagcatgtttttttataccacaagcaatgtataatgcactattatattcacatcttaatgtaaaatttgtgcgaagtttcacacaaaaattaagtgtgttatatttagtttactatttacaatgctacaatgtgatgcacgtccaaaaaaaaaaatgtaaaaaaatattatttttattgatcattatttaatattgtattaaaaatatacaaatatggttaatttttattttttattatttaaataatggtaatagagttaatgaagaagttatgtaaaagtaataaatcataataattagtaatattataaatgtaaaatttattatggactaaatttggtataatattagagaaatttacatgttatactaacttttgttatttttttataaaaa

SEQ ID NO: 117843 - DNA, 1281 bp, Cannabis sativa
tagtcatgatagttatctaggccctcacacaaccggcgcttgcgacgcttttttccttctctctcacgcaggtcaagcttaaagaaccattttatttcttttctcttaatcttcattcatctctattttctattatgtggtgctctttcaaccatttgtgatttactatttagatcttgcatttcgattgattttattgaaattaatttatgtttacagtgtgatctcattgtagaagttctattttgggtcctcatgtttatttggtttagtgacagaaaagtaattatgtctattggagatctgatctcatcttgattctgagttcaaataagctaatctaggtctactctctttcttcttcttcttattaatttgttctgattttgattttctatttgtcttttttacaattctatgctcatcttggtcccttttgcaaaatctacctttgttttgaagggttaaaaacataagtttattattaatcaagcttggaaatatctatttccctttatatttagatatatatatatatatgactgataataattaagagttttgtactataattattatgatgaagatgaagatgaaaatatgattttatattttctcaatgagataggatagagtatactggtggctcctttttttgacttgaaaatatgtcaccattttaagtgaagttttctggctttgtcgaaagaatggttaacctttagatagcttattaaataataagtactcattttttctgcctgtttataattattagttatttgttattgttcttagtgggtatttaggattttaattatgattttatatatattatggattgttagaatgaatatagaaatttcatgtacatgtcatagtgagctgatattcttacatttaattactataactttaccatgacacatattgataaatataggtgaagaaccttttcccacgaacctttagctatcaaactttaccaattctatattagtaggtaaagaatattacccactaataaagtagctttccctacaattataattggtaggcaaataccccattttctagttcagtcatgaaagctctaggagtgtttggtgtagattttgaagtaatctaattttcatcataacgatagtgacgcactgcagctgtgtgacctatcttaagacacacctgacaaatcaagtgagaatgtggagtaaaatctcgaccattaaagtttctacaatttgcaaactgaggagtgttggaaagattttaccaggatct

SEQ ID NO: 117844 - DNA, 1537 bp, Cannabis sativa
  modified_base (1328)..(1344): a, c, t, g, unknown or other
aaaaatattaataccggcggaacactgattgtggtccgtcagtattaatgcatctgcgtgtaaaagtgcagacattaatgtcgaaggaccccaccgctattaatccgccggtattaatattattaccggcggaagaccatttttgtcgctaatagtcacttatagcgaccaattaataccggcagataattatcgacggattccaccagtattaattattaccggcagtctggtctattaatacaggcgaatgtctccgccgataatacaaaaatttgttgtagtgaataattaataaaattaatacaaaaataaataaattaagagtgatgactttatatttttttaaaattaaaagtttggggaccaatttgtcaaaaaataaagtttggggactaatttactaaaatttatatagttggggaccatttataaaaaaataaaatttaatgactaacttgtgaaaatatatataatttaagaacatgtggtacaaataaacttttataatatgacctgtttattaaaaaaatgaaataattttttaaaattaattaaaatgtatataaatttgtaaattattaagtgtttatttaattatggttaaaagtcaatgtaataaatatgtatgtgtcaagttgtaaaagggtagacataggacaccattttttacagcaaatttgaatccgtttaataattaacgtcactaagatttcctgttaattgcaattccaaagattctgcatgaacataaccaaggatttgtcagctgatggctgatattgacccctttgttttatttgtaatttattacattattgggatgaattataacaaatattgacctttaaaagttctctgtccaaaagtcatagcccttaattatgattttatatctattaaaagatgaagagtagtatatatatacttgctattagaaagaaaaaaaatcgattaattaattaattaattaaaaagttctttctagctagagcatataattttttatcccaataattgttattggaagataacatcattgagaagcagtgccttgacatttaagcaaaaaattattttgttgggatgataatgcttattatctacaaattaatactaattaaatattgttacatatcggtttaaccgacacagcaaattaaaacaaaatttcaccaacaatatataaatggatacgataagattccatgcatgtcatttagatatgcttttttgcacattaatgttgacatacacaagtaattagatacatgctcaaattacatgtatattaattagagtaatttgcgacataaatacttaagttnnnnnnnnnnnnnnnnntaaatacttaaatttaatttttggcggtaataatacctaagttataattctagaacttttgtaggtacctgactgttaatttcaaagtaattgccacatgacaattcctaattggtccaagtcattacatttttattttttataaaaaattaattaaaatataccaataaaaaaaatgatacgtggataatga

SEQ ID NO: 117845 - DNA, 2092 bp, Cannabis sativa
cctatttaaaatgttatcaaaatgcacatgtgcgaataccaccctatgacaaccacataatggttcccatggtgtcaccataataccagctagagcgtaacattaacatagcttgcctgccagtcatagattagagccataagcacaaaaccatgtgcgactgccttccttcctcccccatctcactttccttgtctaatattcgtgaattacctcttttgagcagacccattgccattctcaaaccttttcatcctttaaacccttggaagaagctattcaatgcttctagaaacgacgtatctcttttctgcattcccagtgtagagcctattacaaaaaagaaggtgttagggtcagacaataatcatggaattactagggacggagatgaggaggactatttcgatttcgagactggtcgtaaacaagaaaagcagatttcctccgagtttttggatttgacgggaggggtggtagatgagaaggaaattggaaaaggtaaggtgaaattggaggatgggaatggtgaagttgaggagaagttgagtagggttagtggaacatttgggattaagaatgggagacaagtgataaggaggtcgaacttgctagcgaagcaagtaatcagcatacgaaatgctttggctttgggcttcgtttctcagctttgggttgacaccacctctgtaagcattctactgctgcaattatttctaattttgtgtttttttttgttctttagggtattaattttcttatatcttaatatatatacacatttatgtatgtatagtggcatgtattgttcgtagaagtgaggccaagcttgctatctggggagtctgaacgttttcttttggaggatgttagacaagtaagttcatattctctattgaaatcattctggcgtagtacggtcttgtgaccattcatagcaaacctaatatgaatgttgtatagatataacatatgattcagtatttaatttgttccgaactccattgagattatataggttttccatttgaatccatgtagattttggttttatttcagcttatttatctgtgatcggattttttcccacggatgtaatctttaactttggctagatagatgagtagtgagtaaacttatataagggttgtaatttatttataaaatgttttctttttatgcatcctcgttttttagtcttataattctacatagtcattagaatcactatcattgttgggatgttggacaccatcttgttcgctgtggtcctaagtcctcatgaatttgtttttggatacttttacccaacaatcatcccctcaaacaaacgaacaccttgcctccctacaaacgatcctccaactgtcattctccaccaactagtgtttttccctccaatgcgttgaagccatacatggggcacctctacctcaagagtttttgttgattattgaagctcaactcttttgtttggtgttatgaggattcattcacatgactaactttgggacacgacttctgataccatttgttgggacattggacgctatctatcttcacaatggtatgatattgtacacttctggcctaaatcctcatgaatttggttttgagaaccttctcaaaatgtctcattaccaatagagatattgtctattcttatataatcatgatctgttctaattctagcaagtgtgggactttagttgtatgcccaacagtttcactcaacttgtgaatacttcccattagttctagatggttgtttaaagctacttgggcgatcaatcatgactctcaagtgaccgtagcttgtagaattaaagaagaatatgtcctcttctattgcgaagtgacaaactagtacaaacctcttcttttgaagctgaccttcaagtactgtcttttcccttcaaaatgcagtttagaaggaccagatggaactgcagtcttcttggcaacatttgtggttgcggcagaagagccacattgttaggacctaggattagtgtggtgttctaacatatattaaataaaagggtaattgggtcattgtattaagaggagtgtttgagtgagattacaatag

SEQ ID NO: 117846 - DNA, 832 bp, Cannabis sativa
ctgtgtgacaagagcatatagaggcaaagtcacataactgcatagaacttgtatgaggatcctagtaagaaagaaaaagagaagacaagttttgtgtgtattagtaattaattataaaactttgaacatgtatgatatgatgaattcatgtagtaataagcatatattataatttctcaatctcatacaactcaccccattgaaattcttatgatgatatcttcaattttttcgtggaagcaagtgttcaaggtaaattcatactgaaagaaagaaaagattaatcagcacatagaaattgactgaccatgtaataattttattgccttgaaaccaaaaatcaaggaaagtcaaatgaagaatcacttactgtactccatgcaaaaaaggcaagttgaaatgcattctgcaaatgaataagatgcaacagaaacagccagcattaattaataccaagcagaaaagatatcattttgtttgttaacatatatatatatattagtgcaaacagttttaagattataatattaaagagacatatatatatagatagacaacataagtacctgaaagagaacaaggtgaatgagaaagagcattaatttaggccgtccgaaccagaagaggtcatctcctggttgaaccaatggtgcaccctttaccacatctcctctctcttgaatgcttaatcccatctttgttatgattacttgaagttttgttcccaccagtaatattatctgcaatttgtaaaataacttaattagaataatatgattaagcatgttagaatttagggataagatgaatggggttttatcttaaaactaat

SEQ ID NO: 117847 - DNA, 1763 bp, Cannabis sativa
tgattcaaaaattaaaaaataaaagtgttatcaaacaccccctaaacctaaacttgtggttgattgatagttttaaattacaaaataaaataatatgtagagtttttgaaataagaaaaaaaaacataatttgtatttttatttttaagctcatatatccaaatgaggaaattacatatgagattttttttttttatattacaaatatgtggtaatttttactaaattttttattgtatttttttttttacatttttatggaatttttcccatgaatttgtaatatttagtttttatacctataggatattttttacttctagcaaccagttttcacaatatttttataaattgatgatagtaactagtttcttattttttttttttttagtataggtgtattttcttgaattgcatctccgttgatttttaatttagttatttcatgtaactatttttcgtgtgttagtttttaatttgataattttacaaatttatttacagaagtaaattatcataatcagtcaatacaatttgggtgtgcacttttataagatgaaagtaaaataacatgtatatggttatttgagacatggcttaaagcaatgggagggcgtgctccaggttcaaaaagcattgaccaagacaaggcaatgaaagctgtaattggtaaaaaaatttcgcaaccgccattgtttatgtatttttcacataaagaagaaatttgttgagaagttgtcacatgagtattacaaaaagtcaaaatttaaaattgcgatgaaacaatgtattttgtcaacacataaaaatagaatatttccatgagaaatatatagaagaccttaatgatgtaatatgttgtacccaaaattcagctggtactttagaggataacacgtttcaacattggggaatacgaatcaacaaatataatgacaattatgttaaaagatatcaaatagaataattcattaaatgcgaagttaatagagcatacttataacttgcagactgcacagtcttcaacgagacatggatatacgaactattgattcacgtattaatgagaaactatttcgcatcagaggatacctgtaatatcccagaaaatttaatggtacttaaattgggcatattctatttaacatgtgattaagtgggtattagggtagacttataatcctacttaagttaattatgagttaattagtgaaatgcaatttaaaggaacaaataaagtgtaatttattaattacggagatttttatcagattatgtgggtatcgttgataccatatttaaaataaaatattattgggcccggcgacagtgggaacttggcggagtggtcagaaatgtcacaatagtgaagtatggattgaattggaaattataccggactagtttagaattttaggtagtcgaattggcggatcagttagaattactaaaatgccattgggttcaattttacgcatagggattttgaggggaaaaatggtcattatatttttagggttagaatttctattttgtcttatgtgttggcttaaataagtagtgtattaattaggttttatttttttttttaaaaaaagaaagacttaagattaaattagaaaagttaagaaataaagttcattaaccttcttcttctccttccttgttcgaacctgttgacctcacttttagccaacgacagtgagtctaaattgtaagcgataagtagtataataagcatgtaatataataaagacacaaga

SEQ ID NO: 117848 - DNA, 1780 bp, Cannabis sativa
  modified_base (1085)..(1100): a, c, t, g, unknown or other
caaaagtaatgaaattgggcttgggcagtacaaaagttgtttttgccgtgtcccagtataaatgtaaacttttggtcaaaaagcagtatttttgtaaaattcccattaattattactgcctatccaaattaataggcctttcgtatcataagctcctcacacaaaattcaatttaattatatcaaccaaactgagatgttcttttccactattaattacgtcgatcaaaaagtagcttatataatatacatgcatttgtttagctttgctcatagttttgagtaaaaataatgaattaaagctgaaaggactaattgttaatttcaataatgaacaaaagtttaattaagaatcgaaataatatttcttcatagctaagacatctatataaaaatgtgtatactggaatggataatttattttatcagaatatagaaatacgtcagtttcaatattaatatgaatggagtttgttgaacaatacataataataaatatataagaatgatatgtagtgttgcatgtggttcatgtgtgcacctgtttttcttctgctatatattatttgatgtcaccattatggaccctctccagctctaataatgaaatgcagaacaagacctttgacagcgacgagcctttaatactttttctatctttttcttttgttgctgagctgatgatcataggcttatgacttataataatatctacttctataaaatttaaaccttgataaatttattattttattttaacacatatatattctttataagagaaaaagtacatccactcaaaattttcacatggctgcaaatttttctatatctcaattaattaatttaaaatacatttacaaaagtatgacatcaaaggctaaaaataatagtgacaccagatttacatacactataaaaaattgttattttagtgataactttttagtcacaataaaatttatttgcgactaaatgtgacttttagtcacaacaaattatgttacttatgactaaaatatatttagatacaagttgttactaatttagttttagtgacaataaatattgtgactaaaaatacannnnnnnnnnnnnnnntgtaatttttgtaactaatatttttagtcatcatggaccttttagtcacaacatatgaatgatgatttataattagttacaattttttttacttttagtcacaaagtttattgtgactaaaattatttttttttgtagtgatagagattagccccgattttgacaataatagcttactcttccttttacttgtattacccaagatcacaaaatatgaatttagcaaaatttttgtatacaattttggtccggatctcctccactatggtggaggggtttattatatttgtagagtacatcaaattaatagagttgatttcgtgcttcgcagtaaatcttgaagttgaacgagtttacatgattgaatctttaaggaccttgagccctaaaccctaaactctaaactctaagcccattaatgagaatcttgaacaaatttttgtgtctgccggggttaccaattaagcaagtactaatcgcctaatagtgtattcttccaatatgagttcatgacgactcatacctcatgcagaatgtcgcatggctttttaagtaaccaccagggtcagccctaggcataggcagattagggtcatgcctagggcttactcattttagggacctagataaaaaaaaattaccttttaaaaaatatacataattttttaataatttttaaa

SEQ ID NO: 117849 - DNA, 3169 bp, Cannabis sativa
gtctatacggatagggactttaccagctatattgatgttgtctggactgttgtagcctttgctgaataaaagttattgcgctttttaaacactttttcttgactgtgtgatctcattgcagtagagaaataattgctttagttgcctttatgatgtataggtgaggtaagtgaggaaaaggggcccacatgtactacataagtgacttttggggggaaacccttttgtcacttctcatttttcactttttctttctctctctagaaattagctctagaaaacgctcctccttctctctaggtggctaagcccaccattcttctcagaatttttgcgctatttcaacaatctaagcatgccaccttcttctccatcgaaatcttgtagtgggtaagctttcttttcccattatttcacttggtttgattgatttttccatgaattcatgaacgtcatttctctttttgaacatgctttgattcttgtgttagattgtaatccattcagaattttgatccgcatggtagctttaggatagacaatgtatgatttttagatgaaaaagaactaaatttgaccttcgctgtgattcatggctctttgagtcacaaagaactcaaagtacacaaagaacatgtttgagttcttaaaaaaaaaaatacgtgttcgaacccatgcaaatgctggccggccaaggaggctttgtttgatgccttaccggccataggtagtcttcatggggtctggtcggccatggggactatttccctaggatggccagcctatgcctggaactaaagttcctgcccagccactaggctaggtcttggggtgtagctagtttttctccctcttttgatctcagctagggtcttgtgacggccttagaggcatatacaactgtggtcttatgcgtggtttctcttggaaactctatataaggctaggtaatgagtccattatagtcaattgtacaacttaggacttaccgtaagtcttagtaaatatacttaagacggtacatggttgttggttgaccttttacactttgttttacttggaaggtaaccttggatgccgttgacttgaatatacttgtagctttgtcaggatgttaacctccccttatttcttcaatgcaagaagtgtccggtattgaattatggaggtgacaaatgtgtaggtctcttgtttaccttgtagttttgattgatacgaatagtgtaatgaccaagtgatcggcacgaccatcacacgcccagattggctgaacgggatcacatcaagattgtaaaaggggttaccctgcctcatttcgatgttagatccataacttattatgagaatgagagtctcggggctgagtttagtggtgagaaagttgtaccggctaggaggaagagacacatgccttgtttcatcctatctaattgacctttagatcattatgatagagatggtaatccaatgaacaggctcgatgagctttcggtactcgacctggaccatgtctaggacaattcccttgtgcctgaaattcttgatgcaagttcacaaggagagaagatgatttcccctgtttcatctctctcgagggacaattttgagagaaggtgagctaatgggctagtgggtgatatccattgtaagatacctccttcagacaaactagcgtgtagattaactcttaactggatggcatggtaagagtaccacattgatcaagctggaaatttagggaccatggacctataactcttagctgcaataaactaaattatttattaagtctcatcaaccaattaattatatttttgaattccatgattactccactataaataaagaatttaactcttagtaattatagaattatatttactgagtttactgcagtgtccattgatataatcaattctagtcattagccctccatgtgttggttggtaattagttttggtcaaattatcgttttacctttctaattacttctttatcctttagtacccttaattcactagtggaagtataacttagaccccatctaaatttgagcacaacttactagtcccagaattaacacttcaagggaaccaacatttgatctgttaggaaagtcaggattctataattgtagatcatgttcctagtcatccacattattggactcccaacacaaaagttgtaagaatcgtgttttgtgagaaaatttaacaaataaattaaagaaactaataacatgattagaagtataagattacttaagatttaggctaatctactattaatcattgttatgatatgaattaggtctttatagtaaaggacatattagataaatatagctttattcatatcagtccttgtcatatataatctctattatacaacacttttactttgatgccatactacatcagtaatctgaactgagattacttgtaccaaaaaacaggcataagtgaatcatagtagcaaccattaattaaagattctataacattaatgtattgctgactgttttattcatagctaagtgatcttagttctctgtataggtacaagtcacaacctcatatatgaataatgaatttttttataatcatcatgttcagctctttattaacagtcagaaatatctttataagctttctagggtataaaccttaacaatatcaactttcagcatcaatcaaccttttgctgacaaagtagacctaatgttgggcattatcatcttctctgatcagtacgatgcttacatcatcattactgcaaaaattatttttctcaacacttttaaacagtcgtttaaagtattcccgtcaatttatataaccgtcgcctatacgactgtcgtaaaacgggcaaaacaggcgacaattaaaaaaccgtcgctaatgtggacttcccgacggtttaaaatcatcgcctataacagggtataggtgacggttttaaatcgtgccctatactacaggcgatagtttaaaaccgtcacctatagtataggacacggtttaaaactgtcgcctgtacagtattataggcgacagtttttgtaataccctagaattaaggaatggattaacaaaaccctaattagataattatgaataattgagaaattatattattatataagtcagtatatgtgaattaatatgat

SEQ ID NO: 117850 - DNA, 1306 bp, Cannabis sativa
tttatttattatttttaggaattttatatttagggtgttagattataaaattataaacatgcatgttagtaaatctaggtcatggtaaaatattttctaacaaaaactaccctgatctttgagctttgggggtagtttcttctgtaagatagaactgcactcctcagtaagtgctatagtcttataatcatccaatctctttttctttgataagaattccttcataaactttacataacttgacatttgttcaagttcctcgacaaaagataggttagtgtgaagcttccaaaaaatatcaagaaacttcaaaaactacttgtcaagtttcttcttttgaagtcactgaggatatggaatcttgatgtggtggtcataattaattggtgtctgctttttctcaaggttcttagtaaccttgtaatcctatagaacatccttctcaaccttggtattttgtgcaagaataagcttcttgattggctcttctaactctttaccacgagtgattgcactgcagttatctttaggatttacctttgtattacttagaagatttccttgaggtctattatgaagcatattagctagttgccccacttgtgtttcaagatttttgatggatgctcttggctcagtcataaactaagtttgtatattggtgagagtaagaaaagcagcttgtagatcaattactagagcaagtggagcttgaaaattttactgctaagaatagaagcttggttttgaaattgaggttgctgcccctggttatttccccatcaattattaaatgagttgatcaagaagggtttgttgaattgcctctagaagttagaaattacttgcacttgagcaagagtcatcacaacatcttcagttgattcacacttgtcaaaagtgtgtggtcctccacaaatcttacacctagtttgtacaactttggcaacttcaattgtcttttgtaattgcttagtgagagtagctacttgagttgtcgaatcggtaatgacatccaattcataagtactagctttcttcttcccagtttctctttcattggaccattgatggttgttcattgacatatcttcaagtaattcataacctccagttgtgcttttactcatgaagtgtctctaaatgcaacatcgatgatagtcctagtagtaggacataaacatgtataaaagttttgaactaccatccactgctccataccatggtgagtgaatcttctcaataggtctttaaattgctcctgagcttcatactgttgggttttatgccataaataaaactcatt

SEQ ID NO: 117851 - DNA, 1234 bp, Cannabis sativa
  modified_base (1055)..(1056): a, c, t, g, unknown or other
aattgaaaactattaccccaaattaccccaaatttaccccaaatccagtatttttgtaaaatgcccttctataattgtagttaaattacgaagcactctaattaaaataagttgaaccaagttgtatccaaaaaataaatgacgatcgatttaattacacatgaaaatgttttgtaaataaaatcttaaaaatttataaatttgttgattgaaacccaagtataactaaatggcctccccttgtagtgaaagaggtctttctgagtacttttgtccaaataattgacgtttttgtgtcccaattttatgtaataaacatatatatgttatattatggtcttatataaatacatatacaaagtattcagcataatatagcaaccagataaactcgaagaattgtctgcttggcgcctgcatccatattcaatattatcagaaaattactgttttttttctaaattaataataataataagacaagtgtttattcagaatatattaccgaggcgtaatttgctagagcaagctcacgagtctgtacaaaattaattaaacaaattaaaatcgatatttaggtataattttgtttaataatatatatatatatataatataacatttttctcttattttcttttagagaaaggaaatagaatttaattgtggtggcaaacctggaagattaagcaaaatgctaagattgcatgagaaagtatcattatgttactcttgaaaacctgaaatataagaaatatgaacacactgatgattttgttctgttatggaatgctcttgtggtcaccccagcatagtcactatatataattattagattaagattgagaagcttatatatactacatcacccaatggttctattttatatatatatatagtgcattaaattatgcatttaatattatcatatgtatcatatctatatgctttattttaaattatttgtatatgagactggtatatatgaaatttctattgagtaatttgggacattaatatttaagtttaatttttagttgtaaataaatacttanntttaatttttgacggtaataatatctaagttatatttgtaaaactgtgtaagtactgaacgttaaatgtcaagtcattatacctgttattttcttattgtacatataaattattttcttaaaaaaaaaaataaaaattcatcttcgatcaatctgaaattgtcacgtgacaatttact

SEQ ID NO: 117852 - DNA, 2967 bp, Cannabis sativa
  modified_base (1269)..(1272): a, c, t, g, unknown or other
  modified_base (1469)..(1475): a, c, t, g, unknown or other
  modified_base (2693)..(2697): a, c, t, g, unknown or other
gagacatattcatgttgcactcttttaccttagcttaagttttgtcccacttggtttcttgactagatttttaacgagacaacttgcaaataattatgaatatgaaatatatattacactctttagttcaggttttgtcccactgggtttttctgataaggtttttaacaaggcaactttaaatcatgttaacatactcgcactttatgaagcaagcgaaaaaatgtgtgggagtgagatcattgacatagcatatttagaaaacatatggattgcactctgtaacgaagtatcaacacaaacaatactctataaagataataccgcttgcatcgctcaactaaaaacagagtacattaaaggagatagaattaagacacatttcaccaaattcttctttatacatttcaagagaatacatattggtgtccaacatattcaattaagtgtcaatcttgcagacttattcacaaagttattaccagcattaacatttgagaagacgacatacaagattaaaattcgtcgattagaaaatctccatgaatgtctgaatgagggggagttaatttatactgcactctttttctttttaccaaatttttttagcaagatttttaataataaattttttatggacatccaaggaagaatgttatgaaatattatatatggatgtccaaatcaccaaattaattatcactattaatgcttggttgtatttttctttattacattaatttagtttcccattcttttagtcatatttttgtataaataagagttcacttttttgaaataaataattaaaaaattcttattcagtttctctttttatcttaatctttttcttcttttcttattatctattttatactattttataatatataagacttttttgtaattaaatacaaaaatattataaaattttaaatattttttacggtttttaagaatttatttacataaaattaaaatgaggagtgctaccgtcaacctcctgttacaacctattaatcaatctctacacccgaaaacatatgtacgaaatattttttttcaatttttttttcacgaaggtgtttgttatgcttacaacatcatccctataaaattttaaaaattttcgaatagtttacagtgtcgaaaatacgtttgcagttttttgaacgcgtatggtaaactggaatatcaagaactctgttttcggtattgtaaactattcgaaatttttcaaaaatttacaaggatgatactgtaactatnnnnaataccgctatgaaaaaaaattagaaaaaaatattttggcatgtaatttcggacgtggtggttgactatgaggttgtaataggaggttgtaagtagcactcctcaattaaaatacaatcttttaatgtatttttatgttgtactcttgttattttgtaatttgacacaaactgtattgggataagttgaggaatacnnnnnnnttgtatccattaatcaaaaatatcctcatattatatttcattaaaatttaccaatttttatgagtgagttgtctaatatacccttgtcctctgcttaagtgtaacacatgatttatataatctaaggggtataacggggtcatcatttattaaagtgagtatatttttaaagaatatggaaataaaggtaaaagtgaaaacaaataaagtaaagtgagtataccaatttctacgaacgtatttttgcgtttttctgaaattgtccctatttgttggtgatgtaaggaaatgggagcccaatgggctttttgtgtgtttaataaaggcgagcccaaccaagtttatttgagtttgatatataacacggtagcttacatttgaagcggaaactagcttaattataaagctaagtgaaactatataaataaggactcactctctcatactaatatattctttttttttttttttttttgaaagggtctcatactaatatattctctcaaatatcaatttcatcatcattctcttcttattcatacaaaaaaaacaaaaaaaaaaaaaactaataacaacatggcattgcaaggtaccttaatcccaactttttctcttttgatcttgattctctacttttcattttaattatgaatattctccaatagtttctaatcttgttttttttttattattaatattcatgcagagagcacagatgagtccccaaaaacttttagcattggtaaggacaattcccttttattccctttccatatttgattttaattatgttttttttttttaaaaaaaaaagaaaaaaaaatgatttcaattatgttaatctcactattataatatatacagcatagaatataaatttaaacatatttagtggcttacatatttcagaaaatgttaatgccaaaatttacttagatgttatttaattattttgttacaccttatgataattattaattaaataaataaatactattttaaaaaatacacataatataaaattaatttggaatcaaaaggagaaaaatattatttttcaaaattatcaagataatagaatttatacatacaccatatcatggatggacccacatagagacgagagagagcagtcaatcgcttttctaaaaaaagaaaaagagttatttgtggcataaatacttaagtttaactcctaattgtaaataaatacttaannnnnatttttgacggtaataatacttagttgtaatttttaaacttttataggtacctagctgttaagtattaagtaaattaccaaatgtcaatttttaattagtgcaagtcatcaaatttttatttttttttaaaaaaataacttaaatataccaataagaaaatgacacgtggataatcacttaaaatttaacaatcagttacctacaaagttctaaaaatataacttaggtattattaccgtaaaaaaataaatttaggtatttatttgcaa

SEQ ID NO: 117853 - DNA, 1646 bp, Cannabis sativa
aacacttttataaggtgttgtaataatatcgttatttgtgcaatttaataataggccccatttattttattttaataaatattctataaaactattaagaaaaattaattaatatgagtaaccatttggctgattgagatttgtccaagagcaatattataccctcacaaatctcatagagaagtacacataatattgtgccattacctttttttttttatttttttttattttagtatgtttaggtgagacttgtcaattaaatgtttagttcaaatgaatattgagatttgtgaatgtcttttgtgctattcatagtccaaatatgaaaaccattatccaactacattgaatagcattgtgtgagcccatttgaattttgggctgtaaagctatatcacaaaggcaccatttgagttctggcccataaagctatcacaagtaaaacttttattaacgaggaaatgacaaatttaataggtttttatactatgtgtaaaaatattgttttttttccttcgaaaaagtcataaaatttctttaaaaaaaagtcataaaatttaagaaaaattaaaaaaaattatgacaaaattaagtaagagtaatcagagaggtaactattatcttatactgttatatatatatatatatattctatttttttaaaagaaaaatttcccataaaataaatcttttgagaaaataaaatatcatattttacaaacgtatacattaaaaactaaaaaaaaatgagaattcctctttattataccacatatcaattttatttgattttttggaaaaattacgatatcaattattatgttttttttttcttgcaaattatatttccatgcaagctatatcacacaaggatttccaccaactatattacactagtgaaattgatatttgttaatatgttaaaaaaaaaaaaaacataccaaattattgtagttgcatgcattaataatatcaaacaattacgtaagtacatttattaattccattatacataaagtggtaggcttagtgggatctatctaatctaactttttctctaaattaaccaacattaatttaaaagcttgtagattatatacatattatgcatgcatattcattcttttattccaaaaacacatcaatcaacacatatatatctatatatatatttgttttctttccctttaaaacagaatataaacatctttttcatctaaacaaaaccattcgtttaaagagcaagcaaacaaaatataaacacaccacactaccctatatagccccccattgaaaatgatcatctttaattcccattttcagtcacatctagttgtaaattaaagatcaaaatccctaacatgggtttttgctattactcatgtgacctttcatagaaacttcctttgtcatcatgactagaccaactatatacatttagcattcaaattaatagagtatagtagtgcttaacactaccataaaataatgtcttgtgaattgtaagtacattgttaaatatcgtaaaaaaattagaaaattaaaaaaaaaatgcagaaaataaattttttttaaatccttccccccaaactaaagattcacattgtccccaatgtgatataatattcaaggtgagaaggact

SEQ ID NO: 117854 - DNA, 1961 bp, Cannabis sativa
ttttctttggttgcagattgtgttttcacgtccgggcaatgaggctacttttagcaatccatttattggttttccttctgcctatggaaatgattttaattaatataaatatataatagagatttgaacttatcccctcacagacacacaatcacttaaggctagttacaagtgacgagttaataatgtccttattggagttgtggctattttaataactttctcttttattttcttattctctatttaacgttttaatattaccatattgaagacttgtcagtatgtttttttataaatgggacatgttggtatgttgtaatactactttttaattaacaatgacaatcccctaaatttgaaatgaactagtttctctttccttgttctcttgctaaaggttggttacccatcaaattgtaatttgtgttaggtagtgtcgattttctgtaaattatatttatgtcctttaattttatgtaacatgtctataaattcactactgtaatatttgtctttagttagttttttcggtggttcaacttcaatatttatgaaattcagaactgaagggaattcccgttaaagagaaagggatcaaagaaaactgaacgcgaaaagaagtccttatggcttcagttatttgctaataacgaagtagcaaataattgaagccataggttaccacaacataatatgctttctataatacccacatataacattaataaaaagggatttttacaaaaatactagattttgggcaacagtttttaattttactgtcacacagaattttttacaaaaatattgtttttctataaaacaaccgtaaaacaataaaatagaacaattaaaaacaacagtagaacaactaaaaaacaatcgtggaataacaataaacttaatacagtacacaacatgaaactttagataacaagcaaccattaaaaataaaaaagtctaacaaagtctcacgttagcttttaccaaataacaaactctcctcaccgatctttcaccccttcggcgttgcaattaagcagacgactacaggacagaagtcggcacaggcgatcagcgttgcaggtactcagtctcgacctaatcatcatctccttctattctttatttttaggattttattctttcttttttccttttattaaacttttgtatgcgattatacaaaacacaaaactttagtacaatttcagtaatttggtatgaacattacttaattcattaactgcgacttgtaattcagttagtgccagtttcagtttggagttcaaatattttaaaatgtttctataatgtaatattaatattgttagagaatctgcagtgttcgagctcaggtttatcggatcggattgcagagacgaattgaattgttcctttgaggacgacgctcgaagacgatcgatagtctagattggtattttcgtatttcatactctcttttgtttaatcaatactttaattacaaactctattttctttttctcttttgttctgcaattcttacaatttttttctgttttgatgataaattattgaagttaccgaatagttgaacaaagtgactaatagttttggaaagagtcaaaagagaggccacgatgatgaaggagaaaaaatgtggaagaaaaagtctatttttttcaatctaccttattgggaggctttgcttgttcgtcataacttgaatgtaatgcatgttaagaatatttatgaaagttaacttaatatatactttgttgaattgcatagggaagttaaaagatcactacgaatcgagattagctttgcaagagttgggtatcatgacacatctccatccttatgaagtaaatggcatcattcgtctacctcccgcagcctacatattatcaaaagttgataaagaaattattttgtaagaggttattttgtttgtttctatatcactcataaaa

SEQ ID NO: 117855 - DNA, 1642 bp, Cannabis sativa
ttaaatataacaataataatttttgttatcttgtcaagcgttttgaaaagacaactgtatttattattttattttcccaagatgtcacgtcatcaaacctttcagggtttgtgcaggcttggtttgagataaccattggattggataacctttggttttcgaatgccacgtgttaaaatctcaacggaggaggcggattcgtatttaaactcctcggatattaattgattcattttattttcccttttagtttcagttttcattgaagctttcctctctaaaacttcaagaaaaactttttcaaagtttaaatagctttgaggaatcttctatcgtcgaagattgtttttgaagttcaaaggattcttcaaagtggattgagtttagaaactcatgatcttgaatcaaaggttggtttcctctaagaactttctatgttttctttaaataattgcatgtcttatgcaattttttgggtagaaattgcatgaaaatagtaggatatattctggaaaatgaaactccaacaaaaataaggcaataagggaaacttttatggaaaaattttgcctataacttgaatgttcgcatcttctttatcatgaactttcaatattcacactattagttagaacacattgagtatttgcatacttcggtaccaagctattatctcagagtttgaattgcttaccaattggttgtttcacagtgatcaaatgtttattcaaacgcacaaacattaaatcattgtgaaacaccgaaccattttgtttttctttggtgttagctttgttactttttgtttattttattcaatcttaaattgttatctatttgaggaaactctgccttaaattgcactcacaacacgctgaaaagatcttctatctttcagatgagagatctctctgacagccagatattcgaatctgagggtggagcatttgcagatgaatctcaaaagactgacaactttatcccaacatcgcaatcaaaagacaaggttccagcaagagtagatcaacaagacttgtggtctactggcgagataggtcacatggtccaagagttagaagcactggtagctatcgagatacacggaagtgcgtccaccatatctgctcaagggagctttattagtccaaaggttactatggatgtggaagtcaaggaaatggggtaggactttgagttgctttcttgcggggatgaaagggatgatgatgaagatgacttaaattttgctgaagacgcacctttggattagccattttcttacaaggatttagtttcgccgataaggaagtctgatttgatgacatttcaattgaagttaatcaatacttgctgtacaaaactcatgtcgatacaatgtcctcaccaacccaacaattattccaacaagcgtcgttgtggttttagtccccatcaattgatgtggtgtcacggttcctttccatcattttgttaaaatgattttgacatattatgatggttttcccttccaactcactcccaatagctatagaattatcctcatattttatgcgatgtatatagaatacatgtaaggggaatccactgtctaggatgtttgctatttctatgacatcaagaaagttagtgttgggttttatgc

SEQ ID NO: 117856 - DNA, 2672 bp, Cannabis sativa
tctctctctctcttcctctccctctctccctccctcccattgtctctctcttccttaaccagaataacaaaattaggatacatacatataaatgtgaacatgcatacagaagtacaagaacaaagtgaaagggagaagaaacaaaaaacaaaagagatgaagtaacaaaataccaaaatggaagcaatcgaaaattcaaaaaccaatttaagagagggcgtaagcagaggagtatatttcttatagtttgatcattataacttcatcgattacaagtgtcaaattattttatatttttttcctgctgcaccaaataaagagaaggaaaaagaatgccatttgctagggtatgccccccacacaaaatcgaacattgaatctaatgagagaaaccatgagactgactactcatacctgactagagttttaattcaacagaagaaaatacagctaagaaaaagtataatgaacaaggggaatactaaacgtcacaagaatttgaacgtacctatcaacctgatctttagtaaaacaaccaatggggttaataggaatctaactgaaatgaaattagaactttcctatcgattcgttttttaagtttaaagtagtaagtaattacgttatattttttattatgaggaataatctcaaaatgatatagtgaaaaacctggttctggtctgccttttattatagacctagtccaggatcttagctatatatagtcattgctttacaaatataactaacaaaagatgaatcgactaaccttttcgcttctctcggttatatgaacactaaggcatcctgagaatgcggagccgttgcagtctgcagctgacaccactttcactcctccacaactcaacttaaggacattacaataacaaactatgagcacgcccttcttgaaaggaaatgagcaacataagctgaaacccaattggagcttcattgcaagcaggataatatatggactcagctaacatacttgagaaagatgcacattataattttgttactgattttagaattcagtaaacaatagtgatcgagggaatagaaaacaatttaagatgacatcaaagagagcgcatagtattgctaaatgctttctctgcttcttctctgatgcaggcaaggttcacctttatctcattggaaagtcttccctcaacaagctgtacaggcaaccaaagctttggctgtacatcaaccaaatatgaaagagttgtattcatttcttggtcctctcctccactatcatgctgcaacagcataaatttaaagtgacattttttaaaactgaaacacaaaataatgtctccataataccaatcactagatgaagcaacgaaaattgttttgtatttgggcgtatgagattgagaaggcatactgtgatccccttacaaattccaatatctaagccactagtctgaatggataaaaaaaccaacaagaaaagaaggaagtgagaaatttatatcatacttgtagaattgaccattttccttggaagagctggaagtctccgtctaccatgttaaactcaatctcacgcttctgggcagagggaaggatttcaagtggcttctcataacagtcaacaacccctttagcattgaatttaaggccaagggccaagttctgctcacccacctgagtaaaatgaaaagagagcaaaatgggttacaaggatggaacgaaaaagaagcattagtcgttaggtgatagagcgaaacctgaaagagtcgtgcataatcagggcccctatcaagcaactggctaatagcaagaccgggaatgaaatcggccaatccttcgtaatcagtcaggacattccacacagctaggagagaagcgttaatggcgacggaggagagtattctgcgtgagttgttgggaagtttcttgatctctatgcaaacaccatcctccgattctgattccgatatagattgggaatgggaagtggaggaggaacaacggagtcggaaggaagaagaagaagaagaagatgaaacagtagaagagtggtgaagaagaaagagaaagggcttagggttggagaagagaaaagagggctttcttcggtggaagaaaaggagcgaaggagaaagagaggttggaactgtgagagtcagcatgggagtggcactggcgcgcatcttcatcgaatgtgctgctacagtaccactgcatctctgttctccattaattcctattcttttatagaaacatactcacacgtgcaccaaatacacacacgtgtgacatccaacccttatatataaacaacacaaaacccccaattttgccatatccacattccatttcttcaccattcaagttcgtgaccatggctgcttctgctactgctgcaatgtctggagtgttagcgcctagcttcggcaccaaaatctcatcttctgctcgtacaggagctgttgctacgagccttaagctcaacccttcttcttcttctctaaagccaaatgctcttgttttctcttcattccctaaagcgaaaagattaacagccacaacgctacgccgccgcagcagcaccatccgcagttcggtggagcaggagcaacagctgcaagctaaagttaccactaagtgcttcttcgatgtcgatgtcggcggcgagcctgtgggtcgca

SEQ ID NO: 117857 - DNA, 1857 bp, Cannabis sativa
  modified_base (1043)..(1044): a, c, t, g, unknown or other
  modified_base (1329)..(1335): a, c, t, g, unknown or other
aggatggacaacatcatgaaattcttctgatccaatgatgatgaataagtggtccattttttatcttttgctttttatatatgtcttttgaactattatgactttgctcaagttatttgttgtatttggctccttgatagacaaaaagggggagtaatatttattttttggtttgtttgttacaactttggacccttggttttaggggaagttgtcttatttgtggtttgtgaacttttccgtttaaaaagttatcttgtttgtggtttgtgaacttttccgtttaaaaagttgtcttgtttgtggtttgtaaacttttctgtttaaaaagttattttattttaatgtgttagagtacttacatgcaggcggagtattttctatattcttttgtttttgtttctaacacttgatgtaggttttctccaattaaaatattttgtcaatcaaaataccaaaggagaagattgttaattctatttttggcatatttaattgacaaaattattttattaatttattgttcaatttcagctgtgtgtaataatctgaaaaggttgttaaaactacatacaaaaaccttgtgtatttttacttttctgcactgtttgtttttctggtttcttctggagttacagagttattttctgtagctacagaaaaactgttttagtactagttttattatttcacatttaattaagtatttaattaaataataaaattaggaatattaaaataagaaatttcaatatgagtcaggtacgaatttacaacactaatgcccactacttgtactactcacgttgtaagcgttcatttttttttatcttatttgtttgttgtgttcgtattatttttgatctttatagctttgagttgtagaacttcttctcttttttttttacgttgtaccaatttacttgtatatacaaattttttgttatatattttgtcatgagttgtttaatccatggggagttttatttacaccccataaaatgataaatacacccattattaaaaaaaaaatataaacttanntaatttttaaaaattattcttaattttttttaaaattttttcttcaaattattttatattaatttcaatacttattttgagttcattttcataattttttctaactcatggatatatatatatatatatatttttttttttctaaaaaaaaatttatataattttttatttttaatttttttgctataatatttaaaatataatttatttttatttgataaatatattttttaagaatatgaattagaagaaaaaagttcaaaaaaacttagtacaattaaagannnnnnntttatataaaataaaaattataaaaatagagtgtgtttagaaattttggaggtgttaataaaattttccttaacccatttgcagtatttgtattaactttgatttatttctaatattatgtaacatgttaaaattacaacatcttgtgtgaaatatttgtccaaaaaaatgtttatgatatgataagatatgatatgatgtggatccacgtccacgccacatatatactcttagctgtttaatttatactcctatgtccaatcctatcccatctcacctctgcgtggtcaaacctacaaactcaaagacagcttgttatttattattgtcatcaagttgtcaacttggtaaatcattgatatactttatactcttgtgtcttgaatagtaagtagggtgttcatccaagtttagatcttgataatgctttgcgacagaaagaattcaagggctagaaatctgaacaaaaggagtcatattattccgctgcacccaatgtaaaaactttatatgtgtttattt

SEQ ID NO: 117858 - DNA, 763 bp, Cannabis sativa
agacacataccaagggtgcaggaacaatatctggtaaggcataagagatcataggttggctaggccctaaaaaatagggatggccagccaagttatgcagataactccgaacactgagcaatgtaacgggacatgcccaataacccacgaaaatagaggtatttcctcgagatattagtcctatttttaaggaaattagttatctttttttgtaacttaaataatagataaaaaatatgttaatatctctattttaaagggatatctttacctaattgggttaggattttttgtaaactctacactatataaagggcattagttcactctcaaagtctgagtcattccacaaacactaaaggcaaagtctcctttcattctccataaaggtctcctacccgtgtgaagcttcattctcgcaagtttcacattctatctatgccttctagacaatcagtcaagtttcttcttaagtccttgacaaaaccttaccagtgcttgatctgtaacacattgttctcacaattgtaatattgaagagagtcatagctagaaattataaaatttttatctatgatctgtatggtattatctcaagagtaaatacaactaaaaaggaagtaagtcattacccgctaaacaagggggtggaacctctataaatctctgtgtcatctttactatttattgttcttatttacatgtggtgattatcagtcataaataagactctgctgtcagttgaccaaattctgagtcaaca

SEQ ID NO: 117859 - DNA, 5103 bp, Cannabis sativa
cgtgatgattacatgcaaaactctacaaaaaaaaatggttatgttaaaaaaaaaattgaactaaaattactaaaataacctaaataaattataatacacactatgggcttttgacaaataaattccaaccgtatgcgctttaaaatcccataaactatggttaaactatacaaaagccatataaagtgtccatagtcaattatgccatatttatcataaaaggtttaaatttctttttcatgttttatataatttttttttagaaaaaaaccaaatttttaatttgatttgttacataatgccatcttttttaaaatagcccttatttatttatgctaaactcttaaaagtcaaaggattgggcttgcgttctggaagagaagcccaaaatgagtgatgtagactgtagaggagggagagggagggagggagtgaagtgattttgaagtcccagaaatacaggctgagaaaacgccattccatcctttcttgtctctccatccactctctctctctctctctctctctctctctctctctacttgactcgctactttcctttctcctcgattgcatatcgaaattcacccattgatcctcctcatagatccaaaatgtgtgccttcgtaatgtaatctgaggcaccacaaatttgatttcagatgggaaccgtcggtagcaaagcttctgcgtctgcttcttcttcatcctcttcgtcgtcgtcttcctccggtgctcgaagggttcgatctaaagcgcacagagtattacactcctcctgcctcggtaccacgtcgcgatctcacgacagcgacaatgacgatcaggtctactctccattttctttcttttttaaattgtactttgacctaaattcgaactttcgttttatgaaatgaaccaagataataatgtgtggctcctggttcaggtttgtgatcatcagaacaaagaaaatggttccacgaacaaccttagtgggagtgggatagagtcaaatcaatccaaaattgagtgttacagaaaggttaaggttgggcggtctggtgaaataccatgtatatcttcaaatgctaatacttctgcctctacaaacggtagtagctccgctccagcatcttctattacccaaaacctatcaagtcgttttctttctcgttttagtttcattcctggaaatataagcttcaggctgagcagggccaacagtttaggatcatccaggtcttatcctgtatcttccacaagtcttggattgatgaacaatgaagaggacgctcatctacctaggggttctcccaatgttgttgttgttgatactgatcaaaatcagcaaggtacgccaacactttgttgtcaagacacttcaagtagtttacatttgaatactcaacctggtttttctgaaaacctaggagatgaccgaacaacttcttttaccgaagataatgccatgaatactagcagtagcggttcaatagtgggggctgatttaaacttgtgctcgcctagaaatcattctgaaatggatagtgctggaataagactgtctgatagacatgctgtagctcgagaacctatcgagagaaatgttcggttcagcagaactctaagtgtcggaagacttcgtgatagagttcttcgtcgatcatcattatctgacatatccttttgtcctgtacaacaagtaggagaagatagagataccaattctggtagtgggatgcgggcttggggggatcaaaataggacattggcatctgaaagtacttctgcagtctccccaaatgcctctggttattcttcatccaatctgtcaagctcattgttcagcatccaagattatgaggtggaaacatctcgggcaagagaagccaggtatcgtgatcttttggagcatagatcaaatttccttgaaaggaggagaagaatacgatcacaggtctgtatatatgcacattatttaaagtttagcagttggtgtaagttctaatgagcaatgggcaagggtagtatcaaacatcgcctagagactttctttgtttatgttataaaaaattctagagaccatgcttcctaactcttccctagagcaattttgtttgtgtgcacaatatttgttactctttagctggttgtaatatgatacttgctgtgttcgactaaaatattctttaaaaaaagtcaagtctatgcttcctgcaaaaaatgacatttgaaaaatgttgtaggtccgtgctcttcagcgattggggagtcgttttgaaaacctttctagacatgagaggtcatgtatcatgtctggtcaacatagaactgggcgttgtacatgtcggtctaccaaccgggatgaacatctaaatgatgacacaagtgccagggctagcatatccagaattgtcatgttggctgaggcattgtttgaggtaatgcttttattttgtaaacttttgtaacagtatgctcttgaatacttttaatatgagttaaatattttgaacttaatttaattaggttctggatgaaattcaccagcaatctgtggttttatcctcccgaccttctgtatcttcaattggatctgttcctgcacctaatgaagttgtcgaatctttgcctgtgaagttgtataccaagttgcacaaacaccaaagtgaggaagttgctcagtaagtatccatgtttatatgcttttgcatctattttccagtaaaaagtaatttatttgtatctttgtttgggtataccgtatacaaataatagttgtatattaacttaccttgtgctattttgctattttcatgtgtgatattaggacctgtaggaagtatatgtaaaggatttggctgttattcaccaatatctttacttgattagtttatttaaacactagtatcagttgctagatcgaagaggttagctcaagtggtttgctcaaatgagttctgcctagcagtttgctagaattttctacctcttaatgactgcatggcttagcaggaagatcattgaatgaccaaaataggatccttggctaatttatcgttggatcctggcctttttcttctttatggtgcataattaatgcgtggtgcttgtactcttggacctgtaaatagtttttgggatgataatggaaatttttaaattttttgtaaactagagttcccacaatatccctacaataagttaaaagttaatgctgtagctctgggtttttagcaacttgaggaactgggaatctgattatagagtctggctgtctgttgaaatggattatatctagtggtatatttgacaccatgtttactaagtgttttgttgtttgatatgcactctctgattaaaaggcactaatggcttagaagatgcattgtccattgggtgtgtatgatgtgctattgtcacgaaattacatagttttctcttttaaccccctgagacgttgtgggacattgttatggaggtttattttcacatttaaaacaatatgctatatcaataaactcttatgtactctagatggttttcaattttttatccagatgttacatatgccttgtggagtacgaggaaggtgacagaatgaggatattgccttgtcaacatgatttccataaaacatgtgttgacaaatggttaaaggagattcacaggtgaataaatttaaaaacatttgttaaaacttcgtaatttgacagtctgagcaattcattgacgaaaaccaatcactatttcattagattaatagaataatgcattgtgaagatcattctgaaaagaaaaagcaagttaataggcttttggagttccttttttgctgatttgtgtatggtatgccagggtatgtccactttgccgaggtgatatatgcagatccaattcattacctgcagaaaactaagatgggcaggatttgcctttccaatgaccaaggcataatttagaaatgacaaaaacttctcttctttgtatatgatgctctagaagttcagtccgtttcttctagtgttttcttcaattcttttgatcctgccttgatttatgttggtagaaatggactgaactactggaaagtttattgagagagagctttttcaagttatgacgacgaagatgttgtgaatatgatgaggcccccaaaaaatagttctattttgttgtatcacttaagatagccaggccagtattttccattgaaaaagaatcttttgtggcatagcattgttaaacacttggcattttgtaaagtgaggaggaagactccccttaatagaaaggtgttgaccgtcctaagttgaaagttgaaacagctgagccaataaccaagatttttttttttttttttgacgcggtgatccaaatcacacatgattaacaaagcagcaatccacaattggcgacggcaccttctcgaaccaggatagctcattgtctaaccgaagagcatgttttgccaaaccatgtgctgcagaattcgcattccgagccacatgggacgaaattggtcccgggagtttagacaataaagttatgacatccttaaatagcacacccagctcgttgaaaaaaacttttcctttgtttatagctatgactagagacagaatcggaaaaaacctctttagtttggattctgcatgaaagagcccaattaagtccaaacaaaagtgccaaggtctccgcttgtaatacagagatacttcctgaagacataacaaaccagaaaacacaacaataaaaactatgagtaaaagttaaagacaaactaccacaaaagacgcaaccccaaaaacgataaaatcaacaatgctaagaaagaataaaggaaaaaaactagccaaagggataaccctttggctagtgaaagaacaccataaaacataaaataaacattttctccaaaaaagaggcaaaacatgtaaatcttgatacatttaagcctgatacaagtgcactctagaactagcctaccaatgtttaactaatgagtctaaaaatacctaaccacattatataatcaccaccaagtactgctcaatcacttagctagaaacatattttaaaacttgttacgtcagacctaacccttttagcaattaa

SEQ ID NO: 117860 - DNA, 3999 bp, Cannabis sativa
  modified_base (52)..(63): a, c, t, g, unknown or other
tgttatttatttttattcattataacattattatagaaccggttctattttnnnnnnnnnnnntttgagttattttatgttatttaaatttaattataactggttctgtaacataatagaaccggttatatttttagttatatctaagacattttattctagtaacttttccagtgacggtgatttttccggcgacagtgacttttccgatgactttttcggtgacttttccagtgataatgattttttcggtgacttttccggtgccagtaacttttcggtaaaacttattgttgttttacaaaaatatggcataagaaacccatataaatgtaaaaaataaaaaaatccataaccctagtgttatttatttatgccataaaaaagtaaactataccctcaatttccatatttatgaaaaatcctctataataaactatggttaagttgagaaataattattttttgtatccattaattaaaaatactcttatattatatatttcattaaaatgtatccacttttgtgagtagattttccaatatacttttaccctccacttaagtctagcaccctaaaccctagtgtaacacaagtttaataatcgtatcgtgtttgtgtttgagtttttgacacgtttaataatcgtatcgtgttcgtgtttatcttaatcgtgttgtatttgtatttatcttaattgtgtcgacacatttaattattgtgtcgtatcataatcgtgttgactacaatagttgtggtgacatcttaaaaattatttagtcacttcacgaagattaattgtgactaaaagtgactttcagtcacaacattaaaattttaacgggactttatagccacaatcgtcacagaaaaaaattgtaaccaaaatttttagtaatggtattttaaatttttagtcacaatttttattggaacaaaaagtaccaattttttttttttttttgtagtatataattaggcagaagataattacaagttttctaacccaaaacataagttaagttgacccatttataatattgttgagactccttttcttcaattaatattgatacaatttataggtcaaaaaaaaatatttatataatttttttttagaattcacaagtaattattgaatgacaaataaaaaacatgtcatcggccaaaatgaaatttaattagtcaagtaaacgttgagaccaaattcaatcaaaatgcgaagattctaaattttaattcatcttttttgaaggaaaaaaaaatgaacattatttataataatacttgtcctcgtattgttcttatacaattaaagataatattaaacatggtgtaaaaaaatatacaatatatacctcatttctgaaaactaatgtctcatatacagttaaatgcaatcgtcaaagactgccattttaatcataattaaacaactttattttattatgtggtttaaaattaagtctaacattacttttgaggtgatgtgttatttttcatcaagtgattattacttttattttactcagaagatctaaaatctaatttttttttacttaaagataacaataacgaaggaaggcaaactaaaataacttataagttaattaaatatacatctacaagaacataattgcatgagtaaacttaattaacaactcatctatacataatatatatgcacaaaatgtaacacacaaaagaaaagcatcatctagaaaattgttgttgaaataaaaagttatgtgatgatcaagacactgtaaaaaaaattatttttagtcacaaaaaaatttataattaaaagtaaaagatttgtgattaattataaatcattattcttatgttgtgattaaatggtttgtggctaaaagtgttagtccaacaaattacaatttattatgatcaaatatttttcatataaattaatatatttttgatatagtgtaaaaagatgtatttgttgataatttctttaattaagtagttaaattaagtataataatttaaatttctcttttatcattcattatcagaccaaaatttataaacccaaagcataaattcaggcgacaattaataatattgttaagattttctttcgatctatttttattttattatcatcatacacgtttagatagtagaaaatgtagttagtagctacgagtacatgccatataattaataacaaataagagtagctacaagtacatgccatatagtcaagtaaacgttgggaccaaactcaaaaaattaattcacaatatttctatgttaatgtattattttataagctaataagttaattttgtattcattatattagaaaacattgtctcatatgaattaaatataaaaatattaagtcatatataaaaatatgaactactattcatcaccaattgattttgagattggaaccccatatttcttgtcatagtattagagccatagggcatatctcctaacgggctactactcttttgcgtcatttcataactaacgatattaaataatatggtcaattttaaactatcgcaatataaaaaaaatatctttttttacacaatatacgctagttcaagcacacaactcaacaaaaaaaaaacaaaaattaaaaatattgatctagacactcgaaccatctagagcccaacataatttttagtaataattgaataccaaatactagttaaacatattgattggctggtttattttattttattttatttttcgaaagaaaggcattgtattcaattaaaaatttatcattacaagaatactcaaaaaatgcagacaagcatatatgtacccaaataaacttcatattaagacaagtaatagaaatagctagtgcgtaaactacactatttacaacacgcaaattaattagcataacaaggatcacaacaacatgccaataaatttttgtagagagtgtcctattcaatttttgtattatatatatttgatttttaaattattatcttttacattaaaacattaattgtgcatataattttttttagatgatatatatatggattaaatttagtattttatgaacatccttatatataccaatatttacacacagtataaagtaaaatataagaaatagattgtcaaatgattttgctaaaaaaaaaggatagggtatggtgggaacagttgtagaaaattccttgttttatgtttgcatttaaaggcgttggtattaatttgtcattattcaagttcctatatacttttatttaactaggaagattttagatttttatttatttttgatcaaaatctagctagtaattaaaatgaaaataatgaagaggcaaaataaacttatttaaatatgtgcacgaacaaaattgcattagaaaacttagataccaatcttaattaactactcacatatatagctaaaattaaaagaaaattattacaagtgttgttgtaactaaaagtaaaaaaatttgtagtgatggtttaaatgtgttagacttagacttttatttaacttggaagactttgagattttattttatttttatccattttatttattttgtaaatctactagagtcttgaaaaaaaaaaaaaaacaaagaaggccaaataaactacagaggatggaaaaaatatcaatactgaaattaaaattaattatgtgggcaaacaatatagctaaatgtacttattattctataccacaaacaatatataaatatatatatatatttatatactttttgacttgacttggatcttaattcttcaatgaatgagttatattctataccacacataatgtagggcaaaagaaattacaaattttctaacacaaaacataagttataagttgaccaatcaaatgttgagattccttttctttcaattaatactttagagtttcactattctttgtggaattaattaagggcttttttcataaatgtacaacaaaaataaaataattacaaaaaatgtgc

SEQ ID NO: 117861 - DNA, 2449 bp, Cannabis sativa
  modified_base (2187)..(2187): a, c, t, g, unknown or other
  modified_base (2306)..(2307): a, c, t, g, unknown or other
ataataataataataattttctatcaccatatatattactctatatatctagcattgatattttctataagtatcaatgtttgcatggatatttccatgtggatattaatataatttttctttattttctttcttaaaaagtaaatatactagattaaattatttaaataattataaacggttcaaatgaaaacttcacaaagccaattttcaaatcaatattttcttatatttttaaaatatatatttatatatttgttatttatcagatattttcaaaaataaaagtattcattccatcaaaaagaaaagaaaggttaggatttatataaaaaaaatagagtgtaagagaaagaaaaaagcttgaagcttatgttattattctgtactttgaatattacaggtaaagaagtatatacagagatatacaagaactaagttaattagaggtatggctaacttaacttagttcaaaattggcctaactaactaagctaagaatgactttaactgaattgtaactaacactaatgttgtaatattctcttttaagatggcgtgtatatgttggagacttaccaatgaggtttttgtaattggtaggatatggtaaaaatttgcctttatccttgctaagttttaggttaggttccattagaatagaggctggttgagctccaaggtaacttgtgtcagttaataattgcaggctgaaaggtcgttgtgatatagaaatgccttgtttggttctacctatttttaggccaagaaagaacctgagcgagccaatatccttgagcttgaattttttgtcccagaattgtttgaaatgagtgatggccgactcattgttgctagctacaattatgtcatctacatagattaacatagctaggaggattgttggtgttcttttgatgaataaggagttttctgaaagggattgatgaaagccttcagttttgagtgtggtattgagctttttgtaccattgtctagaggcttatttaaggccatagatactcttgttgagcttacaaacaaagttgggtggggcagtataccctgggaaaattttcatgtacacttcttcatggagatcacaatgaagaaatgcattgttaatgtcaagttggtggacattccaattgtacattgcagctagtgcaaggaaaatttttagtgtgttaaatttagctacaggggcataagtttgtacatagtctatgccttatttttgagtgaatcctttagctactagacaagctttaaacctctcaacttcacctttttgattctatttaactttgtatatccatttacattcaatggctttatgcccaggggtagtttggttccaagttttatttttctcaagagtttgagtttcattatccaaggcttgtagacaatgtttgaattgggaggcttcagtatagaaatggggttcgagttgagagtatgttgtaagaacagcagccctgaattgggaactgagttttgcataagatatgaactcctcaatgggatgagctattgatgtagtatgacagacatagtctttcaaatgaggaggtctgtttatgtgtcgaccaatttttaaggtgataggcttgacttcattagctttgtctggtgtggtaaaagagctattgtttcttgatggtgcctcagtagtggaggttgatttgattgttgaaccagaagaggaagtagttggtggtacctcagtagtatgaattggtgtgtgattgacaccagtagttgtagttgttgtatctcgagttattggtatgtgaactagagtaattagttattggaaaaactgatgtatttccttatgtgaactttaaccagtgaggggaaaaatgtgttcgtggaagatgacatctcgagagtgataaatttttttagtttcaatgccaagaagagtgtatgctttcatgccatggggatagccaatgaatatggaggcaagacttcttggtgagaatttgtgtcttgtagatgttagagtagaagcataagctaaacatccaaaacatcttaggtagtcataattaggtgatttgttatgaagttgttcataggaggtgctaccttggaacagtgcagaaggagttctgttcattaaggtgccgtttggtaacacttttgtttttcaattttttaatcacaaaatgaaantaaaatttttgtttttaaaaaatttatttttgaaaaacaaaaatgcgttctttaaccacttttgtttttcaattttaaaaacagaaaacaaaactgtgttctgtaaagtttatttttanntttatttttttattttatttaagtcgggtctaggtccgaggtcggatttgggttcaagtcaaaagtcgggtttagcgccagggccgtagggaggggatttggattcgagtctcgtcgtaatccaaaatattgattaaaaaaa

SEQ ID NO: 117862 - DNA, 718 bp, Cannabis sativa
tcaaaattgagacaacccagaagccaaaaaaaaggtaccttttcggtttgagtcggagactgaggtgggttttgagaagaacaccgagtagtcaaccggctgcgaaatgaggagtggttgagtgaggtagggaagctgcgaatacgattggtggttgtgatgggaaaagtcaagatttttggggttgtgggtgaggagtaggaaaagtaatgggaggagagaatgggtgccatttggattgtatgtagtggtactgactgtgctcaaactcactgaatgttagaagagattaagcataagcaagaggtggcgttgaagaagagagaagagagagaatagagatgagcagataaggtttgttttattggtgggttggatttggttagtagtgttttagctgagctgcaacataagtcagcagcagtctcaagctatggataaggaaataaatacagaggttttctcttttcctggaccctaatgaattcaatccccacttatatagatgataattattataattcaattttatatttatagcataattgttgttaatattctttgtatttattttgagtttagagacttaattagttgactttgatgaaataagaagaaaaagttgtttgttttctttgtgtgattattaatagttagtaatttttttttttaaattttgacatgtagtaaatcgtgtctcttgaactttttttgccgt

SEQ ID NO: 117863 - DNA, 1900 bp, Cannabis sativa
  modified_base (415)..(417): a, c, t, g, unknown or other
caccgtgcggtttaagaaaaattcaaactgtatttttttttttttgcagtgcaggcagtttgagcggtttgataaatacccctactaggtgtggtcctgtgaattagtaataatatgtataatatgtaaggattattgataccgcgtacaaaaaccttgtgtgtttttatttttctggactgtttgttgattttattctgcagttacagagttgtgttatgtagctacaaaataactgtttcagtactatatttattattttgcatttcattaattaattaattggtaatattaaaataaagaattttaatacatatataaagataaaaaaaaatagtttgagaaaaaaagagagaattagaaaaaaaaaaaatagagagaagaagaaagaaagattaataataataataataannntaataataataataataaaggttagagttaaaaaaaaagaattcagccaatgactaaaataaataaagaaaagattaattttttttttaagctttaataagtagaaaataaaaaaaaaaaataaaaaaaaaattaggtatgaaaaatataaaggtaaaaatttcatttttaaagtataaatataaagtttggataaaaactaatattgggtgtaaatgtttttagacattaaattgaacataacagctgatattgccaaaaatttgtctcttaaaatcatataatttatttatttaattatatgtgatataataggaaaataattagatataggtgatttgaattaggttttcagtgagattcaatctcaactactcaaaatattttatcctgttactttaattaaataaacattttggttgttgcgatttccagtgaggcaagagggacccgaagtaagcttcatcttggttcttaggagcaagtttgtcttccaaagaattatggagggataggattccgagaaggaagaaagtggaacattgcattaatggctaagtttttatgggccatactagaaagaaagataatctttgggtaaaatagattaacaccatttacttaaagggtcaaaatatctggaatgtcactatcaagcacgatatgaactaatatttttgaaaactccttaagctctgtaatataatagaagactttaatctgattcaggctgaaaagggagggagattcaaagtgaaatatttttacaactccttacttactgggaacaagattgagtatgacacgaatgtctagaataagctaatcatgtcgaaatacaggtatacttattggaaagtaatcaataacctgttattaactagaaaccacttgagcagaattatgaacatctcctcatctcactgcccggtttgcaatttagagaatgaatcccatgatcatttgtttagggagtgcatctttactaagaaagcagtggatgaaattggtacttggctgggtatttttcattgggcgagaaataggttggagcttattatttggtgttcgaagtctcaaattggcttgaaaaacaaatttatcaatgcaataatcgttacaacgatatacatgatatggaaaaatagaaatacatgtgttatttattgtgtttgtagctcaattaaggcaggttgtaaagagataaaatatctagtgaaatgacgtattttgggtgtaatcaattccaatgtcaaaaagggtgataagtatattttaaatgtaattgagggatggtagtgtgttgagtgttttgttgtgggttgtttcctttcctgtaagtttgcattgtttagttttgaataaaatttatcctttgttcaaaaaaaaaaaaaacattttaacctaaacctagtgtgtgcctatacaaaggaagagctgtaaatagaataccaacatgtaacgtccccgcttcaagcctcca

SEQ ID NO: 117864 - DNA, 2365 bp, Cannabis sativa
ctctctctctctaacttatgctatttcattctaaatactcacttgaggattgaactcttagacaacatatctgaggagaactattgttgagcattgagattaataaaattacaagtggattatagccaattaccactgaaaggagatgaaccactatataattttgttcttcatcatcgttaattttcttttcaataaaccagtttacttttgatcgacattcacttgtgtttatcttgctcatatacaatcttcttaaatctattgacgaaaaatcgcatcaacaaccttattctgttttccctatatttattaacttttttttaaaaaaatttctcataaaataactatttttgttaaaaaaaaaaaaaaactatatttttgtacaaattgaataaagacacgtaaaatttgtaatttattagttttttttttttttttgaaaattatcaacatcattcaaaagtcccaatagcaaggacaatgtaagagtagagatataatccctactaataatacaatcatctataaaataagggtcccgtgcaagataaagtgttatttgttttaatagaatctgtgtgcaatatagtttttttcttcgcaaaatttaatttatgcgaaattaaacttcaaaaaataaaagaaaaagttagaaatatatggagaatacagttaaaagtaacaggtaaccaattgtgttatactatttttttttttcttaaagcaaataaatcataaacacttctataaataattttaatttgaaaaatgccacatttttgcaaactttaccttaaaaaccataaaaataaaaattctccaaatattagatgaaatgaaagggtggtccatttatatacctgtggccaaataatagctgcagccataacactcacgtaattcagaagcatgagtccatgacaaatatatgctatgggttttgctccaaatttagttgagaaggttatgattccaaacctacaaataatccacatattgttttatagtaaattatataaaagaaatacaaccaaagaaaaaaaatacatttattaattaaaattgatcataataaacttacttgcggtcaccttctatgtctgaaagatcttttgcaatggagatgggtatactcaacaatgaaataaaccaaaagagcaaacaaaaagcagggctgcacaatacataataataatacaaattttaccataaagtttaatatatggtaacatatatgagatcaatattaaaactaattattctgtaacacaaatgatcattacattatattttgaaatcgataattaataactcacctccagttggctggaagcccgagactagccttacaagcataatagacaccaacgcttgtgccaacatacaactgtataatttgatgagtgagatatttatatagtaattacaatatatacaatgtcatatatatgtaacaattaagatataataatgtggtggaaactagtagctaagaataatagataattaatatatgtatagatatatataccataacattacagaaacatgctgtaaaaggattcttcttccatctgaatggaggagcagaatagagaaagccaaaaaagatactagcagagtagagaaaagggaagaatggccctgagttcgttataattgttaatgtgaggccacttattgtacaaactatagtcaacaaccatgccaattcaactgaaatttctcctgatgctactggcaaattaggtttgtttaacctgatcatcaaaattataacattaattatatatatcattcaattcaattgaattggtctcacaacattaatcatattatgtaatagtttgtattaaatacatgactgtatgcatatgacattattatctctacgtactgcaatataagaaatcttagatttgtcagtaaataaatgaaaaaaattacaattaaaattaagatcattatttaagtatattagtctcaaaaataacaataaatttgtaactaaagaatttttagtttacagtactcttgttgtaactaaaaacgaaattaatgtattaaaaaaatatactactttttagatacaaatggtatatatttttttgtagtgatgtggttaaatttgtacatttcataaaataatcaataccgcaccatatttagatgcacacggggcgtggaattggcggagagtgctcccctatatccctattcccgttaaaaatttaattcctatccctgtttattccccattgaggatgggatagagacggagcggaaaattttctaataaaaaaataaagtttataataaaatttttaatatacaaaaatttaaattacataaaaattaaaat

SEQ ID NO: 117865 - DNA, 1374 bp, Cannabis sativa
  modified_base (596)..(597): a, c, t, g, unknown or other
ttgaaaaatattttcacttttctacttttaaaaacagaaaactgattaaaaaagtattaccaaacgccaccgtaattattaaagaattaaacaaacaaaaaaggatgaagtgaaaaaaaactaaaccttaaaggaagaggaaggtttggaaataagtgagggttcctcaaggcaacaggtagagtaaagagaaaaaactcatcattccaatcaagaacttgttcatcggataaaacaccagagtctccaaacccttctttctctcccggattccgccatagcttcttcctcttctcctctattggtagtttgtacaattcttctaccccttcctttatcttctccaccaaacaattacttacgccatggtttaccaactgcaaattattattatttaaaataaaattataataattcaatatatataattatagttaaaataatttataacatagaaaagcgagttcaaataatttattttacaaatttgaatttttatgatatgttaaaaaactacaattaaaattattcaaatatcaaaaacacgaaagaaatgcatgaatatatgatttattttcatattatatatatatatnnatatatatatatatatacctggaaaaagccccaatccttgcatgctaagtggagcttattgagttcagattcatataattctgagttatcagattcagacataagcaataagttttgaaagttgataactggaatttcatcagaagaaattacagaagaattggtttgaatttgagtttcatcatcatatcgaatgtatctttgtggaactgtcaccaaatttggatcttctgccaattcttgcagacatggcacaagcactttagagcattcaaagtccatactataattaatttggcttctttggctaatatgtcaatatatatttatagatatcatttcacatcctttattgttaatttattggcttttgcttttttttttgtcttcttataaataaatatattatctactctttgctacacttgtcttaattagggcatttgtttataaattaacatgatgactacttgacatttatttgaatatttaaaagtattttttttttgaaaaattttattgattcaaacaatatttttgaacaatagaaagaaattggggaggaacatcatccacactcaaaagatgcccctaattttttagctctttaattccttgatttgtgataggatgctcttgcaatgcaatgaacaacacacactacaaaaacagttatttttagtgacatttttttagtcacaacattttttttttataactaaatgtgacttttagtcacaataaaaaattacatataactaaaatatagtatttaga

SEQ ID NO: 117866 - DNA, 2984 bp, Cannabis sativa
ggtggaagtctaataactccaacggaatacattggttgagttgggataaacttgcttctcataagttcgatggtgggatgggatttcaggactttcgtgatttcaatctttcgttattagcaaaacaaggttaatgggaggggataatttagcttccaagatcttcaaagctagatactatcccaatggtactttccttactgctactattggaagcaatccaagttacatttgacgtagtgtattggaatcccaagcattggtgcgagcgggagcgagaaggctggttgggaatgggtcaaatattgctatccttcatgaaccttggcttatggatgaggctaatccttttatagaaactactcacccgagtcttgaagggagaatggtcaactcactgatgaaagttgacaaaatagaatgggatagtgaggttatttctgatgtcttaaatgatagagatcaagcgctcgtatggaagattcctttatctgaggcaagcgcacatgacgattggttctggttgaaagatagcaaaggtatgtttactgtgaagagtgcttatagattgcaacatgggcaaagtggacagcctattcataatttttcttctgatctgtggaagaagttatggacattaaatctgccccctaaagtccttaactttttatggcgtgtgtgctccaattgtcttccaaccaagtttatgctgtccacaaaacatgtgcaaattgatacaagctgccctttgtgttctgctgcaccagaaatggcactgcacctattggtgcgttgtagctttgctaaaagctgctggcagcagacctgtgttccgattgtggctcctgctgcaatgacctttggtagctggtttgaagaagggttctcaaggtggagtgaggttgtttgtgtggaggcggcaatgactctttgggcgttgttgggaaggttcgtaatgaggtggtgtggaattcggtttctccttcttttgatgaggtaattaacacggcaaaagtgaattactcggactggtgcaatgcacagcggttcgagtcagagtctcatacagagcttcacaatggttggccggagaaatggtatcccccaaactttcctagcattaaagttaatgtcgacggcgcgctttttgctttggagggtcgttttggggtgggattggtggctcgagatgttgcgggtttggtcattcaggctgttactttgttgaaaatgggttcgcttcagccacatgaagttgaggctattggaatcaaagaagccttgagttggatcaagaccaatggatggaatggtgtaattttggaatcgaattgtttaagggttatttctaatattcaatgtaatataaatatggtctctaaggctttctgtgccgagattggtaacatctctcttagtttagttttgtgaagcgatctgcgaatagggtagtgcagtgcattgtttggcgcgatcctctcttcttgaggctgatcgtacgtttaatagttttactttaccttttgtaatttctttgttggttttggatgatttaaagtaatgaagttacatttttattcaaaaaagatttatgaattttaaattgtgttttaaataataattagtttattaaataataattaatatataatattttaattttacgtagtttaatatctttattataaactttatatttttattaggggattctccgccgcgctcccattaggagagattctctgccccatacctgatggaaaataaacggaaatgagaattaaaattcttaatggagatgaaaacaggaaagcacttcccgttaatttccaaccccgtatgcatccttaattgtatgataagttcttcttaacccttgtaaattgtaattacaatagctaatattcttacaaaaactttattgaattattggacaaaattacaaatcacaaactttggagaggcttgttctctcgtattccaatttgttcgagagggttggagctctccgcaacgagtctcaactcttactaattttctccttacctttttaagagactccctccccttatatattttgcggtgccttaaaataattgtcacatcagcctctaaaactaatacatcaacttttaattttatttttttgaaaagaaaataatctttattcaaccaactaaatcagctattacaatatcctgtaacaatgacgggacattattaacagtaaaacgaagacctgacaaagagcgagagctccaagcaaagaaatgagcagttctcttcgcagattgacacacaaaagaacaatgaacattaacaaaagaaattaataaccgtttgcaatactttaactgaactgagctagaaagtgtctggattgtgacaagactatccgtctcaagaatgacattgcttcaatactttaacttaacccaactcaaagcttcctttaagctcataacttcggccacaaatggttgcacctcaccatgccgataaaaagcaaaagcttcgacaagatggccatcagtattacgggccacaataccagctccataggcacgttctgctgcaaacaaagctctgtcaacattgatcttgaccatactaatactcggcttcacccactgctctacaacagtccaagttccagcaggaactagcagaggttaacaactaagactaaagtctaacttaatctggttgcttatcactgtaactttctcatggtaagcatttactgagggtcatttgagttttccaaatttagaagaatgacaccattgcaatcgtcaagaacattgttgaaccgccccaagagtcaagaaaaattctcaaaactttcaggttcagttagccacaaagcagctccaaactcaaacctggactttgatggtgtattagataggcctcacaaagtcaattgaggtgaaaaatgagatatcatagtcggaatgaaaaaacaaaaacaaaaacagaaa

SEQ ID NO: 117867 - DNA, 1235 bp, Cannabis sativa
gagagagagagagagagtaccaaacgaatctgagagattgatatgctagagaagatgaagttacttttcactgagaaacgaatctgagagatcgatctgccggagaacacgaagttgctcttcaccgagaaatctaggccagagaatcggcgaagatggctaaacgggaaaatgaagaagtttgggtgagagggagagtactggctaacaccgtccaaaataatacaatacaaccttatacactgtttttatttaacatagaataatataggatagattgtattaaaaattagggttgtaatatctattacaatacaaggtcccacccaaacatggtactcttataatttaatacaatacggagcccttatacagagatccaaacgagccctaaatgtctatatgaaatgcagagttaaactaacatatacaccatataattaaaggatccaaatacttccaactattaaatctttgaacttcaatcactacaaggaaaagagcctattgacacaaacattatttttttgtgccaatatactcttagacacggcatgtcgggcctaaagattcgtgcctaaagagagttgataggcactacatttaaatgtcagacctcatattaatttttaaatagaaaatattaatatatatatattatataaaaacaaatatataatttataatatatattactttacaacatatttataaaaaaatatatataatataatatattatttatataaatctgaaacatttgatacaaaaaatttctttatccaacaaattttatgccatataataaatatttaaagtctataaacataaattatatacaattaataattcagaacaaattatatgcaaatatctacttaaaaattaaaaatattattacagaaagaaaaataaaattatgaagatatcttgaaccaccgatcggatcacacaaaccatgttaaagcttgaacttgcgtggtggctcgttgaaaacccatttgtccccaaatcggaggcgcgttaaacaccgatccaccactgtgatatcgcctcatcgtacacccaccgccactgagcgtttcttttcgaactgcgtcgctccacaaccacggagtgtaccagatctgctttaatcgcttcttgagagattttacgactaagaggtgtgcgtctctacacactactacaaattaggcctttagtgacactatatagtgacactcataaaagtg

SEQ ID NO: 117868 - DNA, 1355 bp, Cannabis sativa
  modified_base (1304)..(1304): a, c, t, g, unknown or other
agcaataatatcaaactcactaacacacaaagaaataaaataattatccttgcacaattaatatcccaaaaaattactattttaatctggttagtacaagaggttgcacgaaaaaataagcacttattagaaattgctcatgatattttatatgaatataccaaaatatttgtgggggatgccattcttactgcaacttatttaatcagtagagtgcccactaaggttttaaataatactactcctttgtcatacttgaaaaagttttatccttcatctagaattaattctgtcttgcctctaaagtttttcggttgtactgcttatgtttatcttcctaagagatctagatcaaagttagatccaagagctgaaaagtgtttttttaggctattctcctaacaaaaaggtcataaatgttttaatcctgttacttaacggggtcacactactatgaatgtttatttcttagaaaataccccctatttttccaaaaatttgattcagggggagaatgtaggggaaccaaatttgtggaaagttattgagccattaccaaaaataattaacactgtttcagtaagggaaaggcacccaacatataaacgtcgaatctgagcttggtttgtcagaaaaagaaatactacgattgattaaaaattgtgataatcttgagcctgtggtttattcaaggaaaatacctttgagaaaaataagatcaccaagtcatacctacacaagatcaatcgttggccctgagtgatggttcaacaagtactcaaggtaattctattcccactgctcatttatctcctattaatactattcttctagatgtttctaaaccaggtccaatcacatctgacttagatgatcttcccattacatttagaagaggaactcataattgtatagatattatattgccaaacacatatcatatgatcatttatctaaaacctgcagggcattgaccactattcagagcttgttgggcctagaaacatataggaagcattggtgaaccgaggtggaacatggttgtgtctgaggagatgagtgctttgaaaaagaatgggacttggataattgttaaattaccaaaggggaagaaaattgtaggttgtaaatgggtgtttactataaagatcaatgctgatggtagtattgaaaggtacaaagctagaatcgtggtgaaaagtttcacttaaacttatgggatagattgtcaagaagttttctcctgctgcaaaaatcaattctaattggccattactgatggaattattttactaggatcttanatctactcacaagtatgttaatttaatagcctaaatatgaacttctaaaac

SEQ ID NO: 117869 - DNA, 1366 bp, Cannabis sativa
acatgatgattgtagatgtaccaattcgtgcttcttagactttaatatgtactaaattgtgtctcccgaattttaacatacaccaaatatgtctcctgaactttcattcacattgggcatctgttagtaaaatttgaataaaatccttgaatctaacaattataatcgttcaataaaattttttaacgacctaaaatttttaaaataaatacattttagtacatattaaagttcgaaatacaaaaatcttaattaacctcacaaaaatcacatttatattgagaacattatgtctttaaactcaacttttactatattattttgtcaaaattagagctaattaattggcttttttagctaatgaattttttgaatctagttatactaaaaatttattgtgatcaaactcaattttaaagatcaaagtttaactttttttttcttcttcttctcattttttttttatgaaataggtctaaaaattatttttttataaatatagttcaaataaaaaataatacaaaatacagagtccaaaagatacaaaccttttatttattttaatatttttgaaagacatagtgcaaactagactttatgataactaaattagcctttcaaataatgcatgcagctgtctatagttttcaattgataagtgatgttcccattgaaatgaaatcaccacaatagagaattagcctatgatttcatttattattctttaataatgttccccataatatatatatatatatatttatatttgtgattaaaaatttagacccttggattggattgtcctattcatgacctaatttgccttgtattaattttattttattttatatgaataaacatattttagtgcatggcatattgggttctccactagaggttaggttaattaaatttcattaaatttttgctgtgtatgtattaacatttgggttttgatatttttctatgctatatttgtttatagtatatagttaatttttatatccgaataataatataaaagtaacacttgggacttattttatgtcatagtgtattaccctaatcaattagaaatgtcaataatgtgtttttatacattaatttataataataaatttaattaaaattgtaatttattaaagttgtgattaaaacatttttagaataggttaatgctagtaagggaatgataatgtgaaatattatcttgtttgttttgagagtttagccttaaaatgttattcccctattaatataagtacctttgatgatggtaatgttaataccttaaaaaagatgggtaggattgaattatattaccttccattatattaatttgaatagcatttttaaattaataaat

SEQ ID NO: 117870 - DNA, 1248 bp, Cannabis sativa
aattactacttttacatttatatatctcatcatttcattctttttgatgatccctttcttattatggttgattattcacaaccatgaaaatggaaatggacagaattaaactgtgttcaaattatacatatataatgatgagcaaagtcttgtacttgtatacttgtaaatttaaacgtttttgaaatatattgacaaattcaataatgcaattattattattatcatcaattagaaaagccttgcttgtattcttgtccacatgataaaataattaatattaataatagtattgcaggattatgtttaggttgcttataaacaatgttcatcaattttagaattatttgttttgaggggtttaatcaaatctaggctctacaatgtcatttaatgtgtgaaatgaaattagctaactatatctattattggaagtacaacaatgttttgaggggtttaatcaaatctaggctctacaatgaaattagataactatattcctatgttttgcataatcacaaacaacttcgaatatagctacactttttttttttttttttgcagtggaacctccttaaaccaggatagctcattgtctaaccgaagggcatgttttgtcaaaccatgagctgcataatatttatcgcgagtcacatgggacaaaactgcccctgaaagtttagacaataaaactataacattttcaatatagctacacttttgttatttaataatattacttttgtactttgtatttgtatatgaagatttggttgaattttgccaaataatattttagaagtatgtttgtaaatatgttgatcaatctttcaaataacacaaatgtcatcaagcttcttgtattgtggtggatttcaagaccacatggcatcattttattcacatttttaaaaactaacacatttaatgaaagttatgatatctaatgggctcataaataggtaagctataactttgatccgattggcgaagcatggctaaagcataaaatgaagagccttgattctaatcagtaaatcttctaagttctaacgacacatcaaccattattatttagtggaaattacgctcaaactttgttgataccaaatgcaataattcaagtatacgcgttgtccttgatctttttagtaggggtgatcaacggtcggtttggtcggttttttacacaaaaaaaaatccaaaattcgattttcggtttttatggttctaatccgaaaaccgacc

SEQ ID NO: 117871 - DNA, 1517 bp, Cannabis sativa
  modified_base (1440)..(1445): a, c, t, g, unknown or other
ctccaagggttgcttgacatagggtttattggttgtagtgaactcaaactgcaaggaatgtgagttcaaaatccctcgagagtaactaagatgagtccaacactagaactgcgcttgttggaggatccatctacatacaatttccaggaaggtttagagtccccttgagctacagtctcaaagatgtggacctgatccttacaaatcatgggatagtcttgtttgaggccaatgcatttagcaatgaagtctgctaatgcctatcctttaattgctctttgaggctggtaggtgatcttaaattgacctagttcagttgcccacttgagtaggcaccctgatgcttttggcctcatcagaacttgcctagtttgttggtcagttagtaccttgatgtgggagcttggaagtattgccttatcattatttaggctaggaccaagtagtaggctagcttctcaattgggggataccttgactcgaccctaatgagacccttactgatgtagtagatatggtgttgtgttccttctacctcatgcaccagagcagtactggctgcatgctcggtgatttctaagtagatgtataattcttccccatctattggcttggataggatgggaggcttggctagatgacgtttgagaacttggaaggcttgctcgcgttcatcagtccagtcaaatccctttttgcttcctttaagtaaattagtgaagggaacacacttatcgttcgacttggagatgaatcttgtaagtgcaacaattttctccattaggctttacatgtcttttatccgcgacggtgacttcatgtcttccaaggccttgatcttctcaatatttgctttaatacctcttcagttgataatgaattcgagaaactttcctaattggatactgaagcacattttagagggttgagcttcattcaatattctcgtaggatgttgaagcactcctctagatctttgatgtggtctttagatctttttgacttaaccagtatatcatcaatatagacttccatattgtttctaatttggttgtggaacttactgttgactactctttgataagttgcacctgtattcttgagtctaaaaggctttactttgtagcaataaaagtcgatgttagttcaaaatatagcatgctccttatctagtgcattcatgttgatcttgttatagatggaataggcatccatgaatctgagaagttcatggtcggctgtcgcgtccaccagttgattaattcttggtagtgtgaaacaatctttacggcatgctttattgaggtcggtgaagtcaacgcaagtcctccacttttgatttggcttaggcaccagaacaaggttggatacccaaactgggtagaaatcttccctaacgaagtagtttttgttgggattttacgccctaaataaaactcnnnnnnatataattagatttactaactaataaaagatcatacattattttatgatacattgtccacatgattactttc

SEQ ID NO: 117872 - DNA, 768 bp, Cannabis sativa
gattcatgttatgatttagttcggtgttactaagtttattaccttataatctccgataacacatgtgagttgttagaattctaatgattaaattatactcatatttgccatatgtattttatactaatcgtgttgtctataattaatcacaaacaaaaattgtaacttgtactattcatatataataataatcgggatcatttaaaaaaaaaaatttacaaatagggttgtacaaaaattttaacatttttttacaagattttatttatattaacagtattttaatgtatttttattttattggtaatgtatattatttttctgttgttttaatattgtttttatgttacaatcatttggtttttttatatatttataaaataccatcaaaaaaaattgtacgtgtaaattttttacataaaataactgtttatgtaatttttttcatttaatattaacttattttagagaaaattttaaaatattatacaaaaaaaaattatcaataaataaatgattttgtttcttccactaaatgtcgaagaacacaagtacaataatgtatggaggaatttctaaattatgttttctattataggatgtgtatattatacattgtggtacatgagccaaatatatacatctcgaatgacagatcacaaaaatctaattttcctaataataaattccaataaaataaaaaaaatccttggtggcacgtatttctttttctacagttttttttttttttttaaaaaatcttttttt

SEQ ID NO: 117873 - DNA, 1626 bp, Cannabis sativa
atataaatataatgaagatttattaagaaattaataataaccaaaatataaaactatataaaaaacaatcacatatatatagtgcaaagaaaacaacaatataactttcatccaatattgttctacccattataaatacaatccatatctgaaattaatgcaaataccaatataataaaaatggatcactattttttttcatgattgggtcgtgtaaatatttcttgagcagtagtaggcttcttcattcctttgttgggatctctagtattattaatatccttcttttcttcttcttccccatgatcattatccttctgtttttttgggccaaatagatcttgtgggctatggaatgaatacggtgatgatgatgaactcatatctacgtaccttctaatattattataataatatatattaaagaaaacaaatctccaaatgatgaatgtatataaaatatatagcaaagagagatggtatatataatatatatatatatacccaagctagaagatgtatgtatagttgatggtgatcaataatatatcacctctcttctcaaatcttactcagcacatatatatataaccctatggtgggttcattcaagacaaaacaagaaaactgtattgaccacgtagcttggccgtaactacggttacacaatatatgggtcccacttcttttggcttattgcaactttattagtccaactgttggaagtttgtgtgcaacttttggattatgagtaggaatttcacacgagataaaacttttatattgttgaaaagcagaagcaaacggctgatttaacaaattgggtcgtgaatgatttttttgtacaaaaattatattctcaatgatttatttgacgatttatatgattactataattctgacaaaactcctaaagaaatttagaacgcattttaaaagaaatacgacactgaggaggctgaaattaagaaatatgctgtcagccgctaccttaaattccaaatgactgacgataagtcagtggaggctcagtctcgtgaatttcagaaaattgctcacgaaataatttctgaaggtatgtctttagatgaacaattccaaattattgttattattggcaaattgcctcctggttggaaatattttaaaagtattctcaagcataaaacaaaagaattttctttggaaagtcggatcactcgccttcgcattgaggaggagcctcgtaaacaggacccgaaagaagaagtgcttgttgtgtcaaacaacaacactacgaaatccagtgcgattctgaaacccactgggaaaaatttcaagaatcagaattgcaagtatgctccaaaccgtaacaataattctcggaataataataagaattggtttccaaggaaccaaaacaaacaacagcaaccccctaataagaatgacccgacactgtttttgtgctttctctgtaacaaaccaggtcatatggcacgcaagtgtcgaaacaggtctagttctgctccccaagctaacctgactgaagagttgccttatacagctatgatttcagagatcaacctgattggtggatcagaagggtggtgggtagacactggtgcttctcgccatgtctgcttt

SEQ ID NO: 117874 - DNA, 1470 bp, Cannabis sativa
acataatagtaagcttggtataataattaaagtagatgacaaatatgttataggataaaagttcaaatcccactaagaacactttatatttttctattatttagtactattataaaaaacgcaggatcgaatttgtcatttatcaaacaaaaaatcctatcaataaattttataaaaatcggattcaaaaatatatttattctattatttcccttttcatattcaagatttataagatcacttgccttagtaataaaaagaaaagaaagaaaaaaatggaagagtgttgtggtggtgatcaatttccagggttccaaagatatggtcacaaagatcatgacaatattatactaaagaggagtttgactttgatgagtaggctacaaagaagtgctccttgtccactccaaataataaaggtctcttctggtgaggccaataataataataattcacaagggaactgttcaaatgctacgtcttcatcatcttcttcttcttcttcttcattgagttcaatattgtatcctagtaatgatccaattccattgctttctcctctgccttctttgctggaaactgccggcattcaacatgaaaatgcttccaaatcgcgttgaaatttttgtagctgtgacctgctgattatatatatataaatatatatatatatgtatgttattgttcatctcttcttccttcttgtggcctttttggctatgtaaattatagaatatatttcttttttctttctttgtttgcttaaattgaacattctatatatataatattaattttcgttattcgcccatctaatacattagcattttgaatacaagttattttttcttaagaaaatagaattattagttgataaccgaatgttacaagttaattagacattactctttttttcttttttgacaaaacaactcattgattaaaaaaattgtttagtaccgcggaggaggcagatatgttcagtcgtattaaaaaacttagctaatctatggacaacattaacaacaaacacatatactagagttaaaatgattaaaaggagtggaaaacagtgttatagttcctccaaatgaaaaatgtgtcattcctggaaagttattctttcacagaagctagtccaggaaggcttccttgtccttctgagaagtgtcctcaagaaagctagccttgctttggaatggaattctagttggctagttgtctctcctgaaatagtagttccagatagtcgactccagtaggctctatcctatccggaagcctctccagcatgtgcctttggtccgtgatcctggaagcttgtatgattgcaattttttctgatatggttgaacattttttgaaaatctttatgaatgatttttctataatttatggatcttcttttgatgaatgtttacaccacctgtctcttgtcttgattcgttgtaaagaaaagaatttagtgct

SEQ ID NO: 117875 - DNA, 1488 bp, Cannabis sativa
actgtaaattattcaaaaattttaaaatttttacagaaataatattataagtataatgaacaccgaaaaaaataaaaaaaaaaatctaacatgtaatttcaagtacaaaaattaagtaaaaaattataataaaaggttgacacccctcatatgtattttgcattaatatttttttttatcaatcaatcatgaattttattactccaaataacagattacaacctattatgactttcaaatgaaaacctgaatatcaatctatacatttcctttggaaacttttcaaacacctatattagttacaaaattatttatataatcccaaaaaccaatctccatccgtcggctgcactttctttggccaagtgcaagatattcggttcttcacagctaccttgatcgagtttactacttgttctagtgtttgttgtcatgaattctacaatacatcatttgggttcttccacaaatggtacgtacacaaaagcagccaccttagtaatattttgcattaatattactcaaaagaaaatattaaattaaaatatataggcctgccactaaatgacgctaatagactaatagtcatgagttttttcaaagggataagagttgaacatctaaaatgattaatgctatggatgctgacaaacatctaccatcgaggttcattgcatgttcattaatcatcttatattagccacgtccctatactgattacttattattgcctctctttctttaatttcttttctacatttgattcccttattttattattacagatttggttggtttgaacaatacatcaacattaattattaatagtactattttcatactatttttacttgtgccaaatatgagtattatcatacaacatcccatattaaattatattatatgacacctaccaattaggctgctcttagaatttttggtcaattataactcacaatgtaaatttatactatttttacatgtattactttttaaaaacttagaagtaaattaggatttgatttattttttttttttattattttgaaatctcttataatttaaaaatattatttaataattatacgttttagaataagttggattttctttttgaattttatcactttcatattctgtttgtaaaagttatcatcaaactattattcttttttggaagaaactatttgttattcaattgtgcttattttgttagttttagtcatatgtttgtgacgaaatacttaaatgacatttttggttagatgaaggctaaactcacatgtataattcaattattaatttttttttattaaatttaaatatcacaatatatattttttttttaaaataaaacaaaattttattttttaattaacttaaataaaatgtattaaatgagatatttaggatatatttcttttaaacttgatatgttagataaattaacaattaacccaagatctatttgtatataacatagaacac

SEQ ID NO: 117876 - DNA, 2310 bp, Cannabis sativa
  modified_base (2280)..(2284): a, c, t, g, unknown or other
atccacataattattaatatttataacaatacttattaaattgagtattgtaatgatgattatataccaaaattaatgtaatctctattacaattacacttcattacaaagaaaaaaaaatattttaataaaaatataataaaaaaaagtcaaagtctatattactttttttttttttaatattttataattttataataaaagcaataggatattttagtcaatacatattttattccattacattctcataccaaaccaaacacaataattttgattacaatattcattccaactacaaactaaatattttaatcaatttctattaccattcttattccattccattaccattactattaccattaccattacattacatcaaaccaaacaccacctatgttctttttaactgtttaacttcattttccaaaaaattatcttcttctactacttcccttttgttttcgtttattttcaaaatcttttcctccataagtgttcttgtccctatgttttctccaacattggcgtgtctcctccactgaatcccaatgactgttttatcatgtttcctcatctatcatgtaaccagtttctaatggaacctttcatgaaccatctgacttccattctctccctcactgatgaggagagttcgatattaacccttcctgatgtaccaaattcttcacctgcaccatgactggtccatttgctactggctcgtgttcttactgaaaaaacaacttttaggtcaggtttctatgattaaatatcgggtcactggaagggacgctttccgttacaatcactgactacaaaacagacagatttcacattgcatttggttgtgcaggagataaacgttgagtctttacaaggaaccataatcatctaatcattttatatgcgccaggtgctctgtaaaatatcacaaaggaagatatgatctacaatcctttttcgattcaaatttaccacttgcctttccttagcaggtcttctgctttggctgaggctcttggcaacacaattggagaattcataaaagtctttaaagattctactaatgaaggatgtgttccttttttgtgtgtttgagtcaaactctctatccttaaactactaccctgaggaccaatgattcacttactaaaaattatgaatgaattttggatcgaatacaactataaaagactccctaaattttacttcaaatgttttgagtagtgtgtttcttttatggagcttattgatagtagaaatgatgatgacctcccttatggtccatggctcaaaggtgcaaaactcccaacaaacagctacgatcgataccatgcagatttctctgaaggtaatgcgtggccttttatcacgaggcttgcctacaacgctctcacaattagtcaccctggcttgcttgcgcggggtatagcccaaccacgacctctgtttgaaggagaacactcaattccacaacaaccttcatttggatcccactcgatcagtaccaatctactcagtaaccctcttccaaatgcttttaataccaagttctcaatagcaataaccactgcatttatttcacctttgctgccaaccattaacatagctatttccaccattctaccaataacactaaccctgcgaggaacactcgatctgcaccatttttctctccacgatcccttaccactaattctcatttgtgtactatctcttctatcaatactatttcagccactgataagacctctcctcacaacacataataaactaaaacaccttctgcccacataacaatagcctcctcgtgcaccatttctcccataactgacctctcacatttacctacctgatcttggctctcaatcatcacctctaaacacctttgccacttatctttcaaacaaaaatcctttacccacaaatccaccctccactgtaataactgcaagcattcccttaggtccccaatgcattttcacaccatcaataatacttacttctgttggttttctccaccccactaccactctctcaaatgccaacaagaaaaacacatcaccaaaccttaatgtcaagaggccaaatgatgctttctcaatgagcaaaatgttgaagagatgttgtggtaacctcttcctcactgtcaagggaagaaagtttggagactctagtttctaactctttggcttttggtttctcaaatgactcaattgtggaggttgttgcgcaacctcgcaactcatcatgatgttaggttttatgccctannnnnaactccatttcaatgtaatctatttt

SEQ ID NO: 117877 - DNA, 2030 bp, Cannabis sativa
ttttttaaaaaaaaaagaaaatttaaatatataacccccccaaaaaaaagtaaaaggattattcatatacggcctcttctactatctcttgtctttcaattggacttcgacctcaaaatatacctataattagaagaaaataaacttcttatcattgagggtatttttttttaagaaaaaaattacatcatcaatccaaatagaagtgtcgttcgcaaaaaattaatgttttaattttttctagaacacgacacttatgtttactaagaacatttctaaccataagccacttaggctagcttagtggtgagggaaggatgggaaaaagggagaggtcatgggttcgaacccaggacctttaagctatgaagctaatatatgattgtaaaaatcattacgctaaactcaaaaaaaaaaaaaaaacatttcttaccatattctctaaatacatttttaagctaaaaatagagtgaactttgaaaaaatgagcttcaatcttataaaaaaaataacttcttataatagaaaaatgaataaagagctttctaaatgtaaggagttttttttttttgttaaattttttcaatattattttaataaacaatattctattaaaatatttaacaaatttaaattacaaaattttattaaaataatcaaatactaataagtaagggtataattggagaaagaataataaaaataacacaatattttaacttttaattattttaactaaaatttgactcaacaaatagagtagtttggagatcaggctctaaggtaatgatttatttcattttgggccatatattgggccagcattgagctgggttgagatgagagcgtctaatctatcattatgttaaaaccttaaaatgtattgggccttgtattgggccagcattgatggacaactggcccaagcaagatatcttatcttatcttctgattctatttggaaccatagtttccattggattatgaggaatatttttttttatccattaattaaaaatactctcatactatattttattaaaatatactcacttttctaagtgaactttttaatataccatcactctccactaattgcccgacgctatttttagataatactatctaataacaatgctaaaaaatagtactttatctactctactttacacatgtcaaagtattactataagatatatattattattagtgtaatttaatataataattatattaaaataaattattaaagaaaaaaaaccgttgattattgcatagtattattttcataatttgtaatagtattggacaccatctatgtacattgtactaagtgaataattttctccatcataatgattttttctttgtttctgtgaattgacacgtgggaagtggcagagacccatttcttcttatctttttattattcttctttttttttttccattaatttggggcttgtatgttgttgggggtcaagggcccatttataactctctctcaaaaacaaaacaagggacactaacctagtagtccccctattatggtacataggataggacctcattttggtaggggtttttttagggtttcataggtagattctgtttggtcaaaaatgaaaaaacacatctttttcattcacataaatttcccaaatacactttcctcacttcacacctaactcaaccatttaaacccattttgtctactcttattagggtatctttcacatttttcctttattcaatcattcttttactttaatttgtttggtagttttgttaattagttgatttatattgcattttttttataaaattcctaatctatgcaaaataataagttcaaatctaggatgatttttgtaaataattctcttctctgacaaatacttgcttaaagattgaagtacaaccagtatctagggcacacataattttaagaaatcataattctagtgtaacgtcccaatattttgccttattttacaaagtgctaattttgatgcattaattaaaaagatt

SEQ ID NO: 117878 - DNA, 3072 bp, Cannabis sativa
tgtgtgtgtgtgtgtgtaacgaatctggtttgacccagtaagcttttctactaaaccccctaatttaacagctgatttttgttaattttgtggattaaagggagcttacttgggggaggtgggaagcttgtgacggccatgggtcagagcaggagagcgttaagcgacatagaccttaatgtcactgaagctcctgggtgcccttgtgcagttaacaaaagaggcttttcagagtaagaacttagaaatgaaagagactaatcaagtgggttactttagtattagtattggatcgtatacattagaactaaactcttttacacatccatttttttattattatttctttagttgattttgttttgtttttttacactttcccagaaaccaaaggggtagccttgataaggttatatgtcctccaaggcattctgtttgtgataaaaatttgcctattccatcggatcgtcgtattactaggttggatattttataacttttggcttcttcacatatataccattgtataaaagatgaacttagagttcaactgtcttatgtttgattaggaagtttgctgctcagcttgctaacaatcagttggaaaaattaccaaaggtacaatattgttaatgcagaatttcttggttttgaaaaactatatgtcattgtggatgttggaatgatttatctctgaatgttttaacaggaaactaagaaagtcggtcaattgggttcaaaaataagggggtctgaagattgtacattaacagatgtggaagactacaagactgacaatgactttccaatacccatgtttgtgcatcatacagaatcaattttggaggaaactgatgagatggtagttagtttatctatccatatccttttaaagaaaaatggtgcttagttttgttatatttataatgtgttttatgttgttttaggaggaagtagaaatggaggatatagctgatgagcttgtcatagacatagacaactgcgataagctgaatcctttggcagtaacagaatacattgatgaaatatacgcatactacaagaaagttgaggtggatataaatcttctttgtttttgctgaaaattctaatcgttatgtacttttgaatctgttgaacaagctgtaaatgttttctgattgatgtggtaccattgaaacaattatctccggtttatatgtggccttgctagtaagttagtgcaattactagcacacaaaatatgccttaaagaacactacacccaatgatatggtagtatttcttaaccaatcacttctgataaagacgggactcacagtttaaaaaagcactgggtgtagtgttttggtgcatatcataatgcaacattactaattattttgatgactaatttatagatacaagtaactgaaattgatttatttgattctcagaattctagctgtgtaccagtaaactatatggaaaatcaaccggatataaatgaaaatatgagaggggttctgattgattggcttgtagaggtacttaaattgctgctttcctgttgttattgtactcaatgaattcctctttaatggaattctctgaccatttagtgcaaattacaggttcactacaagtttgaattaatggatgagacgttgtatctcatggtcaacttgattgatagattcttagctgttcaatctgtgccaaggaggaaacttcagttggttggggttgctgccctacttctagcctgcaaatacgaagaagtttcagttcctgttgttgaggatctcattctgatttcagacaaagcttacaacagaaaagaagtgcttgacatggtaaattttaatggagtaattaatatcatgtgtgcagtttcgttaatgtgtacaatgttttcagtgatactgtaatatctgcttgcaggagaagctaatgatcaatactctgcaattcaatctatcagttcccacaccgtatgtttttatgagaagatttctcaaagctgctcaatctgacaagaaggtatgagtctaaattttcatatatgagtctaaattttcattaaatttgccataattctaacatcataccctgactttgattattcagcttgagcttctatcgttcttcatgatagaattgtgcctagtggagtatccaatgctcaagtttcccccttctttgttagctgctgctgcaatttacacagctcaaagcaccatatgtggctttaagcaatggagcgcaactagtgagtgtcacagcggctattcccaggagcaactcttgtgagtgatttaactacatttcttattacaacatcaaaaaagttttcattccaccaacacatacacattcacttcacttggcttgaaatttgtagtgtaatcttaatttcaatggtgatagttttgtatttttgtggggttgcagagaatgctcaaagttgatggttactttccatcagaaagcaggaacagggaagctcacaggggtccaaaggaagtacaacacatctagatttggctatgcggcaggagtggaaccagctgaatttatgttagaaggtttaagatgatgatgatgtaaaaatggttgtgtgttgggttggggtatataattaaaaggccacaacacaactttcccttgcttgggagccttttttgataattttcattgtaagtatctactatagtcctccttgctttggagttttctatgaaaagccactttgataatcttttatgtcttatgtttcattagtgtagttacctattatatttctttatttaaaatatcttaggaaaattctacaatgagaatgcacatttatctgtttcggtatctaaaaaaaaatttagtctgaatttttttttaattgtatatgttgtagttatttaagacgttttgcaaaatttgaaggaatttagaaaaatttaaaaccttagaaataaggtttatagagtcttgtgcacgcgtaatttttttattttatacgtgtgtgatgacgaattaaacattgaattctatattataaactagtgaacaaagccgcacttcgtgcgacatgta

SEQ ID NO: 117879 - DNA, 815 bp, Cannabis sativa
  modified_base (766)..(788): a, c, t, g, unknown or other
taataaatatttgtgagaatattagttaaatttatttttttcaattattttaaattaatttattttttcattttaccttaatggatacctgatgggttcctaataaccaatgggtattcccctaccccgaatccgttggttattagacgaggatggggcgggaatagaggtagaaattggtagcggggatggggcggaaattgcattccccgtacattaaccgaccaatttccatctctagttagcctctacccttatttgacaaaggcaaacatttatactaaacgttccctattaaatatattgaaagactatcagactaggaaataaaattataatataattcatctagtatagttcaaataccatttcaaatcaaataatttaacaaaacattggcaaataactattccaaaatacctcagactaatatatcacaaactcttaagtatatagatatatatatatatatatattttaattcagacttaaaaatctcacaaactcttaaattacaagaaattgctaatataatataagaaactagtagttttgtcgacttgcactggcaacggtagaaatataataaccgtcgaagagcttaaaagattgttgtttgaactgttcggtcggttcttcctagcgacaggtaaaattcagaggtcgcatgtcggaaatccgtacttcaacaacgatgtcggtgtatggatcgacaaagctaaattgtgaggagcttacggtagaagggtgttgggttttatgcccnnnnnnnnnnnnnnnnnnnnnnnatcagatttacttattaatatggatca

SEQ ID NO: 117880 - DNA, 1401 bp, Cannabis sativa
cacgttccatgttccaatcacagggctcccgcaggtaatctctacagccgatcaagtttttattccaactctttaatgatcgattatatcttaccatattgcgtacgattccagtgaagtagagcaacacgagtcactcgaagtttcttgaagactcgagctggggcccaagagtgatcaaccgaaagccaagcattggcaaccaccaacttgctcctttcatctcttgtacatccttcttcaaatttgaagcatcttttaaatttcggatccaatccaccagaaagtatacataaaggtctattgtctgaattacacgcctgggaagagcataggatagctttaggaaacagatttagtcaagctccattaattaatcctttactgagagcagatttcacatggctcctaccagaatggtgattatccaaagccatcttgtcaccttgtataggcatattaataaggcctcgagaattgacaaggttagaaatgaaaaggataaaagggtcccttcccgacgacccttcgcgttccgagtcgctctaataaatccatctgatgttactttatattcttcaaatatttaattaaataagctccctatactttctttatttgatcaaaataatacactagtcgtcgtctttttattttatttcattttttcttttccttttttaatttaggacctgattagttggtgatttaaaaactgtgtttttcaaatactgtgattttaaaatgaaaagtctaaattttgcgattgaaaacatatttctaaaaatgtgattggtttaatatctatcgacagtttttgaattttaaatattgaatgtgtgattggtacagaatttaaaaatataacagtatagaatatgtaattagtttaactaaatctgaaaaatattttaatttcaaactaatgatagtatataatatggtataagtctatagtacacctcctaaataagtgttttggtattagaccttatcttttttggcatccaagagaatttttcagtctattttttttttatgatcatgtatgttatagttatttaggaacacttgtaaatgttaagaatattatgagtagtttacaacgtcaaaaatataatttacatattgtgttgcacgtgcaattgttttttcttttacacatggtaagtaactatttaaactttattttaacactgtaaactactagaatgttctaaaaatttacaagtagccctaaatagctacaacatatgtgatcatgaaagaaaatagtgtagaaaaacatttttggatatcgaaacagatagaaaatctaccagaacgaccctttaagaggtctactataaaaatttctaataatatatatggaggaggtttcaatggttacatttttattgt

SEQ ID NO: 117881 - DNA, 5664 bp, Cannabis sativa
ttagggcataaaatccaacaaaacattgaaagctaacacgtttagtaggaaaagtagagagctaacctatctcaatggattagagaagcttgtcactctaatcacataattacttcctaaaaaggtttattcgagttggtgagagagacaccccatcgaccaacttgtcacgtgggaactagtgtccaaggtgaaacccttgattctcataacactgctgcttcacctggtaatcgagcagccattatgaaaacacaagccatggagacctcccaaagggaaggcaccttcagtataaatgcaactaaaaggggagaaggtcattacttgatatttcaaggggccaaacctctataacaaatctttttgtctattgtttttcatctttatttgtgcatacacgtggcaagcatcagatctgtatgaccccgctgtcggttgatcacttttttaggtcaaaaatatacatgagtggtaattaatttacctaattatttactacacatattcgaacaaataattgaataaagttttgtctttttagaagttatgagataaataaaaattggatgagtgcaaatagattatcagcgtagtatagtcaatgtgttgaccatttcttagacttttgtcaaaagtatgctaaaaaaatcctaaattggttctgagtttttgtgttatatgtggtaacatggagcgtatacaaattactaagataaatgagcatttttttatgaaagaaataaataagggttataaggtttttgttcaccacggggaaaataaaacagtttcgggcgagagaacgtctaagtctaatatagttaagggtgttaatttgaactatgacgatgatcacattccataaatgatgggagatgcacaatttgaattaaatatcgatccattgaaatttcaaagttttgtagaggatgtcgagaagcctatttaccctaattataataggtttactaaattatcgatacttattggattatacaatataaaagccaaacatggatggagtgaagagaattttttggatttactaactttcctggtagagttattacttgaagggaatgttgtgcctttgtctttctatgaggcgaagaagacactttcttccttaggtatgcaatatgaaaaaatacatacatgtcctagcaattgcatcatataccgtaagacatttgtggatgcaatattgtgtcctacatgtggtgagtctaggtgacaaaagaaaaagaattttgacgaggtaaatgttggtgtccttgcaaaggtattatggtacttacctccaatacctcatttggtttggttcttttgaaatgtcaatcatgctaaaaatttgatctggcatgctagcgatagaaaattagatggcaagatgagacatccagctgactcaaccgtatggaaatcaattgatgttaggtggcctgaatttggcaatgaacctaggaatatctttcttggtatttttgtggatggaatcaatccacataccacccttagcagtaggtatagtttctagcaagttttgcttgttatgtataacttgcccccttgattggtaatgaagaggaagttcagtatgcttacactgttgatatcaggcccttcaaaacctgggaatgatatttatgtgtatttagctcctctagttgatgatttgagtcaattgttgtatgagggtgtacctgcatacgatgcctttatgaaagaagaatccaatcttaaggccatattactgtggaccattaataatgttccagctctcagaaatctttctagagacagtgtgaaagggtacaaagcatgtcttatttgtgaggagaaaacatgtataatttatttaaaatactcaaagaaaatgtgtaatatgggacacataaggtttttgccaaacgaacatgtgtttcggactaggaaaaaaagaatttaacggtaagcattaatttgaattgccatcgccacctttgcaagggaatgaatgttacaaaagttgaataaagttcaattcaaccttggaaagcgaaaagagactccaaagaatagaaaaggtcgccatgagaaaagtgacgttactacaaataaatcttaggggccatagaaaaagaagtcaatatttttgagctcgagtattggaagcattttttgttacatcataatctcgatgtgatgcacattgagaaaaatgtgtcagacaacttgcttaatatcttgttcaatatttttgggcagagtaaatatggaatcaaatatcgacaagatttgaaagggttggggattcagactaatttacactcacaagttttaggtcgatgaatgttcttaccagtagcttgtaatgctttaaataaagtagagaaataatctttgtgtggttctatctcccaggtgaaggtacctgaagggtaatcctcaaatgtccctattgggtagacatgaacaaatattttgagtggtctgaaatctcatgatcatcatatattgattcaacacattctaccagtgagtatctgttctgtgttgtctaataaagttagatatgcaattacgagattgtgtttattcttcaaatctctttgttgtaaagtgggttaatgtgactaagttagcgaatcttaggttagaaattatagaagttttgtgttatttggaacaatttttcttgccttcctttttcgacataattgttaaccgttcaatgcaattggtaagagaggttaagttgtctggacctatgtacttgagatggatgtactcatttgaacaatacataaaaatcttgaagggttatgtcaaaaataaaagtagttttgagggtttgtattgtttcattatacatcgttcaagagacgattgaattattctcaaactactagtgagaggttaccgtcgttagctctcgccctactagggttgatagggaaataagtagagggagaaggggtgtttctctttgtggtgtaagttgagctgatcgtgaagaagtgcaccagcttgtgttgcaaaatagtgacgtggtccaaccgtacattgagtaagtttaagttaacttttagtatttaaaacaaaataataatatttaattgtaaccaaaattaatccatcaagtacttgacgataatattttaattggatcaagactactaatcttactaaggcacgaaatcaaaaatgggtacaagatgaacattataaaaattttagtacatggataaaaaaaaaggtactattaacattattattttgttacggatcatatatttatttaccttttctcactaatcaacttgtatgttgataggtatgtgtgaaaatatgtgaatctccgagcaatgtatctaacacactatttttcatatcacaaggtctttcgtgtgatgtactcaattaccaatcatactatataaatattacttaatttttcacccaagcccatgataaatctagaaaaataaaaaataattgtgttatgatagctgctaaaactttccaagtatctggtgcaaaagataaaaattatattgaatgtgacaactctttttatggtgtaattcaagaaatttaaaaattagattacagtagtttttggatccctattttcgattgtgattggactaagagtgataataggattaaagacgatgaatttagattcaagttagtggacctgaatcgaattggacacaagtacaataggtttataatggcatcccaagctagttaagtgttttacatgattggtccatcaggtgcccgctggtcagttgaggacacaactaaaagattatgataatcaagggtctaatagcgatgatctcattcttagtgacaaaatccatcaaatcactccaccacctactgatgacgttggggacgatatcatatcatctcgtgatgatggtcatggattatgggtgaacgaattcatcaatacatgagtcatcaaacatgtattggtattcagtcttttttatatatttaattttagctaacaatttgtatatgtttatatattctaatgtatgttttcaaatttatgtaggattatccatcatggaaccaggtggagacggtgagtggagtgcttggtataattatgatgtggtgatgatggtccattcgtgcctggagaatctagtgttgatcttgaacaaccatccatggataaataatgtagtgttgatcctgaacaaccaacatagaaaaatactcgtaggagaagcaaacagagcgatataacaaaaatagttagctaggaaaaaaagttagaggttgagtacaacaacaacaaatagaataggggaaagtgcgcgacggtaaaagttacctgaattggaacatgggtgggaattaatgttccagttcgagacatatcgtgacctaaagtgagtcaggacatcaaaaactaattatgggatgacataaaggtaaaattaattttattatttgagttccttactattaattataatttgtacttatagctacgattgtcaatttttcaggtcgcgtcctatataccagagacagatagaaaattaaccatttctaaaggtggagacacgtggaaggattggaaaaaaaccctaacacatagtatttttaaatttattgaagtggctccctaatttcttgagaagccacaaaattgtgtgaaagcataattgatttgcgataatggagagagtttgtggctacgagatagagtccatacgttgaggtgacgaggaaaacggcccaacagagcagggcaaaaaatatttaacgtaagttctatatccaacatcccaatatgtaagtgtgttttgtatttataaatttatatatgctaactttaatttttgtgtagatcgttcaccatatataatcaaatgataggatggcctgatagatctatccagtggataactcctatatgtcctgaacaacctgacaacagacaatgtggatactacgtcatgaaattcattgaaagtttcatgactgtagaagatccaatacacgtgttgacacaactaataaaataattaataagtattataataaatattactctttattaaacaacatatgataatagtctttactaattaatatgtacctttgttttacaaggtaggttctccacttcgtatacaaataacgagataaattttatgtgtgatcggtagattctttaattgaaagcagaagtgaagcgacaacgattgacttgttgatcactgtgtagacatctcaatttattgtcactatatagatttttaaatatacttagatgattattaatattagtttaattattgttactatatagagtgttaagtatatttagatgatattagctttagtttaattattgtgacaatatagattttaaaatatatttagatgacattagcgttaatttaattattgtgactatttagatttataaaaaatttaaaaattaatgcaaaggaaaaatggcagaaaatttgcaatttccccatatttttccaatgtaacaattaaaaaacatcgtcgctgaaacaacttttttaattaaaaaaacttaacctgtactgtatggcacgatttaaaatcctcacatatactgtaacaccctaactagcataggcgtgttgacgtgattttaaacgtactgtg

SEQ ID NO: 117882 - DNA, 2486 bp, Cannabis sativa
taacattgtatagtaaccctttccagatttggagtcaattggtgggaaggcagctaatatgtccacgccaggggcagctacgtcgggctgtgcttagtagatcaaacattggaagaagaggtaataataacagtaataatggaaataagagtccaagattagtggtgttttattcctctttcaagacaaaattttctttttaagtgttatatatacattattgattaatgtcatgtaatgatgtaatttaggaacatcaaacatcagtagcaagcatcaataaaattttataagtaattacgtttggtggttaagtgacataattgttgcttatagatttgaagatttgattctcagtaatgcaatacctttagaacagctggggtcagggaacttggtcctctggatgagaaagtggcaactcgtggggacgtccatttgcctatcacagtgttcggagaactcagcattgctgttggagaccttcatagtgggggtggacaagcaatcaaggttagtgtaaatcgtatggatggccttttaatttaaaggggtcttctttttttttttttctgtaccttgctcttcttatgtaggaaattatttgtgtccctacttcaaaatccactttaacacatgggatatcgcatgattgaagtccatcactgtgagactgtgcaaaaatgattccaacacctcctgcttctttgacagcagttgctgctgaagctatatcctgctgatcatattggtctgaaaagcatagtactatttttcctgctgctaatgttgcatttagacttccaagctcacaatccttgcttcaatatttgtaagaaaaactagtaagagattgttttatcattattttaatttatggtcagtattatttaaattaaaaaggaaagtacaaactttaacttagacgagagatctcacgatgaagcatcagtggagtcatccgctatgcgttccgaatatgtgatgccaacaaaaccatggttatgtcttccagtatcaccaatagattggccctgaaaaaaacgaaaaccattgaagaaatctcatttcatttgcccaattttcagttttgactcgtaatgggcaatagttttacccaaagagtttggttatttcctagtgttacgactgttggaaaggccctgtctattgtggtggctgccacagttatgagccatggtgcagtgtttgaaatagtttgtgaagtgggaccactatttcctgcagatgaaacaaccgtgatcccctttgatgctgcatggaaggacccaattgcaattgtgtcacgcagatcaacataggagaacaaaggaacctcattgccaacagaaatggatagtacatccactccgtcgtgtatagctttatcaaatgctttcaaaagatcagcattcgtgcagcgtccagaaccccagcaagccttataaattgctaaatgagcaagaggtgctcctcctctggccaagcctgcagctagtcctttataactggcctgtttcacaaaataaccggctgcagttgaagctgtgtgagtgccatggccatttccatctcttggggacaaatactctcccttaatatgggttctgtttacaggctttttaatttctgccatgaatcctttcatgaaccaacgagcaccaatgattttcttattgcagtttgtttggttaaactcatctccttgttggcagactcctctccagtgtgatgggattgggggcatgccttcatcattgaaactttcagactctggccaaacacctaaagaggtatggattagtttgaattgtagtataaattatggttattgtttaattcttttcagataatatttgtttttaccagtatctatgagaccaataatagttcctttcccagtattctcagtcaagtcatttttctgagaattatgtctgataccgatgaattcccaacttctagtggtatgtagcttgtgtatgcggttaggaatcacctggataacttcaggaaattctgcatttcccaagtgaaagccatcattagtggtgttactgctaagatagataatgcagattatatagtatatatactacttgttaagacattatacctgccatagattcagcctcactttctgttaaccttgcagcaaacccggaaaaaccatgtctgtagctgtatacaatagatctttttgcatcttttttgctttaatcacccacaacacaacaagggaaaaagaaactagaatattttatatctgtgcatgcaactcgtatccacattagaatcaatgagaaaagtaggttcgtttactcgttttccttaatacatgtaaatgcataccttcctagcaagttgactagcaatttatgttgggtttttttgttagcttctggttcaccatgcttctttcctcccaagtacacaatatagacctgaaaacattcatttctttagtatatgctgtaaagaaaaaa

SEQ ID NO: 117883 - DNA, 1634 bp, Cannabis sativa
aaaggcaaaggcttgaggcagccacttctaaaacaggggcccaccccagcgtcatgatccactattgaggccgggacagcctcggtcgtaccacccttttgccattccaaaaatatcctctgtggggttcactttcccaaggaagaccattccttccaatacccttgacatgcagaaagagaagaaagtgaacaaagccctgaaggggcgcctagaggcagagaggctccaagttcgtagaagggataccgtgccctcagcggtgcaaaaggctaaaatttcagacagcatgcacaccctgccccttgctaggcatattgttgaggttgaagcctttaaaaagttttcgactttcaaggtagggagagaagtcaccccctttgtcgccaaacttttggatcaagtggttgggaacgcttaagagctgcctatggagacttgggcttcctacagcagcgtggacgtctttgtattggcccactttgccaagcagcaggcagtcggggtaagacctcaagatattttcttcctcttttctttctttattatgttctgcccctattctgatacctggctctttcattttgacttattttgacaggtggccttattggctctgaggactgccaaggaggctgacatgctggtgacagagctggagaaagtcaaggtagacaatcgtgacttgcgcaatgccaacaacacccttctggctgagctaactggggccaagctttagattgagggcttaaagaagaagaaccaactgctagaggccaattacgctcaatagactcacctcatgcgaggtataagggcatttcatgacctttaccgggagacggtcgagcggttgtttagagtggagtcctccaacccatctggtggtgcccagtcttgaattgcagcatgcctttttaaattgttgttgttttttttttttatcttttttgctatacttttcaggtcacggagatcattttattttgccctagccatggggactatttgtaataccagtaggcttttctctattccctttttggaatttctttttgatctgctagactttttttaggggttggttatattcttgaaacacttggtcccaacgcccagtgttttaacattttccgttagtcttaattatctcttaatcaattcagggactacttcttggttttaccctttcgtccccagagctgtaatgctacttgacctcctgcttgggaaaaccactcgcttagagttagcttggagatagcttcctttgcagaaaggagcccttactttttcacacatcttcttcaggctttagttcttttacgaggttgagttctgggagtaatgcctgcgactgccttaggcttttaggcacttttcttactttagtccttatcagcatgacgtgttagccaattatgcaacctcatgaactaaatttctaggaaatccccagagattagttaagaaggaattcgggcaaatttttcttttcaagaattcttactgaatacacttcttatccctggatttgttcttaagtttagccgttgaggaaagaattcaagtatgtttccctggggaagacttggttgaacacttttcctgcttttagttgcatatgtacgctg

SEQ ID NO: 117884 - DNA, 4073 bp, Cannabis sativa
ttatttaataaaataaatagttcaattagtaattatacaaaatacaaagaccaaaataatatttctccataattaatttgaaactaaaaaaaaatgagaagaaagaaaaactaatgtatatgcataatattaaataaaattaatttgcttgttgtacagtctaagagcaaaatcattatcaaactagatggtaaacttgcaaatatcatatagtacatgtcaaacttattattgaggccaaagttgttccttttgtagctgtaattacatcattatagagagagaacaaaattctcatgtatacttcaaattgatgtggaggtaacaaatccctaattaactaccctctcaaaatgtgaatacaaccatatttcaaatcttaaccaaaaaagggaaaacaaaaaataaataaaaaggtagtatgaattgaaaaatattgcaaacaacctgtaaagcataattatggttcaatttgtttatagttttatattattatataagtaatgctttaatagtgttgagagattggagcttaaactagagaattaagtcattccaaggtcaacaaaatgaattagatagtgtactaatagtcttatatgcaattatggaatgtttccctctattcttgatagctcagtcccacccttatttcattgttttttcttattttttttctaataattttttaattttttattttgtgtggtgattagcccccaccattttcatcatttacatacttttggagccacaattctcacttttgctgtactcatattaattttgtctatttaatctgcaaagtcatgaaagcaacacccaatatttggtcacaatctctaatataaggttgttaaattaatatgatcacactaatacaaagaaagtcatagtataagtagtaggactagtgttagtatataattattttatgtaatttcaaaatataaatgggaaaaaagggcttaaaacttcaaattttgtattgtttcaaaaaaaaaatgtaacaattcgaacctaacacactgtgaaaatatgttccctttattaagacatggcttcagaaagtgaatgaatccgttaaaatatacctaatatagtaatacatcaatagttcaacccccaaaaacttaacaaaccaaaaaaaataccttttgttttttgctactggttaatgattatgttgtattgttcaaacaagttttagaaagtctattatcaaccatagaattttatttaaaatatgacatgaaaccacatctaaaatagtgtggaaaaaggaaaattttggcattggatcacaaaaagagaattcttggacaatttattttttttaaaaaaaaaaaaaattggacaagttaatttgtttaaagaaaagagcgtatcctttgtcctggttaatgacaaatcatgctctttaatttactgacgttacaaatgagattcacgttataaaagtatgaaagttggcctaattcccaaagatttgaaattcactctcacgtacactaaacgaataacatcataacttttttactgttttttttaattttatttttatttttacaaaatcataatccgaaaatcactcttagcaatgacacaaatccgacaagaattaaggccatatatctacttttatatatctttgccaacctctctctctttacaccaccacacaacacaacacatataccaaagcttcaaaccattttctcaagaaccaaacagatcaaaataattcctcacttgggctcccactattttgtctttgcattaatatataattgtactttccatctttgccaataatctctctatattcattcttctctctaccctgaaaccaaagtatcatagcatttttctcaagaaaccaacatgagattattatttgcttttattactctcctccacctaatataattaattgactcaattgtctcttctcttattaattttgattcattcataggcttaagcttctcacaccatgcatttcttgtcaacttttgtcacccaaaaaatctaaaactattctattctgccaaagttgaagctttgtctgtgattaaaaaaaatggggtctgcaacctcatcaatggcggccaagtttgcttttttcccaccagaccctccttcatacaacatatacttggatgaatcaactggaaaaatgaagatgtcagatgttcatcagagagatgaggtggacgttatgaagctaaacaccaagaaagggaatgagatagtggctatgtatgtgaaaaacccctctgcttcactcactttgctttactctcatggcaacgctgctgatcttggtcagatgtatcacattttcaccgagcttagtcttcatctgggtgttaatcttatggggttagcctttctctccacgagtttttattatattcttactttcatttacataacaagaaaacaaaaatcatactcacttcagtacaccaagtttatgagaaaaatattatctgtttttatgtgtccaggtacgattactctggctatgggcaatctactggaaaggtacgtttgatgtttgatgtgttggcacgtgtaataatgtttattcatttttaaatggtaataaaagtcaaagaggaaaggctaggtagtttgatttcagataaagagatcattaagcttagcattgtttctcttgtaaaattatcccatgttgttcgttaatatgtagagatcatagtggaataattagtcttttgtgtgatagtaatagaagtgatttaatatattttggtctattaggcaagtgaacaggacacatatgcagacatagaggctgcatataaatgtctggaagaaaagtatggagtaaaagaggaagacacaattttgtacggacagtcagttgggagtggacctgctttggaattggctgttaaattgcctcgtttgagagctgtaattctgcatagtccaatcctttcaggccttcgagttatgtatccagtcaaaagaacgttctggttcgacatttataaggtcaatcgcataataataacataggttgttcttggtttgttatgttatgttaagttcaattcttcacttcaaaggtctttggtttggtttggttattcttctgcagaatattgacaaaatcccattcgtcaaatgcccagttttggtaattcatgtaagtgagctattttcttggcagcatttttcattcataatgattttgatcaaatttggtgcattaacttaattagttatgttgttggaaaaattcatagggaacagaagatgaaatagtggatttttcccatgggaaacagctttgggagctatgtcaagagaagtatgaaccactgtggcttaaaggaggaaatcactgcaacttagaactctatccagattacttaagacatctcagaaagttcatatcagctgttgagaaacttccacgcattgctgtttcaactgagcaggctaccactaccactaccactaccaccacagataaaccagacagtcctcagaagaacacaacaggcatcatcaacacagagaatggggcaaggtctagcactgatcaaaaagagaataagtccagaagtagtactgggcaaagagaaaaatctaggcttagcacagacagcagagaaaaatcaagaaccagcactgacaagagagacaagtcaaggaagagcatagatcgatcaggaaaggcaaggatcagcatagatcattcagaaagagcaagaaatagctttgaccggtttgtgttttcaaattttcaatccatgtttctgaattcttttccccactcattcattgcatgctttaattattactattgtactcattactgttcttgaatggtggcagcttaggagacatggtgagatcggttgggttgtgtaatgttgactgtttgaagcaggctgcagcttctgaggcttgaaatttggggttgtaaagtacttgtggggttctacgtttgattgatttttcaatttggatttttggttgatatacatatgtgaatggccttatgtagttcaccaactgctgggagggtcttc

SEQ ID NO: 117885 - DNA, 1151 bp, Cannabis sativa
tacacagcattacagtacagcaagcaactacatgattgatgccatactatactaacttcaatattttcaggaataaatattaaaagacttcaattatgaaaatacactgttgatacattgataatacaactccattccatgattggtgtccttatctattacagcaatcagaaccgatgacaactgcattggggcccaaactatttttaaaccggattaatttttttaacgctgtagttctaaaactggatctacttatattttagactccaatatgctcacaatacatgttaggttaggtgcatcctcaccatctcattttgcctttccctcttttagtgtgttcacactttagttttatgagaacaacagacaattgtgatctatctgaatcaggattcactactctggagacaccctaatattttaataattaaggattccaaaagatgtcaaataatacgggacctgtaggaagaagaatgtattcccctgatatgtaatccatgcctatgacacaaagactactaaataagttttacttattccgatagacagaccatgcaaattcttgcacataaccaatcaccttaacataatcaaattttcatcacaaaagtaggagaaatcgaaaagcgagaagaatggtaaaaatgaaagaaacatactgagcgtcttctgaagatgagaaaaatgcatcactgaacttctttgtgggaaagctagctatcactacaggttcaaggccatgtaaaccccgttccagctgtaccaatgaaaaaacaaaacagcataagtacatggtccactgggaggatcctgctgaagactatatatgacgctataaaacgaactaacagtcaatcatacgaattattatcgtgaaactaggccatacttgttcacagacatatagcagattcatcacccataagtgttttgtaatgagagaaaaagaattacaggaaaaatacatagccaattatgatgacaataacaaaagtaggattgactactggtactaagggagaaaatttgaccacagtaaagaaaacagacacatagaaatacgtcaatatcttgagctaaggaggacactaagtcaacatagacaaagattcataaattcataattaaaaaaaaaaaattaa

SEQ ID NO: 117886 - DNA, 740 bp, Cannabis sativa
  modified_base (33)..(37): a, c, t, g, unknown or other
  modified_base (684)..(689): a, c, t, g, unknown or other
taaagaaacagatttaatttcattacttgtttnnnnngttatttggttcatgtgatcatctatttacttatttgattaataaattcatccaacccctttttcacactgatattcttgtttattgtgttgtcaacctagggggaaccattagtttacccccaagtcaagacttacctcaacatcctcgagagaggtaagggaattcacgagataactacattcacccagaacctcaacttaggggacataaatggaaaatataatgtgatgtctctcaagataactatgttcgttgaagatctgtaccaagggaacgtggatacgcccaacctccacctcagaaggatagttatttatcaaggtcctagactaccgactcccaaacatatcatcaacaagaggctgtacctcagaacctccaacaacaaagaacggtaagctttttagaagatagttatcgctccaacttaaggagctgattagtgagtttccatggcaacactccatctcaatactttgagatatactctatgcgtcccctcatgatgcaagggacccaaacttgcatgatcacctcaatcagagaagacaacctcatctaaggggccatctggatagggggcatgcacaaggagaagtcccataccaggtaccatatgacatacctgttgggttttatgcccnnnnnnaaactctatttcaatgtaatccattttattctacatcaataaagaaacaga

SEQ ID NO: 117887 - DNA, 3406 bp, Cannabis sativa
  modified_base (33)..(44): a, c, t, g, unknown or other
aattcaataataatagtataataaattatttannnnnnnnnnnntaatttcataattaaacgtgattatctgctaatttctaaattaaactaagtggtctttacattcttcatgttcttagtgactcgaagagccaagaatcacaatgaaggtcggattcagatctttttcatctagaaatcacacattatgtatcctaaggctatcatgcagatcaaaataccaaaagaacaacaatctaacgtaggaatcaaagcatgttcaaagcaagaaatagtgttcatgcaatcatggcaaaattaaccaaataagcttgcccactataagaaactgtcgaggaagaatctgggaagctcggatcgtcgaaacgacacaaaaatcccgagaaaattatgcttggtgggtttggccctctagagagaaggaggagcttcttctaatgtaaatttttagtgggagaatgtagaatgtgaaaagtgaaaagtgaaaaagcctttcccccaaaaagcacttatgtagtacacgtgggaccctttcttcacttacttcacctacacatcaataagacaattaaagcagttaattttctacaacaaatgagatgaaacagtcaaggcaaaaaatttcaaaaggctaaaaacgcagcaaattttattcagcaaaggctacaacagtcccaaccgcaccagcatggctggtaagtccctatcagtacaaatatccgcataaggacttggagggaaaaacttatcctgatttttctcctcctaacgtggcagtacttgcgtggacaaaatcactgccacgtggcagtacagcctaccaataagaagaccaagtcagtacctaagcaaacggagaccccgacactcaaatgggcatcaagtgactgaccaacttcctcacaaaagttggtcggccacccctggtcgaccctatggccggccagcctctggactgcaccatggtcggccagccttccccctacaggggtctggatggccaagagaagctctctagggttctctgtgcacttctacacatggattctacacatggacaacatcattttggctgcaaattgggccctaaaagcccaatagaataactgaataatatctatgtttaagggcattttggtcttttgtaattaattaattaactatgcaaatatcttagggttttaagtgtaaattagagttcatgcttcttatataaagaccttaactctatcctagaaaatctaagttcagtttaagcctgatactagcctccaagctctaagcctaagtctggtaactctattcttcttaattttctctcacacgcccatacaagcattctcatcacttgagatctacgaatctcaattcatactttgtatccttaagggtgctatatcagatctcacctatagtgatttgaatagtattaaccctctgtattaatacaactaaaaggagagtatgtcattacccgctatcaaagggggccaaacctctataacaaatctgtgtgttctttactttatcattttgtttgtgtaacatgtggcaagcatcagatccacacgatcccgctgtcagttgatcactttttgaggtcagcacaaatgatcttcaatatcttttcatggtatcattttaaaagagtacaatttctgtttgaggaacaacctatttgcccgtgattttttcgtatacaaactctctaatttcttccaaacaccagctgcagaatcttcttctaatatttctctgagaaccttatcaccaaggcttaaaattatggcactatgtgccttatcgagaagctctattttctctttttttgttaaacctttaggcaggttcttctctcccaaaagagcatcttgcaaaccatgttgaactaggagagccctcatcttgactcgccacaatctgtagtcattcttctctgtaaacttttctaaatcgaatttgacattccctattttcttgctggattgatcacctagttttggaactgtcccctctaataagaacctttcttcttgattgatcaagattctacttcaaagttccaagatcccccttcgaccaatcccatctctgataccacttgttggagattcaaaccacgatctcacacaccgggggagttcatagaacatttgagaacaatcctcaaagctcaaacaacctccaatgctaattgaacacacttaaagaacacaaatgaaatgaattacttctttattgaatagtttctaatctaaatttacaaattgagaggtagagtttcaagttacaagaataagggatatatagtctatttcccgagtatacattgagtaaatagctactaactaactagattaattaacttttagagttagttaatatttgtttgcttaggtgacatattactaaggaacactaactttaacaatacttaacatatattttatttttgcaatatagcgagcgggtgtggcttaaaaatttctatctagatttttgagtcaacacttttaataacaaattaatgatttgttgacttcttttacatatttttattaaaataaaattttattttacccctagtgcgttggagtacaattataaaatttgagccaaatgtaatatttatcatttttgagctaaatttagcatatattttacaccatccattagagatggtcatatgtggctatgtattataggtataattgcagtgcaaatgcctatttaacaattttaaactatcaaaatctagtttattgatactaaatatataaacattagctttacgaatgcatagatattttcataattgattattaaactgttatttatgtatttattttttatatgaactcttgaatttgactagattagaaaataagcacaatgcaactgcatgaggagatttatagtaatttttatagtttaggaagaatttttacaacagaaaaaaaaactcaaaaaataaaactctacaaagattataatttagaggataaatcatatttattaaaatatacatatatatatagctaaatcgtattttatagtaaagtattactattagatattagcggtgtccaacacattttagaagtgacgctttgtgattttttaataatattttataaaaattattatattaaattatatacgacacaatatttaattatactaataacacatgtaatagtgtgtaaagtaataacaccaccaccaattcatttgagcattattatggatctcaaattgcataaatcacaattttaccaacaattaatagtactctagtaatgtgctctcaaaaaagataaaataaaaaagagtaatttgcggcataaatacttaagcttaactctcagttgtaaataaataactaagtttaatttttggcggta

SEQ ID NO: 117888 - DNA, 1221 bp, Cannabis sativa
ataataataataataataaaggagctatcaacttattgtgaatggcaagttggggaaatatatatatatatataatttataagaaatccatgtgtctcatgctttgttttccatgtcttctttattatattatatgattttgtcatgaagtaaaccatcataatcccttgattaataattttatataattaatttcttccctatttataggtgccatttcttgcatgttatatataaccatatataacaattgtaattactaattaattatcattcccaaaatggccatgcatgatactcgtagagttacaataagtgtggctttgtttgttttattgggcttggtaattggtacatacgcctctagatctctctttgatactcacgaaagtggaattaacggtgcaacacaagatggagccacaacccaaactgtagtccgcgaagaaggccgaggacaagcccttggtggcggtcgcggtggcggcagccgtggtaaagatgaatatgtaactaatgatagaagtggtggcagtatttggtaatcacggtggctatatatgcttcatgaaatataaaactttgtggttttaaccgttcggaaaagggcttattcttactctttagttagtactataaaaaataatagtacgagtaagacatcatattatattagataagatcataaatgccaacttattgttgtgttcttaattatgttttcttctatatatatacattataagtttatatataagtacgtgatttgaagttgatcaaggtttaaatttgtgttcactaatataaaatgttgaatatagataatgaataaatgataatgttttatgatccttcctaaaaaagaatgttatattgtgcaccctatattattattagagataactaataatgaacaaaatttatatttttttttagggaaattgatacaaattaaaataacaaaagtaaaaaagttatacaactactgaagaatttttttccatctatgaaagtttattatttatcttaaaagcatatagagatagggtaaattatggcataaatacttaatgtttcagattttatacatttaaatatatacctaatgtttatttttggaggcaattacctagtgttacaattctcttatgccgttactaccacttccgttaacttatcataaatatagacacgtggaggctcaaatgcattacatttatt

SEQ ID NO: 117889 - DNA, 2888 bp, Cannabis sativa
  modified_base (57)..(60): a, c, t, g, unknown or other
  modified_base (2823)..(2827): a, c, t, g, unknown or other
aataaaattaacatatgtgacttaccacgtaacatctatctagtaaatatatatatnnnnatatatttatatatatataaaaggttaaaaatatagaaaaaaaataagtaacaagaaagtaactgattacactaaggacataactagttggttacctaaatttttcccataacccttttaaaaaaaaaaaatccacaaaatatatttttcttaaaaaaaccatttttttataaatttttaccaaaaaaaaaaacaaaaatgaaaattccgctattttatttatatcaattgaaacaaaacacccacaggctactcgtacaagcaaaccaaactaagagtagagtggtggtttaccatgagaaaagaatagtaaacgggacagaatatcagatccaaaaacatccaatgcgtttagtatgacatgaaactttcatttatctgccaaccaatacaataataacaataacggaaaaaaaatggtatttcccaattttcctcggacatcataaataagctggtataaatacatgtatgacataaaatcaaacatttatagaccaaaatgatccatgaaattagtgaggacaaaattgagttacaactctttcatctgtgaaacagcatcagtatagctgcaaagggtaccaggaagaatgcaaaagaaaagctacctcatatttgcaaactctcagacgccatgctcgtaggaattttcaagaactcgagcagctggtccatatattattcggcatcgctcattgaatgagccaaccaatctagaaacgacatccttaaaaaacatggacgccacctgacaaacaaatcacctatgtcatactagcaaaaaaataaaatggactggttatctactgcagatcaaaaacacaaatgcaactacattcactactgcagaaataagtctcataacctgaaaatatcagctgcaaattggatccaaccaagggttatctcatattctattttcaatattaagcgcacagaaaatgaaaagaccaacaatccatttgtttaatgatacttttgaaaactagaactccaagtctaaacaaaaacaaatgtgatcaagagaggataagataaaaggtaacacccaaagagagagagactcaaaatcgaaggaagcaaatgtttagtatatgcgtacaatctcccgctattggtgaatgatgtggcatggcagcaaaagaagatatatactatatttttctataaaactacagaaaatgacaaatattcaacaaatgtgccgctaatagctgaaattatacttacccaaaaaaaaatgtaaaatgtccttgatataataataaaattgaaaagtttaaatatagtccgctctcttgaaaagagtagttcggtgattttgtagtctttaagggcattttgaaagttttacattgtgtgtatgttattaaatgatcgtacgatgaaatgtgtaatttcattttttatgaaaaatatatgttttatgttgtgatgttggggttgctcagaacttcgtaaaaaacaatggataatcaatttccttcaagtgcttaggatttgtttcaaggacggaaaattcacaactgctgggattgcgtcgagcgcaacaccacactgtttgcccagaaacatgacttttctcattttgcttgaaagcttaatggggatgtttggggatttccagtttggatgtttaggattgtgatcaaaatattttgaggttgattaggtcttagagaaaataagtttaatcatatagagcattaattgagttttagtgctaaaaaattcatgagtaaatgttgttgcttttagagcagatcaaggaaaggagctgatcttgtcactgctggaactggaagttcaagtaagaagagtgaatacatgtcacagggtgtatgctctaagctctacagaagtgtttccgttgtttatattcgcattgagcttgttaaattttactgaactatgatgcgtgcatggtagcagactagcagtaaagttatcacaaaggtagtgggttgtcgtaagggcgttattgttatacttatgtgttgttatgaaatttttgagactaaatgatgacatgacttgttttgattctattatactggatttagggttgtgtccttcacagcttcttgctgagcgttagctcacgagtaaatcaatgagaaaggacttaagcagagggcgtacatgctatatgatttaacgtccttagagatcaaatctcattgaactattttaggattcacaaacttttattgttaaattattattttattttcaattatgggatctcaggcttgtgattattttaatgacttcaatttcttaatatatggctgaaaatggttgtttaaataggttttgatcttatactatttgcacgaaaatcatgcacctaacataataagaaattggggcgttacataccacctgaaaaataaataaacgccacttatatccggaaagtaaatgaacaaaaatagaacttacctgtcgataaagtggtgactgaaacttaaaatctaccaggaagtaaacgctgcaagatcctggaactggcccagggttgaattcccagatgttaatcaagtggtcaaaaagtgtagtatctgaagcagttgtctgaaacaaaaatagaaacagaggctatgatcataagcaacttgctaaaaaactaaataaacagtgttacaaaataatataattatgagccatatgtaagctccaaacttgatgaacagaacacatgatataagtcattgtacaattacatgaattgcattgtgtgtttggaagtaactgtgnnnnnactaggtagggtaattactagggtagtaattacacagtttaataattacactatattttaa

SEQ ID NO: 117890 - DNA, 1572 bp, Cannabis sativa
ctctctctctctctctctaaactagggtttgcctctgttcgttgttttttctttgccttctagggtttttgggggggcaccgctggccagatctgactggtggtgcctagggtaccttggctctaagctgtacaggttgaaggcagagggtcctttgttgggcagttgtggtgagcggtggggaagaacatctgccctccttctttctccttgaggctggttctttgttgcccaaatttttcaggcgactgatttctgaccaaggtggatggacgtctcttttgaggtgtctcaagtccgaggtcggtgggtgtgggtagctctgatctcattgactggtgggaagcgacaaagatgggtttctctaggctttctccctttcgtttttggggacggcgagttgcgatggcccttctcaggtgagatcttgggctttaaagcattgtttttcttccttttttcttcagatctcggtgtcgcatgggtttcttttcaggcgtcttggcttcggtgcacaatggctcgtggttagctttcgaagtgtcgtcgatgtataggggggactcgggttttcccaaaagggtgtgctacccttgtcctagcactctcaccgttcaaaaccccacgtgatggcagagtttaagcttttttcgtcggaagttggcatcgttcctttgtctttgctcgtcttgtcttaggccttcgtgtgacctcctttgcgttagggggaagtgtttttcaaacggttttatgctttgttgttatttggtttgtttattttattttatttagttttgtcggtgttgagcaccttatgtcctttgtggcgttacactttgtgatgttggctttaggcccgtttttaggggttcgttcccttcgatgctcctgcgtgagccatgagcttaatgctcctttcgttatcgatgtggttgttcgacatttgagtcatttcctagcgagatttgtgtggttcctccactagacttgtgggacttcggcctttgtttaaccttgaatgaagttctcctttcaaaaaaaataattaaatttgtatgttatgcattatcatctaaattgatttaatatttaaattaatttagattaatttaaaattagttaaaaggaacaaagtgaaatgatatttatttatttctttttcttttttcagataaattgttgtaaccatttttgttttttagagagatggtaactatttttttattcacaattttcttgataatttgtttctcttccttttcttatatgtatatatataaataatgtggttatttaacgattttggttgatttaacaaaatattttaataatataagaatattccgttaaatgttagtaaaattagttttataaatatatatataaatattaatattatttatcttaaatctttatatataaaatgtggctatttatctatttttgttggtttaacagaatattttaaaaatataaaaatattctgttaaatttcacggtttagtaagattagttttataaatatatataaatattaacattatttatttttaattaatttaaatatatata

SEQ ID NO: 117891 - DNA, 2441 bp, Cannabis sativa
caaacatgaagaaataactgatttggaaatggcaggcaccaccacatgaccctgcgagtggacccgaacaataggcatcgacattgaatttgaaggtgccgtgaggagggattttccattgttgaattcttttatgtggccgatcagtggtggttaaagggcggctattggcctcatggtatttttagataattaaaattatgaaattatgtaatttgccaaacataaaaccaagaaatcatatacaataacacacacaatgtattttaaaatacactttatttactctaattattaacaattactcccaaatacatcaaatagtatcatataaatgttttaaaccagttttttctatcatgtacaaagtgaataagaaaataagaaatgctaaaaggcacaagtgtcaaaacactttcttatgagtcaatatcgttattggtgtaatttagtatctgatctaatatagtttaatataatagcttttaaggaatatcgctaactaatcgtaagacgatacgtcttaaggatgctaggcaccactagtgcccaataacaatgctctaaaaaaatatattttttacattgtataacaatttattaatatttagagacaccgtttgataataatagtaataattgggccacaactcgataatttaataataattatggggataggtagtgtaaaattttatgttttagtttgtcaacatgctatcttatctcatttaaagagatgaacataatttaataattcagaaacacaatcaaattgtggtaaaattcgtgtcaagaatcatattttaataataatatgttgttgtgaatgtgaagtaccaattatataataataataatacagatatttgttcaagaaaaaaaataataatattaaagatacaattttgtttttaccaaacttaaatttgttttgagccacccaatttgagtaatgctttgtttttttcttcctagatttaagacttgttttctgagttgctaagagcctcaaaaatagcattaaattaatattgtatgaattaatattatcttattatgctaaatgccaaattaacaacttgtatgatctaagagagttttagagagctgatcaaagattgtcatatttgattgaataaaaatgtcaaactctattgattaagctcttgaagatcttacaaactagttaaactatatgtttcaaatttttatttttgggttggtaaaaatcatagtgtgctctcatttttcatcatttcaatacttttaaaaaaaaaacagacaactgtgttctttctttgtctgctgcccttttattttctatctaccgacgacgacgatgcatatacactcttcattcttcgtccgagggtggttcaacccatcggccatgatcttttattagctgaatcaatgcatcggtcgcttgttccattgcgattccacgctgcactaccgtctgaaaaaaacataacgtaaatttccatgtcgattttaaccatatgttctttcgaaatataaaaccgaaaacataattatatacctttccaacataaaggtcaatctttccgggagcaccaccgacataaccgaagtctgcatcagccatctctccgggtccattaacaatgcaacccatgattgcaatctatcatacgaaaagattgaaaagagttaaatacaaaggaataatatttcaaaaaaacgaaggactcgagtacttactgagacaccgggcaggtgtgatgtcttctctcgaatctctgcgctgatttcttgaaggtcaaacaaagttctaccgcaggatgggcacgagacatactcctgcgacgacattttagaaaagttggacctttttttcttccgaaatatatttcgaatcctttcaaatgataaaagcttcttaccgtctttgtatttcgcattctacaaccttgaagtaggttgaaagaagtatttctaagaaaatcgaaatcctgatctggggcttctaagaggataccgtccccgagtccatctactaaaagggcaccagcgttgctacctgcaccgatgactaagtcatccctgcgtgaaaacggttttgaagtcaaaattcatgactgaatagaatatctcataatctttcatagtcaaattaagagaattcaattcatacctgtggattccatttggaaattgaatgtggtgtattacaggaaagttaagagaattatctgatagatactcaaataatctgcagccaatataaagtaacatattgtgtgttaatataagaaattaaataaaataatcttgtgcgagtaaggtcattctaatgcaagatgaaaaaataattattgacttttgttatgcatattaaattttattctacggtcaccctgagattggacgtgccttgagaaaaaaaaaatggataattacataatatactattt

SEQ ID NO: 117892 - DNA, 1039 bp, Cannabis sativa
  modified_base (34)..(36): a, c, t, g, unknown or other
ataagttttaaacactatttttttaaaaaaaaannnaaaaaaaatctttgtttcttggcactttgatgttcataatcattacattatttttttttttttgataacttagagggtgcaaaagcaccccaaaacagggaaaacagacaaactaatatccgaaaaaaacaacaaaccgaaaaagactacaacaaaaactggaccaaaaaaactaattaaagtccaggatcccactcaatgaggtcatcaagcaccgccggaggcagagcgtcagagctaatccttccagaaaccttgtaacaagttgcccatttggcgatattgtgcgccataaagttgcacctccttggaatatgaataataccccagtccttaaacttagaacaagaatttgaaaaccgagctttggcataccgaattctaaagttgaacacttgagatgtctgatcttgaaactcattcacaacatttagattatcactctggaaaatgatgttgttgactcccatagaattcgcctcatccgcagccatactcacagccagagcctccgcaagcaacggatcattgacatcagtcctggaagtttttattgcaatgatattgctccactcatcacgaaacacagcagctaacatacttccagccgaagaaatcgccacatccgagttacaacacaaccatgaaggaggaggcggcgcccaacttaaaatgtcagggacagccttcgaagagaccaagatatgatctaaggttttgaggcggatcatctccttgacacgcaaaatatcgttttctttctcccccacaagccttcggtttcgctcgttccaaataccctccacaatacataatgtatgggccatgaaatcgttgaatgacacactgaatggtctatttgaatccattttgaaccactctgtccattgtacccaactttgaatccattacattattaacaatttgcaatctcatttaaaataacaaataataagttattcaaaattttaaacaacatgccttaaaataaggtaaacaatat

SEQ ID NO: 117893 - DNA, 1688 bp, Cannabis sativa
agaggggtatttttgggtttattgtaaagtggtcatattttttaaattttaaaatgtattagattagggaaatttttttaaggtattttatgcatattttttcaaatttccccctccaataactacagctaaaataatctaatctaattataaagaaccgaccttatttgaacccatctaataaaattaaatatccaatcataattagatcggttacatgtaaattttgaaatccaatcggatcacttattaagtgcgacatccgatcaaatgagtaaccgaatgaaacctatcaaattatcattcaatagtcatttgattatttttatatatttttaaaatacatttatagttttatatatttaatatattttatttaaaaatatattaattatttttattttgcacctgcacacttgagattaaataaaaaatcttagatctaaaatattaattctaatcttcttaaacgctatcaatgcatattgaataagttttgtttttttgacagttttattgcaggatcatgagaattatgttagaataaattaatatttattatgtatgttaaattattaagttttaaattatatttttttatatatattttctttttaatgaagtaagcttaaatagtagctaaaaaagattaaatagatccaatttaatttaatagaaaaccaactaatacatccaagctgaatctatagtgcatgctctcattacatgcccatttgcacactcatgttggatcaagttgggttcaacacttttgtttctacgtacaacactgtcaacatttggcaattagtttgataatctttttactactcttgattatgagcgggtttattgtgtttccatgttgcatgtgggcattatagaaggcccgaaattaatgcgacggtttggaagaaaaaattctcctcgataagtgaggttcttgcatcggctgattaatgtaagtcttaattattggcttaaggctcaggataatactaattcgtcatctatgttttttgaaataaaggaaatggagcggagttttggactataaaccagaattgaaccacatcaaaataaatattgatgctgccttattttcacgggataattcttaatagtttcaaaattgtagcttgtgatagttttggctaccttattgaggctaaaacttgttatcgaggttatgtttttgatgctacagttatatattgaagaagtaagcaattacaacttgtagaaattgagactgatagcatgatctcaattcaaggcattcatagtaatcaattgatcttctattatttgactattcacgattgtttactttaactctcatctttacccaatgttaggttaggttttattagacatgatcaacaaattaagttgttcatgttgtggcaagacattctcaatttatttctggtcgcaatatttttgagtataatgtttgggttgatttagaagttcttctatactctaaattaatgctaatatttcaataaaattgctattcattttttttaaaaaaagattaatttatattatttttttttgtttttatacttaattgaaaataatttttaatggcttctgatttggctactcttaccactacaagaaatatataaaaatatttatagtacactataagaatataggatattggcggctaaaccacc

SEQ ID NO: 117894 - DNA, 1751 bp, Cannabis sativa
atttgtaggtgaagtgctttagtgtttctcttctaaagggttctagatatatatcctcaattggcttaatttgcaaaatgtaagaatcataattggcccatacaaaaagcaatccatgttggaatgcaattaggtgatgatataatatatatttgactaattatataatataattttgaaatattattcctatgtgtgtgtggggccaaaaaactagctagcatttgctatatctaactcctcttgctttatttgcaccaaagcttatcatgataagagataagccatattagagaaaagcaatatacataattttatcttcaatgttcaaattgcattgaatctactaataacaagccttgacttaccaccttgtactttttttttgggtgttgtagtcatgtcgattgtgtcaaagttatttatgaagctatctcatgataattaaaaaaaaaaagaaaaagaaaagattatctcttgccataatttgaagagggaaatgctattaatgaaaacatcatttgcttagctaagtgttatagctgtctcacaatcattattccataaagtttgtgagtaacataaacatataatatgtgtgtatagttatcaattcctattataaagacacatgtttgatgtttcacacttttaattttttattgaatcaataagagaatttgtttaattttatgtcccaagtctaacaaatgatcaatcatgagccacactaattgtttaaaatacttcaataaaaaaaaaagtcaatttaataattactaattttacatgattgtagcatatgtagttggaaaccatatctcttgtaagagttagaatttggcaaaagaaaaaatgagtaagttatgcaattttatgttctttgaagaaatttaattgtgataatttattaagattataaggtatgagactacacaattgaaggcataaattataatacaatacaaaattattttacatatttactattactaatcaattttttaaaaaagcataaattagtaatcataatttgtacaattctttagttttcttactatttgatagttaaacttaactactaaatatatatgtagtcttaactctttatttgtaatataagaaaaatgtaatgcaagatcgaaagatagaactttaagagttgagaaattaaaatttttgtactttgagagttaattataacaaaaagagatagagaaagaacaagggattagagaatttgtttcaaagggagaattgattcttattgtaatatttgattgtgctaaaagtgattagtagtgctttgtacattacaaaatattttattaaatattaagactcgcataatttaatttaataattattataaaatatcgttaatcattcgtaagacgttactaattgtactaagaaaaaaatttatagatatgcattatagcaatgatttattattatattgatacagaagagactaaattgctaagtgaaattcaaagaggatgtgatgattgagttaagcatggagcatttttatttttatttttgaaaatagcaatcataaataaaagataaacttaaagcacttggtcaattttatgtctatttttttgggttaatttcttcaaaaaaaattcttctttttttgttctaatttgttttgtacataaaacagggtttgtgcataacatagtacaataatatcaattcattttctaacttcattagatgaatcaacagtgttgcctata

SEQ ID NO: 117895 - DNA, 4369 bp, Cannabis sativa
  modified_base (32)..(47): a, c, t, g, unknown or other
  modified_base (588)..(592): a, c, t, g, unknown or other
aaatgatagattttaaaaaagaaggtaaaaannnnnnnnnnnnnnnnaaaaagggtatagagtgtaattttctcttataaatttacagaaaattctatggtttttctctttaaaagaaaacatctatgcactctttatctattttaatatttagaaaaaaatattagtctatttttttatggtcgtgtataatatagttatttaagacattttttaaaattttaagaaatttaaaaaaatttaatacatcgaaagcaagattcaagcttacacacgttgattattttattttatacgcttggaaaataaactgtttgaatattgttttccatattgtaaattatttcgaatttctcacaatgttatataatattttaaataactataacgtgccaaaacaaataatgtggttaatttatgttttttttttcttttgcgaattacaccatttactatttttttaatttgtttttcaaatttacgatttgggtttctaaagtagttgtagcgctggttgcagtagaagtttccatacgattttttgttgcaatttaagttacaatttagttgcaataggagtttctatgnnnnntttcgtaaaaatgcaaaaaaaaaactgttttgaagtataaaaatgaaaaaactcttttttttaatgaagaaatttaaagttttaattattctaaaattctaaaataaatattaataaataaataaatcaaattctacattctaaaataaatttctaatctaaagtcctcaccagatttcaaaccttcaaagtctcccgcgtctctctctctctctctcttgctttctctctcttgaagttacaggtttgctttcattttccttctctcataaattaccaggtgttgatgatgcttttaacgttgatgatctcatttccctgttcatgttcttgcgttttttctttttcttttttccctatttaattattttattcaatttctcgcattttgaagaatgaaatataaacaaattttgcttaacagtaattttggtgaaaatcttggtttagaaaatttccaacctttatttatttttcaacaaaaagaataaaaaatatgataaatatcaatgaaaaaccccagtacaataagacaaattgtaaaaaaaaaaatgaaattttggtgggaaattgtgtagtttcatctgttgttcttgatggttcaactttaaaatttgcttttattatttgacatgtttttttattattaattttgaattgggattttcatatgtttagaggaaaaaccatggaggatgtttttagtgaattagattctgtcaaagatgagttaaagaaactaaaggctgaatacaaaattaagacagagctctctgagtgcttgaagaaagtccataatgagcaattactcaaatttgaagaagctaaaaagttgattgaaaaacagtctcaagaactgaaagacaagtgtgaagaagttgctgaagctaaagaactttctaagaagcttgaatcttgtttgcaagaaaaggatttgtcattaaggcatttgggttctctgaatgagaaagccaaatatgattttgagcagaagttgagaactttagaaggggaaaatagagatttggtatcttgtttagatgaaatgactgcgagaaacagagaattcgagaaggatgtgtatgccagtaggaacaagattgaggcctttaaaaagcttttgttggataaggagaagaagtgtattgaagctcagcaaatggctaaagagtgtaacgaatcgagagacagagatgagatgctagttaaactggcggatgaaaatgagtgtgttcgggatcagttgaagtggaagaaggagaaacttaatcatcttgaagaagctcataaaagagttcgacatgagtttgagatgagcaaagagaattggaagagggaagaaatggcattgattgaagaaatttcgaagttgcagacaaagtttaattgccaaactataatgttggaatgtctacaaacacgtttggagatgtgcaaccatgctttagctcgagaagaaagcaagaggaaatccctggaggttcgggtttctgattatgaattgcgttttgagaatgcctttgtccaggttcaagaagaaaatttagagatacaaagaatgactgcccaaagaaatgaagagattgcaatgttaagaaccacactggcagcaaaggagacattcgcgaaggaagtggaatttaagactgtgcaccttgagcgaatgaatgaggaactggcagaatcactaaaagaacttcaggaggctcaaatcagaaatgctgggaccactacttctggaaaaatgcataacaagcttagacacttggaacaggtacacgccatctgttctgaaaaattgaaagcaaaagaggttgaatggctttccgagatggaaaagattaaaggaaatgtgattagttgtaaatctgaattgaagtataaggatgaacaaataaagaagcttcagatggagctggaaagttgttctacaactcagttgttaaatgaagagattcaaataatattagcatttttcaaatcagaaatttcagaggcatactccaaaatatatgatatgaaagatgaaatgaagctgtttaacaaagagaaggctcagttggatatgagttgcagtgctctagaggatgttcatcctaaatttgaggaagaacagaagaatgtagaaggcttagcagagagagtggattcactggaacatattgaacaaccaccatttcttaaagatgaagagcttgaaaggcataaaaagtttgttgaggaatgttgtgtgtcccaacttcacttgaaaaatcactgtattcagatggaaagttgtctcaacaatgatccacaaaatctttgtgaggcactaacaatggaaaatgctcagccaaatgcagacattgatgaagtaactcagtcagatgcttttggagaagaagaagtctacagacaaatgatgaattgccttcttgtacaagatgaaatgacagacatgtataagagagagagcgagaggctcacccgaatattccaagagaaagacatgaaacttaaagatctccaacagcaggttgaattacttgaaaccaaattagcagcagaagcagaaaaaatggcagcctgcttacaagataacgagaatcaagcccaagttgcaaaagaagaaagtattggcagagaaaatctgctaaagcaagagttcagaagagaattagaagctgcaaccgttgcacggttagatgcagagagagtgcttttcaaggttaccaatgagaaagacgatgccataaaaaatctcaagttattggaagcatcactggaacaagacttcacaaatttagctgcttcctttttttcagatgttgtagaaaatcaggtaaagattgatgtgcttattgaggcattagagaaggggaatgtcacagatattagtactgaagacaaggacaaagaaagtttgatggataaacagaggagtttggagcagttatgcaagcagcttgagtttgataaagaagttctccttcaagacatcatgaagttatcaactgaaaaggaaaacttaatggtttatgctcaaaaaatttgtgatagtgttggtcagctttccagtgaggatgtagaaatgatgaaagtcttgaggaacatgttgccaatgtcaaatgaagagattccaacagaaatgtattcgattgtgcctgatgaaagttgcgaaattaccggagagaatgctacaacaaagaaacttgaatcaagtagcaatgaaagatcaccactgaaggaggtcaaccagagacaaatataagaaagaagaatgaatcctaagcaaccttgtagtatgttggacagttatacctgctagtgttttgaaaaagatgtgtcataatttcacctttatggattctttatattcttatataataatggatactcctcaaggttctgagtacaccttttgggttggtctatttgcatcaacaaactctgagactgagctgcttgcttggctaaatggaagtttcattattttgtaaatctctgttgtattcattgtttatttaatatatgtaaattatactggattcaaccttcaattattgtaagaacaagaagccccaactctataacaaaatctaaaccaaatattgcagaaatttttgaggaaataacctaaaaatttaataatgaatatagaaaatacattgcagtatcaactatcagctaatacataggaaagagaatgtagaattgagtagtttgagggattgtttggtacgccgtagtacgccgtattgtattgtattgtgttggattgtgttgtattgtattgta

SEQ ID NO: 117896 - DNA, 2919 bp, Cannabis sativa
aaaataatttccaacaataatttggtaataaaattgtattgcaaggaagaatagatcaaaaaattgagacttgcccctacggcctactgtttagcggccactgataaatttatggatcaacactgctgctcacggcccacttctctgacgtgagctcgctcacactaatactcatgctgagggctatacaaatttttttataaacttctcaaatcgaataacccgcccaaaccaaacaagaaaaagcccgacaaataatgcaaactgaaaaaaccagacaaaattataaatcgtcgaatctgttaattgggcgggttcaaaataggtccaacccccccaattaaacaaaaataacctgcccaacccgattatgggttttctatttagtttttaatatataatatataaaataaattaaaccaataaattcctatcagatttagatgcgcccttcctttccgattcactctctatctctctgcccactatatctatgtcttcttcttcatagttcttacaatcgtcagcggatctaagtttcttcggtgctcatcatctcttgtggtcagtactgtagtagtggacaagatttttctagggaggaggtagctttctttctcaaaatggtaggctacataaataaatcagtaatgacgggaagctatatcttttctctaatccaacagttttgttaatggagtttctgattcaagacctgaggtgaaatttcggttaatgcaatttattttatttagatctgcttaagttttttgtttacatttttgtatcatgatgaattgtgtatctatgttgttatgaaggaattgtaggaaacgatttatctacatatatgtgtgttcattagaatgtttattttttgttctcatttatttgtggttaatacaggttgagaaaattgaagctttgattttttattttaaaatttggtattttcagagatcatgtgttcctacgagtgtctccgatgaagggaatcagacgtttcgggaaaagaggcaagttatgccctaggtttatagggccttttaagattctcgagaagattagactggtggaatatcatctagctctgcctccagcactttcaacagttcacaatgtgttccatgtttccatgttacgaaagtacatttcaggccctactcatgtgttgagttatgaaaatcttgagctgtaaccagttctatcatacgaagaacaaccagttcagatcttagacaggaaagataaggaagccacctgggagttagaatctgacatgaagactcaatatccagagttgttcaggttagatttcgaggacaaaatccttttaatggggggataattgtaaataccgcttagctttgtttttggaattagcagataattacagtttaattatgaaactagaataataattatgattttatcattttatggagatttatttgaattcagggtctattatatatgccatatatgaaattttatatttttgcatattttgtgcccagtaacatcagaacgcggagtttggccattagaattgcattttggtattttatcagtaggcgggacttaattaaacattgggaatgtcgggaattattcgagatttagaaatgaccaaaatactctaaatgacttagaagctttttgggtttggtgtgggggcaaaattgtcttttcgccctatgatcctttgtcttttagtgagtttattttggttttataatctgaataatcttttaattggttagatatatattactttattctttaatcgaaaattagaaaaaaaaatcaagaaaaagaaagaaaacacactctttctctcgagctccctagaaccagctagggtttggattttttttctacataatttaaggaattccaacaggtttctaagtgttccaatccaatctatacgtcccttagatcttcctctttgttttcttaagttcaagttaaggttttttgcttgattttagggtttagggttctatatttattcttcctacttgagtttataatctgaggttataattatgttatttgagctgaattatgatagtttgtgacttggtttggttgttagacctagtttgagttttagaactcaaactttggtctttaatggcaaattttgattctggttatgttgtgatattttattgcttaaaatatgttcattatgatacaataagcaggtctggaagttctggttaagtttggagtcgaattgagggtgtaatgaatttttgagtgtttcctacactaacccggtcgaccggttcaggagaccccatagaaccagattccggatagggaaccggtctgccggttggggcatttttgggaaccccaatttttcccgttttgcaatatttaggtttttgccatgttatccatcgataaggaaacttttagtttcaagttgaagtccctgaaaagtgattttgcgtgtcacttattggttttacgaattatgtgatttaggggccagtaattcgtcgagcagctgttccactcaggttggccggcacacctgaatgtggaagcgaggtaagattagtataatgttatgcatatatatttacatgtttagtgtgcatgtttattatgcctgttagattacatcgatagcagtaacagtatacgtaaagttatatttggtactgataatgtatgtttggctcagatattgttcgatgctatcacattagtattgttggagtatgaccagcatactgagtaggctgacattatggttgatggtattgtcatacgaatgttcttgactcagcaccgtgttggacacagggatacggttatgcttgggtgtatgggtgcctgattataatcttggttaatgctatgttattatttatgcttttcttactgagtctgtcgact

SEQ ID NO: 117897 - DNA, 2425 bp, Cannabis sativa
atatatatatatatatatcaaacgttttattttcaaaaaaaaaaaacaattacattataatatggtatcagccttcatagctgagatgaggaataccaaatgctatgccaagtactaatagctacaaatgatacattaaatggtccttacaataaattaaattgataagaaaatacttacgagtaggtcttcacattaggctgcaaacgtttgtggtcttcaaccatcatgccaagtaactcagcaacgtcttgcactctacatgtcattataacaccagtcaccaggataatgagcagttcacaaacatatacaaattaatgtaggaatatagacttggattatattttgatactgaaagttagagctcactaacaatccattatacatagtgatctctatgaaggcaactacacaaaaacagtcattgatgtacaagagaaactacctgtcatatgactcagctctggtatatgcttggatcacccaattgtatgtttccgtatcaggtttcatgggttctgaaatttgaaagagattgtaagaaagaagcccaaaacataagaaataaatattcctcaaaagtagtagaatactccatagaagacgatacgaatttctcactgtaaaaagaaaaacgtttaagcagccctaacatccataatatccacattggtatctgacattactacaaatgctgtatcataaacaagattgccattggtaacacaaaaggaaaataaactaaacatacataaaaacataaatgtgaaccttctccatattgcatgttctcaaatgtggcgaaagcgatttcagggattccacaggtagcctaagttattcaaaaagaaaaactatcatcagtcttggacaaactccattgacatgtaatgaagttaaaccataaccaattcatacctgcacactaaggaggcaattgaagtgaaaagtggtggccatccgccctgcagactccatttcataagcaatatctaaagcattggaatggtctccaattttgcagtcctcaactattaaaaggtcatagacctcatcagtagctctcaagccacctttggcacccctcaagaaaaccctattggcatcctccaaatgattactacgaaccaattcctctgccacaacgaaccagaaaaaagaaatataatcaagacaaagagcgtataaacacgcaagacttagctcggaaacgaccaaagtaccataccaacaagtataatccaagccccacgaatgtcgtattgtaatttctccattgcagcaagaatttctaacccattcgtagcacgacctttcgatccaaacagccgaattagagcgacgaatgtttcgtggagaggacgaagacctgcgctaagctccctcctgagcgattgcatctgtatttccagcataatgtaacaatctaatccttcaatttcgtccaaaattttaatttctttatttaaaagaaaaaaaaaatgcaaagtttaccgcgctctctgtatcgccattgaaggcatgagcaacaatcaagccatggaaggagcgggggccggggctgaggccagcggcaatcatgtcatagatgacgtcagaaacgccgatggcgtcgtgattcctggcgcggtccatgagctcctccatgaaggtgaagcgaaggcctttctcggcggcagagtcatcgtccttgggctgcctcttcttccttcgggtacgcttctcgggggcggaggtgggtgcagctcggacgagcagaagggcgttgtatttgggtttagaggagagaaaggggagagtgttgaggcgggtgacgaagaaggtgtgagagctgaggaggagggtagacattaggcagtggataagatgtctggcataggcatttgctactgtatcgcgggaacaggggttttagccgttttcacaaggttttggaatctttccactcaatttttctttctttgtggaacctttccactcacggaaatttgatatggtgtgcatagattagccaacaaaacacttaagtgataaggataattcaaaataattacaaataatttagtaataagaagacatagatttataaaagtttgggcctctaattatagtaatagtttttttttttattattattgttttgaagaagtgtggacatttaatctaatccaatttaattataaaaaattagatattcaattacaattgaattgaattaaatgctaaaagttaaaatttaattagaattgacggattattggatgtcaatctcaaagtttaattaaaaacggatctaatttaattatagggaaaaaaacagaaaaatacaaaaaaagaaaaaaaaattacaaaaatactatgggccggcccattaaatatttatacagtccacatacaaatatttaccaaaataccacatgca

SEQ ID NO: 117898 - DNA, 966 bp, Cannabis sativa
  modified_base (933)..(939): a, c, t, g, unknown or other
tttttttttttttttcttttttggcttgaaacggtgacttgtaccagcttgtcataatacaagtgttatagctgttaagtatttattgttactaaaatactatcctcataagattaagacttggtaaccgcaagtacatgaacgatatattttgtttgttaagctaattttcgtttatattttaggaaatctttgctgcagggagtgagacatcatcctcagccgtagattgggcaatggcggaaatgataagaaaccgaagagtaatgaaaaaagcacaagaggaagtgagacaagtgtttaacaaaaaaggcaaagttgatgaagcaggaattagtgatttgaaatacttgaaatcagtagtgaaagagactctaagattgcacccttctgcaccattgttactcccaagagaaagcagtgagaagtgtgttatcaatggctatgagatacctaagaatcatagttaatgcatgggcaattggaagagatcctaaatattggacggaacccgagagttttatgcccgaaagatttgttgatagcaacattgatttcaaggggaacaattttgagtatattccatttggcgcgggaagaagaatatgtcccggcatatcatatggtgtcctcaatattgagctcccacttgcatttttgttgtaccattttgactggaaactcccctatggattgaaacatgaagatttggacatgactgagttgtttggtgtatcagttagaagaaaagatcatcttagtgtgattcctattgcttatgatgatttaaaaattaattcacaagaagggtaaaattaacatcattagtttgtttaatgatcgttgtggattgtaatgtttgtaaataagagtacgtattagtgatatcaattagggctcgtttggaacgccgtattatgtcgtattgtattnnnnnnnattatattgaattgtattttatgcaat

SEQ ID NO: 117899 - DNA, 3120 bp, Cannabis sativa
gcttctggtggcaatttcacgtttttggtcacaagttaccatatcatttcaaattcttttccgattaatcactaaattaataaatttaatcatagtttattgaattttgcttcgagtgggtattactcttaatagcattaatttaataatgaattgtttaattgtgttaattgttaaaccaccgataatctattattttatttagagaaagtttcaatattatagtagtaacaagtaacaactgatttgttcggttgcttaatttgaataaaaaacaaaacaaaatgatcacaaagtgaccctttatttggtcaagccacatgccgcacatctggccgtgatttactcaaattaaatatataatgaagggacttagccttagatactatactgttatatactctttttttttttttgacaaatactatctattcaaatttgtttaaataaaaaagtaatcgtatagttggattaaattatatattttctcaaatatgaggcatacaaaacaaatgaattggatctatattaagtgcatatgctagttaaatatcttatataatagtccttcattatattgccattatcaaaaatggtaaaactagtgctcttttgacagacttacaaatttctttgtaatccttagtaatctttgttgaatggttcttttatcttagtttgcactttgatcatataattaattgcataaccctctcaaaaaaaaaaaaaaaaaatacataaatatttatatgtataataatatatatttatgtctcccattcccatcaacaactactgaactacataaaaattaaataataactcaaccacgtataatttagttcgtgataatgttttccctcttgagtaggaaaatattaatttaattgtacccaacaaaagtgtacatgttttcttcttaaaaaacagagcctgaaatataataaggcagagagaaatataaatatataaagaaagagagaaaaaaaaatagatggatcagaatttataatatactattcatgactaagttttaatttaagtatgtgaataaattaatggttcttgtatttatatttttgaattgagttttcaacgtgccatacacttggcaaacaactatcaagacgacaacataattgaaggaaacgacagtaagttcaaaacaacatattcatgaaacgacaacataatgggttagacgacaattaacaacaaatcttatctaactatgttcaacaactaatgataacggacaccgacaatatttttacaaaccacattattccgaacgacctcaaattgctttactcatctagcaagaaaagaaaaggaaaaaaaaccagcaacattatatcttagaagagttaaaaaaaacaaaatggcaatagtactatcaaacacagtattgaaaattacacatttgttgtgtttttatataatttgtgaattttttttttcttacaagaaagttatttaataagaacaaaaaaataaaaaaaaatagtataagacagttggttgctcttaaaaaagtaatcgttacccataataacttgtgactctaaccacgtgttgtgtggtgtagtggtaggaaagttttaccgacattcttctttgtttgggtcaagggttcgaatcccaccatagtccctcattgtgagagattataactggccatttgggaggctagcttgttgtgaacgtatcatctttaataggatgaaaactctcatgatgtgcataccgatgacccaattaaaacaagatgaggtataaggcccttataactggcatgtagtcctcgagattgtcaaaattactgaaagagtgggtaagagtgggtaaaagatctgcatcatatgatctccttttgtttataaatttattaaaaaaaattggttactctaaattatgtttatcgtgttcttaaactttattttttactttttgaatttttttcatgaaatatttatgtaactttgccaaaaaaaaaaaactataaaaatgaaattttcccattgaaatagcataattaaggctcgttgaaccaaccaatgcgaaaaaaatcataccgatttaataatcataagaattaaccaaaacgtatgcagcattcagcccattaaaagaatgaaaaattacatgttttaccattctttaaaagaccgttttactatttacataaatatatggtggtttaagaataaatttgtattagtttagatttgaataggtagatacaaggaataagtgtttaatggttgttatggtaaagtagtgaaatattggtgttattgagtagctaatggtttagtatatgagaatgacttggcttagaagagaagattgtatgagaaggtagtaagcgttattgatagtttggatgttggagaatagttgataagagtagttgtataaatggaagagtgagtagtatctttggcagtgaaagacttgatttatttttcaagcttggttactatatggaatcttgatggggtatttataattgtatgcccctacaattgtggctagaataactcatctagattgttctagttccataaggttcacaattactctagatttttcttaaataactacttctaaactcttctaaatattttaggcttctctttatttattttttctacaaatgtgtagaaatttctagagtatttgctattgtagaaatgtgtagcaatttttaatacttctccttagtacacatttgggtaactctgatcatgtcgcaaaagatctttatcgcctcttcttgtaatgctcccatatctttcagaattcttatgagccatatagcttggcttgtattcattgctgttgcaatatattttgcttcagctgaggattgcgcaactgttgcttgtttctttgatgcctaagaaaatattcttgatttaagtgtgaaggcatatcctgatatacttttcatgtcgtctatggatcttgcccaatcactatctatgtagccaatcagctttgactcattcgtgaattcgtaccatattctataaagttttgttcctcgcaagtatctgaggatttgcttggctactgtaacaccctaactaccataggcgtcttacgtgattttta

SEQ ID NO: 117900 - DNA, 1611 bp, Cannabis sativa
  modified_base (1555)..(1561): a, c, t, g, unknown or other
aattattcacgattttcaataaccacgttgattagcaacgagctgcacagtacgtttaaaatcacgttaacacgcctatattagttagggtgttacatttcgccactccaaagttttggaagcttggggataaacattatccacatttttggatgagtggcacgtggtgtgttaagtatgtaaccaatccacgtcatcaatggcctgagccttccagcatgcgaaggcccagtccaaactagaggcaaacaccagcccttcatatttctaagagcctcgcccttggaaataagatcctcctgctcttgcaagcccttttgaccttcctatagatggagcgaacaacaccctttagaagattaaggaggcgtatttggatgaagaagtccaagaggtgcatctggaagccttcattcggtgatgtgactactctctgacagttgggcctacaaaatcagatggtgtcccctctgtcaggacatggtagtgcacgtactaaaaggagaagcatgatccttttgtccaaatggcatccctctggcaatcttatctactgtaattgcacccatgcgtgacacttgtccagatcacatgggtcccccactgtacggacgccttttcccaaaaggcagcattggccgtgggccttaaggtcatgtgtttggtgtatttaccccaatagtgagcctattttgcacagaaatcctagcgggtcacgggtatgctcaaactcaaatctaagcctatataaaccccttttatccttcaggtaaagggaagagaaaaactacttctgagaaaaacctctttaagctttcttcttcaccaagaaaaacctagagagggaaaatactatagcaaggactagggttcttcaagctataaaactttacttgtaatacattcaaagcttgcgaaggccaatacactaactcgtggactagggaactttaacgtctgaatcacgtaaagatctccatctcatttatttaatcgctcatttaatttcttaagctcttgcttaatctcatttttgaaaatcttggtaaactcatatatttttattcctcccaatcaaacatcacttaagtgttaagttatggggccacaatttttcactaaaacttatttcttgcaaaattaaataaaattagttatattgattataatttttgtttaacatagacactaatatataggactagattatattagaaatattatttttatccgtaattgtagagacatcaatatttcaagcctttcaaaaattataattcaatttttttatatgtcggtctacattatagttacagtaggtctctcatcaatttttgaatgatttatgagtcaaaaatagagtttaaatattcaattgtagatgttcttgcttatttttctacacatgtagttgaatgtttgaactttatattcgacactataaattatttaattttttgtaaaaaaatatgtgaaatatctactataactaaaatggacattaggggtgttcgcggtgcgggtggtgcagtttttaaccattttttcaaaccannnnnnncatgcggtttttccaattttccaaaccgcacccgcaccgcaatactaaaa

SEQ ID NO: 117901 - DNA, 1408 bp, Cannabis sativa
gaatttttaacggcaaaaaaaaatgaaggaatataatttagtattctatataattttatacatgtgggtatagacttattatagtagcttggaccatagttaatgaacagtgtaaaggactgcgatactatacttaatattaattatatatatacttctttttacacaataatctatagtaatcattactgatcataatatatatagaaaagatcttgagaattaatattgcatatgatagatatagtaaatatacacatatctaactttcagatgtgttgaagagacatgatttatttcaagaaaatgacaaaactacacaaagccaccagaagagacagaaaaccacatggtgaataaagagtgttattatgcctaacctcatataaattaatttatatattatttttctaacttttcttttaaatttatggtttgggtttttaaaatggttgtagcgctagttgcagtaaggatttctatacaaatttttattacaatttaagttacaaaactagttgcaataggaatttctatgtagaattccgtaaaaatatatatataaaaacaaaaaactattttgatgtttaaaaaaaaaaaaaaaacattattatattaggttagtaatattttatataaattattatattaaattatatgtattttaatatttaattatactaaataatacgttagatagactattattgtgttataaattcaataattaatttaaccaacaatatttgttttcgttatatttatggtcattaacattaaattggtatcaatcttagtcaattttattaggattatgtattagcttattccaatattaactaatattccaatgttaactaatcttaaagtatttcaaacataattaaggcccgtttgatacacttttttaaaaaaagctaaaagctactttttgaaaaagatgtaataaaaatgtatttggtaagcagttaaaaaagagttttttaaaaaaaaattaaaaaaactacagcgaaaagctaaagctgctttaacccaacttttagaaaaaactgttttaattaaaagactataataattctttttttactaaactatatttacttatttattatatattaaaaaataaaaatatttaaaataaactaattataataaaataaatatttattaaatctattattttttaaaaaaaaaataatttatattttattttaatattgacaaacaacatcaacctaaaatttttcttatgtacttgagtttctatttttttttttatatatttgataatatataacataaaattactataaattatttttatcaaatgcatataaatttatatttgcaaaaaaaaaaaatatatatatatagaaaataaaatattatataaaataaatttttatat

SEQ ID NO: 117902 - DNA, 1112 bp, Cannabis sativa
tttgatgaatagattttagatttagaatttaaaatatattttcaaagcaagattgactattgaattaattacataagcttaatttttattcatattttatataagttattttcaatgtgcaattttcgaagaaattttttatatcaccaaataaaaaaaaatgtgtgttttttaattttttttttcttgaggactagcaaaatttaagtttagggttgtgattactctagaaattaggattatttttcacaatcttaagtttataattaatttaataagtttttaattattttttaatttattattttattttatttttataatttttatgtatttttatatttattttgttataatatgttatatgttatttatttttaagtttattttaattttctaattatttttatgtaattttaagtgtctttggtgataaaaatgtgggactaaaagaaaaacattgagaattttatttttaaaagaagttttagaactggaccaaaataaggccacttgcggtcagctctttaactctatctggaccgtttggtcactgatccaagggccctactaggggcgtgactctcacacccgaccagaagcatgtgaagccttcagtgcacctgccaactgccagtccgcgagggacccgctggaactcttcacccaccacgtcagcttctctagccaactgcaacctgccacgcggaattccgtcagcctccctctccaaccacatgccaccacgtgtacctactgagagaaagaaagaaagaagagaaaagtttgtgtttaatttgaattccacacacacaagtccaaaaattgcaatttctcccacattttatacttaagaatataattttactttttccaatttttctcacctaaataaacattcttcttttatatttttaccttactttttcactactctttcatccaaactaacatttcattttccaatattcttacacatactctatttatcctttctctttccaatactaattaaatcaatcaatttaatttttttttattttgattaatttaggtatcgtttggtaacacttttttaattagttttttgtttttaaaattgaaaaagtgaa

SEQ ID NO: 117903 - DNA, 1422 bp, Cannabis sativa
atcacaaacgcaaccagaagatatatattaaaaaaattaaataacacaactaatgtaatggaacagaaataatgatgtaagttctaaaggcaattggcagtacagaaccctcttcccacaggactcgaaatggttaactattcaataatgattattcagaaaattgttaagtaatgaaattaattcgccaaaaagtaggaaggtgggaataagttgataacatatcataaactccttcagggaaaaggcagcaagaacataactgttaagaaaagctaaccaaccatattcaattatgtgcgttatagatgcatagaaatagttaaaagagaaatgttaatctgagctgaagaagaatgaaagattgatggaaatgggaaatttttcaaacgatccaccaagagccattgcactagaagaccgtatacaaggttaagaaaactaccagcgatactaaactttgaaatgatacagaaccatacaaacaaagaactgtaaagcccggtaaacccaaagctagagcaaaagtttaacctggtttcgctaaattcaaaaaccctagggacaatattgttcattttattaaaattttaatataattgatgcaattgtggatccaaatgaaaaggaaaatagcataatgatacctgaaatgagagagtgattcggtggtaaaaccctagagcgaagagtcggccaatgggtttggttgttctacttctacacacacacacacacagttgcagtgcataaccaagctcgatggcgcaaagtgttattacttattggattcatctcattctcatctttacccccaattttcggttttttttcattttcacccctcttttttcttaaaaataaaataaataaataaataaaatttgctatttaaacaaaaaaaaatgataaatttacaaattacttcacacataaatcatcaatattaaccttaaattaattttatttatctctcaagcactaacagttaggaactaaggttccatttgagaaaatataaaagctaatttatcatttaataaaataaaaaattcaattaataatttttataaaataaaatacaaaataatattcaccctaaaatcaaatctatgttattataattttaccaaaagatttatgttggtgtgagttccacttttaaatttattgaagtcataccacatggtattgatgaaatggtcactagatttgcacattacataacaagtaaaaatagtatctgtttgggtagtgatcttcttcttcttcttcttcttttttttttttttctgagaaaataaattaataacaaaaaagagttaaaggtcatcacataatatcagtgagtactgagtttacctgggttcgagtcctaagttatgcattgtaatttataaacgtttaattcaaaaaaaaaaa

SEQ ID NO: 117904 - DNA, 1513 bp, Cannabis sativa
  modified_base (1438)..(1438): a, c, t, g, unknown or other
aaaataatttccaacaagatatacaattaccagcccaacaataataactatagacattactttataaagtaattatttttgctacttatcgatcaaagtaatctcaatacctcacttgacatactaatgtacttatggttatttagtaaaattactctgatattcagaattgataacctaatatccaaattaagaatatatttaaataacgatattctaatagtaatataacatatcaagtcatatttatcaatttataaattaaccatcatttttattgcctaataagataacttcagtgtcctcacctagaatttatatattaaattgcttataagacaagtcagtgccctaacctagcacctatatatcacatcgcctaatcaagtaagtcgatgcctaacctggcatccatatatgtctatcattatctaatcaaacaattgataagtaggaaacctaacaatagttcctatttatagtcatcacttttgatacttaatccttcggtatctaaatattgttgcctaataaaacaacccctctttttcattgccaaatcagacaatatttacatcatcgtttagtaagacaatcttttttatcattgtctaataacacaaccctttttacattacataacagtaattaccgtatcttaatctcaatattaattaattcacaatgaataataatcctatctcaacataacatgctacatagtacaaatatatttttcttacctttaatccagattcatacatgtcggccaacctaagtggagaaacattgaaaaatcatggccctataccataacaacggtaaactgataagtgtctattctaaaacacttccttatactcacataaaacaatctaagattttctattgaatctcgtggtaaaaacaccctataataaattatatattttggctctaatttatacttcacactttagagctctttcgaagcttcaaaacggtatataaaaagtctaaaatggacacctgagtgaaaagttatagccaaaatataaaaatcaccatttctcgattactgccaaatagaattccagttggtacagccttgtaccattcaaaattctggttcacaacagtagggactaaaaaattttaagttttcaaagtcccaaaacttgctccaaactaaaccaattgatctcaaacttcactagaaaaatcatataacatccatataacaatctctatgtgacagaaattaaaagcatgcactaattggttcgggtaacacatacatcttgggaacatgataatacaattgagtgggaacgctaatcatagatatgtaatctatagcttctatttggacatagaagtgaaatgatgatttccttcgagcttggctttatagagataaatggaagaggcaagagctcttatttcagtaattatattngtttactgaaatatcatttatagctaagtattttaaggataaaatatatttgggggtgaaatggtaaatttatcc

SEQ ID NO: 117905 - DNA, 2152 bp, Cannabis sativa
  modified_base (68)..(68): a, c, t, g, unknown or other
gaggcgtgagtggggtttcggagagttaagattttcgttttatggtgtgggaaatggagaagaaatangtgggcatgtgggaaatagaaaagaagtaggtgagcacgtaggaaattttgcgagaagtaggtgacgattttttaatgggcccttatacccgactgtttaaaattgtcgcctatactataggcgatgattagtataggcgacgattagtataggcaacggttttaaaccatcgggtataagggcctaataaattcgcgaattccaaataaaattgtcgtctattcttgtaattactcttataaactgtcgggaatactaattttttccgacggttttaaatagtcacttaatttttttagcaacggtcgcccaaaaaaagtatttttaagaccgttgcgaattctaatttttgtagtagtgatacaatgattaaaataaacaacttgattgatatatatggaatcaagttaattgaataaatagagatattcgatccaacacattagctacaatagcaggatcaaaactaatgaactgaaacaaaaagtaatataaagtgataaaagttttaacgtggttcaaatatttttaagaaattctattttcatgagactacattcagaaataaaataatgatgattttttcttgtggtaagtaactttttgtttaatcatttactcattatgagaacaaactacgaaaataacaatcaatccctccttttttttttaatctttgcttgaaatataaattttacacaatgtaatagaggggaaattattcatcataaatcatataaccaacttataagagatgtagctattattgaaatttttgaatgtaatctctcacccattaaaaaattatatacgtttttggctaattatcattttctcttttgaactttatatactaataaataatactattaaatttttaggctgttaaaatctttttactaatgagtcgttacagccaaagaatttttgcccttcatttaatcttacttatggccaattgatattacaaaaattcagatgaaataatttggtacatgaataattatcacgtttagctccgtaggtaaaattgaaaagaattatataaaagtttttgaattgaacaatttctattttaaaaaatttataaaacttaaaaagttagaaagatcgacacaatttgatgcatatcttatatttatgaaattaaaaaagaaatcataattaacctaatttttttctcatgtaagaatatctatagagtgctgatttgtaatgggtaatattatatttttagtattttcgaataaaaaataaataattatatagacggggtcttcttgtttgacagcagcacaattttaatgaatttgtagttaattggtaaattctgaatagtgtcatatttggttgtaatcatgtagtcatgaattaagaaaaatacaaataatggcaactagttttctattttgtattacatttaaagtatccatttacaagtaaagtcatcttcgatacatgttagataaatgaacaacaaacaacttacaagttaattttagaaacacaacgctttatatattgtataaatattagttatgtcacacactaactcttcacgcactatagccatgagcgagcggtaccccactaatttttcttttcttcttttaactagaaaacataaagcgctttgcctgtcattgtatttcatttaatgataattaaattataaaattatattacactctaaatttttatatttttttataattattttactataatatgaataataaatttattaaacttatttttttttaattgattcactataaatatatattattataaatttagttttcaaaatatatattgtttgaataaattagattaaaatttgaaaaatatataattgatataaatttataaaaaactaatttgtatattttcaaaattgatgttgatatcgtatttcattagttgtagtcgctattacatttaaagtcattatcattattgtatctcacttgtagatatatttaggtttgaatataaatgggccaagatgcaaaatggcactaaatttaacaattaagttaataaatgtctattttttttaaaaaaaaaattaacaaaatgt

SEQ ID NO: 117906 - DNA, 2829 bp, Cannabis sativa
  modified_base (2762)..(2774): a, c, t, g, unknown or other
aattactaattagcctttattatttatttttttaaatttctaaattaatcacaatcatttaacaatgatctaatggttaaaaataaatgtaaccatgatggttacatatttgatgtaaccattgaaaccttcttcataataatattatatatttgaaatacataaaatatataattttatttctaagaaagtgagatttgatatattttaaaaaaatcgatgtgatgtaaaacttgatgtaaaataaaagtgtaattttgttaatatatttggaagaatagagtagagagagtttatattgagagtgctcgtgatctcaattttttatgctttataaagagatagtaagactctgtttggtaggaaggaatgaaagtagaatggatgagagtttaaaaagaatagggagtacgagcgatagataggatagttgctcttctttgtgttgtttggtaatgaaatgatagaaagtaaaataactattaaaattacgattttataatttttaataaaattatatattatttttttgaagggtagaaaagacatttcatatggcttttttttatgtctttttcttagattcttttactttttgagggattgaaaattgtgtatttgaaggaaaatgtgttgagatttataccctaaaagtaagtatttaatggataatatattatagaatatatgaaatacaattatgagataaatgaatacattaattatagaagtataattagtatatagatggtataatcttgtaaggtcatacaaaaaaattaagattgtacaatatatagataaaacaattcggtagtgtattaaagtaagacatctttaatatggaactactaagtacaatttaccatacactataccctagtgtgtgtgattttgattcggatcacatatgtggatagacatgtagtaaaggtattgtatataatttgattatatatgtctagaccgatatgtcaataacatctttcattaacatgtcgtttaccataaaagagttattcatatcacagtgattatcattagtagaccagcctgaatcctgagtatgcatgaacccgtattgtgttcattgagttctttgattcactcgttaaagtttctcagagaagatgatttttacaacttttattttgggagcttaataacatgagtggttggaaatatgttatataatatagaatctaagcgttctgaaaagatcgtatattagttcccttatagtgttaattctaggagtgctacagttggatccaaatctataattagattatagattaattgttcacattaaatagcacataaggaatcaagagataattagaaaggtaaaatataatttagaccaactctaattatgaactaataaatattggagggaagactacttataatgattatatcaatgaacaacaaagtaagaattatgtaaatataattctatattatcaaagagtacaattcaatatttatagtggagtaataatggaattaataaattgaattattctattgatgagatcattaataattaagtgtttattggagcttcgaaatatagatttatggtccccaagtcacctctatacaacactaaggcttaattttgacgaagaaaaaataagaattaatttttatgagaaataattcttaagggcaaaatagtaattttgtgaaaaatattattttgaataattacatcaattatgaattatgtaattagtatttaacgttttagttttatatgataaaactatattaattagttaaatataatattattcttaaataatgttaaagagagaaatatattatttaaatcaaaataatatttgttttaatcttagtaaataagagattaatgaaaattaattaattattaattattgataaaataaataataaatcttatttgtggtaaaattgagaactcaattcggaccttaaaatatggtccacacgtgtagggtgacacataaagattcatgataattttgtttaattattttattattaaaataaatcaaaataaagtaataattattttttaattattatattaaatatattattggataatgtatttaaaaattaaaaagataagattaaataaaattatataattgatttttgttaatcagatatttatatttgaatttgaatttaaaataaatattatcttttattttaaaggattaaataaagaattaatattttatatatatatatgaataaaaaatagctccaataaaagagaataaaattgagataatacgataaaattttctctttctttatctctctcacgcaactcactctcactcacacgcctatcattacagtgtctcatgagttgagtatacactgtgattactaaatagtactcatctaaattgaatctaatagcctactctattcttagagtattgaggctaacttgaaaggctctggtgtgaactcttcaataacttcttctgaattggatgttcaattgaataatatgaaaagatagtaagaaaaccctcataggcaaccagaggtaaaatctctaaataaatacttatgtttgcattatgtataattgtgtcgagatatatctagaatatatagtttatattgtattcaataattattttattaaatccaaagttttttttaattaatgattctgcttctgctgcgactctgatatgaactataaaaaccaacaagaaggtctccctccatctctctctctctctctnnnnnnnnnnnnntctctctctctctctctgtaatatccgctaactccgagagggtatttttgtaata

SEQ ID NO: 117907 - DNA, 3051 bp, Cannabis sativa
attcaggatgtcattgggttgaaaatttctaggccgatgttattgggttgggtcattaaaatagcctcaacccggccaacccaacccatgctcagccctactagttgctcaggcaaataatagagtgctcatacttactgtaatcccttaagcttttctagcaaaatacttaataatattgactcatggactaaggctcgttaacgcctcaaccacataaaaactctgagtgtctttttaatatatttctctctaaattatattttctttagcttttatatttaataattggtttctcgaaaaactcgataaatatataaatgtgaattagccccctccttatgtcggttcgtaatttattttggtcaaattactgttttacccttctaattacttttttttttatcttttagtaccgttaattcaatagtgaaagtataatttagatccaatctaaatttgtgcacaacttcttaaaactagaactaacacttaaagggaaccaacattcgatccattaggaaagtcaggattcaataattttttagatcacgtcctagccgttcatattattagattcctaaaatagaaactgtaaaaatcatcttctctaagaaactttaacgagtgaatcaaaaaaactaattacatgaatacgagttcatgactcaggatttaggctgatctactatttatcatttttatgatatagattaggtctttatagtaaatggcatgtttgataaagaaaatttaattacatattggtccatgtcatttataatctctattaaatataataccttcacttagatgtcatactaaattagcaatctaaatcgagattacttgcaccgaataatgggcattagtgaactacattagcaaaagtttatttaagattttacaactttaatatattactggttgttttatccatgactaagtgatcttaattcttcgcacaatacaagtcacaacatcatgtatgaatacaaattttttcgatatttgtatataattattaaatattaaatattaataatttagcatttaagcatatatgaaagtgttcaactcttatttataaacagaattgtctttacaggcttttcagggcataaactctaacacaatcaacctaattcctagcgaatagctagatcatctcaaaagtgtttaccataggaaattttcattcaaagaaaatcaacataataccctcacatgaatgtcctagaagatagaaacaatatggtataaaattcaaaacttaaaaaggatttataaataataagaaaaaaagacttactcactgttcaaggcgaagtcccaaattgcaaaagctagacggtctcctagaagcattagcacaaaaatcctgagatgatgctaagaaacttaaaaggaagttgtttccctctaaaaacccaaaagcctcctcttttaatttaaagaaacctccttgaaaattgtgtaagcgtcagtcacgcttccccacacacgattttctatacaagtcatgatgattgctaaaagatttgaaaagacttgaggagattcacatcaggctagcacaaaaccctaaaggttggatcacatgggcaaagatatgtgtcattaggacgtgcaaggaagaagctaaggagtccacgtacgactagacgctcctacacacatttgaggagcaaatgttatcctaaaaatttcctgggtgatttggcacacattaagatgacatgtgtcattaattaaaagattggtcatcacatgataaagtcaaaaggaatgttagatggaatgaccagagccagatggttaaaattcaactcatctttcccactcgttgcgcgaccaagaagatcgtctgacaagaagcatccaattgatggtgttatggggatttgtcaccgcagtgtcgcaaggcaagatattggttgaatcatccaaccgggatgtttgacttattccaaatcaatgctccactaaatcagcccccaaatcccacaagacaggcttttatggttgcctaaaatcaagggattggaggaataattaacatttattgaatatttgtaattaacactatttattatttgtaaccctataaataatgacccatattcactattgtgggagggggattcatactttcaaaagagctattacgttgttagaaattatcatatataattctttgagaaatattgagaaactcactagactctgattcttgtgatcttggtattccaacaagtaaatacaaagaaaagggagtaggttattaccatataattggagttgaacctctataattcctggtgtcattattcttcttacctaaactatatatcaaaatattttatttgactctgtggcattgaccaaaatttgggtcaataaaaggctgtagaaggataatactgtcagctattatcagtcaaactataacaatttgtaccattatattcgttagagttgttttgtatattcctctgttctctctcttttattgttattagtttgttaataacttagtcaatcttttccttgattgtagtctatatcagtattccttgtaaatatacacgcctatataaaggctctttatcaattaataataatcaattgcttccaacattcacatggtatcagtgccctttgatctttaattttttttccccctttcgtgttttcattcatcactatggccaccaatcaattaaataatgctcaagatcccaccaaaccttccaaataccatcaaactcacatctaccaactatcttgcttggaaaactcaaatccaggcacaacttttgggtcacgatcttaataaatatgttgatggcactttcccttcccctcctgctaatattaccaccaataacgtcacgacagctaatcccgatgctctcacttggttccgacaagatcgactggtcttcggcgcacttgtcggcactctttctcatgatcttgttcctcttgtctctcaaacaactactactcatgaagcctggacaattcttcaatctacttatgctaacc

SEQ ID NO: 117908 - DNA, 7064 bp, Cannabis sativa
  modified_base (1268)..(1281): a, c, t, g, unknown or other
  modified_base (4000)..(4000): a, c, t, g, unknown or other
atccagtacaactctatgtatactgatactgttatcaatgtactctaacaagcataaacaacatgtatgctaaacatgtaaatacatatgcataacattgcaataatcttacatcatttccgaattcaggtgtgtcgcccagcctgagtagaacaactgcttagcaaattacagccccttaaatcacatcgttcaaaacatggataagtgatacgctaaatcacaattggggacttaggttttaaaccaaaaatctacctactgaaagttaacatggcattaccctagactaacaggaaattaaccaaccaaagctctgaaactaacatgaatcgacaaaattaaaaattgggggaacccagcagctgatctgattaaccgggtttacaaggcctgtaaaaccagttaaccggtttacaccagaaaaccccaaaaaattcaaaaacctaaccaaatcgatttcaaaccttaccaaaccttccagacctgcatattataccccaataaacatatcccaagcaacaaaacaacaaacatgctttaaaacaaaaatcaccattaaagagccaagcttgagttctaaaactcaaagcttgcttaatcaacactatagccaccaaaactagctcaaaataacatatctaacaataatttagcttcaacaaacattcacaaacaacagcaacaaccacagaatccaaaaacccaattcatgcaataaaatctttaacttaaaacccaagaaatcataaggaggagtgttgggatctttaccttggtttgagatcactaaaaacttgctgaaaatcacaagaattgctaaagaaaatcagaaccctagctgattctaagagggttcgaaagagagagagagaatttcggagagagagtgcttttccttaatttaattttttgtaaaataaatgagtaaatgaaattggttttattaaattaaaatcaatctaaatatcagcatattaatcacaataaagtccactaaaggacaatgagttaattaggaaaaatgaccattttgcccttcccataactaaatagtcataaaatcacttaggggtattttggtcaattataaaatcctgactattctcgacattctcaatgtcaaaatatattgccccgctatactaaaaatactaagatgtaattctaatagccaaacaccgtgtttcaatgttgtcgggcataaaacaagtaaaaatataagattccatatataacatagaaaatccattctgaattcaaataannnnnnnnnnnnnnataattcataactaatatgcaagtttcatgattaaaccctaattatctgctaatttctaagttaaagttaagtgatctttacacttggcctgaagcatttgccactttgtttagaggttggctggaagaacttgttttctttcgttgattagtgggagtagttttcttcaaggtttctcttacctttcctttttccttatcctaatgaggatcgtaaataccaagatcttttggattttttcctcatattgttatcttgaggaataacatcatcaggattattctctttaggagtcaaatttcttgttccgagtcttgcttccaatctcgccaaagtttcttgcatttcgtaagagaaatcttcttgagccgccaactttagttcagttgcttcaaatttcttggccatttcagcgaccgcatgattttgctcatcatgttcaccttcttcactagttttttgtcttttagatcagtaggatcaataccctcagtttcatcttcttcattgataggatcttaatgaacacgtttttcatgttgattgtcattcacatgacgattgctttgcctgagtaagatctccattgatccatgttcttgtttgagtgttgggatcagcttcgtccatcagagggtccttgcagtaaaggcaatatttggtttggatgagtaccatgattaccgtatgtaatcgtcagaggtatcactaatttcttcaattctcaacgaaagcacccaaatatttatgagttttttggaaataaatagtttaaatgtaagagccaatgaataataattcagaaataaaagaatagctacactcaatatttttacgtggtttggacattaacaagccttagtccacaagtcaatattattaagtttagactagaaaagcctatgtgattacaagaaggtatgagcactctatgttttccctagcaactgagtaaagaatttctaacctttttgtagggttcgttgtaaatttatagtgcataaaagtcatactagctaccatcttttctctaatgggatatttacaaataatatattagctttgcctttatctggtgaagcttaattcatgaggtgccttgtatgttgacatagatgccacatcacgatgccagttgttaaaaccgtccgtgtcatatcatcgtgggaactaatgacatgttaattacttgattcccaattatcatcatttcttaattggagagatatgatcttttatctgagaatattggaaggcaatccctgatctcgcgcgatctggcaaaaaataggaaactatgctgggcttctagatagttgttaaaggtttcttccggttacatgatttcatgtctttcagaaaatgaccatgctggatgggatcttacctggacaagttgctcattcttcaccatgaaagactgatgataatctatggatccaacctagttatctcatttggctcgctattggatctggaacatttaagtcgtatttgttatgggaactccacgtgtccctatccgaaaatacgaataacattaaccatttcatgaataataaaaaaaggataataatgaaatatcaatttcaaatatatcttcaaactaccttttaattttaacaacgttgcttatatataggcaatttaggatttttactcgccaaactatgacctatgtattattgtaccccgtgaactttttgactgttaaaaatagtccttaaactattcatagtgttataaaattatccttttgtcaagttttgtcacatgtcacaaataaaataatgacatggctgcttagccaattgccacgtccgtatcatgtcaacgtcatgtttctaattaatttgaaaaattaataattttttaatttagtttcacgtaattttcttaaccattaattgatttttagtttcataatttttaaaaatgtataatttatattttttttaaaaaaaatattaaattatacatgtgacgctaatgtagaaattggctaaacagtcatgtcattattttccttaccacatatgacaaaacttgataggatataagcagtcatgtcattatttatttatttttttttttttgccacgtatgacaaaacttgatagaaaaggcaatttacaaaactatgaatagtttagggaccatttataacaagctaaaaaatttaagggtacaataatacatatgtcatacaaaaattttaaatatataaatatccatatatatatatatatcaaccatatacatagatttttttagttactaattataaataacacttttgttatgctactttcctttatttaagaaacatttatctttgaagggtgattgatttatgtcttacgcaattacttttaagtttttgtttaatatataaaaaataaataatttatcactcttgataaataattatatatctttaataattatgtttcctacaaataacatatatttttgggtaaataccattttagattctgtgttttgtaaaaagttaccaattggatcctctgttttgttaaatgacaaaatggaccttatattttctaaaattgtaaaaataggatcctgagctcaatttttaacaattatattttttaataaaactaactttaagacaatttctaacacgaatagatacaaaaaatctaaccagttttgtcataacatctctagattagattattattaaattttatnttgacaaaaaatcagttcagtgtcctatttgtacaattttagaacagacaaggtctatttagtcatttaataaaacagaaaatcgaattagtaacttttgcaaaatacatggtccaaaatagtatttaccctacatttttttgtttgtttataatttttcttcaaaattaatcacacatatatgtatcaaaacacattttttaataatacaatatgaactataaataatttaatactttttatacatataaatatgttattatttttaatatattattcacacaattttttaaatttacatatatatttatttaaatttgcaaataaaatattcttatttactaaaaaagaagtgtcatgttgcttaaaactcttttaggtgttgtatatgtaaattataaatagtattttttattatcatgatattttttaataggtaggtgattgattaatatcttaattaatatttttttaacacaaagaatttaggtagaatcctacatttttctattttattttgaaaattttgcgaggtttttcaatttatttaaaagaaaactatataagttttgtttaaaaaaataaataattaagctgaaaaataaaatagacatataaatctatgaataatattattttttctacaaataaatttaatttaaaaggctcacatggtttaaaaactattttaagtgttattcatgtaggttatgaataatatttttattatatcattttaaatctgtcagaaaaattttatctaacaagaattttttcttaaaaaatataataatatataatatattatatattgatatttttagaataatatctagttagattaaatttacttataaatatagattaaatattttcattattatttatatatctatagattaaattccctctaaagcttattttttttctactttacatttctatatctttttaattttaaaatttacaaacgattttttaaaaaataaattattttaagtaaatctgtataagtatttttctcaaaattttatttgtccaaaaattaaatacaatttagtttttatttataaaaagtaatcaaataaaataataattgaatgaatatatgaatgtatcttgatatatcaaatgtgactatctaaggtttttgttagttaacagaatattttacgagtataagaatattcttttaaatttaacgatgttagttttataaatatatataaatattaatatattacttgtaatattatttttatattttgatttttaattgggagtatgctcaattttactatttttaaactttatattattttcctaaaatttttaaagcttgaaataatgtttcttcttaaaaaaaattaataagtggtttcttttaatttataaaattttaaaaaaatacacacaacaaaaataaaaaccaaaaatctttatatataaaatgtgggtatctaacagtttttgttagtttaagaaaatattataagattataagaatattctgttaaatttaaaaacaccaattttagattaatataaatatatacaaatattaatatattattggtaacgttattatttattatttttatttttaatattgagagtagtacgtttaattttaatattttaaattttttatttattttcttcaaactattaaaactctaaatatttataaaattaagtggctttctttaatttataaaattttaaaaatacacataactaaaataaaaactaaaaatataattaattattcgtgcaatgcacgtaacaataacctagtatatatatgtatgaagttataaatttatagattatcatataacatactaatatttgaggattcttttaaaaaaatattatataaccatttttatagatttatttgtctatttaaatgtgctgttattattttagtttttcataaatttagtctcaattttttaaatagttaaaattggggaatgaaagtatttttttttactttggagattagtttatatatatattttcacatagaaaatttatcacaaaaatataaaattttaaattggtaaatccgaagctaactattgttcgttattattttaaaataaacacaaaagttgatacattttttatgatacaataatgaaatatttgcagcacaacttaatgtagtgtccgtaaattataaaaataaagaaaatcataaattaacctaaaaaaatttattaattagtataataaccaggcaaagtgcagttatgttatgaaaaaaatagtaagattgaaatttgatgggctatagagttcaagaatatgaccaatatttccactatttgctctaaaatctggcctaaagagaattctgaaatgaaatatgggttaatatcatttagaatagaaaaagtactgcaaagcatatactcattacttgggtggcatgttggggtagactccaaagtagacatttagctttgtaaatttggtgtcattgactgggatagttgtcttttttgtgaagggaatatagaaaatcaccaacatctcttcttcttcgattgtgattatagtaaaatgatcttttatgagttgtgtgattggattggcataaagcttcataaaagtgagttggcctatagtcaaaaattaatcaagaagtgttgggggtccaagttaagaagagaaatgtttattgctttgataaataccttggtctaaaatatttgggatgcaagaaataatactttgtggattgctccagtttttacttctaattttcttataaatagaattaaaagaaaatttattttaggttttcttaattcaaaaaagagaaagctagtatataatatttaatgaatattagatagtttaagtacaacacattaattgtgttttgttattttttaaaaaaattaatagtttgcaataacattcttacttacaaaaaaaaattgaaatttgatattattggagaacattgtctcacaagaattaaatgtaaaagtgttgaaccatatgtaaagaacatgggctactccactcattgccaattggttttgag

SEQ ID NO: 117909 - DNA, 1456 bp, Cannabis sativa
  modified_base (1391)..(1417): a, c, t, g, unknown or other
gctaattgccttttctaatccacattactagagcggtcattacatccaatctctttatttttcagttttatcatgaaatagatattcagagagtcattgaagggagtccctggactttcaatagaatccaattgatttttgaacgactgaaacaaggagaagaccccaggagtgttcgcttgcatcagcttgatatgtgggttcaactacataatctcataatagggttcatgacagaagccaatgctaggaatgtaggcaactacattggatcattataaaatctgacccaaagaactttatgggtatctggagggattatctgcgtataagagtcactgtgaatatagatttcccactgaaaagaaggatcaagctcaaaaagaaatggtgattggttgtggtgccagttcaaatatgaatttgtcccaactttttgttttatttgtggcataattggccactcagaaaaattctgccacaagctttttgaagcccatattgatcatatcgagaagccttatggattgtggatgaaggttgaaccgaaaaggaaaaaatagaggatcgaagcccaatggttacgtaccggaattgacactgataagcaattttctgatgagtttgaaaatttcggcaaggatgatgaagtcttcaatgctggtaatcaattatcccgtaatattagggatattgttgcaatgaaccagggtaaaaaaggtggcaatgtacacataatgaatgctgaagagtatcatgtagctgttaatggcaaagatgttagtcaacctccatcagaaagaagtgaaaaacaattgccaacaaacacaattatggttatagatacgaagagaaggaggacaaatatggaaactaatgaagtcattaatgaagaagaagctgatatgagcctagactctattgggttgtcaaaaaatgggtctttggtgggtcctggattccaggcccaccaagggtcatgagtatccttagttggaattgccgtgggcttgggaacccacgggccttacaattccttaaggatctggtgatccacaagcgacccaaatatgtgtttttatgtgagacactttgtaaacatgactctgttgaaaaacttagactttctttgggctttgaagggctattagtcattgatgctgttggacgaagtggaggaattgctctcctttggaaagttagagatgaggttcaagtgttaagtttctttatccaccatactgatgttagtatccatgttggggataagcctacttggcgtctcactggttgctatggtgaaccacaccgaaacaaccgtgtaaaaacctggaatttattaagaaatttggctgagagatatgacctacctgttgggttttgtgccctannnnnnnnnnnnnnnnnnnnnnnnnnntttacttattaataaagatcagatataacattttatgtt

SEQ ID NO: 117910 - DNA, 2951 bp, Cannabis sativa
tctctctctctctctctcactttcgattgtttctcttcagttggctttttgcatgttagccccaaatattactgtatttggatgagccaatcatgtttagtttaggcagcaaatactatacacagcaacagcaagtttattaatattattaggttgggcagaaaatactatatatactcaacacaccacaacacaacagaaagcaagtacattgctgttagacactatatagtgcccaacatcataccaatattaacattttttatattatcaattaaattaaattatgtgtaacccattattaattaacaccaataataatatatcaccatttgttgttgtacttagcaccataaatttctctttaattaacatttctcgattaatttgtaagtcacatatttatctataccgaaaaatagttgaaaactatttaatttttttagtcatcgtgtcatcactcacaaacaaacatgtagatgtgtacacttgtcttttcctttgttaatttcagagtcctacggtcacactgtactgtacatgtttgttagcttaagatagattatcatggatgcaattaataaggattattaattaagtttaaatgcaacataattatggtttcggtctggacccctaaattaacattaattgaccatatttatatgtatataaatcgtagaagaaaaaaagaaaagaaagtaataaataagtatatatttttttataaagaaataaaatttcattaatcaaactgactacaatcaacgagcatactcattatgattatattagatatatacaaattcacaatacttttaccattgctagaacggatctatcaattttacttaacttctttttatttacaagattcaatctaatcttttaattctctttcactatatcatctatacattaaggagctaaatatcttttttcaaatatgatttaaccaaattccataaaaagacattcgacacaagcctctttcgcctcttggtatctatccattgaaccaagtcttcaaactgattcggctagatttggcttcctagcctcactgattttgagaagtaaaatccatgaaaaatgttatttggaaaaataagtattcatgattttcctattccaactcacaaaccgggaaatagcagattcaacatatatatttttcgtaattgtctcgagcaagaaggtttgtatgaattacttgccatagaatatatcgatgtgtaggcgctatgagagaatactaaacaaccttcccaaatgatacttgtatgctccattccaaaaggaaaccataagccttgctcatagtaaattttccattgatgctagccttctttatttctgttatgttcctgatgttcctaagttagcttcctccaagaccaacttacatcggatttagcttcaagagaccaaacatcctggccttcaagtagacacaattcacccattttacccaaaggggatcttatttcaaagataaagcccaaaggaacttagtcaaagaatctttgttccattttggcccttctctgaaacccaaaccaccaaactttttgggtttgcaaattagttcccatgaagccatatgcaatttactgaatgaatatggagtgatctaccagcaaaagataggtgcctactagcccatgtgtgaattttcatactcaatttcctcaaaatgatgtcacaatcctattgtctctagtgtgttggtctgagactaacaagtaagtatttcaaagggaaagatccctctttgaattgaagtacttcttctatgcctttcttaacaacctcattaataccagtaaagtagatattggacttatctatgtttgcttttaaactagatgcctgactaaattgctgaaaagatttagcaaggcaagactcctaggcaacattgcctttaaatcacaatatcaaaccatttgcaaaacataaatggcttaacttgaggttctttcataaaatatgatatctatgacaaagacaacagaggggagatagcgtctccttatctcaatcctttaacatcttgaaactggccttgaatcttttcattcaaaactaacaagtaaattgagcctctcacacaaaccatgatccaattaacatattgagttggcaagcataaagctttaagtaacttctctagaaattgctaatcaattgtatcataagccttgcttaagtcaatcttcattaagtacctgggtgaaacagtttttcactgataacctttcaacaaatcttgtaggataactacattatgagcaagatatctacttttaataatggcaccttgattatcacttaccatcttaggtagcacctcagccagacaagaataaattatcttagagatgcatttgtaaatagtgatacagcatgctattggtcggtaatcaattaccttcaaaggcttctccactttggagataagcatcaataatgttttgtttagctgatctgtaataattccgttttgaaaaacttttaggacagttgtggccagttcgttgcccagatccttccacaaaaatttgaaatttttttacccatacccattaggtctagggcttttcagacccaggatagaaaatgaagaacttttgacatcctaaattatgaatggtttgataagtttcaactggtcatctaaagttaaccgaggcccttcttccaaacacttcttattaattggaatgtgaaaaaccatgtttttgcaaaatgtcagttgtatataagaaaatataaaactgtaagtgttagcagaagcagaaagtaattctgctacagcaaaacaaaacaggcaggatataaaatatttatagaaaaaaataaataacttgacacaagagatttatacgtggtatcagtgttctcacgaacactcctagtccacagagccacgcccagagaatgaaatc

SEQ ID NO: 117911 - DNA, 1594 bp, Cannabis sativa
aaatagagctaaggaaagaagcttcaaaagtaaagatattatcatgtttgaaagaggagaaaatgaagactagaaaccaaagacattcagttcaacaatatagactactttatggattatatgtaaaagaaacagaaatacctctccaaaaggtaaggcatcactttcgaagaagtcgccaaaatctccaaactcatgaagaagagctagaatatctgtacccacatctctatcgtcatcatcccagtcccaataagatccaatctgctcgtttccaactcctgtaaccactgaattgttaacttctccaggaccaagatcggacttgtacgaatcttgcatgggaaaatttgaaattgcacccatttgaccgtatgaagctgtcatccctggtcgtgaacgcttggaaccctattgaaaagttacagtttctttattcttctgaaactaatagattgatctaactaaacaaacttaaatttatataacatcacaaaattccatgttctttaggattgataaattgatttacacaaacacattgattttaaaattgttacctcagctgttgacagtgaagcaggactgaagctaattaaaacaaataaattaaatatattcacaaaaaagacaaagaaacagagacaaagacaaaaacaaattcaaattttcttttttcgtattcaattaatatatttcgtggaaaaaagaaaatctttactaccccaaaggtaacattcaaattttactccccaattcctaccttccccaccacaaatacaccaaaatccaactattttttaaaaaataaaataaaataactagaacaatttcctagttgattgcaaatcattttcggctctgtaatatgaaaaactcttcctccagcagaaaattgtcttcccaattttcaggattagtttatactaaacacgtacaaaacagtttaccttagcttaatttggatgtctaatttcgacacgtcatacatttaaagctagagagaaaatattacaaaaacgaaagtatcacaattagctagcaataaagcataagaagttccaagcatattgttcccaaagaaaatctaacgaacaagagaaagaggtcccaatttggtacaaaagtttgtatgcatttctgtagccagcaaatgattttaacagtaagtttcatgtcttaataggggtctctacaattatttccaatttgatacttataaatttctgtagccagcgatgatttcatcagcataatgttataacagtaactttcatgtcttacacagaagctactttgtaaattaagaaaccacataccaatttggggaaatccatatccatttgatcattagatgataaaccagattgtccacaggtcaatgaatcagcatcagcctcaagttcacttgtgccagtgatcatcttataatcaccatcactggagctgctgcttaagctactaatgctgctgttattactgttgctgctactattataaccatgctgtgagcgtttattattgatttcattcaatccttctaaactatctacatcgtcagcactgcatgaaaaggaatagatatttaagaaat

SEQ ID NO: 117912 - DNA, 1302 bp, Cannabis sativa
  modified_base (27)..(77): a, c, t, g, unknown or other
agatcttggtgatactctgtgacagannnnnnnnnnnnnnnnnnnnnnnnnnnnnnnnnnnnnnnnnnnnnnnnnnncaaccaatgtaaggtttctcatacgattttatgtgttattttcatcattttagaaattcatatttaggatgttaaaaagatacttgtttgtaaatctagatcctggtaaaatataatccaacagattcatcatacaaggacattgtccatgtgattgtacaagaatgcatgtttcatcctgctcaagctcattcagatacctcttttgtgcatttctagtgtttttaaaaatatggggaccttcggatatggtcgctacttgaccatctaatgctggcagagcagctccgggtaggtatggatttctaggtctaggagaaactaaaggtcttgccaccggggcattttttacccgctgagggacctgtaaagtcggagcttgtactctaggatcttgttggattcctactccttaaggaggatttacagctttgggctatctatgaataaaaagttgttcgtgttctactatttgtccagtatagatgactggaattcttacccagttggataagtggccattgcaaactaatcctttgattttgtccctcagataatcacattcatttgttgtatgcccaatatcaccatcttactcacactttttattaggttctctcttttgttttccacccttgtccattggtggaggccttttatagtgaaccatggtgcaagtagctttgtatacattttcctgtgtatcaatcaagctagtgtactcagagtatcttagttcgttggttcttcctttcttcatagattcgctctggcttggagcttttgaacttcttttgccatgggaattacttaaattcgattctggtggctccttctgttgttcatttgtctagaagcagcactatctccggtgtgtgccatctcgaagctagagaaacttgcttgtatagttagatgtgcaaaagtactaggtctgtagacagttggtgctgtaaatgtaggtgttagagtcagtactgccagagtagtttttagagttggagaactatttgttgatggtgctggaagtactccataggcctaagcataagcatcttccagtttattaattcttgggatctagataagaaatcaaataatgaatattccctctttctttgatgctcgccctgttggaatttattttaccaggatcttaatctactcacaagtatgttgcttaacaccctaaatatgaactttttaaaacgataataaacacata

SEQ ID NO: 117913 - DNA, 835 bp, Cannabis sativa
gagagagagagagagagacttatttgaagaagaagggaaagaaaaaacttaaataatgagaagaagctacaccaccacacttgacacttcaatcataagaaacaaaaatcccaaaaacaaaattaaattttaattgttagcaaagaaaacaaaaagcatttacaggagtatcaaaccatcaaaatccaacgtcttcaatggtaaattccagaaagaacttccctttaaaaaaaattaacactttccatccaaacaaacaagcttacgaagttacaacaaccatgaaccagaaaataaaatagagagagatgaaagagacgaaccagcaaaaaagaaatgaaattgattggaattatggagatctcgcggtcctaaattgggttttggtcgccaggatcaatgagagtgagagaaagagaaagactcaacctttgagagagtggtgtggagatcttcgaatgggagagtgggaaatggggcttaaatatccaatcccagctctccctccaaaaaaaaaaataaaaaaaatctgaaacaatgaatagagagattggattagagaagaaagaagagccccctaattgaattgagcccccaaacaagaaaggtgtgaaattggattatgggagataatagaaagtttaaggtgaaatgattatgattaatattattcctggcaagaaaacgacagagtaactacgaaaacgatgtcgtttttcaactgtaagtaaaggtaggtaggtcgtgtggaggtggcgggtaaagaataaagaaaataacaatttgcggcaaaatcctcttatgttttaatttttatggtgccgtttggtaacac

SEQ ID NO: 117914 - DNA, 1451 bp, Cannabis sativa
acaagagagacaagaagaaatggagatcgagagagggaggaaggcagtgagagaggagggcgatggtgcggaggcgtgggtggggtttcggagagttaaggttttcgttttaaggtgtgagaattagagaagaaataggtgagaagatatatgtgggcatgtgggaaatagaaaaaaagtaggtgggcacgtggaaaatgtagcaagaagtaggtgatgatttttcaatggacccttataggcgacggttgaaaactgtcgtctataaaggtccattaaaaattgcattatattaaaaaacgtcgcctattttgtttactacaattttaaaccatcgagaatactaaattttttccaatggttttaaatagttacttaatttttttagcaacggtccccgaaaaaaattatttttaggaccgtcgcgaattctgatatttgtagtagtgaaataagttggctcattgcttggcaagagactcttgtttccctacaagtcgcgtgcttcaattgaaggactattcctctgaagtgcgcactattgttgtgacgaattttttaattaattaatagatcttataattttttttattccaaaaaaaaatatataatagtcatttaatcagtctgtgtacatatagttattattcatttttatatacaaataattatatatttttattaatatttggtacatatatattttcacccaaaaatatataaatgtatccaattatttattaaataaataaattaaagcatttttttttaaattaattctggaactttcctttattatttataaaatatattttccagtattaacttcaataacatattttatctcaagttttcatttataaaagttttcttataatttttttaaaatcaatatagtttttttagagaaaaaaaaaaactttaacaattttttatgtattttttgtgtaatttttttcattaatatttaaatatattatatttatatattattatctttttagaatatgagaatataaatataaatttaaatgcaatatgcaatgccatatgtaataattaagtaggatattttgagttttattattacaaaattgaccatatgtatttatatatatagtgttatttatttatcactactcatgctgattattgtggtccatatatatctaatcaataatcattgttacttaaccatttggttttatctttgttttaattgcaaattctttttctctgataagggccctgtccttgaattctgagggataatgctacaacaactaaattaaactttggagttcatcattacttttaaattttgaataaccaagcttaattttattttattcatttaatatatatatatataaatttatatatacagtagaacctctatccaagaatacatttaggaccaaataaattatattctaattgaggggttataa

SEQ ID NO: 117915 - DNA, 1678 bp, Cannabis sativa
agatggtctggtggaggatcctagccgattgtttgttaacaagaggtaaactcatgtttattctaaatctgactgacatatcttgtcctttgtgttctatgcaagtggaatactcgtttcatatcttctgggagtgtgaatttgctagagctttgtggtttgggagtgactggcacattagaacttctgctattattgcctccaattgggacgaatagctagattggttccacaatgaggccaataggccaccacacattgatttcaacttactgcttagtggagctgcaactatctttgagaaaatttggcttgaaaggaatttcagagtgcatcaaggcaaggtcacaccaccaaatgtcctcatacagcgaatcaacctcaggctcttggaattgggtgaagcttacaaagaacaggccactctacctagcacctggcttcccccaccagcagggtggatcatgtgcaatactgacatcgccataggagatgcgttttctgtcggggcagcagtgtttcgtaatgaagatagcacaattaagaacatatctacaaagtgtatgcattataatgacccccttgcaggtgaagtagtcgccctctgctggggcgcggatatagctatgaagcttggatacaaaaatattattttccaatcagactccaagggtgcagtagaggccattaccactgatcacacaaggatatcaactctcaatcacaacgttcaaactctagtgcaagccttcctgagtcatgccaagagttttgagttgtgggaggccatctggatcccgagaagactcaattgtgcagtcgattttgtggctcgatgggcgattcaatctggacagtttggatcgattgaattggccaattttgacagttccccgcctccttggggggcggatggctgaatcggtttttttagtttttagtctgttctgctatttattttcttagctctttgttttcttagtttagtctgtactttgctgttttctctggccttgggcctctgtttctgctttcgttagtcttgtagtttgttgctccgttggaggtaacatttatcaagaaaaaaaaaaagttgcgtgtgttctaaagtgcaccaatttaaaagtattttaatagaagtgtttagtggtaaaataaaaatgtttagtggtcggcggaattaagaaacttaacaactaaaattacaatacgtggtcaatgcaatggaggcatatctccaaggccaaaacttgcgttggtggcaatgaagtcacacaattggaggacgcgtctgcttggaagaaatgaaagattaaagcgggcaaaatcatgtttacgattcgaaccacagtcgaagatgagatgttggaacacataaagacggtgaagacaccaaaagaagcacgggatactttcacatcagtgttcaccaagaagaatgatacgagattacagcttctggagaatgagcttctctcaatcaagcagcgcaacatgaccatcaaccaatacttcaccaaggtaaaatttctttgtcgcgaaatctcgacattagactctggtgctggcatatcagatgctagaattagaagaattattattcatagaataaggccagaatttagaacttttattgctgcaatacaagccaaccttctcttgttgagttagaaaactt

SEQ ID NO: 117916 - DNA, 763 bp, Cannabis sativa
gagccttggtctgccaatccatgagtctaggtgacttccccaaggatatcagcttgtcaacttgttgggatcctccccccaaatgctcagaatgataatcatcgttcactttagcactttcaaacagttcttcagaagaggttttggtatttttctgtataattaggatattctaatccacccacgggtccaaccttaattgagaagtctctgactaccccccttgtgttgtctgagatggaattttggtttatccctaatggagtaaggtgtgaaatccagcttatgtttatttaatagcatggtgcactcgtcaacttcagaagatggttggaccccaatagcaataaaacaagcttttattttattatttctaagagcccctatgtattttaattccttaacatattcatctttggcctagaaatttttttagagggccttgtcttcatctaagtgatcaaaaatatcctagctcgtaagagagatactaggatcacgacccatatacaaaataggcccgccacccacaataactttagagtttccattggaattaattaataaaataaatgggcccacttaagatatagtgtgggagagttattctcaacccattagggttacttattaggataatcagcttaggcctacttgtaaaaccttccaaatttaaacttactaaaggagctaatgttggaaattattttaccaggatctagatttactaacaagtatgttagattaacaacctaatatgaat

SEQ ID NO: 117917 - DNA, 1777 bp, Cannabis sativa
  modified_base (1739)..(1741): a, c, t, g, unknown or other
taatttagcaaaggttctataaatatataatttagggttttctatattaaagcacttttaggaatatgtttagatctatgatttatatatttcttaagtgttttataaatcctaacattaagtggattaattgtgctaatctcactaaatttcgtagggaagtttatgtggtgttaagatagctagatagttagcttacaattagtgttagtttattagttgtgagttagttaaggtgagttttcaagttagttagacaaaatatgttagtttgttagagtcttggattctaatttagattgtacataagtcaccatttcaataagtaatactctctaaatttattcatctctcttcgtatatttcttcttatatttctctctatctttcgttataaaatgtctatgaaatctaatatgttattagagcaccattgtctttcattgacgataaatgtggttacaagctccaattatccttcaaactccgatgtccatggaatacaacaattttttctgcaatagtacaagagaaataataatggtgatgactcttctctcatttacttcaatcacagcttgtcaatcaagctaaatgattacagtttcctactatggaagcttagtcctagttacaatccgtgagaattaattttcaagctatatccatggtggaaatcctctattaaaattcttccatgataaagattgtgctctcaaccgaatcaaacctgggtgtcaatcaagctaaatgattatagtttcctgaataggagtcaaccacaatcttaaaatttaatttctttctctctcctcaccatctctctttctcgacctcctttgaaaccaagaagctctttgcaaatttcaaagtttttcaatcatttcttaggaaagaatctagaggagcaagttacaattgcaagggatcatcaaggtatactctcatctcctctttcttttacaatttcaagataaaagcttagcttcaataagtgatttcatgatttgggttctgtttggttgtgatgggttagggaattatttcagaggttatttatgattgataacatgtatttatagtgattttttattaatgtgatcagaactgggcaagtttgagttcatgaactcaaacttcgctcaacaagcatcttttgattcttagtgtaatttttttgtttaagcttagaaatatgttacttatgtggtatattgatgttctgaaaaatttggtagcatttgggattgattggaacaagttgtgggggtttgaacgtgtttcttgctgcccaggaaatcaaaattccaagtggtacagtgttgtaccaactagaattttgttggggcaatacttgggaaatgtcaatttttcgtattttggccataaattttcactcgagtgtctgaattagacgttctatatacctttgtgaagcttgaaatgaaatctacatcatggtatatatttagagcgaaaatataagttttattttagggtattttcaccacgtagttcggaagaagatcttagagtctttatgggcatcagtgagtgttctcgagtaaacacttcccaatctttcgtaaatatgacatagggcctccgatcgttagacagtatgtccggtcaagttggccaacacacttgaatcaagaaattagataagaatagtataacacacatacatatgtacatgtttatgtttgcaagttatatgatgtaaagcccgcttagtnnntttggaaattagcagttatttatgttaatcaggaaa

SEQ ID NO: 117918 - DNA, 1007 bp, Cannabis sativa
aaaaaaaaaaagccacaaaagaatatgatttttttcaaactccatagatttagcaatgacaatgatcatccaataatcatatcgaaactgcataaagctctaacactgataaaaaattttaaatttaacttaaatttccatataagaaactaaatatataatcaatggaccccttttgtgtttttgatggttagaaagttgtatttttatttttttatatatataataatatatattatagttatttaagatatttttgtttgaaaagaatagtttttgtttagcttcataacttaaaacctgttttacaatttttaaaaacaaaaattcattttaaagaactaatagggtcgtttggctaaatattttaaaatcactttttagaaaacagatcgcattaaaattattataaaatatcataatttagagaaagaaaataaagaataaatgaaaatataaaagtcaaatattaggaaactaacaaaaatggaatattgattacaattactggtaataaataaaagatttggacatccatataattattaatatttataacactcctccttatatgtccataataactgtctcattaaaaacctcgccgaaaaaacccagtgggacaaaactcagtcaatgaaaaaagagggcagcgtgaaattactccccctctttttggcattcatgaagatcctttaatcgacgcattccaatcttgtgaactgtcttctcaaaaattgatgttggtaatgattttgtgaataagcctacaagattatcacttgatcgaatttgttgaacatcgatatcaccattctcttgaagattgtgtgtaaagaagaattttgggaaaatgtgtttagttctatctcctttaatgtaccctcatttaagttgagcgatgctggcagcattatcttcatagagaattgttggtacttctttattagatgttaatccacatgttcctcgaatatgttgtgtcattgatcttaaccaaacacatt

SEQ ID NO: 117919 - DNA, 1461 bp, Cannabis sativa
attagccgacgtcccagcacagtcaatagtcgtcgttggagcttccgaagcaacaactgccaacggtttcatcacctcactagagaaaacatcatggtatcgagacgccgtcgacatccacgggccatacatggggaaagggatgtcatcgagattggccacagtgaccggggttgacagcgagcatcccctcctttggtggcccaggcgaccacaaaaatagcagaagataccaatcttctcatatttaaattgaagccactttttaactccagaggccaaatcgaaaaaacagcccgaaactagaggatttccaatatcaatgtcgacttggaccctgagaaatagtttccacgccaccggtttatcttcttctaaatcgaccttgcaaactttaccaatagtagcgccaagtagcattcccttagccacagagaagtattcgtggggaagattataaatctacacccataatcttaaacaatccaccaaggttggtccttcaacagtaggaaaccattttcgaagagcaaaggtgtaacctttaatggaccaaggcccctgttccaatgcccaatctctgtccacttcactctcaaaaccaatcttgaaacaattaaacatagatgactcttcaacaagagaaaaaacagtcaccttcttctgccaccgattggtcacaaactccgaaatggcatcagcatcaaccaccatgggagccaccacttttccatacaaacacagagtagagagagccttaagagatgaagtgctaggggaaagagtaacatatgcttcaatacaactgaagcttttgcctttattaaggggacaaagagtattaactacctccataaatgagaccacaaaggacaagagagtaaacacagatgacactccaccaaccccactaaactagatcccactgccccacaaaccaaaaccaggacagaaaggcaaaaggaataaacaccccacccacgagccaaaaaaacacagcagtaatggcacacaaaacacaaacgaaaaaacggctaggaaaaacgaaacaaacgaaacaaaggaaagaccaagcacaggacgaggaaggaaccaaatatcaattcaaaagatagaaataggatgacccaaaagaaagaatgaaaatcaaggagtagaggaaggtataagaccaatctctaggaagagagagtagttgatgaccattctctcaggctcagggtgttctacatgattaacatcaattatttttgtattacatagatatatatattgatatatcgtatgttaatataaattgacacaatataatgtaaccgctcaatcaatcatcgcccatatgcagtgataaatgattattatgttgagatatatattaagggaaatttgaaattctatacataataaaccctaatattattttcctaaacctaaatgttataccataggccatatatgact

SEQ ID NO: 117920 - DNA, 1317 bp, Cannabis sativa
  modified_base (591)..(608): a, c, t, g, unknown or other
ttttttcggtgtcggttttttcggtgttcggacggtcggtttactcggtttggtcggtttcttggattttttgctcacccctactttttggaccttggaactcaaacccttgatgttgtgttgcccagggagcatgatgctcacctacgtgttgggtgtcacctaagcacgccaggcaacttgttcataggttgagtgttttgttgctcgagattagagtgtcgtttgcctttacgcatattatgtttgcattagttaaagagtaaattcagaatcgaacaaactagggttccagaatccacttggatgcatatggtgttcacctaagtgaccaagtgatgcttgtgatgtacacgtgatatctttacttctcgtcttgtgcgttataatgttgtaacaacatatccacttagactgttgaagcaaacacttggaaacaacacatttcgggatccacctgctcaccctagtgcctccttatgctctacttaggtgttgggcatgttcttaaccttcttgggtttcagggtcaggattgtttccttcgtgtcatgtatcaaaaatatttaaataacatcaaaacaacaacannnnnnnnnnnnnnnnnnacaaaaaattaataacaaattaacaagagtacaacataaaaagaccgtattttctgtaaataaaattcaaaaaatcgtaaaaatatttaaaattccgtaaaaccgtatttttgtaatttttttgttatttttgtgtatgtgaaataaaaatacacaaacacaacaaaaaaaaatatataaaaatacacaattaccccatttgcatttgatatatgggctgctcatctttggcctttatgtatatacatgtttcaaaacaattaaaatacaagggtattatatagcttacataaaaagaaaagtagtatttatggaattgattttaaaattttctctatattcaacggctatattgttgttgtgttgtgtagtacaacaacacacaaacgttaaagtttaaattctcaacggctactttcctccatctctttcccctaatctctcttttccactttcatttccatttccagctctctttctctcactctcttcttcttcttctcaattcgatctgcaattaaaatcaaatcttgaatttctatcttagtaatggcgcctacgccttcctcaaaatccaatcaaggcaaccccagccaattcaagaccccaaattcaaagcaccgtcttcaattccacggccccaaacaccaccaccaccacaacccatcacccaatcccaactccgccctccgagaaaaccacaacccac

SEQ ID NO: 117921 - DNA, 1265 bp, Cannabis sativa
aaaaaacctcactttttaatcctatttggagagggttttgttctttttttcaaataatgaaattgcaatcatcaaaattttggttggaaaattggaacttatggtagacaattaaaagtgtaaaaataattttgattggaataacaaagtacaataaccttttctttagctcacttctctacttgaccgactcaacagtgctactttgcttttgttttatggttgaaaattgaaacaccgacaacctcaaaacgtttctaaattaatagaattatagatattatatttcattttatttttacacacttcatttaattattataaactaaagaatccttaaatacagaatctattcatcaaaaagttaaataataatatacattttccttacggaagggttagcagtaaaaccaataattgaaaatagtattaacattaatctaagtttcaagccaactcatgtgcagaggagaataataacttatataacaactgcagaatagatttgtattttgcacggttttaataatttcttaaattatatattaaaaactaaatttaaacctaatactttttaatttcttataataatatatttatataaatataaaatctcttttatatataattaacataaaattaatacaataaaaataaaagtacatctgacataaagttatttataataattaaaaattattaatataaattctttttaaatgagttatatattaataatggtataaatatttttacgaaaataatatcattcttttatttatttatttatagtaaaatttaaatttttaatagtaaaatatatattttttctaataataataaaagttatatatatttatattaattttagtattaataatttaaacattataaatttttcaacatattttttgaatgaaagacaaatattttataaatattatttattaacttgaaattaatgaatcatgatttgttatctttttattgctattattatttataatattaataatatatatgtgtggacaattttttttatatataatctaataagataaattaacataatattatattatttcttttttatataaatgtttttgtctctctctcagccatgtattttcaaacctaattaagatatatatagatactattaagatgtatattgaaaataattgtaaaataaaaaaaaggaaaatttaattttctatacttacatatacctaatattttatttctaaactaatacatatcaccat

SEQ ID NO: 117922 - DNA, 831 bp, Cannabis sativa
  modified_base (27)..(36): a, c, t, g, unknown or other
aaaaaaaaaaaactttttttaaaaaannnnnnnnnnaaaaaaaaaacttttttaaaataagcacccaaatatttaaattagcccttctgtatttaaacattatgctaattatatatttataacgtgttgaatgatgattataacatttttttaatcaatcagtatcaaacactttcttacaaattatcagcacctttttcataattgtgtttaaggaaaaaaaattgcaatttacattattgtaattaattaacaaaataaatattgtgataattctgtacccatttgtaacaatttttatatgtaattaagttcaattacaaaaaataatcattgttacaaattttaaaaaacagataaattttgtaataattatgattatactccgccacatgcttttataattttgtcaaaatttaatattttttgtaccctttttactttcaaaactgtaggctataattttaagcattcgatccctttatagatatttatatattattgcataattacttaacaaaatatccatatttttggattattccaagttgggcagaataatcaaataatattattatgtgatggaaacttaaaataaaaaacaataatgcacgtctataaataaaacagtactgatctcagtttcatttattgtatatatatgataaaaattatatggattcgtataaatgagaacgtcactgcagtttcatgatttacatttatatatatacacacacttagggaaatttgaattaatatgcttaaataattaaaaaattttattattataccaaaaatttacactataaaaaaactatactttttttt

SEQ ID NO: 117923 - DNA, 2730 bp, Cannabis sativa
  modified_base (456)..(456): a, c, t, g, unknown or other
  modified_base (2667)..(2672): a, c, t, g, unknown or other
taattgctgtaaacatattccggttaactttgtaattaattgtccactatgtaattataaatagtgacaaacaagagcaaaaaaaggacgaaaaaactcatatgtgagagttcttaaaaaaaataatcagaaatctgaataagattgacttgtggattatgcagaattttaactgcaaaatcacgtaaaaaaaaaaccctgtgttaaaaaccctgtgttcatataaaccctgtgttcatatctttatttctacagcttttattttttctgtgtgaaatcaatattgtgaggctcaaatttagttaaggaaaatctgcgttaataatttttaatatattataggctaattaggatttttacccctgaactttgacatgtactaaatcatgtcccctgaacttttatggtcattaaaaatgccccatgaactgttgagattgttgaatttaaggactnttatccaattttagtaaaaaaaatctaacatggatgaaaatttagggggcataatttagtacatgtcaaagttcgaggagcatgatttggtagatatcaaagtttagagagcatggtttagtacataaataatcactcaaatagtaaaaatctcaatagtttaggaaaaaaatttaacgacaaaaaaatacaaaaaaacatgatttattacatatcaaaattcgggatataaaaattttaattagcctagtagataataaagtatcgctctcttaacttaggaataaaaatcccctccactcaacttaaatgttaaatcttgaatccgcatccgctacagccaattaatggtgcttgagtacctcaatctaacaagtaaataattgccttgtccgacgacaagtcatccacttaaaatgcatatggttgttgaataatattaattgtgacaaacactctgttgaaaaccagagcaagaaactattcaaatttagatttcagtagtccaaatgatggaaacagatagttgagtagttgatagtaaagcctttatttcattacaattttctatttttgacttttagaaataggaaacgtacgcaactacgcatgcttccttagccagctccaatggctaagaaaaggtgtctagcagggaatggtcattggtcattggtgaggggatacgcactttgaccgttgcttatacattggagcaaattgcagcagctatcaccgtatttgctgtcaaactaccgtgattgattttatttttttttttttttgaaagtaacaattaaaaagataaataaataaagttaaaaaagaatttaatcgtttgtattaaaaaaaaataatataatttttatttttcaattataaatacctattaaattttatttatttttcacactattttttatagctttattacaattcatcaatattacaaattttacactttttttctcatgacaaattcattttacattaatatatgaattctaaaaatattagtgtgaatatataaaattaaagtgagtgatatattgaataagagtattgttattatatatcagtagtgactaacactttttataggtattaccctcccattcctcgtttctggatgttgaattaggtgctaatcctagctacgtgtggcggagtattctagaggcaaaagctgtggctagaatgggtgtgagatggcgtgttggagccggtttgtctataccggttcttaatcaaccatggcttccttgcaaggaacatccgtatgttatctcttctcatgtggactgtaaggtcaataatttattaaaagtgggctctcttgagtgggatgaggaagttcttcacgatttatttgttcaaagggatattaatttgatccgttgcattccgttgtctccgttttcggttgaggattattggtattggatgttggagactcgtggagattattctgttaaaagtgcttatcgcgccttacaagacagcaatggtaggtggaatactcaagacaattcgggcttttgggagatgttttggaacttgaagttgccacctaagatgaagatttttctttggcgtggtcttactaattgtctccctacccttgtgtctctgcggtctaaaagggtgcatgtgagcagattgtgtccgatgtgtaatcgggaggatgagataatttttcatataatggttggttgtgcatttactaagagttgtctggacatggggctgggaggaacgatttgggggtgaagctgttgtgtttggcagctggtttgataatgtttgtaagggtcagcctgtggatcgtattgaggggcttgctatgcttttttggggagtttggggagctcgtaatgacttggtttggagcaataaggtgttgtcgatagagagagtggtgaatgctgcaattacttaccttgattcttggaagaatgctcagctgaaaagtagaggtgtgtcgccaaggtctggtccaattacttctgggtgtgagcaatgggctaaaccttattttggtgaaataaaggttaattgtgatgccagtgtctttggggatgacaatagtcttaggttggggtggattgctcgggatcataatgatttattcattgatgcgttggcggtcaaaacttatggtcaacccgccccgtttttggctgaagctatggcgttgaaggaggcgctcannnnnntgaagggaaggtgggtagaggggggtgtgcctgttggtgtggttatggagttagactt

SEQ ID NO: 117924 - DNA, 2956 bp, Cannabis sativa
tccctcccttctaaaacaaattcaaagccaaaccccataaaaccatcaaataactttggggatgatagtaagaacagcagcaatcccgtggattctaaacaatttgtcactgaatttaacgcacatgaaattgtaaatgacagtggcaggcaaaaggcttcggttatccctcctatacaaaatgagtgggagccacgtaaaaagatgaagaattttgaacttccacttgtgcaagccgatggctctggtggtcttcattttgaggttgaatcattgtccgctgttgcagtggctaatgattcgaatatgtcatatggcctcaacctgaggaattctactaagggtgttgaagagactgaaggccctaaggatcaagtcatcggttcagattctaaaccaccattaatggaaccatcaagaaatgttcctgcagaagatggtttgcttcagaaattaaagtttgacctgcataggttgcctgaggatcagggaatggacgagtttacagatatgcccgtggagggttttggtgctgctttgcttgctggatatggatggtacgaagggagaggcattgggaagaatgccaaggaggatgttaaggtagttgagtatcacaagagaacggacaagcgtggtttggggtttgtgagtgatgatgttcccactcctggtgtgaattctaaacaaaaattaaatagcaaaggaaaagagaatgatagggagaaagagaaagaaaagggccgagaggataggaatagggaaggtggaaatttcgtagagaaatatgtgcggatagttgggggaagtgatgcaggtctgaaaggaaggattgttgaaaaactaagtcgtgatagagtagttgtgaggctatcgaggagtgaaaagttggtggaactgcaagttggtgatgttgcagatctgggttctaaggaagaagaaagatgcttgaagagattaaaggaattaaagattaaagaaagaggcttgaagagagtagaggagtttccaaggagtcaagacaggtcagaaattaaggcaaataagccagtgagggaggaggtaagaagagacagtaaaagcctcaataatgaaagtagaaactctagtagcgttgggcaaatctcgtggcttacaagccatatcagggttaggatcattagcagagacttgaaaggaggaagactgtatttgaagaagggcaaagtggttgatgtggtaagtcctagggtctgtgacatatccatggacgagagcaatgagcttattcgtggtgtctcacaagatcttcttgagactgcacttcctcgacgaggagggccagtacttgttttgtttgggaaacataagggaatctatggcagccttgtggagcgggatttggaacgagaaattggtattgttcgagatgcagatactcatgctttgcataatgtccacctagaacaggttgcagaatatatcggggatccaagttatcttggctattgagtcttctgaagccatttaaactaatattaattattctagcgacctactgtactttccatatttcactcatgtagtgataatttttttactgatagatttggtcagctcttctcttgttatgtaaattttctctttgcgagcttaaaattctttactataatttacaatctcaatcataacccttttttaatctcaaaataaaaaatagcttatagtgtattgtttgtatgaaatttacattttgtttttcaataccgactggaaagtgggtcttgtactatttacatttttgaggaccatgtttggttttttctgagttttgttttgctaataagggtttacttattaaacagaagaaataaaaaggaaaaaataagttaattatttattctggtatacaagtttgcaaaagaaattagaaaacattatctgttgaaactcatatattttgagaatttaaacagattgacagataacctccaaaaacttaactaagaaatcaaaaacaaaagataatgaatgtacctgggaacttccaattacagcaaattaactaactcaacttcactaaggaaacaaattgaaataaaaactagaacttctaaaataaaatttgtagaatcaaagaagaagcaatcaaattcccctacagaaaaatgtcatctaggaattggttttcaatgtcagcttcatttttatttttatttaacaatgagcactccaatgaagatgtaaggctaaaatccatgtgtatgtgtacaagtttcatgaacaaaagaatggtggacaatgtcgacactaattgcattttaataagaatcttgttctctgtcaattctggaaagacccgttgaaaagatataaacatatgatatccagagaaaatagctaacaagatatttacaattatcatctccatctttctaatgtcgattccacaataagatgaaattgttattagacgatcacaccaaattgttaaaagcgcaaacaacaaataaaaaatggtaacaagtgcagtaagtgtagccaacaggccccatgcttagaatgttgtcacttaatccaaggaagtcttcaaagagtgcaatggtgatgtatagtgctaaagttgccaacgtaataaaattctcaactttgaaccttaagagctttatctctccttttctctctctctttctttcttgctcatagtttgttgaaatgatttcatctttttatataggaaaaattacctaattataattgtataccaattataagtattatctttttcctgaaaaaaatatatagtaaggaatctaaatccttttctataattttttttttaggaaaaatccttttttataatttattattatattcccttttcctcctatctatatataaatataaaggaatgcacaagacaatgtgaggtggcattctaagaattcatttctctatgttttcttttttgttattt

SEQ ID NO: 117925 - DNA, 1551 bp, Cannabis sativa
  modified_base (1492)..(1520): a, c, t, g, unknown or other
atttagtgtaattaagtttttatgccatatatatcaaaacttatctttattttcccatatttttgtaaatagccctctgatatattgtttatatttttgggccaaatgggccttcaatgattgttgaccttttctttataaaaatgtcaatttatcttgtattgggtttttagtttctctttttctttatcatttttcgcacaaatattattttctactccaaatgagatcaaattaaaaataataaagataaatattttgaaaaacgaaattaacattatatatataaaaagaaaagaaataaacaaactcacttctttgtgtatggtaaatttaatatttttagctgtgagtattaaagtgtcatctacgacaaatatttgattgtgtatagtatatattttagaaatttacacataaccactttatattataaataactacacatttattttgtcattttaatatactcaaattttaatatttaataactggaataacaaatattcagaatttagctaccttattaatataatcaatatttttaatgtactatagtaactatacaaaagatctaaaagtttttgttggcacaaattttaatcaacgatgcaaaattaagtaatacaataataaaagtttttaaatatgaaattacaataaataaataaacgacactagagatacatagaggttcgatcccaattatatagtgttgacgctgaaaaatagctaatactaactcgctagattgacaagataaataataagtttaagtaaaaaaatttagatagacgcacacaatttataatagttatatcgtgatgataatagaattacgtttactttgtcaaattataagaattatatttctaataagaatgtacacacacaataaatgatatatttatatatatatatatacttctaataatttatacaatttattataatcatactcttttaactacaaattataagaatgtatttatcactatcattatttttttaaaaaaaaaaatatttgaacataatatattttaattaattctctaatcaaactcaaattttgtcaaaatattttctaatataatccttaaatatagagattgtttacccaaattttaacgacgatgacgtgctaagagtagcaacacgtggcacaaaaatacagagactaaattaatggagaatatgcaaagtcatgagcgttgggatgactgtcaaccatgaagggtagtcatgaccgttagagtggaagtcaaacggtcactcttacccctagcttgagtaaggtaggcatccccatgaaagaaaaacgatgggctaacaccttcgtaagcggaatgaacaatcaccagacacctacgggagtcaaaccagtttagggggtatatattactacccctacctcaactgcaatgatctatatgggatttagtctaggagtatacccctacccctaccgcctactgttggaaattattttacnnnnnnnnnnnnnnnnnnnnnnnnnnnnnttattaacatcctaaataagaactttctaaa

SEQ ID NO: 117926 - DNA, 2144 bp, Cannabis sativa
  modified_base (35)..(58): a, c, t, g, unknown or other
  modified_base (2082)..(2087): a, c, t, g, unknown or other
aaagttcataattaggatgttaataaacatacttnnnnnnnnnnnnnnnnnnnnnnnnaaataatttccaacagaaacttcaattagaattttgaggtaggtgagcttgtctcttcctttaatgacttcatccaccataatcgggttccctagctgtccaactattttgaaaagggctttctaaccccagtatttcaactccagatccattaattgaatccaaataggaacggttctgacatcttcttttttaagattaagattcggatcctaggccttcattattactagccttttattaaagaaaatgtaacctctttataggatatcatctctatccttgatactagaatcgaattaagaaaatggcataggaaatcatacctattttatccactttatctttccagatccttcgagcaaaaccttccagaactaagagaggtgggttggcacccaacacgtagtagactattgcagatctccagcaggacatttcctcttctatatcatccatcgttatcctaactttctccaccttcttcgagctagcaaaggaagagtccaagcttctcatcacattctcaaacctaagcatcggtgggttaacattatgaccttttgagatagaactttgacattcctgattagcagttaggaggaagccaaagtctgcagctatctcatcgtattgtttcatcaattgcagcaatgaatcaagagacagaggtggttgaaaattatcgcgaagaagagggtccgatatatctctgtctccttcatcatcagtaaactccaggggttccaccccaaggatttcttccattgattttgtctttttcacctctactattgaattcgatcctttcttcttgattttcttgctcaaaaccttcgatattcccacattcttggcccttgttttcgccatggcaccaattcctagagagctgacaggagcaaagaaggagagagaatctttagtcattattttcattataatgttctaatgataaattaatatttatggaactaattaaatttttagtcattatttataaatgaaaataagctctaatatatttatatattgagttaaagttgattttactttaattgtatgtatcatatcagtaatttattgatgttggacaaaaatatataatgataattaatttaatttgttcaatttaagatgggagaactaaaataaactaaaaaactttatatctatactctacaaatttatttatacatcccaatagaataaatcaactaaaattattttaaaatttacacttaatactttttttaatatatatttcttctttgttaatttttagttatttttctaatcttgttttcatatatttttttaaataataattttattttattttcactctaatatttgtctatattgttttttaatttctttgtattaatattcaaaatatattcttttttacatgtgtgcattttttcacaacgtagaaagaaaaaaaatgaattatatatatatattttatgcaagatatatttatattttggggtgtaaatattatttcacttaaaaatattcattttttttttataaataaatgaacaaattatttaactagtagaataatttaataaatggcacaagtgtaataaagttataatactatgactagatattaagtataaataaatattgtttaaaaaatgacacttgtcattagaatatagagagtgtaaattagggtgtgattagcactcttcttaattatttacaaaaaggtggggtgttacaccaggcaccttagatgttcattttgatcaaatggttttcatgggcttcgtctccatatatgttgaaaaccattcttctcatttcatatttttgccaattttgtcaaaaacttagaccattttcaatgggagatgtaaaaattgtgctatatttagcacaaaaagtaattgtgtggtaaattttagctttgttctctaatgcacaattgcaaaattttgatgtaaaatttaatatctcattaatgttctattaaaaaaaataaaatttaataactttataatcaattnnnnnnttattttaatatgtaagacaataaaaaaaataatatatatataaatatttcataatt

SEQ ID NO: 117927 - DNA, 978 bp, Cannabis sativa
tatgctagcaaaagtgacattttgatattactattattatttttacttatttatgtatatatatatatatgtatatatatatatttgtttataagagaggggtgagtaaagataaaggatatttttttggaagaaatctaaactcaatgattaagaccataagagtagcccaagttgatatgaatatcatggtatgaacttaattgatcaactatattgtattatccatacatgcacacaatgataagacaagcactaaacttttccaacaagaaagaaaaagggcaaacattacacttaaaaaaaaacatttttattatcttaatttggagattaatgatgacccacaattacaaactaaccaaattaatggtccacattgttttgttatatattaataatgataaaaggcacttcttagtctttagtctttgcattgagtgtaaggtgtatgtagtagcccccattgacccaccacataagaaaaaattaataataatcaaacttatattttcatatatatttttttatatgtataaatcaaaaaatttaatggggcaggaggagacatttttcatggattaaagtcagcaaaatactactttgaatccaacaccaatagtctaattaattgaaatctccaccatattggtagactgtagttacacaaattaaacagtcaacaggaaaatgaaaaatagtatgctttaaacagaagtttaaatggtaagaatctaaaatacatatacattcaaatgccataattattgtttgtctttctttgatcattatagacatttttcttttatttgccatagtagtgatatgagactagagtgcttaatttcccaagtggggaaatccaaaaatataggttatgtctaaattaagggtattttctttttggaagaattaaaaggaaaaaatataagaataaatagaataaaataaattttaggctaattaggatttaaacct

SEQ ID NO: 117928 - DNA, 1744 bp, Cannabis sativa
atatgatatataatccaatttaatataatataatacaatacaatatgacctaatacgacgttccaaacaagcccttagacactaattgcttaaggccttacgagttgttagttatttttaatcaattattaaattagcatatatttgatgaattacatcaataacaggcattttgctaatgaacttttggctctctaataatactatagaggcagcagtaaatacgtgcggcccaacctggttcatattttggaaagcttgtgataatataagttgtgtcgtattgtgctaatattttaaagggtaatctcagcatggtctgtaagtccatatttttgtaccgtattcggattcgtgtcgcgcgtgctttatacgtgttagtccgtttttcataaacgagtcagctcgttttctaatatgagatcgaatttgtgcttcacttttcaactattttttatataattatatatatatattttttataatttcaattatttttatctaattatttaataatattttacacataatcataaaaaaaaaaaaactaattagaatgattataatttgaatatcattagtaaatacaaacgtattattattatttttattagaatttttaacgtgttatgtttttggttagtccatttgcacttgcatattgtgtcttcggatcgtaccatatcatgtttaagtttattttttgtgtcatgtcatgccaatttatagtatcgtgtcgtatttgtccaaattcctatttttccgtaccaagttgtgtttgtgtcggtttcgtatcatatattagaggcagttataaaaaaaatttgaatcaatctccttcaaaagaaaaaaaaaacaaaaattgaatcaatctatgtatgtactgccaaaacatttttctttttcttttttacgttgtttattaattaccttctaagtcgttgatcaaaattaatttattattatttcgtcaaacaaagaaagagttattttagtttgtgttattcctaagcaaaatgcttatagacctcgtcataattatattggtgtgtgtattatttagtagtacaataagccaaacaaaattatgactcatgagcttacgttttctattatttcatttcttgatatttaaaaattatatcttgtcaaacaaaaactcacgtttaatcaatgaatagaggtaacaaagtatcaagttaattttgaattaaccatataaataatttaattgaagtttttacctaattttgaatatatattgaccaggtttatatttattggtaaaacaaagaattgtatctaaggtgtctaacactatttgatgtaatatgtaacactatttgatgtaatatgtatgaagggtttaatataagatttagttattagtctgaacaagattccttgtataaatcctttggtttgctatatattggctcatttaatcactctttttctgagtctctctcttcgctttagtgcgtacgaaacgggctcctaaattatacttatttcttcatttctaacttggcgagggaatttctcccaacacccctagcacatgtttcgagggacacatccccgaatttcttatcgttcgtgtcttacatttgtagtacactcacttgttttatatacattattttaaaataaaatataataaagttaaatttattattgaggtctcatgtaaccctataatatagggatatgattttgtctcgttattgtactttcacggatt

SEQ ID NO: 117929 - DNA, 1252 bp, Cannabis sativa
atttacaattgttatacatatgatcctactcaaaaaagtgacagtaaaagtactttattttataattttattaccgtcgtactctgttttggccattaagtgtcaactacgaaacacgtggcgacatattattagattacgtattaaataagctaaagaaatatgtcgctatatgtttctgagctcacactaaacgggcttaattgacacctaacagccaaaaaaatgtatgattacaacaaaatcgtaaaataaggtagttttagtgttactctttttattagggccatatgtgtaataaataaaaatgttaaagaaagtttcaccgcaaatttctcataaataaaactctacaaatgttcataatttttaggaatagatgatgactcgatcaatcccctgctgctaatgccttgataacagtagcattatcacaataaaggatgactccatcaatacccttttccaccattaattcagcagcatatagatagcatgagctttcctaatttaggtgcagtaatgccagtccatcatgttttgaatattcattagtaaatatgtaagaagtgttattattaaattataagatttcttaatgtgtttttttttaatctattcatgtttacgtgttgtacttttaggtatatcgtattgtgtttaaatctattttttaatgttgtgccgtgtcaatttataaaatcgtaccttattgtacctaaactaatatttatatttagttgaatcttgctcgtgccggttttccgacatgtcaaaaaatttcggtctgcatttacagcactgctaaagactccagcaagcaatgtaactttttctaagcttttatagtttcataacaatgacataagagctatgtttaaaaatagtcaacatgaataacatattaataacaatgaattattagcattgttgaaaatcgagattagaatactatgaagttgttatttcatttcaagagaaaagattgaaatatataaaagagagcgcctaatactttttatctatagtatcaaattttacataatttaattttataattattatagaatatagctaatatatcatttcaaaatagtggtaaatactatttatgcttaataatgacactcagaaattgagattttcgaacatgtaagaaaaacaactagaacaaatatcataatatatagagtaaatactattttgaatcctatattttacaaaaattattagactttctattttgttagat

SEQ ID NO: 117930 - DNA, 1228 bp, Cannabis sativa
atcaatttttatacaagtgtattgaggggaaaaaatgaattataaactgaactttctttgaattttgtaatgttgttgaattgtggcaggagagagaccctttacctctgataatacatcatcttcctatagcaataacctttgcatttattggtagtgaaagtagtgtggtaagctgaaaatgtctcttgtagttgagggttatcttgagcttttgttatgtggttggcacatatcgtttcttctaaatttgtatgaatgttggctaggtaatagatccaactcattatgaagaggctgttatgggaggacgaatgacaaccacactaaatgcaaatggtgatatttgttctattcaaaaagctggaggggaaggtgtcttgcaaagtgttatcatgcagtgtttgcgaatcgcctctgtgaaagccggtgatataacccagaagataaagaaggcagtatgtttttttccctgtcccatatgaaattactctttgataattgaaacccaagacttgaatatatacagatcattctgaatctcattagagaaataactgcttgcaaagccttcatccttagtatcgtgataggggaatgaccattcttttttgtttggttgcaatgccttcattataaaactgtgacaggagaaaaacctgttttctccctcatgttgcagtgcagtgtgttttgtatcgtggttcattttggcaaatttggaatgataaaaaactagcattgctacatttataacttgtttaatacatttctattaggtggattcatttgacacacagagagcattaaagaagattaaacgccatcctgcttctactgctatggatattgatgaagttgattctaaattaaagaaaataaagagtgagctagttgataaaaatgataccatcatttccggtcaatctgaaaatgttgaagagggaggaactaaatcattagaacaaggacaaactaagaagggaaatgaagtgaagaaattcatcgggggcccttcatcctggtaggctgctagttttcctttttaaaaagagatttaataatattttagcttttctcaacttcactttgatgtattgctgaggatttcgtaaacagtatacttaaaacatgtttggatgataagccccgagatcttcggatcaagagctcaataaaacagtagccaaacagtagcaaaacagtaggaattgtatattaaatgtat

SEQ ID NO: 117931 - DNA, 1443 bp, Cannabis sativa
ttgattaactattgctctattgcttgtgttcatcgcttgtgttcatcttgctcgttttacgatcttcttaaatccgttgacgaaaaaccgcgtcaacaggtaggttttagtcttttatatgtctaaataaatcttcatatatgtattagttgtaatctagctcaagtttaatacctttcggattagtgttgtcaaatgaaatgtgttttgtagtcctacaaattttgcaaaccaaaattatctttgatttgggaaatacaaattatatataaatatatattaagtttggtttttttctttctgattttggtgggtgcactccaaaactcaagtcttagggatatattctatattttctgaacagagggctggaatggatgtggaatttcattacaactgatgaggaaataagtgcattttccaataattctctgtattggtgcttaagcaattaatataatttgttttcttttgtattatcatgtagaacaagatttattttcttttaagatgtaagtagaatagggatttaattagaataattcaagtacaaaaatgttctttgtaagtaaaaagaattacaattgccatgtagtaaagttactttgcctttacaattgtagaagacactgaatcaaatgcaggataatttgtagtttctcttgttttttatagcttgaaaggttctacatgaattgtatttaaagacataaaacttaaggtctagcaaagtttgctgttgttaactagaaagattaacctgaattctctactttcaactcaaattggtggtgaaactgataagaaactaggagtttgtaaaattgtaataacttctctcttgatgtattataatctgattagcttacctatatcagataattggtttctttgatagaagttaactacctttgtaatttactgatttgataacttctctcaaccattattttgacttaacaaagaaaaaatatttattatatgcagagattaaactgacacaagtaaataagatgggaaggattatgcatttgggtgatcttccatttgaacttttaatacatacttcctctaacaacaccagagatattgctataaaaactgtaccttctgcttctaaggtactaacttttcgtcacattcacaaagtaaattacatagagaaatttaaatttctatgcattttataagggataattggttaggagaaccaataattagagtaattttaaaaataggacacttttacaaaaacccctaaaataccctcctcataatttctaaccctttctctctcatctcaaccaaatctctccatccttgcgctcccgcttcgcacgaaccgaacggcgcaccccacctcccacctccgaccgagaccagtccgacggagacccacagcagcccactccgatcgacacgccgacggagacccaaaacacc

SEQ ID NO: 117932 - DNA, 2656 bp, Cannabis sativa
  modified_base (2036)..(2059): a, c, t, g, unknown or other
ctgaacaacaccatggctagctagcctgctccctgcaggtgtctggctagctaagtgaagacctgacaggataacctatacaattctacatgtagactgctaattgggttgcgaattaggtcctaaaagcccaataaaacaacttaaaaaaatctatgtttaagggcattttggtcttttttaattaactaatttaatatacaaatatcctagggttttagttgtaaattagaatttagacttcctatataaaggtcttatctctaacttagaaaagctaggtcataactaagccaaaaaccctctaagtttgataactctcttcatcactctctctcacatgcccatacaagctatttcaacacttgagtcgctaatcttgatttctacgttgtatccttaaggatgctatatcagatcccccacctatagtaatttggatagtatcaacccttggtattaatgcaactaaaaggggagtaggtcattacccgctatcaaagggggttgaacctctataacattaacaattctgtgtgttcactttctcattctaattgtgtaacacattgaaaacatcaaatttatatgatcccacagtcggtttattaatttttgaggtcagtagtaccctagcaccctatctcgatggttcacccatgaaccgccagattggtcctcataaaactatttttttaatgtcaccaatctcgacggccagcctctcgacgattacacatggaaccactgagattggggtgtcaagatagcctacatttttagtagtgtaactaaaaggagagtaggtcattacccgccaaacaagggggccgaacctctataaatcttcatgttaattttattattttattttacattttacatgtggtggttatcagtaataaataaggctccactgtcagttgaccaaatctaagatcaacaaatataattctagaaaaaagacggactctacatgatttgtgttcttaactcatgactaatgactgctcaagcttgatttttaaatttttgcacgtcaatcgaatcatcatatttgctaatatttagagatatgaatgcatgtttgactattggtaattaatctcaatcattttagaacatatttgataatcatttgaggtgaaattgataaattacacatgattttgagatatgatataggtaatttctttaaatcgatcgagcttttcaaactgttgacggaaagaactcatcaactaaatgacaaggacttaaaatggtgtctaaagatcttgatagaaaaatacttgaaataaaaatatcacaacctttgatctctagaaatcttattgatttttccataaaaaagtccctttaaaatgagttcaaagaccctatttatagtgagcccttggcgttttacaacttcaccagatctcaaaaccatagaatgttaatttattttcacacctaataacattgtttcctaggtggtctgatgtagctgacatcttaagttacactaaaaatgcccccttcattttgtacatcggatgaaatgaactttgtccgtattatccatactcattgtgctatcgttatctcgtctaatacttccttacttatattgtttgtgttaggaggggaaagaaggtcgacgggagcgtaggaggctggacgcgaggagttggtgtgagtgcgagcaggcacacaggcgcaaatggtgcagtgggcgacacgtgggcgcagcgggcgtagacagcatgcaggcatagtaggcgcacgggtgcgcacagcgtgaggagcacgggtggagcacgcggggtgcacaggcgtgggcagaaagcgtgggcgcgcgtagtgcacaaatacacggggtgcgggggcgctcggggcataggcaaagcgcgcatgcgcgatggatgcgcgagcgcagtaggcacggtaggcatagaggcgcgggcacgacagatacgcgagtgtagcgggcgtaggggtgcagatgcaggtaggagcggggaggggcgtgttagaatatattttaccaggannnnnnnnnnnnnnnnnnnnnnnntttaacatcctaaatatgaatcgctaaaacgataaaaattaaacatatataaagtatgagaaaccttacattgattgtagcagaattaaatgactcattccgctcagatctctaaccgttgttcctttctgtcgtagagtataatcaagatctgagtccgacactcctttagttatttagattattcacagtcttatacactatgattgaggactaacttgctatgggtgggcatgcactcaattactaaggctctaattttaatggtgaagaacactatagaattttaaaatagtagagagaaaagaagaagaagaagtctcaaaacactagttgtctgacaaaatgaaaactaggtttagaagcattagttggataatgagactaatcttttctttttataataattcacttagggttaggattgaattatttggaataaaaaatgataaaataatagcaaaaataggagcatagtggccgacgacatattggggccaagactagttatatttttgtcatttttcttaaccatttatctattatatcacaaatgtcatattttgtaattctaatcctataaatgctgaaactatt

SEQ ID NO: 117933 - DNA, 1230 bp, Cannabis sativa
taggccttacatgtaaaggatcttctataaacaatatacatgatagtaaatctaaatcttggtaaaataagttccaacattattttctttaagtgagagaagaaaactatgatagtcaaaatagttttgattattatatttgtttaattaatactaaaatgataatgaatttttaaattttgaattatgaattttaaaattatggttatcattttttttttttttaaaaatgatactttatttgaattttcaattatcagttaattaaaataaaaatttaagaaaacaaatcccctatatagggatatgctacacgcatagggtcttggactatcctatgcatgtacccttctgataatggacaataaatgatttctttatattatttaattacttaataaaaaaacagtatttttaagtagaatgcaagactttatctttattattattactattattttattattataataataattaaatttatatgtaatttttttttcaaaatttaagggacaagcatgttgataaacaattgataaataactttaaatttgagaaattgaaaattagacaaaactattaacaattaatcaacaaaccattgataatttatgagaaaaaaacagttttagaaaattattgacatactatcgatatacaatcgaaaattcatgctaaatcataattttggtaaattatcgatattctatctacaaactattgacattgaccttgacttgcttatcattgacaatatatcgagatactatcaataaaccattgataaatcgtaaaaaattcaacaatcgtgaaaaatcagatctcgaccttttagaccaaaatataacaaaataacaccagtacaattaaacatcacacacatataatggaaacaaactacatactattcccaatgtttaaaatatggttaccaaaaatcttacccattattggggtgaatgattcttgagattgaatggtcaccaccgagagatagagagatagagagttgaaagattatgagagagtgagcttaaagatatgagtgagatagagagggagagccaaaatagggagagagttaacaagattacctattttttcgcctcctgtttctcctagctggtgtctgattagttgagtttgttaggtagtttcgtctgttaagggtagtttagtccttacaggctgttttgtcgattattccctttactctgttttagctct

SEQ ID NO: 117934 - DNA, 1090 bp, Cannabis sativa
gagtaaatgatgaagaggaatggcataacaaattaatttattaatttctttttttagaaaaataaaaatagaagagctgaagaagggtttgaatgaaagatacaagtagaaatcgagagaaatgattttgttgtagataagtacttaatagtccaacactactaacaatttattaaatagtaaaataaatagtccaccaccttaatttctaaaattccttcccataacaatcctctgagtctttgtcggtaggtgaattcaaatgagaccccaccaaacctccactcactctttttccaccgttagatacacccccacactgctacgtgtcaactgattagacatgctgactgttcctcatcattgccacgtgtaaaacaagaaaagagcatacataccaaattgggtggcagtagtagtcccatacgtctttcacgtgtaccccaacatactccactacctctatctcagattgggccctcatgggcccatgggcctactctttttagcaaaactcaaaacgtggtcgattttgtgggcccgttaggggaactggactcgactgtttcgtacataggaacatgggttattaaggtccacaattaagattggtcaacccatttgataagatctctcagctataacaaaaagtcatgattgccactaattaagcataatttggtggagcgcaatgtaaaataaaatcctgctctatcagattttttttttttttttttgaaggtgtctttatgaagctttactgatacattgaataattaattatatgatttagaattagaaatgcacaattaacacacctaaaaaacattaggatttgattaggcccatttaagagcatttggtatgaaatcatatcttttgagaaatagtgtaatctatgctttgtaattgtttatatatattactcgcacactcttaaaaatttgattagccgagacaagagagaaaaaaaaaaaaaaaattaatcaattaattaaactaattgcaaataaaacatcattaagtatattttaaatagacaattaaatacgattttggatcatatgttttgtaaaagttactaattaga

SEQ ID NO: 117935 - DNA, 1882 bp, Cannabis sativa
  modified_base (1837)..(1838): a, c, t, g, unknown or other
gtcctataaataaatataacattcataatcgtgaaaataaattagactaaaagattcttctgaatacccaaataaataaaaatctatcgaaactttcttttttcttttaaatttaagaagtgtaatatagacatactctacaaataataataaagcaataatagactaaatagcaaaaagatgataaagagagaatcctaaaaccgctgacttatgttatatcaagaaatagagtgattagctttattattgcactatcttttgctttttgttttaaactttaatggaattgtagctctctctatttatttatttattttagttttcactattaagttatcaactcaaaagttagactgaaaaattaaaaattaaaaataataaattttatattttgtgatatgttataaatataaactcaatacatataattaataatattttcttcaaataatttcaaattgcattttagaaaaggctatacggttaattatttgtgcaacaaaatatagatttttttttttcttttattagaatattatctttttgtggaaattaaaatttcaaaatgtaattataatagccttttggaagtgcttgcatggattatttttttcagaaaaaaaaaggcttggggtataatgatgagctaataatatgagaatccaattattatattttgttttttttaagaacaaaagaaaaaaaaaaaccttcagaaatattctgaaagatctcctccaagaatatatactgtatatactaagatatatttgatcttattctctgtactttatttatttatttattttttctgttttgatgatactgatatatatcaactcttgactaagtaacattaataagtaattaaaataataaattatacaaattaactttacataatgaagataaagatgataattagatagtgtgattagtgtccctacatgatgagcaatattcatatttattcaacctttataacaggccaaattaatcaattactacctttctacttaaataaatttgtcaaaaaaaaagcttttttatttaattatagttaacatctcatgatcatataccataatcaactaattagtcaaatagctttaatttttaattattttgtacaatatttttgttttgataagacaaaataatttttaagacacactcgacgttattttatttgaatttttaaaataaataaaataatttatttttatataataattcaaggggtcttttaattttttttttcttttaagattcaaaaaatttattggcaagaaaatttgcttagaaacttattttaattttcttttatttttaaataaaataaaatcctatatattcaaggtagagacgagcctgcattttataaaataagattatgaagaaaaaattcaccaagagtactcaaataaaaatgtcataaaatattatatacccattaccaatattaaagaggagcatatataaatgtatgaaaatgaatacatgtgtaaataagtttaattatcaattttcatttttaacattacgtgaacaaaaatcgatatgaattattattatttgtgatcatgtttcatcattgcatgcatcattgaaatttgcatctgaggagattttattgagtttttccatattgtgaactctgatcaaacagtgattcattgcttaatcatcctccacaatcaccacatatacaaacccaattgccaaatttaatttagccacaaatccatataatcatgcacaacattctaggcaaatatatatagagagaaatattaaaagatattaatataggaataggaatgggaataggaanngaatggaataaaatttaaaatggataaaaaaattgataaaaaaa

SEQ ID NO: 117936 - DNA, 2039 bp, Cannabis sativa
  modified_base (2002)..(2014): a, c, t, g, unknown or other
ctgctcagactgtgcttcccgagcagatgctccaagtagactccacgtgtcaccattcatgtgatgccacgtcagagtgcaaaaattgggataacaccaatattgcatttttattcctacccaccacacaaggcaagcccaagtaaaggctagtttcattagcttcgttaatatttttgatacactcattgtaatcaaggatattttaggtactaaaatttaaaaagaacatttaccttaaaaaatttaaaaagggacattgactatagttagtattaaatttaaggtcatttattgcaatttttctaaaattttcctataatttgtaaaatttgtactttatttatttatttattttttggattgatcgtgccaaaaaaaaaaaagcaccaagaaaatacaaaacagagttcaagtaaaagcaaataactaaataactaaaagactaacgataagcctaagaaagtaactactacaaagatagacataaccaaagagagcaaatcagccatctatcgtcacacttggcagggacctgtcaaaattgggcattacaattttaccaaagtggtttgatcagattgcccattgcgccacatcatgggccacaccattgagttttcgtggtatccaattgacctcccataggtccagatttccattcaatgtttggaacttggtaactaaatccttaatgttatggttcagctcaggcttgttgttactattacaattcacaacagccacaacccctgcagaatcgctttgaaaaatcaccagtttgagcccaagttgaaccgcagcttccgcaccataatagagagaagcaatttctttagcaagaggatcacgatagaggagtttagtagtgaatacaattgttagagcgcccttctcatttcgaaagattgaagcacttgctgaaagccgattgccaatagctacatctgtgttaaacatgctccaattggtagggggagggagccattcaatctggagtggagtgtgcattctatttttcatcaagttcagccaatctgcaattgaggtggtgcataataacattaatcggagttgggtggttattgtggattatggaattcctcactttccatattttctccataattatagctgatccttcaagaagagggttgaagttgagactcaaaggcctttttttccttctatttgaaccagtttatccattgaacccaatctgtggcatgactctcaattgtcctgatgtgccaattgcatcaaaccagatggctctggcaaattggcaatccgaaaagaggtggaaagaatcttccactaccattgtgcaaaaaggacagtaaggatccgataagccacagacattgaggattttgcttctagtgaggaggcaatctgataggaccctccaccacatcattttcgacctgttatgcattttggcaccccaaactagtcgccatttctcattttcattagaattaggctcaaggttcttgatggttatgtaggcggatttgatgctgaattgaccattaccttcaggcagccaaagccacgagtcatccacgcgggagtttggcaatgttatgttgagtattcgtttggcgtcatcatgctgaaaccattgacaaacaagttcttccttccaactattatctcgaataaagttgtttaccatactaatccctccagttgcatccctccgaggtttcggttggaggtctcctcccgggacccaagggtggaaccaaatagacgtaactttcgcgttcccaatctttctgcaaattcctttgtgaataaattgtcttgcgttgaggattacttttcacattattgaatctgtaggctgagctttcatgtcaaggaaattattgtacttaaaaatttagttacacaattgtacttgaaattgtgcttctaacgaaaatttataggtccgccactaactccatgtttcctattatctcaaactgaagggtaaatactattttggacnnnnnnnnnnnnnaaagttaccaattggaccctgtgtt

SEQ ID NO: 117937 - DNA, 2506 bp, Cannabis sativa
cgtatctttgtaaattagcaatttctcccttaaattttgacaactatcaaattgtaccccctcaaaataaaaatgagaatgattcaatttttttgaagatattaaaagattaatttagatcttaaaataaattattttgaatgattaaaaaaaattcaaaaagaaaataaatcttaaaataaattaagcgatttaaaatttttatttatttttattaaaaagatatatttagatataaaaatgtatattaaaattttaatttttgtaagaactaaattttacgagaacaagtttgagtttttactccaaaaatatagatttgtttaagtaaacataatattttttttagtttagttttttttaaaaaaatatatttttattgaatttgtaattattttcctttattttgtatgagtacgtaaatataaataagcttaattgtttatttacaaaattttagtttgtttaaattatttattagattttcaataattttagtttgatttctaaagatatttgtttataaataatatagtttgacttttttttttttttttttttttgaataatttaggtttttttaagtaaacgtaatttttttttattaatttaatacttttagcaggtttttaataatttttttttttcaaaattaatagaaaattataatttttaatttttttcaataaaaatggacaaaattttgtattgagcatatctaagggtaaaaatattaacttttaaccataaaagaaacggaacttaacaaaagtagtatgattatataactgttatattttaagaaattttttaacaaactgtatattttaaagggcagaattaagtagtgttgaaagtctagaggctaaaaatactaattattcaataaaaaatgtaaataaataactaaaattattttgtagtttttatcaaattaataaaaatctttagtcattgttccttaaatagaaacccaaaaaatccaaaaatcataaataaatacataatccttttccttgaagacttattatatatttattattattatttttagaagtaattatcaatatccgtgatcttgagaaaataaaaggaaccaataagattttcttcaataaagaagagtaatgtaatctcaaccacaaagtcaattgggtatccgacagtgtgggccagcccaaatacgttgaaagcccactattagataaggcaaagataaggcgcgagctgttcagaaccgtcagatggatactctcctcgatccaacgtttataaactcgccacgtatggataattcccatacagctcgatttcaaaaatcttaaataataaaaatcaaaacccatttatgtctctttaatttaccagaagaaaaaaaattctcactctcagcacactccttctgctaatatacgcaccggcgcacgttagccgaatatggccaccacgacatcagccgcagccacgtcctcattcatcggaacacgtttacccgacgtgcactcaaactcgggtcgggtccaggcccgtttcggattcggagccaagaaaagcccacctaagaaatcgataaggcccagtaacgatcgcccactttggttccccggagctaaggcacctgaatatctagacggaaccctagtgggtgactatggattcgacccatttgggctgggaaagccagcggagtaccttcagttcgatctggactcgctggatcagaatctggcgaagaacgaagccgggcagatcatcggaacaaggactgaggtggcggacgtgaaatctacgccgttccagccgtacagtgaggtgtttgggcttcagaggtttagggagtgtgagcttattcatggacgttgggccatgcttgctactctcggtgctctcactgttgagtggctcaccggagttacctggcaagatgccggaaaggtatgtccgtacgtaaattatttttatagtaaagtaatgttagtgttttttctttcttttttaaatgataacttaattatactaattactatataattatttatattttgtaaaatttatacccatcaaattcaaactcaagtgtgagtttcaagtatgtagatttgatcactaaccttcacaagtttaattaattataattagtttaaatcattgtttctttttaaaaaaattaaaagatatgggaggaaatttattatttatatattttatggaatatgtatttttttaatttgaagcaaagttgattatattattattttcagttaatattctaatctatgtcaatttgtttataaaatatagacattaattgagtaacaaagtggcatgcataacaattaagtctaaaccttaataacaatccaagaccaaaccaatatgaacattattacactaatttttacgttattatatgaaatattaattttagggataattacctaggcactatttttttttttgttaaaaaattttatttttatttttaatattttttttttttattttt

SEQ ID NO: 117938 - DNA, 1924 bp, Cannabis sativa
ttttaactttgacatttataaataaatatatataacctaaaataaaactaaatatacgtgcattgcacgtaaactttcttctagtatatatataaatatagatattcattttattgaaataatgccttgtattggccgctgaatgttattgttcagagattattatatataataatataataatatcagtgtacacaacaaaataaatatatattattatagtgtaacaattaataatatgtagagacatattatgacttaatattaattatatgatatgagacatattgtaataatattgaatcttcttcctcggaccatacacctctgtttctcgagccgtgtataaaactacaagtagctccaattaaaacttctaggtttgaaaacgcatggcttatggaagcaatgtgttatcaaatagtgaaagattgctaaaatgagattggcgacggggaaatttttaataaaattaaattgtgtgctgaaaagcttgaagagtgggggcgacattacattggtaactttaagggacggattaaatattgcaaggttgaattgaaagagttacagggcaaaaaagatgcagtatcagttcagaaatatggggaatttaaggaaaaattgtttgccattcttgatcggagagaaatattttggaagcgaagagccaaacaattttgactaaaagagggagaccaaaacagcaagtactttcacctagctgctagcaatagtaaaagaaacaatcagatccacaggttaaaagatgacaatggtgcttgggtggactggaattcggggatctccaaggttgtggtcgactatttttcaacacttttttttgcatctaatgttagttgtgatgaggtaattgactgtgttccaaaagtggtgatagagcatatgaacttggggttacaataaccgattagtgaagaggaagttaaaaaaagctgtgtttcaaatgcttccagataaaagccccgacctggatggtatgacactagctttctaccaaaaatgttggtccattataaagaatgatgcgatcaaggtggtacaacagttctttcaaacaggggtctttgcagaggattggagtgtatcaaatattgtgcttattcccaaaaagaaaagccctgagcatatgaccgaccttagacttattgctttgagcaatgttttgcacaagatcatcaccaaagtaatcactaaccgtatgaagccaataatggatcttattgtctccgagttgcaaagtgcatttattccagggaggctaatcactgataacatcatggttttctttgaagtcttgcattacctaaaaaggaaaagacaaggaaaagtgggattcatggcaatgaagcttgatatgagcaaagcttatgactgcatcaaattgatttttttagaatcaatgctttgtcgtttaggctttgatcaatggtggattcatttactgttacaatgtgttacttcgacaaggtatatggtgacccataatggtcgtgcaatggggtcgattattccaactagaggcattcgccagggggacccattgtcaccatatccatttattatctgtgcaaaaggcttgcctgctttactgaaaaaatatgaacatagagggtggctacatgggtataaagttgtgaatggagcaccaagggtctctcatttgttgttcgcagacgatagctacttgtatagtaaagctacggaggatgaaaccttgtgtgtgcaggaactacttggaaaatttgaagaggtctcaggacaaaaggtaaatcatgcaaaatcatctatcttctacagttccaataccactactgttgttcaagatcgggttagtactttgttgggtatgcgggaagctgaggagggaagcttattgtaacgtccccgcttcaagcctcca

SEQ ID NO: 117939 - DNA, 3281 bp, Cannabis sativa
agaatatttagtgcacaaaacccaacaggctgaccatccatggtgcagtcccaaaggtggtttgccatagggccagccaagggtggctggccagctcctatgagggagctagtctatcacatgatgcccatttgagtgttggagtctacatttctttaagtgctgacttgaccttcttattggtgagatctgctgccacgtggcaccaattttgtgtatgtaatcatgccacatcaggaggatagaaattgggataatatttgcctccaagtccctatgtggacgcctgtatgcatatgaactttaccaactgtgttgttgtggtcaggactgttgtagccttttctgaataaaagtttattcacttttagccttttgaagcactttgtcttgatggtctgatctcattacagtagaaaaataactactttagttgcctttatgatgtgtaggtgaagtaagtgaagaatgggccccacatgcattaaataagtgctttttagagggaaaaccttttttcacttctcactttttacttttcactttctctcactaaaaatttgctttagaaaaagctcttccttctctctaaagggtcgaacccataagcttcatcttcccaagattttacaccatttctacaatctgagcttcccaccttcttcctcaacgacatcttgtagtgggtaagctttctattcccgcattctccacttgatttggttgatttttccatggattcatgaacactatttttttcttcgaacatgtcttgattctaacgttagattgatttccttttggtattttgatctgcatgatagcctttggccggctactacactgggtcttggggtctggccagccactaaagcttagaaccctggtcagccaaggctaaggctccaagtgggtagcttgtttttctccctcttttgacctccactagggtcttctgatggcctttgaggcatataaaactctagccttatgcttggtttctcttggaaaatatgtataaggcaaggtagtgagtccattacagtcaattatataacttaccacttactatatgtcttaatatgtttatacctttattaggtttctcacctccccttgttccttccatgcaggtagcattgaatactgaataagggaggtgatagcagcataggtcgatgtttattttgtaactatggtcagcacaaaacagacaggtggtggagtgactctctgtgacccctatgcaattatgttggctatatggggtcaaattgatatggtagaaggggataccatgcctcatcttaacatcagtcccaagactgactaaggagataagtgtcaaaatgttgagtttgatcttgaggaggtcgtactagttaagaggaagagacatagaccttgtgtcgtcctctccaactgccctttgggtcattatgatactgatggtaatccactaaacaggcttgatgagattttagcactcgatttggatcatgtctcaaatcagtcttctgagcctgagattctagatgcgagctcacaaggaaacaggtggacttcacccgtatcttctatctcgatagatagttttgaaagaatacaggctaatgggaagtgggtggtattcattgtaaaatacctttgcaagatcaactagtgcatatattggccctcaactagatggcgtggtcaaagtacaacattaagcaaggagttgtgctacattttcatccgtacttctgagatgttgctgcacatttcacgatgtgtccgacccaaatcaccatgaaaggtatcaactaccttgcggcgatgtttatttcgtataaggagctaggttggcctcaaccaccccttatgagattggatatttttttatttggagtctgtttcgtggcaacatcagtctggatacttctgctttgacgaagtttgccattagtggctggatgatactaatagtttatcttggtgaatatactgataaatacttcattgcttgggatgtcaaagaggtttgtcatcgatgcttctagagtgaaatttttcaagcattctgtccccactttacaaataagggatatggaaaaccacatcctgtctcttttggtacagtaaagaaatgtaatccagttgaccaatgtggctaatttctagaagtatgacttgtattctcctatccctagagttacaagaccaccggcttagatggggcctgccctggagataggtaagctcttgactttgatgatgaggtacctttatctagcattgcacagaatctagagaggaaatagaaggctctctgccgcgcctggctagcagtggcccaattgatgatgcttctctccatatcaggcccaaagaccaagcttctaaagacctactcgcctcgtgcttgcatctaggggcaagggaaaggctatttgtaaagaccgcttagattaaatttggaaattagcagttaattaagatttacttatgaaaattatttatagatatttaaataataatttatgttgttatatttgaattcagaatgcatttttatgtcatacagtgaaatttcataattttggaattttcagtgcccgacaacatggaacgcggtgtatggctcagtagaaccacaatttagtattttagtatattggggcagtttatgtagacattggaaatgtcgggattagtcggtaatctagagcttttttgaaaatacccttttagtgtcttttaatccttttggtgtgggaggggcaaaatagtcatttttccccataagcttttgtcctttagtggaattagagttatgaattaattgatttatttgattagtcttggctgaaataaaggattgagttatgcaagttttatcttttattcaaaaaaaaattagaaaaaattggaaaagagaccaaagttggcattttctctcaagagctctctctctctttcggttttgattggggctgctagggctcggatttttgccctgtaattcttgttatttcggctagttggtagtgatcttaagataaggtatggttcttgaaactttccttgttgtgttcttcaattttaagaaagaaattatttgcatgcttgatgattttgatagtaatagctgctgttagttgttgttgttgttttctatagctttaaaatttttaattgagtgaaataggataggttttgatgcatggtagttgcttttgttcaagtttgggattttgactcaaaatcttgattttaatggtgaaatgttgaactagctt

SEQ ID NO: 117940 - DNA, 1026 bp, Cannabis sativa
gactgtgtctgtttgcttgtttctgtttttactttgctgatgtggatatctgtaagtatacaggactggttataagtggaatttattcaacagtgtaaaattcaggggtatcttaagcttaccattacgtccgcccctgcctatgtgttcctactatttataaagattagataacagttatttgatctgatctatgtaacggtttatgaattaacatagacattcttcatgtttcatttatctacaaataggtagaaatagttgataaccaatatttaaaatgaacaactattattatatgatataaatcttatcgcattatcacagtgtagcttcaacttaactttttttctcctcaaagaatacattgaataattgatgtataatgaatgtgtatcgcctcacgaatcacttagatggattaaacctttcttgctgatctcgaaaagagtaaaatgtggatgcaggatttcactcctcataagctttttcaaattgtatctcttgtacaaactaagtcgaatgcattcaatctcgcgataagcttggctttcttctcctcgtcaatagcatatctacttggaaaattcctgacgacctattatttggttctgaattacctgaggcattatgtacatattttcttatattcattttgctggctgttgtatcatcaggactgataattcattcttttcttaaggcgtatatattgaatgttgggcatttcaatatgtgagccaacttatcttgtagagtttcatacatgtgtcatatgttgaactcccatattaattgcttaaaatgtaggtatatataataattaccccctaaaaagtaatttctaaatttgaaaggactttttaatcataactttaaggagtaaactaataattttttgtgtgtattgaacacatttctcattttggcagttttgtgttaccgagtaaatgtcatataggtatttaaatgccaccccctcaactagagatggaaatttataccgcggggatgggtaaccgcggg

SEQ ID NO: 117941 - DNA, 1430 bp, Cannabis sativa
gtgttctatgttatatacaaatagatcttgggttaattgttaatttatttaacattcctgccattgatagtgattcgagtttacccgagaggtttactaaggaactaggcaacactccaccaaagttacaatttgaaaggttaagcttttcaaggctactacaattggctagatcagtgagaaatttgaggtcatcattgattccactagttccaagatcattatcagctagccatagcaaccgaagtttgtcctgatttctaaaaatatttggaacccctccaaagaatttgttgttgctaatatcaaatatcaagagttttgaagtattagagaatgaacttggaattgaaccactaaactgattttcccacacattaaagtattggagatttggtaaagtaagacctatgttatgaggaaagcttccttgaaatttattcttacaaagagataacaaactaagatgtgaaagattatagatagactttggaattgtacctgaaagcatattatctccaatactaaggatagttaagctcttcaattggcctagtgattcaggaatttctccctctaacttattgatcctcaaggaaatttcaagaagagttgaaatattcccaatatgtgggggaatgattccttctaaattgctgttcctgatgcgaagttgttccaacttagttaaaaatcctagttggaaaggaatcttactcatgaaattgttgtaactcaagtctagagttctcaagtttgaacagtttgataaggtggttggtatttgacctcttagtgagttgtttgccaatgttataaccctcaaccgaaacaagtgaccaattttttcaggtacttgtccttggaaactgttgtttgaaagatcaagaacttgaagaaaactaaggttggcaatagaggaaggtacgtagcctaccaaactcgatgaactcaagttcaattgtgtcactcgttggcgtttgcatgaaactccatgccacatgcaaaagtgtagagactcattccaagagcttgttactccaaaaggatcactcactagctgattcttaatggcttgtaaagcgagcttgtctacctcgttttggcaaagaacaaagctgtagatgagagaataataaaagcaatagatggatttggatgcagctttcattttggattgaacataaggtttattggaatagcagctttgtctagtaatttggtttagttaaaagaagctgtgtatatatgaacatctaaactttagccttttcaacatccatagcataaatttcaacacaccctgtcctactcttagtctatctaaaatgaaccatttttcatccttgaaaattgtgaactttatcattcgttgtaaataattaaataaaaatttatatattttatgaggggttttttttttttttttt

SEQ ID NO: 117942 - DNA, 1371 bp, Cannabis sativa
tctggaggatgagcaatgacatggtacacaataattatcctccggatgtgctgaaatatattgaccatatttgtacttcttttacagagttatatgcttctctcttgcctagtcctatgccgatcttgaaggagacttgaactcctcctcctcaggattggataaaactgaattgtgatgttagagtatgcttagagagtatgtgcatagctgttgtagcaaggaatcatctagacagggtggttcagattcacatgactcggttagatttctcagatgctttatgtggagaagctgcgacttactgcttggctgtttcgttggctatgaatttaaggtataagtatgttattgtggagagtgactcgaggatcgctatcaatgcgctcaatggaaaggtgctctgttggggtcttgagaactatgtctctttttgtatgaagtcagctccttattttattagttgtaatttttttgatattagcagaacttgtaacaatgttgcccataatatggttaaagtaggcttttacccaccaattgtactgctctattccgatctcctctttaccggagaatctattttataatgtccgcgagtccaacggtttatttgataaatatttgaatacacttattttcaaaatatatatatatatatataaaatttgttacattcattaattaataatataaaataaataacccatctaacatagaataaaagcccagtttcacacaaacaaatgttgttcttgctcttatttagaaaataatcaaagtctttagcaattagactcattatttagatccttttataagttataaataagtttgatataccatatttttttatttatccaccacaaaaaattaactccaattattttttttccatccattccataattaaaagaagacgataaaatatattgcaaccaccgtatgattcaaatcttatataataaaaatttaattaatataatataaatacatagtttactcattattttttagaaaagtaataaaaaaaactgattgaaaaaaaaaaaaaacgaatgaagagaaagagaccttctttttggtttactgagccactttctcatgctttggattcaatattattgattgtcgaaacctatcaaaacaattataacagatgcacatctaggtttagggttatatatttatgtaaatggtgtaattttttatggagtgaaagtggaaaaagcgtttgaaaggctttgtctcctaaataaaattctatatcaatataattttttctattcaattatcaataaagaaacaaatttaattttattacttgtttaatgtgttatttagtttatgtgatcatttatttacttattt

SEQ ID NO: 117943 - DNA, 715 bp, Cannabis sativa
tttcaaagtacactaaccagaccgagctctagttgaaccactgtaattcttccgtgtcttttatatattttctgtttatattttgatgatcattgttttactttgattactccccactcaaggtgaatacttgcagttctgtttgtgggtattcttatcgactcgaatactcgtattttttgtgttgtataagtttctccaagaacattttgcgctacaagaaggagatttctagtaacattttttgtgattttggagaatcaaaattttgagcttcaatattagcataaacgaaactgtcgtcaatgaaggggctaccaacaccacgcctactaacgtcaaaacgaagagtttgaacccgacattcgataacaattttggaggagttggttgttgggatttatgccataaaatcaagtatttaatggataatatattataaaatatataaaatgcaattataagataaaataaatacactaatcatagaaatataattaataaatatttaaaaattccttattcatatgaagatggtataatcttgtaaattcatacaagacaataaaaaatatacaatatgaataaaacaagtcgatagcgtattaaagtaagagatctttaatatagaattaccaagtgtagtttaccatacactatactctagtgtattttgtattcggattacatatgtggatagatatgtagtaaatgt

SEQ ID NO: 117944 - DNA, 1433 bp, Cannabis sativa
  modified_base (663)..(671): a, c, t, g, unknown or other
attctttttctctgttttgtaatagataggtaatcttgatcaagcgatattaatcatgatcacaattttgagtataaacaaaataaagttacttccaatcatataacatagttagatataattaaggataataaatgagactaactgataaagtttttcactaacagtatataatatgtctaaatcggagttagaaataaaaattatagctagaataaattttacaaaaatttgaatgaacgaaaagaatcagaatcgcagcgctaccacctatgagggctccaacgcacccaaaagaacatggagcatatttttagctcaaatctatacgagccgcgacaccctagaacagggtcacaacactaaatttgaaaaaaagccataaatatcttgtttaagtacccaaaaatgcatcaaaataaccgaactttatattacatgtagtttctatgcctgaacagaaacagaatgcaaattactcacattaacatcacacaacaaatcatgcttaatccacaacaattattcaattattcaagcataaatctcaaaatcttaaaaccaagccaaaaaaaagtatgcttaaacatcaatattcatacttttttttttaaataaaaaaaaacatgaatattcatactcttttttaataataataataannnnnnnnntaataataataataataaatcaatattcatacttagaacattaattaagaactatatgataatatcacaccccaatatatattgacctcattactaaaactcaagtcaaattcacatgttattaacttcctaaacaaatcattattaacacaaattattactcaattcatgtaataagcattacaaaatacaaacaaatcctaatatatactagaatatttgtggcaaaaccatataaattatacaatttatgacacttaatctcataaaaaaatatataaaatgtacttttattataaatgtaaagataaaaaaaaatagtatgagaagagagagagaattaaaaaaaataaaaaagagaaatagagagacaaaagagaaacaaaaaaaagtcaatcatccctaagtgaaaaaaaaagtcagcatgaagaaaaaaaaaaaaagaattactcattcctgactgaagaaaaaaaaatcagcatgaaaaaaaaaagaaaatataaagaaagaaaagaaaatatatttttttaaagttttaataaataaaaaacaataaaaaaaaagttaggtagggaaagtataatgtaaaaaatttcttgtcaaagtgtaaataaaagtttggagtaaagttagtattttgtgtaaatttctctttcttatatagcaaactgttgggaaaaacaataaacttcaagcgcagcgaaataacaaagaaacgaagtaaatcaatttactcagtttggtaaaactaccaaatccaca

SEQ ID NO: 117945 - DNA, 1065 bp, Cannabis sativa
taaaattttaagtataatttattcaaaaagaaaaattaagtatgatatgtaaataaaaaaattacaaagtaatcagagtacgtttatcaatttggtaaatatatctctcatgttcattaattcgatgttgcatgtatttatttattttttattaaggaaaaataaataattgattaaaacttttaacatcttagtaaatataatgtatatttaatcaacttatataaccatcttttaatttggaaaacaaaaattatattaaaaaaataaaattacagtcaacatcttttaatttaggttgtataatttgattagtcttaaaaatttgtttatatgataaattaataattataagaaaataattagaaaaaatgataagcacaaaaagacaaaaaccaataaaatgtaccacaaattctaatcttctattcataatagtctgtagatgcgtttgtcactttcacccatttttaagtgatttatttttaggggaagtactcatttttttaatttacattttagatttctaaagtggttgcagtgctagttgcaatagaagtttctatatgattttttgttgcgatttaggttgcaacgctatttgcaattggagtttttatgtagaattccgtaaaaatgcgcaaaaaaaaaaaaaaaaactgttttaaagtgtaaaaataaaaaccttttatttttattaattgaaaatattagttacattaataataaatcaaaaaaattaattatgtaaaaaatagattgaaattatcacgatagactaagagaatatatgccgttaataattgagtgaacataaattttatgtacactcctaaaattcttaaaatttataaagacatcacattttaataatttttattttatatgaaatttatatctttaattatattaaatttttaaaatttttttttctctaattcatatttttaaaaattatacccatcatataaaaatgaattatattttaaatattataaaaaaattaaaataaaaaattttatgaaattttcttagaaaaataaaaaaaaaaacaaaatttagaaa

SEQ ID NO: 117946 - DNA, 1606 bp, Cannabis sativa
tatgtagctagattagcagactagctagatcgatttttctaatatttaattagctagtattcgtgcctcttttttgggagtgaatattttttctcataaaactgagatattgttgtccattattgtaaattataaatataaacggtagtcgattgtttttctgttttgcttgaaaacttctccacctgattggttaactactttttctgatccattcagtcaactaattgttagattggattgtatgtattatactctcctctaaattttcacatatactaaataaatcatgtcttttaaattcttttaatgtcgttacaaatgcctctgaattattgagattgttaaatttaagaattatttttcttatctaattttatactatttcattaattgtttatgtattaaattatgctcctcaaactttgatatctagctaccaaattatgttcctcgaactttgacatgtactaaattatgaccctgaactttgattcatgttagaattttttactaaaattagataaaaaaaatccttaaatccaaataattcaggggtattttcaacgaccttaaaagttagggagtatgatttgttacattgcaaagtttaagagtaaaaatcctaattagcgtatacttaatcttctctataccattttttttctttttcactatttgtttgataattacgcatgcgatttttgtccaagaagaatttttttattattattattattgtccctttttttgagagaaccgcaattagtatttttaagtgacttcattgtcgtttttattggaagaagaaaaactaataattaagacaataagtctcacgcaacgtacgaatttaatcttccaataatgtttaacatatataacagcattcattccttaaaaaaaaataaaaaaatccttataccaagtgaaaaaaaaaacataagtctagagggaccaatatttaagatgggatattgtataaaaatatatattattgtatgtaatgtaagtcaagttaacgaacttaaaagttaaaatctttattattccttaaaaaaattcttcaattaatagctttatatttaacgaatttgtgcatcaaagttcgaactagggttttcttttatcttctcaatatagtatttaaatatatatttattatgtaatagaaattaattaattgaaaaaaaaatatatatttttggaaaactgataataaattatagttaagaaaatacgatggtactttaactgatcatcttattgatgtatggattttttttacttaaattatataatttaaatctactgttctctccatttcaaaaaagaaaaaaaaatctattgttctgatttaattttcatcatgtaagaactcccaagtactactactataaataattagagcctagctaatcttcagttgtactagatttctcagcttctcgctagtcctgtacatttcccatgcctgcatttttatcatcaaatgcccatcacgtgttactacttttgtctttctttctttgggaacatataatacacaatacatatttatagggatatgattttgtcctgttattgtactttcacgtattgtaat

SEQ ID NO: 117947 - DNA, 2057 bp, Cannabis sativa
aatcgtaaaaatatttaaaattatgtaaaatcgtatttttgtaattttttgttgtttttttgtatatttgtaaaataatcctttaaaacaattcaaagacaagtacattttagaaactgatcttgtgtattagagacccattaaaaaaaatcaaccgactaaaaatggtcaagtcccatcatttttttatatctttgcagtcaaaaataagaagctgaattcaattgtgggaagccttaattagtttttaaaaataatatataaaggttgtcaaatcaacactctacaaattgtaccaacatttagtatagaagaggtctatattgtctctcctagtcgaggggcatctagctagcgaaggttatagatccatacacaccattatcactttattttgcttatttattatttttactatgacaaattcaatgattcatgtctctctttaattaattaaattatgtttaattcttttgaaactgcattaccaataaggaaacaataaaaagatagattttcgtatgatgtctgttttatcattaacagtgattactagaatacttggaatttttaatattattgaccaagcagagaagagaaaaagaaattctactaactaagctgtgtgcacaaaatcatctgttaaatcgtaattaatttgtccaaatctagcaggcattattgctgaatgttagagacaatttgtactttctaagctaatccacatttttaattaattgcatattccaaaagctttaaaagggagaaaaagtgcttctttttattatgatcatgtgattcgttgcccagtataaagcctaaccctttgctttttttgatcaattttacacatacatcaaaatgatatctttcttttgggtcccaggccaatatgatgtgattgaatttctttgttccatcattaagttttaacattttcttcatgtcactaaatacaataacaatttttaaagctttttgttgcatatatataggacatccgttcatgtttctcctttcaaataatagagcataaaaaactactattcttgtaccaatactcactctttcatgcatggttggtaggagaaaattattgtgagcatatatttggctaagggtcaattctcacaaacactttgtggacaagacgtacaatatccatttcacgggcatgcatggcttcttacaaagacaatatggaagttggaactaacccattcccacgaaggtcctacgtacccctccggcaaaattaaataataattttatgtatagatttataatgagcattgttattgagtacttttggaatagttagtgattttatatattatttatgaaatcaaaatgtgtgaaattcattattaatttccactaatataacagtaccaatataatagtatgtcacattttgttaaggtgtcccttttcatttacaagaaatgactacttatacattacttgtcaaataattttatttatagacaaactttaattttgttttggtcttaatttttccgttcattttgatctgttaaatattaaagtagactgtcgctatgtacacagcgagcgtacgtgccataaattttattagtttatctaatattaattgtaataataaaaaattataaaaattagaaaattaattttaaaagattctttttttctttccttttttttttctttttcattacaaatcaacaaactgtcaaacccagaagcccaaatcttgtatataaatgtactacccacaattccgtgaactttctttgaaaaaaatgatgtaattcccttgagaatctttcattattctgcacagctttatcaatgggatgcattttacttatgtgaagagaatgacctattgaatagccttattaccctactcttttcacttatatatatcatttatatacaataaaaaaaatattacaaaaaaatgtgaaaaaaaaatcaattttaaaaatgtacatatttgaaaacatatttatataaaatcatacaaattgttaatttaattatattagatttattaatgagtcaaattacca

SEQ ID NO: 117948 - DNA, 1463 bp, Cannabis sativa
aaaccaattggcaatgagtggagtagtccatgttcttatatatggctcaatactttcacatttaatccatgtgggacaatattctccaatactttgatacccttgttaaaatttctgagagaagatgattgttacaacttttattttgggaactaataatatggatggctgggaatatgatctacaattgtggagtcctgacttttctaacggatcgaatgttggttcccttttaatttttaattctggaatttgaaagttatgcacaaatttagattggatctaaattatacattcactagtgaattaactgtaaaggataaaaaagtatttaaaataataaaatgataatttgaccaaaactaattacgaaccgacgcaaggagggataataactggaattgattatatcaatacactacaataaaactcaataaatataattctataagtactaagacttcaatttcatatttatagtggagtaatcatataattaataaaaaagattatttggttgatgatattcaataaataatctaatttattggaacttaaaattataaatctatggtcgctgtatcaccattttgaaacactgtcaagggtatcgataaaagttatatattgatattcaaaaaaattattttgatttttcaaactagtaattatttattttgtaataaataatttattttctaatttactaattaaataaattggaaaaaagacaaaagttgtctgtataaaaaacagtatgattaggatattctctcaagtggttgaaagattccctcaatcggttataagaaataagtatctataacagattcgattataaatatttattcaagtattcaaataattaaatattgttaatttattattttgaattaaatatttattttaagtaaaacctttatttggttttattttgtataccttaaaaaacttaaaaagactatagatgtataagtttttttaggaaaacctaaaaagagggttaattagattgaatattttttcatcatcatcttagagttctttctcatgcatgagaaaaaaaaaacacaagaactcaatatataatttatcctattgacctacactaattcttgtgtgtggtggaaggttcaaaaaatgacgatctgagttcttaatcaacatcccgaggatataacttacaaaaagaaacaaaaatatcccaatttgcttcgagagataaattaatgtttctgtctattttatttcatatttaatatatatacacatgtggtgaggatatcattttttgttacgtacctaatttaatatcataaaattaacaaattggtatcagagtagagcaattttgttatgtatatatatatggattatttcttaatgggtattacacatgaatggttactaaacaaatttaattatcaatattaattttaaaaatattaaatcatcaaattttg

SEQ ID NO: 117949 - DNA, 664 bp, Cannabis sativa
  modified_base (197)..(200): a, c, t, g, unknown or other
gatccacacctatccagatggttagccagccgcacgagatccagatggtgcaaagacgcctgagatccgaaaaaaaaaaaataagcaagcaaatgacaaggcatgcgataaggtgattcaagattggtgagcaaaaatagccaccatcttgagaggggatattagagaatattgtcccacatggattaaatgtaaannnnttgagccatatataagaacatatataggctactccactgaaccccacaattctcaacagccactaacacatgtttaagacttgccaacaagagggatttagatattttttttaactatataaacttatgaactaaacaaataaataaatatttatggatttaatgcatattttatataagtgtgttcatgtattttgctactatatttgtattttgtgttgtatttgcgtgctgtaccatttttaagttcataatttttattgtgcctaattttatatattttttttgtgttgactcatatttttcttgctgtaccaaaaaaatccacaacaaaacactaagtacatctctatatacataagaattgtccctcaatttaaaccatgaaacccttataataaaattaaaagggttatttggaacgaattttttttatgttttaattttttacacttaattctttt

SEQ ID NO: 117950 - DNA, 2537 bp, Cannabis sativa
  modified_base (2485)..(2495): a, c, t, g, unknown or other
ccaccaaaatatgaggttggatggttttttcaagtaaattgatagttgagggggttttgccgcaaattactcttttatttattattaatttgacacaagttgtcagcaactgagacagatcctaccgagcccaccaccacgatactagtaaaaatcaccccaaaacacacacacacacaccttcaacacgttgaagagccaagaagattctattctaatttctaaaacgcagtgaaagtgaaaaccaaccccacctcctctcacatgaccaccgccgataccttccaaacgttttaattattataattttccttttttactacgaaacaaacttattttctttaattcccattattaaattcttccaatatgggaatttcaaggagagacaacttaaaacacagagctaacacggataaatcccattattttaaaaatctaatcttgcattaattaattttatgctaattaattattgactgttattgggtttctacaaatattattatattatttatttggaaacacagtattatagtagtactacttctctctctatcttctttctaaagtgaaagaatcaaaaactgtattctatacgacaaggctacaaggttctttcctctgtctcttctcgcactctcttttgtctgtttcgctcagctctcttcttcttctgcactgagacgagaacataatcgtattttattaatcgaattgtgacccatttaatttaatttaattaaactgtacaaaaggttaaaacagaaaacaaaaacagatcagaggcactcgaaatttcatggttctcagaagataatatatatacatcgatctctatctttcttcggggtttagaatttggtcaaacaagttgaaactctgcatgatatgtatgattactattatatatattttggagacaataaaaacaataaaagggtcacgaggggatatggatacaatataccacgaacaagttattatataaattatatatattcatacaacattttctgataatgatatataatatataaacagaaaagatagctgtttatatttgtggtgcatcaataatgaggacagcttttgtcttccgtgtattacattgacatctctcaatccttatagattacatgtacatgtatgaatatttctatataaccttttcattgctaatcctaattcacatgatgattcagttctacacactgctacgcaagatcgatgctcaacaagtaatgtacctcagtaataaatatatatattttgaatggggcaaataaatattaaataaaataaattcgtgtaactatttttgcaagtccaaatagtttcacataaatatatatgtaaagttcaacactacaacaacattggtttacagaaagaataacttcgactgattactagattcagattatcgagttacttaagaaatgaatttacaattgtaactttaacattcaagaatcagattaatgagcaatcaatattgaagatagtgatttacaagtttcatctgcactgagaacacatctcagccgactagtgcttgggttccccgaaccagggtaataacatccactatattcaaagattcatattacaaacaccagttcacaattaagtatttaatacaatctttacaacttttagtgaaatattactaacatcaaccaagatccttggttgaatacacaagattccctgtgcataagttaagttcttcttcaacacttttctccaatttgaagtcccttcagatctgatgacgaagatgacactgaactaccttcaatctgaactcagctcgaacaggctgtgatctttcggctatggacaaccatcaccaagatattcaatcagacctgtaaaaacaaagaactatacaagttaccacacacaatacagcacgataatattgaactaaccaagaaaacgaattagctagctaaccaaatcacagaatagaactagctatatatagacaaacagttctaactgacctaattaacaacattttcatgacaactgttaatgcataatagactgacgtggacactaatagaatattcacatgtagttatgtcggatgaacaccacagataagactggaatcactattaatataatctatcaaaaatatgaaccttacaatctccccattgacagattatgttcaatgaccacacaaaacaaataatagctactagtcaaaataaaggaaaggacccagaaggttatccaccatgcagcaagaaactttagaaacataaattgtctttgcaaaaagaaacatagcaatccataatccatataaaaaaaacttgagaacatatatatctcccccttcattgaacataatagattgcaccacatctttgttagactccccctgggatagtgggtactgaagaaacaagatgaggagcagaggaaattcgagacggtactacaagatgttgggttttatgccctnnnnnnnnnnnatttcaatataatcagatatacttattaatatagatcagaaa

SEQ ID NO: 117951 - DNA, 1518 bp, Cannabis sativa
agaacgtgttccagtcccgccgtttctgtgactcgtaacggctcggcggtactgttgtcccaccggttgctgcggctgcggccaatgggctttggtccgtacttgggcctggtagtggcccagttggtgatgggccatctgctcctccgctattattcggatcggatgatccagtaataacagttgtagaagaagtagtagttatagtaccggcgccaccacctgaagctgaatccattatttgtggacaaaaaggccaaaatcttgataagatgtagtactaatagtaccgatgatgataaaactgtatatatatgtatatgatgtgacctacttttgacgatcaataactgaaaataataagtcctcttatttttattattttctccttgtgtcttgtgcactacttggctgtgcaaatagagagagagagagagagtgagagagccaataattaaccctttggaaaattatggtggctgcaatttaattagaagctatatatatatatagatagcagaatcttaattggcctctgataataatcacggctgggttttattatccggagactggatcctatgtatacgtactctagtctggactgagatatcgatcgatctctgatcttcacgggaaagtctttccttgattttgttttttattctattttcttcttgtgagttagaggaaagggttttaggggtgggaagaaagaagaaattaatgagaaagaagagagaaattagaaagagaaagagagagagaaaagaccgctcaatgatgggacgtaaaaagtatagatgaatgaacacgaatgagactctctccctctcacatctcactcaagagaaagcaaactctagagagagagagtgtgtgtgtctcagtgaaaaaaatatgaaataaataaatagaaaaaaaatcaaataataaataaatagaaaaaatataataataaataaatagaaaggagagagagaagaagtaacaaatggtagcaaggaaggaaggagagaatagtggatagagaaactgtagcgtgtgtaatgtgcaagtgtaaagcgtttttatttgacattaactagtgatgtgagatacgatattaaatttcatgagtataatattttgtactaatatttgatacaattagaccatcatttcttttgaatatcgttaactaattgtttgctatttttaaaaagtattaaacgctattagtatctaatagtaataattcaaatataaaattaaaatactatccatttgaagcgtgggagtatgagaagcattgagctgataaaaaaaaagtttggaaggaagttgtggttgaaactgatagtcttacagacttatagttgtacaaatattgagaagttcgatccctatgtgttcttattttgggagtattattttggattgttagatgttattagatgagttgtctgatgtctctgttatttttattacacgatctgcaaatagtgttgtttatttctttgtccgagcatcctatat

SEQ ID NO: 117952 - DNA, 2973 bp, Cannabis sativa
  modified_base (1653)..(1664): a, c, t, g, unknown or other
tgcatctaagcccaatagcaaacatatatgctcacatagataaatgatttagataggccctttcatgttactggatttatcacagatgaaagaaaatacaaattaacccattacaaattacttatttgatttattggccattggactatgattaatttagatcattggatctataaacaagttaatcatagcaatttaaatcaaataaataataagtttgctaaatttttttgaagtaaataatttaataaacaaacaaaaacatgtaacaagatctaaaaagttgtttaagatatttctattttaaaataaaatatttgaaaaatatcttcatttgaattcaaattaagttgttagaaaatatttagaaaatattaaatctaacaaatacctaaaatatttcaattcaaattcaaattcaaaccaactaattttcaagaattgagtttatttaaataaatttaaataaatcaaataactatggtaatataatataatatctaaattgaaaattaagatatttcaaatcttataatttaccacattaaattttacaaaagtaaaatatagaaaatttcaaaataaaataaaaataccttataaaatttcaaaaattttaggttcgaaaaaaaaaacttagaatatctattcaaacaaaaatataagctaactattcagaattttcatgttatttaaaaaaaatacaaatttttataaaataaatttctaataagataaaatgccaaataaataatatttatccaatcttataatttaaattaataaaatatattaaaaaataacaaattttttgagaacttatttttatgatttgttatttaaaaattatctaaattatctttaaattttattattattttaatttcaaaataagatcattttatattttattaattaaatatgtaaatatttgattttataatcaacattaataaataaaataaaaaataatcaaattttaatataaccaaaatcacaaatttattgagagattaaattttttaaataaagcttactaatatctaaaacaaatatcaattaataaaaattaattttattttgataattaaatttttctttgaaaaataagatgctacacaaaattttacaaaatttaaatttatttgataaaaatgatttataaaagttgcaaaaattgaaaaaataggcaaaacaagggagtatacattaattgcgtactcccccgcgcatgctagggggtttgagtgagagaccatgctgcatgcagccttgttgtgcaagggagcttagtcacgggctacttcagatagcctcgtgttagagaaaactcggataggggttgtctgaacccgtatcatgaccaacttttgcccctcagatgcgcgtgcatccaccaaaccctagcatagatatttttccaatttcaaaaaatcataactaattcaattttaatcaaaatttagttctgtaaaagccaaaattacttattttatcaccaactttccaaaataattttggaacgaaaatcacattatttttcataatttcataattaatattcaatcattaattaacacatcgaccaacatgaacacatccaaatcaaccaaatcatcactttaaatccatatttcatgaaaataaatcatnnnnnnnnnnnngaggccagttgttggaacttgttttactaggatctagatttactaacatgtatatttgattacaaagtataatctaacatcctaaatatgaattttctaaaagaatgaaataaacacatataatattgtagaaaaccttaccttaatagaaaataatgactccttccatttagatctctaactcttattcctttttgttctagagtattactaagatctgaacttggatctctttagaagatggaattcttcacaatcttccacactatgattgagtattgacttgaattgtgtgggcaagtactcttcactacagggttcaaaaattttgaagaagaaacagagaggaattcgaaatctaagagaggctctttattttctcagttgtctgacaaagtagtgtgatgagcttatgttgtcaggttttttttgaaagtaagagcctatcatttttttgatgaatcaattagttgtattgctcataaaactcttctgtacaaacaaaatagcataatctatactattcactatatcttatattttggaaaaccaatcttgatccctcctcttgatctctttcggccaaagcaccaatacacgggtcttgactatctcctttgtttgctgcataatctattttatgttcaccatcttcatgatccatatgtggtcatttcttgctttcaaaatattatatatcaacgatgctatggcagctgagagtacctttttcctaaactttgatagctttgctcttcctatccaccgcaccagctgcttcattgagttagcttgtgcaccccattatagccattgttttacttccagcaagcattttgttgacactgagcattcaaacaataggtgctcaacattttcttgttgcagattacacaatacacatctatcttcctacacaattttatgagctttcaaccttgcttttgttctcaaccggttgtgcattgctagccaaaaaatgtagcaattcttgggaacattgagtcttccccaaacctctctatcacaggtgactttctgctatgcacgacaaagtaacttagacccttcaacaatggtatatcaagttccaataaaccgctgaatatccatcttgcttttgatttggtccttagcagccaccacctgttttcaataccagctaccattttttcggaatttatattcccactaatgaccctatttgatatacacactatgtaccaatagaacccacaagttatcttctttgtttgctaatacccacacgtactgtaaagactgcttagtttaatttggaaactagcag

SEQ ID NO: 117953 - DNA, 980 bp, Cannabis sativa
  modified_base (927)..(940): a, c, t, g, unknown or other
agagagagagagagaggacaaaaatattaataattggtacaaataaaataaaatacataactccaaatataacaaactaaaaaaactcaaattactgagataatttttttttaaaaaaaatagatttcatttaataagagcaatcaaccataacaatagacattagagtagcaggagcatcaacctcagtaaaaacatgatccgacaaaaaataagattctcttcccatacaatgagcagccctatctacagatcatttaagaaaagacaataaaatagtgtttagagatgagagcaataaacgacaatcattgaccaacaaaccaaattgaaaggcatttggacataactattaaccgcttgaaccataataagtgaatccgttcaagagccacaacaatccatcctttatgttttatccaaagtaaagtctatttgactccaattacttcagtaacatcagaatgaaccaagcccgccttcctaattgaaacaacctcaattagattccaatcacacaacatacaccaaaacacttttcatgctaaaaaatggctccattaacatttatcttaaccttatgtatcacaggtttcctccagtgcttatcaccactaccaaaaactacattcaataaagaaactgatttgtgtgcttgggcattcaaccattggtcaagagccaaccttaccaatctcactatttttgaggcattacttagcttattgttccaaaagacatcatgcttagccttctaaatcctccaagccaccatagtcgcttctgccacaaccgcacaactttccacaacaagcatatgttgacggtgagaattcatcaactaacttagtggccaaaaaatctaagttaaacccgaaaacaagatgatgatgatgaagatgaaaatgttggatatttattttaccnnnnnnnnnnnnnnactcacaagtatgttgtttaacacgctaaatatgaacttt

SEQ ID NO: 117954 - DNA, 1042 bp, Cannabis sativa
  modified_base (26)..(37): a, c, t, g, unknown or other
tatactattttagaaaatacagggtnnnnnnnnnnnnttaacaaaatacagggtccaatctataacttttgcaaaatacagggtccaaaatggtatttacccgcaaagaaactagaaatcaagaacaaaagaaaacagaattaaaaaattgacacagtgcatatagaggtttgaactttctaactacctaccaattattgaaaacaaggtttgaatgaacactttgcactagttttagtgagaactgatcttacaaattccacatcagttcttactagaactaaaagaagaatgaaatgccactacggagttcagagtaatctaaattgtattagccaatttcaactctaagcaagtctttgtaatgatcaaacttgcctagagttacaaccttggttcccatatgaattgtcatgcaccttttttattgatctgtccttgagcttgagatacttttttctttatgaaaaagtatttgatgtctatgtgtttggttttgtcatgctacatggaattcttgcacaagatatttctgcatcacttgaatttaaacactcttttatggtctcagtagctgccataaatttagattctatagtagaaagagctaccacaaattgtaactgtgtttttcaactaacatagtttccccatacaaaaatttgatatacagatgttgatcttcgagtatccttatcccctcaaaatttgaatcactgaatccttcaacagtgatttttctatgttgatgtttgtacaccaaaccttcatttgttgttcctactagatatctcattaaccatttcattgcttgccaataatctttttctggatttgtcatatatctggtaaggcaattgatagcatgagccaaatcaggttttgaacataccattaaatatatgatcgatcctacagcagcagcataaggtatcttctccgtctctttttttcctttcatagtttcaggactctattagagttagaatgtaacaccctaactagcataggcgtattatgtgatttttaaacatactgtgca

SEQ ID NO: 117955 - DNA, 1625 bp, Cannabis sativa
  modified_base (52)..(54): a, c, t, g, unknown or other
atatgatatataatccaattcaatatcatacaatacaatacaatacgacctnnnacggcgttccaaacgagccctatacagtactagtgtacataattagtgttgtaaatatatatgtacgtgtcatactaattaatttaactcaaattataccacattttttaaaatatgagttgtgtcgtgccatgactttatacggtaagctcggtacaccccgtaagcctaatgtttttgtaacgtgctttactcgggtggcccgtttcatatttgggctctatattcacatttatttttacaattaacgaaccaattattaaaatatatatttttcataattttaattatatttatataattttttaataatattttacaaataattattcatattaaaaattattagaattactatagtttaaatatttacttataaatactaaaattttatgtcactgtaaaaataaattaatatataattttaattttatattttctaataatattaagtattatatttaagttttattattattttaatttatttataatattgacaaatacatatctatttattataattattattagtaaattgtagtatttttttaatgtgttgtgttgtgctttttaggtttgtattgtgtcacgttcttcatgctagtttattcgtgcttatgtgtcatgtcattcgtatacttgttgtgtttaagtacatatttttcacgtcgtattgtgcaaatatctaacatcgttctgtatcgtgagtaagcctatattttttctgcatctgatcgtgctcatgccacccacgtaccagtttagtatcgtgtcaaaaaattcagtaactacctattccttattttgtctttgaaaaaaagaaaaaaaaaagatggattcataaattttcatctaattgtaattttatttaaaacttctaaaatatgtgttttattttttttaaaaaaatattggtattattttctttctttctttctttctttctttttttttttttgttcaaaataatgcaaacgtggcaacaacgaccagtcttgcatggcactaacgtgcagagaaagaaatatcaattttcaggttatgtgaacttcgtggacttgacttgctaatttctgaaagaactaacaaacaacttggcccaaacaggcccaaataagatgggcccaaaaagaagaaaaaaaaagcaacatagaaatgatattatataagatgggcacacataaatattttggtattatacaaacaatcaaattaatattggtatttttaaaaatattatcaaacattaatatagacacttctaacttacacacacggggatcattcacaatttatggttattaattaataaagaattcttaaagggtagtggtagtttctagcactctgctactggaactcgtatataatttagtttaataatcattatataaaattattaaacagtactaaagtatcacctcaatatacctcatgtttatagttggaatcactggtatatataaggcaaaacttacaaaaatactgaaatttaggataatttttacaaaaatactgtcacacgaaaatattttcgatactgtgtttttataaaacaccagtaaaac

SEQ ID NO: 117956 - DNA, 969 bp, Cannabis sativa
aaacctgaagatccctttgctgagcaagaagtttcatttcaaccaccttgtactgctgaagtctgtccagtagaacaggtacaggaacatcattactactcaatactcatgaatcataagcaaataacaataatagtaatggtagcaaagacaaaacaatctgatttttacttaagtcaatcatttcctttcgtcttggcaacagaaatctaacacgttaatttctacttaaataattagttgcccagatgtgaggacaagattatatatgttaatggtagcaagaactaaacttaatcgatccaaaaccaacattacgatatgggttcttcacatatggaaggacccaaattatcaaaacttggattcaaaaaaaggatcaaaacccatacatgagaaattaaagttgaggcagagagagtgataaaaatcgaacctttcttggagaaaagcgagggctgagttaacatcgagtcctgattggtttagataggtctgcacatcttccacgaactgagctcctggtattcctcttctttctgcaacaaccccagcctctgtggaagaagaagaagaagccattttccttcgataacgaatctccaaagtctacttcgtcgatcgttgtcgtttctagctccgattttgccactgtccttcaaggtactactctctggagactcgagagaagggcagagagtgtgggtcgatgaaagaacgggggcatcgaacgacaatcacttgtgtgtcgtttaatgtaattggactaaaggcccaactttagagttattgggctttataggcttcaagctcaatatagttgcttagggtttgcacctttgtaaattgaaaaatacctctttaatttatcaatgggataagttaaaaaatgcctcttttattaatcaattaactaaatttacctctaattttatatttatttgaaacatacatctttttatatgtatt

SEQ ID NO: 117957 - DNA, 1637 bp, Cannabis sativa
tgtgtgtatgtatgtttgtataggtggtggcagttgcgtcgctgccgaaggagatagcggcagggttgcaaccaaagcaaaacaatgcaatcaggggactgttgctgcagtcagggtgggttgtggagcagcttgaaggtgatgactcttgcatggtcacctatgttgtacaggtaaaacaactagctacttgttataatacttgtcattcattattcatttagtatgatccaatttatagcatcatccagttttgttcaatttctattattttgtgctgacttcaaaatttcattatgctatacctagaaagtatttcattattattattattattattattattattatagaaatggaagggaaccttaaaggtccaagcaaaacaagatataaacatattgttattagtgtattttaatattaaatttcatttattttaatttaatgaataatattaaaaattgctaactagttataaattatcatataagtgtagctattaaggagtgttggacagttaaatgtcaaatagcaatgtctaattattagtatagttgagatagattgggaatggccgaactcattattagagtggtttgactcagctcagctcatgactgaggttgaatactactttcatgggataagcatttagtattgaaaagtagtattttttttttcttttatttttattattattaaaaaaaatgtaggagaatgatttcaagtattattttttaacttttagttacggttactcagttttttatatggattctttagttccaatttagattccgttaattgctataggaatttttatgacataaaaataaaaaaaataataatttaaaattgtaaaaataaaaaatcccaaaaacctaatattttttttctttttattgttattattttttttctgttaaatgatattaaatatatttctttggctgaaaaattaccaaacaaaatttaaaacagactacacttgacacaaacaaatttgaacaagtctttgtcaaaataaataaataaaaaaaaaattgaacgagtcaaagctaatatcttttgcttgtgtttattgaacagctagatccagcaggatggcttcccaagtgctttgtcaatcggttaaacaacaaactggttatgataattgagaatcttaggaaattggcacaagctactctgcccaattaaatatcaattaagctcttatgttataaattcctgatgctacaaaaaaaaatatatgaagtggttaatatattcttaaagtgagtataccaattataagttttttttttttttcttttttttttttttcagtagagttagaaaatgtcataaggttttggtttttaaccaaattaatgatatggtttgataaatgacacacatatctatatatgatgtggaaactgtctctcctctgagggccaagtgataccaactgtaaattacacgaaatctttgttatttttcaatgtcgaaactagctccttttttttcttcaagtaaattgacatagtatttgatgaggtaagttgaaaaatactacttgtattaattaattaattaaatttacctctagttttatatttaattgaaacatacctctttttatatgtatt

SEQ ID NO: 117958 - DNA, 1206 bp, Cannabis sativa
cggatatccgcattttgcggattggattggattggatcgtgcggattagattggatcggatactttgtgaacaccctactctatacccaaaaacaaaaaggcttattcatagatgaaaagacggtttagggagttaaatgttctactgtccaaaatcttttgttttaatataaaaattgaccatggatcggatcatcagctacaggagttgtaataaatagttttatattatatatcatgagtggtcactacacttgggtaccgtacttactgttccttaatttggatctagctagtgaccaccaagaagtggctctctgccttaaattagtgaatttctacggataatgaaaagttttattgtctggctgtttaataatgcatggacttgaaaaatgggcaattcaaccaaataaaataatatagtacatatatattaaagtttttcaaataagggaatgaaacagtatatatgtgattgcgatatctgaagcaaagaatacaacagattcttatgaaaaatgtaacgttaaatgtgtatatatataataggctacaatacagtgtattgaatgaatgaaatcagctcaaattgaggctgatgaattatttgcttctttatttatacttgaaaatcaggatttacagtatagaatacaattaatgaagcttacatgtagcaaagatattttctaaaagctaaataattaatgaaatctatgctaacgctataaaagacaacttgcatggaataatcattgagattaatattacaattctaacaactttggaggcaggatagacaataatgccccagcatttacaagcgaaagggtgaagaaatcactctgaggtagttgtcctagaatggtgaaatgggacagaccttttgtgagacaatcaacaatctgatcattggatggtacatagcgaatttctaggtgctttcctaaaactttatctcgaacagaatgtacatttagctcaatatgctttgtcctagcgtggtaaatgggatacgcaacaagtgcattggcgttcatactatcacaccagatcacaagcacaacaagaagcttaaatctcatctccttcaagaactcttgaagccaacttatctttgttgctagatttaccaacaccctattgttggaattattttaccaagatttagatttactaacatgtatgtttcattaacatcct

SEQ ID NO: 117959 - DNA, 1713 bp, Cannabis sativa
atggaaccccatgattcttaacatggtatcagagccacttgtgatccgttgtgagcctaaattgccaccggtccaaaaagtcgtttgtgatcctatgtgagccaaagtgctgccggttcaaacagatacttctgctgtctcccctttaacctctatttgggacctttcggccaatgtgtgacaatttccagtgttggagtatttgacctgtttcaaaatccacaaatttcccgacgtgtacacccataaatttcctaatatttggcctacactttccagacccaaacgtgaggagggtgtattaagagttagtcccgcattgttaatgtgtggaaataaattgtgatatataagatgaatgagttactcctctcattgctaattgattttgagatggaaccccatgattcttaataatataataaaattattgtttcttttatatatttttaataaaaatattgattcacattaaattttgcattaagttttataattgtgcaatagaatataatgctaaaacctaatttaaatatgtcacaaagttattttttgtatcaaagatagtacaatttttacatctttcatttatatagtgtgatgatacaaaatttacaccatatagtaaatgttgtgttaaattcgataaattcctcacaatattttttatgttctaaatttgtatcacttttaaggacacaattagaattaagtgaagcatagttaattttgtttatttgttcttcatattcctagtccttatcctcactaaataaaactttggactatcattaaaaatatatatatatatataaatataattatatggagtgttacatggatcaataataataataataataataataataagagaccagaattttgattcgtggcaggttgacagtggaacagtgagtctaataacaactcttatgtaccacaaatttaataatcaaaagcttagaacacgaaagattttaaattccatattaataaatacatatagtaccgaaaaaactaccaaaaacagacgaacccattctcaatattaagcaaaagaaaggtaaccctatacaattgtgattttttttttctttttttttttgaggaagaatataattgtgatcattaatcatcacaatcacaatgcacaagattgacaaaccaacagtgtttttttttataagaaaaataaataaataaataagcccatttctctcacttttctttttttgttattattttttctttttgatacactcttccctcttttctctgtctttctttggttggagtctctttttctcttttaatgcattccccagaagataaaaaaaaaacaaaagggggtggtgttggctctgaaattactaggatgaaagccaagaaaaagtttgttgccaattaaaaacccttcctctgttctatttttaaatgtataattatttatatatattataactttaagagagaaaccaggcagcaagtcctatgcattttgactctcaaccccacaaccacattgacttacctcttcttcaaactccaaggcccttaataccagacaaactccaaaagttccttcttaatataataatccttcggctactctactacttttattactatttcccaaatatcatcttccatcttataaccaaaacccactaaatcttttatacatatatataggagagagagagagagaga

SEQ ID NO: 117960 - DNA, 2624 bp, Cannabis sativa
  modified_base (1525)..(1534): a, c, t, g, unknown or other
aaaaaaaaaaacagtacaaaagttatttttggagtgtaacagtataaaagaaagaaaatggaaaaacacagtaaactgtgtaaatttcccttattatatatattataatcactcttactcctcaatatgactgaaggaatagtagttttatgagaaatgctcacaacaattattggtactcagtattcttcaatgtgttatatgtaattaagtatccgacttatataatttaatgtaataatttgaaaggaatacaataatcaatcgtaatgtgctacctcttaaaaatactggctactacatgtcgaatagcaatgctctagttttattgggatgcctgcacatgagtctagctagctatgaagttcgggaatcgactcccaatataaacaagattaaacatgaatattaatttatgagacggagatgagagagacaccgacaagagatggtggtggttcgacatatgtgacggagaggagagggagaccgacgagaggaagggtgagtggagatcgatggacaagagagacaagaagaaagggagatcgagagacggaggaagacggtgagagaggagagcgatggtgcggaggcgtgggtggagttttgcagagttaagattttcgttttagggtgtgggaaatgaagaaaaaataggtggacatgtgaaaaatagaaaagaagtaggtggcacgtgggaaatgtggcgagaagtaggtaacgattttttattgggtccttatacccgatggtttaaatgtggctagaatatgaaccagcccgaatatgcaatcataaatgcattcagagaaatcgcctcagaaaatacagttggtagaaacattcgaacttatcctcttaaaaataatagcgagacatgaataatgaattgtttggaaagggtaaataatgaattatttaaagagtttccagctcattgacccccacacacgtgagtgtgttgaaatactaaatacaacacctttagcacgatttacctcgcaattgtcatgttgtgacaaatgtcttgcgtgtttctaatcttaacattaatagaggaacgcaaggaatactacaacacatacttaaacactagtttaacataaagctagcgtctaaaagaattattataccacgggcatgatgaaacatagtcagcataactgcctatatagataaaattaaatgtgcagttatggggagttatttgtaattatcttatttgcgtaaatatgaaacgtggagattgtcctcgttctccatgtttcatgaacgattacaagtgataagatcccacgagaataactgtcatcttagatttttataaatagagatagaacccaaggaacaagagatgactaattagaaaaagtaaataaaattatacttaccatacattctgtaaaaaattaattgtattctgtatataatttattaatccctgaataatatagacttgcgaacaatgaagaattaattttaaaaccacccaaaatccttttcatttattattattattatnnnnnnnnnnattattattattattattagggttcatttattacaaaaagacttatttattagttaataaaaatatgtgttaacaatataaatttaaagaagacacataataattaataaatatactttttagttaagttataatattgtcattatttgttataatgttttcataactttttaagttataatattctcgttagtttttttttttttttgaaatatttaatttatttattattattattatgatagccattttttttatcaatttacacttaacaatgctatacactatatattagagtaatttctattattttttttttactgaatataatatttgctctatatcaaaaatatatatatgatataatatttattcatttcttaggaatttttttttttcttttgagaaaaaaactaaacacctcgtagaaaaataaaataaaaagatatacatattatattatattatatttattttaaataatttactgaagatattttaaaatattatattcttatcttaaataaataaaaaaaaaaattgaacactaataacctctataaattattaatagtgagaatcgaagcgattacctcatcattattatacatttcaagttctaactaaccacttgtgacacaaattttatatacaatatattaaactaaactctatacattatattttattatatatataaacatatattatataaattttaatatttttgggcctttaaaattgtgggacttggggcctaggccgacatagcctcgccctatggccgaccctgtttagtggtaatgtttgctttcgagtgacaagaggtcatgggttggaacatgggtaactcactctaataagaagtatttaataaatctatggaactttaaatatgaatttttggtgccagtccattctcaaaaccctctatttcaagctcaaaaccctctatttcaagaaaggcattcactactagttgtttggtgcaattttagtgacgtagcacattgtagatgagggaccatatgttggtttacttttttttagggcaattttaaaaaatatgggaaaaattattaaggttatg

SEQ ID NO: 117961 - DNA, 1108 bp, Cannabis sativa
attactaattaaaatataacatcaattggttactgttttctcaataataccataacaacttgttaatattatttgcgtacatagtaaccatttaaactaatgccgaaccctaaccgtacctaacttacatactgtaaatattagcaatcctttactaaactagaaagacaataatcatcactataactaaaaaataaaccattaataataatataatagtaactaattactaatatttagtaacatcactaattggttactaaactaggaaaaatcagaataaaaaaaaaaactggaatattacaataattacttaggaaacaaattaagaatatgcacccataaattaaacaggaaaaaaagacacatacagtaattgatatgggatcttttgggtgatatcctctatttggttgcagagaaaatgtgttttttttttgtttatcaaatcctcctccgttttggaaatcaagaagtttcaagttaatgatcaaggtgttggtgggctgcggcccgaaaatgtgatttaaggatgaatgggctattttcgcgcgtcgggtgtgctacggcccgaatgttccaagtcactatcaaggcttcgacccggtctggcccggcccgctttttcttccgggtctttggcccgacctttttgcttttttcttttttttttggtcggagcctatctgctcggttcagatattaattaaaaaaaaaaaaaaatctattttcttcatcttctctccgctcgtaatcttcttcatctaataataataataatgcttaaatttgtatatatgtatatgttagacaaaaaaaaatatattacttttgctaagaaattacatttagttttaaaatgattgtaatgtaatgtatataattcttttaaatgttagcttaaaaaagaaaaaaagaaagaaaaatttgggctgggtcaaaactgactcggttaaatcgacccgactaaaaaaacttaatgggttagggttgggctaagcatgcacttaagatagatgatgaattttcttgaatggagaaacccctcctccgttgatgtaattttattttctaatcaataaagtgatcataaaaaaaaaaaaaaaaa

SEQ ID NO: 117962 - DNA, 1778 bp, Cannabis sativa
aaaaaaaaagaaaggaaaaattgagaaattaaacacagaaaaactggcggcctctcttttgaatttaaagaggagactggagagagttctgtttgccgtagaagatgataattaggactccccaacagaagaggcctcggccttcggaaaccctagctccgaacagcgtatcaccggcggcacccggttccgatcgtcctctcattatctacgaggatcctccatcctcgtcgccgaagccccccacgaccacgaccacgaccacgaccacgaccatgactcctcctcccagccaatgctctgcacctatcaatgtcgccaattggttagggacatttatttttctccattgattccttcattctttttctccattgtaacttgctttggtttgcatttattacgtgcttaataacctgctctaggtcaaatcggatttccttgttgccttaagctctgcggagaaggaagctagcgattatcagtcaaaatttgaggcattaaatgagaagttccacaaccttggttcgtttgtttctttacaaacttagtattgctagctagaattgcgttgtaatttttgtgttagtgattttgcatacaaatgtttgttcagtttcatattatcatatacttggatattatcttttatgaatctccaattttttgaatattcttgtttcggtagtagtatgcgaatgtcctaagttgcagtaaatgttgcagaagcagagaagaataaatatgtggatcaaatcctatattcagagcaagaacttgctgctgcaaaaggacgtgaacaatcgctgcaagaacagcttttgaaggagatcgatgattctcaggaacgttataaacagcagctacagtcgtacaatgaacatgtggtatttaatttcgttttaatggctaaggaattttaatatgggtaacagcaatatcagtgatgatcatgtttttggtggaatttgttttagatttagtataagttacttaaaaaagtatgatggttatctattttgttgctgaaaatatgttttgatggtgaatttatttctccttccagacaccagactgtttggtttctcttgttcattcaagtttattgccacttcgtaatgtactcagctatatatatatatatttatacatatttataatgttgttccttatttaaaattcaggtaaagttccaaactgaaatgagccttcgcttgaaagcggagtctaaggcagctttggcagaggaggaagtaggtattttgaaggaaaaacttagtcatctttctgaaagtacagagagagagaaacaacgtcttggcagtgaacttgaacagctgaaaagagagtcaaaactttcactttctagaattaatgctgatgtgagttgtttttactcgtcaatttagtttgagatttcaaattgtctgtacaggaacattttttttggtaactgtatttctttgatttgtagcttgaaaggatggagtttaaagctaatagtgccaaggaagaatcagagctactgaaagagcagctagaacattcacagaatcaacttaaagaggtttgtgcattttatttttttcaatacttaatatatttttctcgtgaactatggttcttgtagagttttcaaaacacttttttgtaaaaagaaccccctcaaactatagccaccattgcaagtgtgtccatttgattgcattcctttaacttttataaatagtgttagagatattattacaatggaagataaaccaagatatatacaactc

SEQ ID NO: 117963 - DNA, 1468 bp, Cannabis sativa
attaaataatacaacttattatttaatgcaatacaatctttataccacctataccaaaggaatccttaagtaaaatattatactcaaaaactaacaacccaattcattttcactgtaaatctgaattgaaaattaagaaaactcttgttatactttaattatgcttgtacatattattttcttcttcataaaccaaactgaccctttttcccaattgagtatttcggtaaaactaacaaactcacattatttctttaccttagtcaatcaccatatatgtcagaacacttcaatgttgttaagtgatattatgattttcttattaatttgaaaagcctaataacaacttaaggccaaatatcaataccaagttgcgaataaaaaagtaaaggtgttatattacatcaaggttagtataaatatctattacaagtaatgtacgaaagccaaacaatgacatatatataacatatatccctgtccagtacctaataaatgccctttctcttaacccaaactcaaaagtgagttgcactcaaacaagcacttacatacaataatattccgttgccttttactattattattccaaagtcgtataatctttttgtttcatcttaattagggttataacttatatgtgctttttttttttttttaaaaaaaaagaaaaagaatcaaggtgagatcgatattaatcaatgtaaacacccattcttaatttaattcaatcattcagaatggattagaatctatcattgaaataataaattaataataatgagtaaaacccagagactaactttttgacatccttaatagcagtctcatcagatgttaataatttctgtacaaccttgactattgataattttgtaaccaaactaattaaaaatgatagaaaaggttgataattttgaagtgaataaatatatatgggtaataaattaaagatatatgagggaattgaatgagagtttaattaagtgatcgagtaaaatatagtttttaatttggtaggtagttgtactcttcatcctcatatcggtgcaacttaagaaacaaaacaaatgaagtctcctctaatctatattaatagctagctagttggttttcggcagttttacagttgagaagttcaaattacttgtggacccagaaaccttccatcccaaattaggtgacctagtgtcaaatcgccttatatattattattattacactttcacttcaataattaattaattaacattatttatttggtccaaactcactaaataacggccttactaacactatttgtccacacttcaagcacaaacaatatttttatattctactacacattcacacgaatatgcatgttttttcttcccttctttcaaagcccattgcgctattatattgggattattttataaatacacaaaaacaacaaaaaaagttacaaaaatacggtttcacggaa

SEQ ID NO: 117964 - DNA, 1768 bp, Cannabis sativa
gaaaccaataaagtattttattttctatttgacaattgaaattgcaattgttaaaaataataaatagcaaaattaaataaagaacaacaaaaacaattaacttgtatcaaataaataaatgagaaattagagattctaatatcttccactttatcattaattaatgcaattacaaagataattattctcactaagatgaaagacatgcaaaagtgttaaatattccagttaagaaatataaaactcgacctaatgcaaactctttatatttctatgagaaatttaaacaacatgaagcaataaagttaaccctaaatcacatagaccaatttgatactctcgttttaaactgaaatctatgtctattcaattttagcaaatccaaaatctcacttctcaaattttaattcaaatttataaatattatgtaaaagttacacaatcaattacataaacaataaacgcaaattgaataaattttagataaagaagaaaatagaaaaattatattattttataataaagcttcaagagattcaattaaaaattctaaatagaatttggtttatgttcatcactagaaaatctataaacatgaaattaacatcaactaaaagtaaaaagaaaaacaaaaaaaaaaaactcaaaatgatagattcaatctttatctaaagcactccaaaatgtcgtctgaccatcaaaagttgagtctccacactcaaaatcccaattaaaacctaattcctacatttttccaaagtgaaaagataaaaatagtcttcattagaagtttctcctaatatgtattttcaggacagttacgcggctgctccaaatacctctctgattgcacaactcctccaaaaacaatatttttctgttttttagcattctttgtcaagtcttccatctttttacaccaattccacttcaagtcctccttaatccatccgaacttgaaaacacatcaaaataaacgtaaacacgcacaaaataaacctaaacaaactgtacttctcctaaattaacaacctaaagtaagtcaaaaactcacttatcaaacttcttcaaatttaacatttactcgcttaaagataaattaaatactaaacaaaaaaaaaaataataatgatacatatgaatcaagttaacaacaacaaattatgcctcaaaattatgaatatctactcatatagtttcataaactcagcgatcacaacgatccaaattttcaaccgatttatcttttgacttcactctaatccaaacaaatacattctcaatcatgatcaataaataacttgaatttaaatcaatttatagttgttgagtatttattctcaaacaattaaattactatctcatatgtttgtattacttactattctccactaagtagacaacccatgctcaaaatttaaaagaaccttttaggctcataacaatggcttaagtatatgggtagataaaaaaagtcattggagctcaattatgctattaacattacaactacacagatcacacttgatatcactttataatccaattacaatgcccaaatcactatcctttctaagatcaagaagtatccatatgaatatttttattttcaactacactctcccaaacttatttttcaacacgcacacacacacacatatatatatatataaagagtgtagttactctttttttgtttactttcaaaattttctcaatctttttgaaaaatcgtatttttacaaatgccaataattataataaattt

SEQ ID NO: 117965 - DNA, 1223 bp, Cannabis sativa
  modified_base (1155)..(1181): a, c, t, g, unknown or other
tttcaccgttgtggcaaatcacaaattcaccactctctctgatttatttttgccaggtactcgatcttggaatgcttccttgatccaagcctgcttccctcccaacattgcagatgaaattcttcggatcaagcctttgcctgatgaggaggacgttgtgttctggcaggctaggaacgaaggagccttcactgtgaaaaatgcatattagctgtctcagaagcatcgttttcattaggaaaaggtgtcttggaagcaactttggaagctgaaacttcatccccggcatgccttgctgttgtggaaaatgatgagcggttgtcttggtcttaaaacaaatcttttctttcttcatgcgcatgacagaatatgtgttctttgtaactcgatgatggaatcagatgttcatatgttctgggattgcagtctcgctcgtgcgttgtggtttcagtgcccttggagttttcactctggtgcactccagttcgagaccttcacctggctctggagctttgctgaacttagattcttatactttgcagcctgtgtcactgaagaaatctggcacagtaggaatgacatgagtttcaacaatgttcccctcgattccaatgcttcctacttgagaattatgatgcattatgcagaattctattctttcaaggagaaagacagcatcagtgcccagcaggagcctgatccgtttccagaggtttttgatgccgttttcatgacagatgcctcagttttggaccaatgggcggggcttgcctttgttcaaattggagatgcagctgaggcttttacaggccaagactgttgtcatgttaagagtgtgttacaagctgagttggaggccattcttttggctttgaaggtggcttcgacaaaacggttctctaagatccaaatcatctcagacaatgccattgcaatcaaggctttaaaggtgcgggagttacattttgcttgaggatccttttcggtctttcgtcactgtgtggatttgtttaaataattttcttgtatttcttttaaggctgtttgtcgtgtggataactctgttgctgatgggcttgcctatttggctagagtaaacaatgtgcgttcttgtgtggttgttagggaggcagtactgttgggttttatgccctnnnnnnnnnnnnnnnnnnnnnnnnnnnatttacttattaatatagatgagaaataacatttaatgttgc

SEQ ID NO: 117966 - DNA, 1967 bp, Cannabis sativa
tatgacatattaaatactataaaaatacttaaaaaaatactatataaattggtcaaatttaaaagtactatatttatgtaaacaatttttaaaattccatagtgagtataattttctctaacatataccatccacgtccacaaatatctaatgggataatattaacaaaactgaggaaaaaaaaaaagggggacttacccttcttttgcgtcatttggaattcggattcttgcttttgtgaaatataatcttttagaagaaaaaaaaaacagaatcactttagtacaattttggaggatagctagtgggaagctaaatgatagtcctatggaagtcattgataaagttcccttgcttttcaataaagccaaaagaagaaaatataaagaaaaggagcacattttgggacccccaaaaggaaaaccttaatctttataagatgacttatgtagtacattatttatttcatttatttatatatatatatattatatgtgtgtggtaggctatgattattattattattgtctaatgaaatggtagaaggacaataatattatgatgtgaatattaggttgctctcaatgagatgataagatgatttgacaaccactacaacgtgtttatgggtgatgcctcaccgccttaaaatttcatagtacatgtaataagtgctttaatgtgtcacttttctctaattcaagctaataatacctttaatcaaatgacatgcatgtataaatatattatattctatatatttaacccaaaaaaaaaaaaacagaacatgcattgccaattcaccatccatcaaaccctataattgacttaaataattcatatatattataggaactatgcggtagttaagatttattttagtaatgtgtatgaggaaattccataaattatagtaaattattaatagtaaaaataaataaattacatattagagataacatgtttcttttctttttttttttcaaaaaaaaaaaaagacaaacaaacaaatttagagcacacatttttaaatagaatttttataccacatactaaaaatttttaaattcttttattgtgaggcaaatttttttctaaaaatactgtgtaagctttatactgtgacggttttaactgcagttatacgattattttttagttgttccattcttgttttaattgtttttttattgttttacgattgtttttataaaaagagtattttcataaaaaaaatctatgtgacagtaaaatagtaaaattgtaaacttttctccaaaatctaatatttttgtaaaaccaactttttaaatacactatttctatatgttgcaagtgatgacatatggtccatatcggcaatgtaaggtgttctacatgggttatgaattcaattacactcaaatgggattttttttacaagttaagataaagaaatttttacactaaaaatacaaaatacacactttattacatatatatcttcacacggtcaaaccaacatttatacttatcaactctattttattacacttttaccacttgcacacacactccatgcagccgtacacgtcattgattgatgacatatatcaatcataccttacatcatttccttctctttttctctttttttttttattattttcaatttctttttattttttttttaaaaataaaacctccatagctgaacttttctccttccaggatcccaacccgttttccctcttcaatctgttcttccatttttttcaactcacattcaccgatttacataaccgttttccctctctttcttttgctcttaatccatttataaatatggctattactcgttcttcatctactccttcctctgtgccaaaaaaaagttataaaatggggttgaaatctgtagctaataggaataagggcaaatgtcctgttgttcaagacgatggctccgattttgctcctcagttgtc

SEQ ID NO: 117967 - DNA, 2571 bp, Cannabis sativa
ttatcagaaaatcaattatttatttatttctttaaataaaaatttatttctttaaatagaaatatatttccttaaataaaaaatattcttataatccaaacttcccagaatactttataaaaataaatatataagattaaaatattaacttaattgaaaattataatctataaatacaagaattaccattagagctcaaactttaaaacatgaagatcaaaactaacctttcacgttaaactagcaactcaaagcaatactaaactagaaaaagatcaaagaacccatttttaactttcatagagtctaaacaaaaccataattcaactaagtatcccaaaaccttgctatggagttaaaaggaatcttagtcaatttatttttccttaggaaatatgagaatttattactttttatttccactttcttttgcaaacattgctattatctagtatttagaaaattatatcaaaaaagtttttttcattaaacttgctgtcccttaattttttttaaacaatatattaatatcaattattctataaaaaaaaatatcagctattatatactagtcaaacagtcagagttggagctccaacagcggtcaaaatgggttatccttgaaatttacaacacaaatttttgtaactgttgtgtgtttgaactttatagattaatttggttgactaattaagtcacaatgtaagtttttcttttctggtatagagaaaggccacgtcatacatttggtatcatcatatggtagggcattaataaaaccctttcctgggttctcttctcttagacaaaatagtataataagtgcaatgaatttgatatatattataactaatattattattatttattattaatataatattgtacatgaaggggtccaagtatggctagaaaaaacaacatattgctctgaaaattcataaacaaaagtttgagatatggaatcaatggatcgctttcaagcactctaaaaaaactatacaaactttggcttttgctcacttgcccccctacctatcttatttccatccttttaattttaatttaattccctttttttctttataattatataataataacaaatttattcttcttatcggtattattaatttattattcaagttgtgtacgtgtgtgttaagcactaaattttgcattatcatttgtataataaatatgtaattaatacctatttgttggcaacaaatttgccccctctttttttaatatgtttttgtccattgtacatttttcacatttgttaatcttttcattccttggttacttttctcaaccaaataagttgagaaatcaccatatgaatatgatcatatatagagattatattatatatatagctaacattaatttatgcatattgtaaatgtgggtacattgcatctttcctcttttattttgactcattccttatttctctaaaatacagaagagaacatacaaatttattaaaaaaatatataggatataatagctgctttattattttatataaatttttagagtaatgaataatgctcttttacatgttgaaaaatactatttattactttaaatttgttttattagtgttttttagtttaaaattatttttaatgtgtgtatatattatatatttttaaaaaataaatatattgaaagatagaatattaaagaaaggaatacatatgtaatatatgtaaaaatttattataaaataaataaagtaggattttaattaggtatttttcaaaaataaagaagaaagtctattatagtgctcttagaaggtagtttggataagagaatacaattaatttaccttgaagattatgattattgtgtacgtacgtggcttgaaagaaaataaaatcatataaaagagtatatatagtactatatagaaaaaatgaattaacttatcttacaagtttgacaaaaagggaaaaagaaagttgcactacaagccctatgttataatcattaatcaaacgaagctatgatataaatttaattattaaacaagtgcatgaactgtcctgtagcaaaccccagatgaagtaaatattgaaaacaaagaaaacccacttattggttgcttcattttctagcacacatatatgtatatagtaagctcaaaattacagcaaacaacatatgtctgtaattttttttaatcattgtatatattataattattttaagatattctataaaaattaaaaaaattcaaaataatttataatataaaaaataatgtttaaactgtttattttaggtataaaataaaacaaaatgtacaacaaactgtttaaacttatttttaacattttttttttaaattttatataaaattttaaataactacaacctacataatttttttaaaaaattaaactaaaaaattcaccaaaaagacacacaagttcatacttttaaaagggttcaacccataatattttcttacaatatatataatatggcggctaattaggattttttttctctgaactttgacatgtaccaaatattgccccctgaacttttaag

SEQ ID NO: 117968 - DNA, 2701 bp, Cannabis sativa
aattggtactttttccttcttgtttctgaatctgtgttttttatatgaaaccctttaatgggtttttcgtttattgtctggttcctgagaaaaatgtatagagaagggtatattaattcgtttgtcaacttaagctcaatttcccatttgagttagtttgagttaaagattctcgagcttttaatgctaacgctttttctttttcttcttttttttttttttacgaaactttttggtgggtaattgttcttgtttcctttttaagtttacatgagaaaactgttcagaaatggacagaaaatttcaactttattctctagtcaacttaagctcaatcatgagtctggttttgttggagttgatgattttctaaggtcttatgttgtttctttttgcttcagtgaagttatatttggataacttcgtgttatcatttctgtacgtgtccaagtctggagattcagctagattttgggtaagttactattacttatagttttgattatggaaatacctgttaatttattattggatttggatgaaaattggaaaaatatgtgtatgcatatatactatacatgttgatgttttggcattatggttgagctgagagtctgatttctgttatgttcgttaaaatgatgtaggatatatatttgttggccactgtagtgtatacactagcctaggccagaaaaatggtgggtttgaggtttccatggaagagttctgcggagaatcctgagctagtgattggaattttggggtgtgaagttgttggcctgatgtcaaaggtggttaatttatggcattgtttaagtgataaagagattcaaaggttgagagaacaaattgaagattcagttggggttaaaacacttgtatccgaggacgataattacctcattgaactagcactggaggagataattgagaattttgggtgtctttcaaagtcagtggtgaggcttagttggagatgcaaagaccctttatatcaccgtcttgaacagttctttaaggaccctcttcaaacttactttcaatggtttggtttggtgtatcgatggaagaaaatggagaagaaagtgaagaaaatggaaaagtttgttgctgttactatgcaattatcccaagagcaagatgttttggtggagcttgaacaaacactgcggagaatgcagaaaaattctcagttagatcgggtgaaattgctcgagcagcagcagaaagtgatgtggcagcgtcaagaagtcaaaaatttacgagggttgtctccatctgtgagaacttatgattacattgttaggcttttggcaagatctctctttacaattctagagaggctcaaacttgtctttggagtcattgaaatggcttctgcagaagggaaaaacaactgcgaacctagaaattctgattttcttcgagcccattccttttcagctcatttgcattcttctgttcatccatctgagactaatgtttgtgacttttcttcaggacctcctgtggggtcctttgcaaagcaaggggcaagtgtgggcaagaacagcctgaatgacttgttgcaacaagatcctcatcagtcgttgacacaacatataaagattcacaattcaaaatctaggaggcatcgaggatcttttagtggctgcatggttggaagagtttattctcctgtagttgaaaattgtaggcctccagttggtggttcgatgaggctgagccctacttatacgaaaactgttaacaatactaaaagtaaggtacctctctcttcaagtaacaacgtttatttgaaattagccatgttcaattccaagagtaaaatgttgaacctccgtgcttcaactcttggggaggctgctttggctcttcactatgcaaatgttatcattttgatagagaaactagtttcagcacctcatttgatcagtgccgacgcaagagatgacctgtacaatatgttgccgacaacagtaagagcttctttgagggctaagattaagttgtttgccaaaacaatgggttcatctgtctacagtcccgcccttgcagcagaatggaatatggcacttatacagatattggagtggttagctccacttgctcataacatgataaggtggcattctgagagaaatattgagaagcagcatgaggttgcaaaaacaaatgtgcttcttgtgttgaccctttaccatgctaattgtgcaaagacagaagctgcaatcacagagcttctgatcggtttgaattatatgtctaggatcagcggagttaatgagagagccattttgcattctgctggtaagctgcctcgcaaggagatcatcagggaacaggcctcatcatgatcaaatttccgaaatggcctcatcatgatcaaatttccgaaatgagaaaggtaattatcaagtcgagtccttgaagttatttcaaaaatttattttaagaagtctgttctttattattattattatattttctttattggtggggttgggggcgctgggtgatgggtgggttgggtttgcaacaaatagcatttataaattcttttaatacaaacattgctttcactctgaacaacaatacactttaatcctccggatctttgactttgacaattctgccttttttatccatttgtaaatttttcttttgccttggctctctttgtctttttttttttttt

SEQ ID NO: 117969 - DNA, 955 bp, Cannabis sativa
tttgtaatttaaaaaaaaaaattagaaagaagagtataaatctttccatttgaggaaggattcaaaatagtaggcccaaatggattgtaaatcattctacctctcctctctctcatacaatcctctatgccaaacaaatggattttctatcccaccacccctctccctccttccctctccatccacccatgtctccctccttccaaacacatcctaaggttaaagatggctaatttattttaaacttaaagcattagccctaggccgtagctccacaaaattgtcataatttgtttttttgaaatgaaaatattcatataatttaattgttgacattgacctattttcgaatgaatattaatatattaattccttcataatatgtgtcacaattgcgaaaataatgaccaataatacgtcaaacgattttaatattattttcattcaaatgtttagtattgcccaccgtttttattaactttaattcctatttaaatgtaagttgagttatataaagtcgaacatacctgaattgaaaaagaggcgatatatagttttgaaataatgtgttaatggagtaggtgagataaaggattggtaatgaaggcacaaatatctattaaaataaaatagaaaatcccctttcaaaaaataaattataattacttttaaacataagtttcttatcaatattttcaaaccatagcggttgacaatgtcttttcttttgtaaattaattttgccgatatatgactacactattatattaccccattttctattatatgaaatgaattccatcaaatatatatgttcagatattgataaaatttgcacaaagtcaaaggcatattattaagaacctagctatggcattaagtgtgtatatatagggtaattctacaatgcacccccttaaaagagatgtattagtgcacccttaacttgtttcgg

SEQ ID NO: 117970 - DNA, 1640 bp, Cannabis sativa
tatggagagagctccaagaagaactagaggaaggtcttcaagaatggcaggtggtggtgcagataagagatcaactcgaaggtggaaaaatgaagaggaaacctgtaatcacgggtaagttttagaaatttggatatataaatttatttttggctctttttttatttaaactttgatcaagaaagaaagaaagcagatatgaaaagattcattctgtgatcatatgaactatttggatatataaatttctatttgtcttcttttgtttttgattgtgaaaaaaaaactaattcaagatttattatataaaaatgaacttttaacaggagaaaattaaaagagttatactctaatctatgtgaactacaaaaacgtataattcttgaggaaaagaaaacatcaaatctaataaggatgggtgagactaaagattcacctccaccgtttttgcattgtttaaaggaagcgtttaaagggtgcaacaaaaaactgtgtcatatcatcaataagtgttccacgccaaggaatacacatttgattactaaggtgaggctccaataccttgatagagggcataatgacgtgaaagacaagtttagtattctatgtttaatgttccaaactacacctcctatgccaagatttgatgtaagaaccaacgattatcaagacaagttccgaagctttatgcttaaagcaaagcaaaatgggtttttcttcaaaaggtgtggactcaaatccataattgcttcgatgccagacctcaaagtcaaagaggtgaagcaaatcacaactctgtgtactgacttttcaatgagcatcgtaaagatagccttattgggaaaatcctataggaggagaatgagagataatttggattttaaggatatagaaccatcatctttcttcgttaggaacaccaaagaggtgcttgctatagtgaccgatgatattgcaggccgtaaaagggtactgatgaataatatggtcactaacagcaggacaataacaatggaagatcgactttactttacttttgctgttatggagaatacactccatatgccaagatttccaagtttccctaatgacccacaggacatgataagcgacctattacagggtttaggtagcttggttaaagatctgcagcagagcattacagatgttgaagcatttgttaaaagggatcagaaggagttttacacagcaatacaggcacagatgctgacacgcattcagaatatttggaacacaacacttaaggaattggcctttccagattattaactaaaggtatcctattatatatatatatatatgcacacatgagcacaaccattatatttatttcttaattaatacattattttttttgttttttcaggcagcatgcatataatagcacaacgggacatgttttttatattgactaataagatttgaggttactaattgttggaggcatttacatttacattgtcaacatagatatgtttttttagaacaaagtatacaatacataaatatctgtctgtctctctctctgtctctctctttctctcttttttctctccatatataaatatatatatattacataacatcacacaccaaataggctaaaaagcaagtccaca

SEQ ID NO: 117971 - DNA, 753 bp, Cannabis sativa
atatatatataagaaagaatcgtgactatcggagcctgatagtataagattctaaattaaagtaaaattttatgaatgaaaattttctaagcaattgtaattataagagaaatattaaaagtagcggtgtctaataccacttaacgttgttatattgatattattggtgcttaagtattattttatacaatttaatttaataactatgataaatatacttatataaccattattgcaaagcactatatttaaatattgtgctaattaaacaccactacctaaataaaaaagctcttgttataatacaatttatacatatatgtatatataacaagattaataactcatccacaaaataaataaatatatatttaggaaaattcatttaaattaatttaatcatgtctactcaaaacccaggtaaacggtaaaccaattcattaatgattttaacttcaagttgcgaccaactacaagagagaactagcaatttgaaaaatagacaaaaaaattgatttcgcacgtacatgaaaaaacacccaaataaatatatgcaatcgattaattattaaagcctaattaattattagttaattatatatgtctcaagtacgatgcatgaccatatactcgaaagaccagaaatcacataaatgactttataataaaaatatatggctcactatttttaatcacaagttgcttattttaggtagcttactatttaaatgagattttatctcaaaactaatt

SEQ ID NO: 117972 - DNA, 1134 bp, Cannabis sativa
aaaaaaaaaaaaaaaagagacaagacaatataaatgtaatttttaccgtgtgacaataaaattgtaaatatttgttcaaaacttagtagttttgtaaatttttctttttttttttatttaggtattaaaaataataaaaaaaatttaccgctaccctttagtaattttaacatgaacaatagccctaactaatctacacctacttttgtccatgcacatatttctctgatatggcaattagcaactgaaaggacactacggcagtaaaatggtaacggaatgaaattttgtctaaagacgacatttataacaattgcaagtgatttcaatggttgtaatatccttttaaataaaccctcaaaataaaaaaataaaaaaaaaccttttaaataaacaacaagtcctttttttcagtcaagcaaatcaatggttacaaacacagtctttcatgcaaagtcttgattatgatagtattttagattttataacaaattctccattacaaattacaatagttttttcctttttgatagaagcttttttctttttttttttaaaaaccaataaattgtaaaattaagttaggaaaaaagaaataaaaacataataaatttactgtatatacgaagaaaactaattcatcatacctaacgcacatgtagcaaacgaacatgatctatgagtagattttttaaattattattattttctaattcttgtaaaaagaaaaattagaagattgattaaattatttttaataatgtgagatttttaataataattattaatttttttaattcttgtaaaaataaaataataatataatgaatacttcaacaataaatttttgaaagggtctaccgatgaatgtactcttgttaattttggcatttaaaataatttttctaaaatttaaatttttttattgtactttatgttatagttatttaaaatattttataaattttattttaaaaaaatagaaaaatttaacatgcctcaaatagtttgttacaagttagactcttttatatgttatatgtgtgcagaattaaggaggcgtttggttgagaggaatgaaaatatagaaataagaatgggaatgagaataagaataggaatggaataaaattt

SEQ ID NO: 117973 - DNA, 4148 bp, Cannabis sativa
  modified_base (3764)..(3764): a, c, t, g, unknown or other
aaaaaaaaaagaaaataaataataattattattattatcaaaactcatgaaaagaagaagaagaagaaggtatgatgaaagtgatgaggatcgatcagaagatgttataaatatataaaatatcagaacatatgatgtaatgtttatgtttgtacgatgaaaaaaagaagaagaaaagaagaagaatatgtatatgtgaggtgatgatgattgatgagagaggtagtggagattcaagatctggtttttatagaattagagagagagagagagaatagtagatgaggattgaggaagagggtgtgtttgagatgcttatatatacacataaacgcactttaggggtttctattatcacccaagagtgcacgcaacttccctgcaatcttaattgtagatcgtgggcttttcttataaggattggattcaaagtttcatttgtttatttcttgttggtagttgtcaaaaactatgtgtaaaattaggttaaacaatttaaaagagtaggtgccatcaaaatatattaataatgtcaaatgtacaactatgcagtaaaaggaaatttatatgtcaccagttttagtacatcatacttttttttttggataaatttaattatactgaacacaatatagttaaaagtcttgtaaatataagttagactttttgatatataatagggcactagtttggaaagtatgagacacaagacacaaaaaaatatgagtttagacatgagattgcactacatgatacgaaaaatataggcttaagcataacacaatacgatacataagcatgaatagtctaatttgaaagcacaacatgataaaaaccttataatttgataacaataataaaaataatttgagtatttattagtaaatatttaaatttaatagtttatagtttttttatttaatttcttgtaaaagattattaaaaaattatataacattgaaactataaaaaaatatatagtctaataattttcttattaatcgtaaaaataaaatatggaaaagtagaaagcgtgaatttgagttcatataagaaaacgggttagtctaagtaaagcatgatatgaatttgaatctgaattcgaacacgacacaacttattttttatagcacaatacgataaaactcatatatttttatggtgaggtacacgacacgatccatatatttgctacacgacatgtacttacagcactatcgtgggattatggcttggtagctgctaaatttaatataaacaccacaaatcactaatacgtgagtaatgtaggacaaaacacacacactatttatatatatataaatttaattacactaaacacattgttgactgttgattactttgttgatgctgaaaagtggccaacaccagctcgctagattggggagatgaataatgagtttaagtacataatttatagaggcacacaaaatgtgtagtagttcactccctgtattggtaatggagttatgtcaactttgagtttttatttctcacaagaattataagaaaattgactaagtctgaaagctctaatagaaaaactagagatagatactctgaccttgtgggtacttttgtaaatatgaaaaatgagctaaaggagctctccttttataagaaaagagatcatattaaaataataataaaataatctaaaaaatatagaaaaatacatttaggctatttctaatcattgatgatgacctaacagtgaaattaacttcggatgttggtcgtcaattttcagagcttaaatcgtgtccgcaagactcgcttcgggtaaattgtagcttaaatttgtaactcctttaagggtaaaattagaagtcaataacttcaaaaattactattaaaatgtgagacatgacttgatagaacattaaagtagcttcgaaatgcaatttgaattgcatcaatcagataaatatagagagagttatgactgttttactgaaagttgttttaggcccaccacccaggttgacatgtgacgtcaacctggatgctaggtgagtaggaaaacatgccgaggttgtattttttgatgcctaagtgatatttgaacatcacttagccaatttctgtgttatagtaaagtcaattaccaatttttgaagatgctgctattttgcaaaaatgagagactcgaaacttttcaatatttgaataagtcactttgtcgaaaaagtgaaaatataaagttgtaaatttgactcttctgacttcatagctctcagctactttgaaaaattagacgaatagtcgaaacaaaattagaattagataagcagaacctagtgcaccaaggcataagtcaacttgggtgttgggtgctcttttcagagcttccgttatgtcgttttaacacttccaaggttcttgaatttgaggacgaggtctcctaccatgtttttgaccattttcaaagagaatgcttggagcagaatttgtatttgagagatcaaaacgagtgcaccaagttgattatcaatctaggcgctaagccgagcactaggtttgttggttttatgaaactaaatcaggcacgcaacagaaaaattcgtattatctgattatcattgtaccataacctaatgaatctctagatgtgtatatatattaaatctaaagataaaattatatgaaaagaatatatctcttaatgactatcagggtatccttaaaaattctcgttgtatttttttggttgattagaaacttataccgtagtcttccaaattgatccaccacacacatagaatagtgtgggctattagaataaagtgtataatttgttcttgttgaattctcaacacatgagtaagaacaattgagagaaaaatagtttcctctttctccactgtaaatttcaaaaattatatgttgaaaagcttattttgatttctcaaatcaggcttgtacgtatttactgaaaattcaaatcagggaacatcttaactaacttgaagtacctttattaatttttaaattcaaatatttaattaattcaattaattaacctaaaaagaaaaaaaaaatagggacaccctacactagggtagggcttaccatatcttatttaggaaaatgattgtcttgataacttttatctttttcctatttaattaatttaaaaaaattatttatttattaaaaaaataaatattcctatttcaccaaatcaaaatagatttttttgaacaacattatagaactctttatcccttctcttgataatgtttcaaagtggcaattcggggaccatagacttacaattctaagctctaataaactaaattatttattgagtttcatcgactaaataatctttacttattaattccatgattactccactataaatatagaattgaactcttagtaattatagaatttacttattgagtttgactgtagtgtccaattccaatgattagccctccatatgttggtttataattaattttggtcaaattatcgttttacctttcttattacttctttatcttttagtaccattaattaactagtggaagtatattttagatcttatctaaatttgtgcacaactttcgagtcccaaaattaacacttaaagagaatcaacatttaattcgttaggaaagtcaggatttcataattgtagattatgtccacatccatccacattattagattcccaaaataaaaattgtaagaattatcttctttgagaatctttaacgagtgaatcaaagaanctaataacatgaacatgagttcacaattactcgagatttaagctgatcttctattgatcatcgttatgatattaagtaggtattatagtaaacgacatgcacatgttggacagagacaattttattcatattgttccttgtcatatataatctctattatgtacaacacttttacttagatgtcatactacatcagtaattcaaaccttgcactgaaaaaaggcatcagtaaactgtactagcaaccattaattaaagatttcataactttaatatgttggtgactattttattcatagctaattggtcttagttctctgtacaattacaagtcacaacctcatatataaataagaaatatttcgatatttatatataaattat

SEQ ID NO: 117974 - DNA, 1334 bp, Cannabis sativa
gttaaaccaagaaatgccgttagataggaacttttaatatataaagatatatatatatatgattaattggtcagaccattcaataatgttttttttttaatgttcgatatataaaatattcacaaaattgaattatatatattttaaaagttaaaaggtggtctttggtaatatatttttaaaaatatattttataaaattgtttttactttttaattaaaaattaaaattttgaaattaaaaaaaaaaattattttcaatatttttttaaattatttttttttattaatagtttagaatctgatcagacttggacccaaactccactctaaccctggcactgaatctaactcctgactcggactcgaatccgactctggatctagacttaacttaaataaaatcaaaaaataaaaataaaaataaattttacacaacaaatttttattttctatttttaaaattgaaaaataaaaatttgaaaaatacaagtgagtataaaacctatttcttttcaaaaataaaatttttaataacaaaaattttactttaatttttgtaattaaaatattagaaaataaaaatattaacaaattgcacttaaagttttgcacatttgatcaaaatataaataagtagactactaatggatgattttggaactgcaatcagtttatctatatttaaatccttaattaaggtactagtagttaatttctaattgtattaatattggttcaatttttaacttaagacacaaatatgactacataatacatatccaataatatataattcataattaattatgtacgtatatattattaaactatataggatagtattgaattaattaaaggacaaaaatggagaattaattttctttttccattcgagcgcttgtttatacattatttttaagtataaagtagtcccacgagattacatctgtatgtatctgtatttttattttaatattttgaagtactaaagaagatctgttctgaatttaaaatatttaaaatttaaatcatatattaattacacgggttattaaagtaagagctgtaatttatataaattgatgacctcaaaagagaaatataatcttggattggaatgtccagaaaaccttctacagtctttgaaagtgatgaaattaagtctatattaccactcaaacactgactttaatgaatatattatatataagtatatagaatgcaatatcaattaaactaaagaataattagcttttttagtccctgtaattatgatactatactatgatgccccttaatttataagtgtagttaaaaatacccctaaaatat

SEQ ID NO: 117975 - DNA, 2112 bp, Cannabis sativa
  modified_base (326)..(346): a, c, t, g, unknown or other
  modified_base (2042)..(2063): a, c, t, g, unknown or other
actaatcagattgtaaagagttttattttgggcataaaacccaacatatatgtcaacctaggtgttggtaacagagcaaccttcgataatacggtcataactcactcaatattgatttcattagcgcaattcaacttgcattttaaagctatttcaagatatgtctcacactccaatcgtaatattgaagttatcaagaacaaattttattgtcaagggagttatgaattaattacagcttacctaaagtgggtcccgcggacgctgctcaagttctagaaattgacaaccaacctcctgagtcaatttcaccgttagatcatcannnnnnnnnnnnnnnnnnnnnaatgtattttttttttcatattttattattgttttattaggacctcattccttataaaaggagagctcttttagttcatttttacattcagaaaagtacccataaggttagagcatctctctctaatttctctctatagaaattagagctttcaaacttaactatttttcttgtaatcattctcgtgagaataaaaacttgaagtagacgcagcttcattagtgtcgcgacacagggagtgaactattataaattcttgtgtgtgctctctattttacttagttacttctaactttcatctcatctatacatacgagctagttggccagatttctaggtcaatattttggtactttcattgagagctacaactcaagaagtcacttacaagatggttgcaacacgatccacaagtgtggaaagacgcaaaaaaattggccagcagattgagggcacgctggtcacttgaactagtgatgggacaagacctccatctcatatgccaactagaggccacgaaactagctccacagcttgtcccccaaggccaccaacttccaatggtactgagattagtgaacaaattccacctagggaaccacgtgtggaactaaaagaccttaaggaagccaatcctcgatttgaacaacttagccaaataatggctgacctatttcaatagctgcgagactctctcgataaacaacatgaaaaatttcaaagttggttcatggagcaattgatgaacattgagaatcagcatgatgagtaggtacaacgaagagctaacctatctcaacagatcagagaagattatcgctctggttgcagaacaactccccttaggagtgtttctgaattagctggagaaattacccgtccgccatctggccacgtgggaacaagtactaaaggagaaacccttaatgtacgaaacaattctaccatgcccggtagttgtgcaaaccctcaccgtgcaacaggtgttgaggctcctcaaaaggaagtaaactttgagcaagattctgaatggaattaaggtcgggtgtgccaaccaatgggtcctccaactcactttgagcgaccatgtgctatagaatgacccaagtgatctccttcccaaggttctcctcattagtggaaggcaccagcctgtataggggaagggacctatcactaacaccgaaggggtaaacaaaggctttacttcaaaattggaggtcatgaaattttaagagtaagaactaatgagccgctttacactcgaaagtatttatgagataagagaggtgagttatgttgatacttcactcacggccccaatggccaacaatacgagtacttctctcgagtacatggagaagagttgaacttgagcaatcaatgcaactctctttgcacttatgatcctattaaagactatttcaaaggaaataaccactacaatgttttggatgacctctctcgcagcgcatcatcccaagaaaacctggacattgtgccaaaaaagtcttcggtggttccttcacgaccccgtggatagatgaaaatagccagacataagtcgacatgcgtttttgatcgacttggaagacagagagacctggacgacaccctaaccagaggacatatggtggaatcaggagcttctagaagtgaccccaatcgggtagcaaatgttgggttttatgccctnnnnnnnnnnnnnnnnnnnnnnatcagatttacttattaataatgatcagaaataacatttaaagttgcat

SEQ ID NO: 117976 - DNA, 2202 bp, Cannabis sativa
  modified_base (2084)..(2084): a, c, t, g, unknown or other
  modified_base (2132)..(2135): a, c, t, g, unknown or other
aacttcgggaggttttgaacgattttttcggttttctgaattttatgctcacccctaataagatgggttcacacatgtttgaatatgaaagttcaacatatttcgaaagctattaaatcacaattaggttttctttttacaagtataaaaacattaaatcaaatgaacaacgtatttacaagttttccttgtattaaaaactcattctaaccgggtagtgcttgggtcctaagaatcggataagataacattcactaagaaatcattcaaacatatcttttccaatttcgatttacaaattgaatagtgtaaactttaatgattccatacagaagttactcataaacttgattgcaatcaagaacaaagatctaagtcccgtagatctgaggagataagatcctctttcttccaacaagctaaactcccttctacaaatcagattgaactttcttcagacatcccagattgacattccttcttcaaccttgaagatctaatgaattacaacctgcaaagaaaccatgtaatatacaaagacgaatttcgcccaagcagatcaagaatctctagacgattctaacaaagacgaggagttggttagaaaaagctagctcagctttttatacctaacaaccctgaataacgaccaaactagcaaccaaaactagctccgccacactggcaagaagctaaacaacaaaaacaacaacctaaaaactaacctggcaaaaacaagatgagaacagatttaactgatgcaactaacagagtcttagatgcacaactaataaagtcagaacaatgcaacataacaatcaacagataaaccaacaataagcataattttccagagaaaacatgacacttacaatctcccccttgttatgatcaacgaaccaaagcagagagacaaaagtaacagaaggccaaaaggaaataataataaaaaaaaagagttcatacacaaagaactaaaccaacataacaatgatctaacgttctgttacctataagaactaagttcccattcgatgaaactagacactgagacttggtgaattgaacatcataattagcatcacacaaccgattgacactaatcaaatttgcttttagtcctttaacatatagaacttcaatcaatggaaatgcacttgagagattcaaatctccttgtcccatgatctgccatttattaccatcaccaaatgtcacaaacccttcttttgaattttgaaaattatgtagggattatctggacccagtcatatgtcgtgagtaaccactatcaaagtaccagtgattctccttcataaaagataatgaagtatgagctaccaagggaagattggcaaccttgggtttccatgtcttatatgaatcttgttgaaaagcaagagggaacttactagaagttgtttgatcatttatgatgttgatcagatatgttctaagtttatagcaactaggtctgatatgacttcttttgttacaaaagtgacaaataagaacaaaacgatctagttgtctggcagtatgttccacttttgaatatatttcctttttagctttcttctcaaatcaactaagatactgtcagactcatcttccttattcactgcagcagacacaaacttcacctttccatctgaagaggatgtgttagttccatcaatctacaagtcttgaccttgtttataaagcatcttatacccaattgaattcatatcaccatagggcttctgactcggaagggtttgattcaaggaaatagtccctgaaggtatgaaagacagagactgattggctctcacaagtttggcaatcaacttgtatatttcactatctttagatcattattgtcatttgcttcagcttctccttaagttcaatcttactgtcattaagagcattgttcacatcttgtagctctttaactcccttagccatgtagatctggtgagcaactatctcttcataggctttattttttttctacaacaactgaatctgaattagaaaaagactcatcaccatcaaatccctcagacatagctttgttggggattattttaccaggntctagatttactaccatgtatatggtttaacatcctaaatatgaattnnnnaaacaatggaatttaaacacatataaagttcaagaaaccttaaattgcttgcagcgaaattaaatga

SEQ ID NO: 117977 - DNA, 1736 bp, Cannabis sativa
tgtaacatttatttaatctcttttgttgatctttgtattatattgcaatagtgttgtaatgtcttgattttcttccattgtaataatatctctaacagctaaatcctgtaataagctctcattgtctctatatgtttgatatgaatatgaaatatgaatattgattatatattgttgtttttttatttatttttttaaaaagctaattaagaatttttctcgccgaattttgacatgtaccaaatcatgctctctgaatttttttggccattaaaaattccccttgaactactgagattgttagatttatggacttttatctaatttcattcaattttactgtttcagtaattgtctatgtactaaactatgctccctagattttgatatttaccgagtcatatctcttaaactttaatatgtactaaatcatgcctcctgaactttcatccatattataatttttttactaaaattagacaaaagtctttatctagcaatctcaataattctggggaaatttttaaaagcaaaaaaagttcaaagggtatcatttaatacatgtggaagttcaagaaaaaaaattttaattagactttttgaaatgatatgttgttgttttcacgatgttgaaatttattccttagaaaactattattaaccgtgtacatttattgttcgcaatttacatatgttgacagagaggagaggctaagatatagaatatagattgagactgattgagtcgtcacatacatgtatacagtaagtgaatcctttttttttctttttctttttgaaaatggaatataagtgaatctttatattgtatagtgtattatgtgatagtgtgacgaaaatggttgtccttttttttgaatatgtagttgttactcgtgagttagcataagtcactttcttaggttttgagggttttggttgatagttgagactgagagcctgcctggctagtgtaccacaatgattaagaaggtacgttccattttaatttatttctttttaattgatatttgatcatgacatctatcggttgatttagatttactatctccaatccaaaattggaaattatgggtttgattggtttgtgatttaaaaattgtgttttttaaaaatgtgttttggaaataaaaatttaaattttgtaagtgaaaatttgtttttaaatatgtgattggttgtagtgtgatttaatgtttttgagttttaaaaaagtgaatatatgattggttgagaatctcaaaataaaaaagtaagagaataattagagagtttttggattcaatgatttgaaaacacaaaaaatataaaaatggtgttttcattttttagcctaaaactcaaaatagtattcaaattttgtttttgaaaacactcaaccaatcaagaattcttatatggacaccattttattaagaccatctctaatcataattttattttagagaattttatacaaaatgctcaaaaatgacatatatatttagggcaagactatggtaggacctaacaaaaattttctaccggtaggaaatttttttgaccattgattttagatcatgtggttattatgatgtaaggtatatactcttactataagacatatacacaaacaataaagcaaggaatgcgagaaacttacaatgaagtgttgaaactgggggttctgttgtcgatcaaacaaaggaaaggtagattgacagtggtgaatgaag

SEQ ID NO: 117978 - DNA, 2178 bp, Cannabis sativa
  modified_base (768)..(775): a, c, t, g, unknown or other
ttgaaatgggttttatttacggcacaaagcccaacacacacctcattcattacggatcgaggcttgtattgttaccgggtcatgcctttcggactaaagaatgctggggcgacgtaccagggacttgtaaataagatgtttgctaaccaaattggctgcaacatggaggtatatgtcgacgagatgttaataaagaccaagaaggcaaaggctctaattcaggatctgggcaaaatgtttgccaccctccgcaagtatcaaatgaagttgaatccgttgaagtgcgtatttggtgtgtcctctaaaaaattcttaggattcatggtcaacgagagaggcatagaagcaaacccagaaaaaataaaggcattggtagacatggagtcacccaagaataggaaagaggtgcagtgtctaactgggacggctgcaaccttgagtaggtttatatcgaggtccaccgataagtgtctcccattcttcgataccctcaaggggaataaacaatttacttgggggaagattgtgaaaaggcttttgcaagtttgaaagaacatctgggaaatccacctttgttggctaaactggaaaagggcgagaagctgtacgtatatttgacaatttctgaacacgctctaagtgtcgacctcgtaagaggggaagggaagaaacaacaacctatgtactacattagtaagcgttttgtggatactgaaactcgttacccagaaattaagaagttggcttacgctcttattgtggcatcannnnnnnngaagccatactttcacgcacatgcgattgtggtgttgactaaccaccctttgagacaagtacagcacaagcccaaaacctcgcgacactttcttaaatggtctatagatttaagtcaattcaacatatcctacaccccgagagtgtctatcaacaggcaagtgatggcagattttgtagcagaatttacctatcgcccagacggtgaggaccaagggcatgaggttggtgaagagtcaaagagtgaagctaaagaagagttcatttgggaattgcatgtggacggagcctcgaaggatagtggggcaggggctggggttataatgacaacacttgggggaatctgaatgcattgtgaaataaggtttggttttaaggtcgagtatgaagcgatgctagctggattaagactcaccaaggaactgaaggtcacgcgtttaagaatttttagcgactcacagctggtggttctccaagtgaggggagaataccaagcgaaaggacctaagatggtagcatacttggccaaggttaggagctagctagaatggctgcaaaatttcacgattgtgcgaatctcaagggaaagcaatgccaatgttgatgcccttgataaacttagaatccgtaccagtaaaattcctagcccaaccaactatcaagtgtgacttggtgttgcgagtggaggatgaagcaccctcctggatgatgccatatattgagtacacccaagaggggaggctacccacagataagaaggaggctcgaagaatccaatataaagctgctaggtatgtcttgatagatagagttctatacaagagaggatactccatttcactcctgtgctgcataaaagaaagtgaagcacaatgagtgttgtctgatatacatgaaggagagtgcagtaaccacacaagaggatattcaatgtcaaggaaggtattaaaacaagggtactactggcctagcttggagagggatgtgatgtcattcgcaaagaaatgtgacaaatgccaaaggcatgccagctacagtaaacgtcccccggccgaactcacaaacatgactagcccgtggcctttcgccatgtggggaattgacctgattggggcctttccaacaggaagggccagagcgaagtatgcagtaatagccatagattattacaccaagtgggtagaggctgaggcactagtcagtatcactgtcaggcaagttgtgtccttcatcaacaaattcctgatatgtagatttggagttcctcacaagatcatcactaataatgggaccaagtttgaaggagacttgttgagttcatactgtgcggagaggggcattgagtggggattctcggtggtagtgcactgttgggttttatgccttaaataacactcatttcaa

SEQ ID NO: 117979 - DNA, 709 bp, Cannabis sativa
aaaaaaaaaaaaaaaaagttaccaactatatcagtctcaataaattatattccctagattatcttttatatacaaactcaggtgacaggtgatatatatatatatataaatatatatcgctacaaataaaattaattaagtatttagttcacatttcattcaaaaaaaagtatttggttcacatgatttaatttaataattattataaaatatcactagttatttatactttcaataaaaatatgaaaccaataaaattataactcaacaatacaagaactataataaaaattaaataatattacaactctattgcaaaattaacacatgtaaaatgaagaatagaagataaaaaggagaatcacaatatgaaagtaaataatacagagtaaataaattgcataatatttatagaatattaagaaaattataaaaaaaaatgtctagttgaaagttttaactagtattgatgatatagtacgacttcttaatagaggttccatctttttttttatgtataattaaactcgaaaatgttaatcaaatagtgtttatctaaaaaattaagaattaatattgtatatatatgcacactcaactttttacattatcaaattatacttcgtatacgatttgttaatattatccattaaaatataatttttatagttaattaattgggaaaaaaacaaaaaaatacaaaaaagga

SEQ ID NO: 117980 - DNA, 1029 bp, Cannabis sativa
tgtaaagggttttatttagggcacaaaacccaacactaacacacctagctagtgaatgtatgtccaagaagttggaagaaacttcctccaaccttggtttaattcctaaatgaactgtcgtagatctcccctccagacctgttcggagtggtgatgatgttgtgtctctgtttctagagaatcactactgacttcaaagtcagagctggacgaaaaaatgtctagggaatcgctggatgaagaactatctatctggagtgcaggctaatcttcaaaaaggagactaagaagattcgcatcgatccagtattcatcgtttaaaaaatacaaaactattttacatgaaattcaaatattttatgttttagtcactaatggcaatgccaaagtgataatagttttgacacaaatagaacaaaacataattaaagtgatatcgacatgaggttttcattttattcatgaaaatataccaatttcatgtatttaagaaccacataacattattttggcatcactttatagtgattaattcaggtttattatgattttttgtataatgggttatattgtattatataagaacattgtttagatagaattttgtattacattaattttaattcaattcaaatcatattattcaatacataaaaaatagtatgtattaacttgtatagtaatatttaacatataagttgtactgtggtaaactcaaggacagggtccgggtcagatttgggggtgggatctggatccagttttgaagtttgaggtatgattggatccaagatcggggtggggtccaggttgagattgggggccaaggttcgggattgaggtctcggtctagatttgggctcgaggttgaggttcattattaattaaggatcgaggtctcgttctaggtcaaggtcaatgtaatatcccgaaaaataaattgatattttaattggacatattttattaaatatgtggttgtatgggtattagagtaggattataatcctacttaaactaattatgagt

SEQ ID NO: 117981 - DNA, 2579 bp, Cannabis sativa
tcatcttgatctttgggtccatattcatgatcttgaaccaaggtatatgtctttaaggattgttaaagagattggaatttttatggggatatttcttgaacatatatgaataacttcactggagagggtgtgagtatatgcgagttcatatgttaatggatgtcaagaaactaatgaaaagaagattgaagatttggatgaatgataaaacttggttctgggctaattttaagtctaaaaatatgtctacattttgcttcatctgtggggtcatgggaattcagagaagttttgtgctaagattttttataaaccttttcatctactcgagaaatcttatggtctttacttgaaggtggctccaaagaaatctaaggggagtataggagccaattggttccagttaagggtcgtggtggggccatgttaggcaagtgattgaaacacagggggtacatttggcacaaatattgatcgtgggaaggaagctgatttttcagggtaatattataggaaaaaaagtcacccatgaaaggggaaaggaagttatttctaagaatcaagtgggctaaaataatagggatattattaaggaatttaaatttggaagtattttaaaaatgggtctttggttattgctgacccaaaaaagaggtgtcaaaataatgatatagttatcatgctaaatggtgttaatgggcctatttaatgtagaatgtgatgatatgaagtaggaagtagttgagggtattaatttgtcaaaaaatgagtttttggcgggttctgatgtccaagcttgttaagaattatgagtaatttaagttggaatattcgtggacttagttgtatagcccaatctaatttttctttgtgaaacactttttgagaaagaaataatggaggggataaaggcccaagtgggtttggaaagatgttttgttgttgaggcccaagggcacaatgagagtttggctttattgtggaaaagagagggtgatgtcgtatagcaaggctactctaaacatcaccttgatattatcgttcgtatggagggggagagagtggtatttaattaggatttacgttgaggcaatagatttcgacgacatacaaccagtgatctttttcaacctctgtgctttaaatctcaattatcgtggtgcttaatcagtgacatgaacaatcttgggagacatgatggaagaaaggagggttgaggtatctgagcaagcttatcgagggattttatgagtctatggttgattgtgggcttcaaaacttaatgattcagggatactctttcttttggaaaaaatgagaaaattataaatcttgggtggaggaacatctagataggctttggttacataagattggcttcatgtattctcttcagctaagctctataatatttagatttctactttcgaccagtgccccattttttggttccttctgtgatgaagatgtgggtggggaagaggtttttttggtttgaaaatacttggctctgggagcctatgttttaacagtttgttaagtcttgttggaaatcgatggggtggtgtagtcttcaggagaaaattaagggtgtggtgaggcattggctaagtggggtggagattttactataaatttcaagaagtgtatcagtaatcgtaaggctcaaattaaaaaatttaaatagagacaagatggtgattcagtgcaaaaagttaaagctagcgaggatgaattatgtgatcatttagctcaataggaggtattttggaagcagtgatcaaaatattgttggcttgagtgaggggataaaaataacaaacatgttcactctgtggctaatgaaaggaagcacacaaattttattcaaacattacaagggtcaaatagaggttaggtggattagggtactggtttggatgtacttatggttgactattgttatctcaaaattcacacaaatgaaatgcacctggcaagctgacacgtggtagggaaattgaaccctggacggagtattaaaccataatgtactgactaggcaagacaatgctaaattaaattgatgtataaatgctcaaagtgattatcacttgaatgagtttaagatctcacctcgcgcgagcgatgtgagcaggccacgtaacgcaaaaggctgatttaaggaattcgctaaagatattttaggacactcgagatagttagctttaaaaccctaagtcaaagaagaattccacaaggcattagatactcaacctggttggaatatcaagatacaaaggacaagataacatcaccaagactagaagagatgtatgaaatgagaccaatgcatttgcaatggctaatggtctcataaagcatagaaaaatgaggttttatgagagcaaggcaaaacttttggccagttctcgcatcacacatgaaggtcccaaatgtgtgaccaaggccatttccttggccagtggtcacatattgagaagaaaaagaaccccccatgcaattaagccttctctcgtggctagtggtcgcataagaagaagtgaaagattaaggcttcatgcgaccatggctccccc

SEQ ID NO: 117982 - DNA, 3167 bp, Cannabis sativa
ccgccatgtcaaaaaaatcgaaaccgaaaccgaccgccaaattcagtgatgacgtggtatcgaaaagtcgattacgatctggtcggtttgatggtcggtttcaattttttgatttttatgaacacccctagagaaaaatctcccactaccaccaccactatcacttactaattacacagaagtccaacctatttaccttttttttcttttgtttcttcaagtttaaaaattcaattcattcctttttaattttgattttgatatccattttccttttctatttgcattattttttctagttttatggagcatctccaatagtgtcgctcacctcttatatctttttcatgaataacaggtatttttatattatatataaatattcctaattattttagaatattattatgattttttacctattatgatagatcatattatatataatttaataaaataaataattatattttttaataattgtaaactttttttgaagcattaagaaatttttattaatcaagttcctttaataaagacgaaaaaatagcatgaatagaagtctcactaagagtacaactaattttagaataagagtactttacaagaaaatgagtcactttattcgcaaattatttaacaaaagtatgactttttagaatcatcaatcaagatgccatatggagaaaacatatgaactttgctattgatagcacgaacaacattaatgcactctgattccacttgcacattttgccaatcattcatttttatccagttgagagcttttttaattgctattgcttcagcgatatcagctctaacagaaccaagtttgcttactagaaaggcatctaagaagcttccaacatgatctcttgccacaaaaccccacccaaagctattttgatccgcaaaagttgctccatctacattaactttgatcataggatagttcaatttagtccagtgctcatcactctctaaagtagttggtaaactatttaagagagtccctcacatagattgagcacttcttttccattgctcaagagtgagtttagaaaataagatagctctatcagtgataattgaatattattccaaataaggtcattttgacatctccaaagtgcccaacacatcatggatataagctcgatatcagagcttatccaatttaaaaggccatgttgaaaccaagctgcaaaagtgccttcaatactgtctgcaatgctttcctccaacaattttgggcaaagttacagttgacaaagagatggagggcagattcaagtgccgagttccagagagaacaagtagtatcaccacgaacaacgtgtcttgatcttagttggaccttagtaggtaggaagttagagcaagctctccacaagaggtctttaacacgaggaggaagttgtaattgccataaagatttcaagaaatcataaagatggtcgagaccatcattaccttttaattgttgcagcaagtggtaagcgattttgacagtgtagacaccaacacgatccttgatccaataccagtgatcttctgaaacaaaataacataatttgagctgaaatatgaggtctccatctctttcgtcagaaaatcactcaaccgttcaatatcccaagctttggcatcagattgtagtagagaaacactctagttgagaagagcaagatgagttgagttaataaaaccatcatgttcaacaggaagctatggatcatttgaaatacttacagtagtgcctgatccaattagctgtctacaaccagtgaggagtagatttttagactcaaaaatactacgccaaataatacttaagttttcacccaaatcaacgttaaagaaagtagtattagggtaatagcgagccttaaaaatttgtccaacaaggttgttattgttaaccagaaggcgccaatcttgtttacgaagtaaggcaagattgaaatctctcaagtttctaaaacccatacctccttttgatttgtgtttgctgagattactccagcttttccaatgaattctcttagaattatcaccatttgtttgccaccaaaaatggctcataaaattttccatttgcttgcacgtcttattggaaagaagaaagagattcatggcgtaacttggaagaaatttgacaacagatttgatcatgacttcttttccagcatgggatagaaacttaccatcccaactttatattcgcttttgcatcttgtctttgggaaaactgaggacaacatttttatttctaccgaggttgcttgggaggcctaagtacttgctatcctctgaccttcaaaaattctcatggtaccacaaatgagagctttagttggatgatgatttttgccactagtttgaggagattctatctgaggtcacgtagatatggtggaggaggcacttatggtggcatggtctctatggaatgcttgaaatgccctattgtaggataataaagctgatacgtcatcagaagttgttgctagtgctaggtctactctctcctagtggaaacatgctcatgcccatcgcgttgagacgatgttggttcatcaggctattattagccactgtagtgaatattggtcgaaaccataaggtagcatgcttaattatttatgttgatcgtgcaatttaatgaattatctttttcattttttaaaaaaaaaacatttgaaagacataattcaatttaacacattcgtaataattattgggtatattattatatatgatattaatttagtcgttgtattatatatatgttatattttcttttattttataaaaatgtgtaatattattgataaaaagaagaactatatgtaatattcaataacaattaatcaaaaatggaggaaaatttggtgtgaaataaactatttgagtggaaggccaagtctttttctgctggaggtcgtgaggtgctcctcaagttaattattcaggcaatctcaatttatgctatgaatcttttccactttgttgtgcagttggttaaagaatttcatagacttaatttgtgccaaatttgggtggggaggtgatgatgataaaaaaaatacattggtgtagggttgggtgtgcagaaagtcatccaatctaattacaactgatcgatccaatcccaaccgatc

SEQ ID NO: 117983 - DNA, 2498 bp, Cannabis sativa
ctctctctctctctctatttatttttattttttgtaatacaatattttatccatttcatgagccctaaattgcattctaggtctagaatgcaagcaccgccacttttaataaacttaaaatacatgctgcttcagtattttttttttgttcctcataactgctggttctaatgattcattctatcgctcaaattaggcatgggatctttattatcatgtatttagacggatagataagcagcttcaaagtcttacaaccctcgacttgcaagtaagaagagtatatttctttgtatattctcacttttacttgtagctgcactaacttctttacatttgcataatagtctgtctcaccagagttgttagattgtcgcaatttggagcttgctgttccaggaacataccgggctggtaaaacttaattatatagttatcaagaccatattttgtactgcacataagtttactaaacaattaaattttgtatttcagactcaccggttgttacaattgcatcatttgcacctcaacttaatgtcataacgtctaaacagcggccaaggaaattgacaattcatgggagtgatggtgacgattatgcctttcttttaaagggtcacgaagatctacgccaagatgaacgagtcatgcaggtagtctcgtctatccgtttggtttttatcatgaattctcatgcacttccacgatatgctttcttttcaatttactgacatattgccctccagctttttggtttggtaaatacattactggagaattcaagaaaaacttcagagaaggatctttcaattcagcgatactctgtgattccgttgtctccaaatagtggattgattggctgggtcccaaattgtgacacccttcaccatcttattagggaatacagagaagctagaaaggtttgttgataagtttttcatggttcttgttgcttgaaaaatttaatttgcattcttgagcagtgtgcatggtttcatgtgttagattctgtgtgattaaactgcaattagcttgttgtgatgaatgcttgtttgattgcagatcacactgaatcaagagcataaatttatgttaagttttgcaccagattatgaccatttgccactcatagcaaaagtagaagtgtttgaatatgctcttcaaaatacagaaggaaatgaccttgcaagggtataaacattgaaccattcgtattcttttttatttactgtcctttcttgaatgttgtcttaaggttactggagctgcttttttgataggttctttggttgaaaagtcgtacttctgaagtatggcttgagagaagaacaaactatacgagaagtttagctgtcatgagcatggtaaatatttcttggtcttcttcaatcctatctttatttatttactatctaattcttgcatatgtagagctatattaaaatttctagcatgttctgatgttcttttcttcacttaaaatttgtattttagcttttggtacatatccttgaaaaagtaatgcagacaattggagtgatggaaagaataatggggtggaatacaaaattggagtgatggaaatgaaaatgctcttactttagtctttgggttttttgatacctaaggaaagaaaatgtatatttagtgaaataataattttctaaaatctattttttattttattgaatgaaaaaaaaaaatcaatagtgtgaaaacaattctgcaatttacaaaaattaaaattggcattttttttctcctaccaaacctgcactttttaaggaaaaaaaatcctttcactctccgtccctccacgaaacatagctttagtgttccgttctaacttttctattctgagtcaagacaatttataacttgtctactgtaatatttcatgtttgttttcatttcaggttggttaccttcttggcttaggtgatcgccacccaagtaatcttatgctgcaccgctataggtacatttcaattggtaaagaatgacatgggtatattaccttcaggctttgggaggtgtctaaattttctttattttacagtgggaagatcttgcatattgattttggggactgctttgaagcttctatgaatcgtgaaaaattccctgagaaggtcatcactgtgaaaaaatcctcctattttgcggttgttttgggtcttcacattgtttgctcactttgctattggtagtgcaggttcccttccgcttaacgagaatgcttgtgaaagcaatggaggtcagtgggcttgagggcaactttcgttctacttgtgaaaatgtgatgcaagttctacgaacacataaagatagtgttatggccatgatggaggtattcttgtaaaaaaatggcattctattcttttggctataatttcctaattaagagattgtggaggagtgttcattggatcacatccaatggatttggacccaacccaactgatccaatcaaattatttattggatattgaatt

SEQ ID NO: 117984 - DNA, 1690 bp, Cannabis sativa
ttctttatttggcaaagttgttagtgattgtaggaatttgttaagttctttgcgtaatgtttctttttattttgtaaaacgatcagtaaatgtagcggctcattcctttgagaaggcttctatatctcaccctgattgtctgttcaatttaaacattgttccaattgaattgttgcttaatttagcaacagagattttcgtttaataaaataactttcattattttcaaaaaaaaaaaaatcaaacaattttgattaatctaattaataaaataaaaagagtggctgacatatattccatattccatcttccaaattccaatacaagtaagcaaccacgtgtaattatttttacaattatttattgtgtggtttttttttcttaattaattattaaaatacttatttaattatctttcattgtctcaattaactttttcctctttggtggtcttgcttacgtgtcaactggctttaagttagataaagacaaaccgaagttaccaggatagtacctaaaaatctacatatcacaatcacacctctactcactttctcttttccttttgatttttattgatataacacttaaattaatttctttttctttaaatattaaaataaatagactaaaacccaacatgtgtcatattatgactagtgaatttttaaaatctaaccccgtttattagaagataagtgtaaaaaaggtgaatctcgtattacaatcttttaattaatttttgtgttagaaaataaatatgaaaatatttttttcaaaaaaaaaaaaaatttataatggtgttcattatagttacaacattaatcctataaattttttaaaattttttgaatagtttactgtagcaaaaataagtttgaacacgtgtagtaaattgaaatattaagaactctattttcgatactgtaaactattcgaattttttaaaaaatttacaaaattaatatagtaactataacaaatactgctattaaaaaaaaaaaagaaaattagcatataatttttaggcttaaaaattgattaagcaattgtaataagaggttataattagtattcatcaatatattaatagtatttaatatcatttaagaattcatatatcaagttctatataatttaatttaataatcatggtagaatattactagctattaacttcattagaatattaaggccgctaataacttatagcatgcccttattaaagattatgatgataaaattaaaaatgatatggtacatacatagagaattgataaaagcatgcgtgattccgaatataagcaggttagacttatgtttagggcttacatagcctaagagttcataaaaatctcctttttaaaattatatatattttttattaattttgaaaaatatcacattttactctaaataagagcctaaatatattttatttcctatggccgactaaattttaggatcggtctggctaaaaagcactactggtacctagcacttccttcagtgtcatatcatataattaagtattgagttccatataaattaagaaaataacttatatagaatattgctaaccaaaaagcattatttattggaagtgttaagtaccacggatgtctaataacaattagagatggaaattggatggttaatgtacgggaaatgcaatccccgcccccatccc

SEQ ID NO: 117985 - DNA, 1485 bp, Cannabis sativa
  modified_base (46)..(48): a, c, t, g, unknown or other
agaacataaataatacaactgagtcgaacctaaccatatcaggatnnngatctatagacctaagatcaaccaatgatattgacttaaaaagatataacggtaaatttataaaaatatatttccccttaccaacaaaaatagaatggcaaaatttttgatttttctcccatcatcaactagttacccatctactatatctgcttttgttaccccaaataattccccaaatttagccctaggtacatcaatactaatttcttcaccctccaacaattttggtaaacaaatcaacaaagcaactcacttgcaagattacatatgtaatatggtaaaaatttccacctttgcccattatccactactacaaattaggcttttagtgacactgtatagtgacacgcataaaagtgtgggtcactaaaaagttaggagtagtttttagtgacccacactaaatgactctaaatattcagtgtttatcacccgaaatgtgggttactaaaaatatggagtgtcattaaatgctaaaacccaaaatttataattttatgaaaataaaaaaactacggcctatagagacatgacacgcgtgtgagcaaaaccctttaccaacatgttatctgcgtcattaaagccacgtgattcacgtggctttagtgacgcgcataacgtgatggtaaatgatttactcacacacgtgtcgtgtcaccatataccctcttatttatttttcttttaaaaaaataatcagatacatattgagaaattttattattacccaatatacactaatacaataaataatatttattttttttatatatatatattaaatgtaggatatcatattttctttatttattttctgattaaatgtatcagatttttttattaaataaataatttaataataataaaataatatatatagcaaagtaagaaacttaaccacatctctttctctctcaccctctctttgcacctcattctttctctcctctgagtcttaattttgtttttctaaatcactcaaattttaacctcgatgaactgaaggttggcgtccatgaatggcctctcagctactcgacacctaatcccccgttgttggcccaagcggatcaccactgtcagctactgttggcccaaacggagatccattcgactccggccacatcatcggttcccccactcaccgtctctcctcctcgtcatctctccggttcgcctaggaagacgattcatcctctgacaatgattcaacccattcaacccggttccgggacccggaccgagacccaaacccggactcggacccggacccaaacccgaacccgaacctggaccgggacccaggacccaaacccgaacccggaccgagacccaaacacggaccctgatctttacacaatctattaatacatgtcaataccaaacaaagtattgtatttaataataatacaaaattaaaatggatataaaatt

SEQ ID NO: 117986 - DNA, 1307 bp, Cannabis sativa
  modified_base (27)..(28): a, c, t, g, unknown or other
actaatcagattgtaaagagttttatnnagggcataaaacccaacactagatggcttcattttcttcttgaaagcacttgtatcttccttgtggagaaaactaagggaaatgtctggacaaattctctagaaagaggtcccagattgcctctggttgagatatgtcaacctaggcacccataatggccttggggcatgcactaggcacccaggtggtgggaaacatctttgaaattggtttctatgatgctcaatcttctttttggtcaaaatttctccgcggattttagtttcgtcaaatttacacaggcataacttggtgaaacgaaattgattcccaagttgaaattgcaacctatatacccatagttttgtatgggctcctttgggatgttgttgatgaaatttcatgtccttgcatcttacctttatggatttgaggaattgtggtccaagtatgtccctaaaaacctaaactctagccacagggcgcccaaatcgactatattttaacctaggcccccattagggctcctgggtatccaggtgccatttcttatagactcatctccaaagtctgaaacttggctggggcatgtctctcatgtatcttaggacaatgaataaggatatttcccacaagaagttgataggaaccaaaactgatgtaggacgttgcatggggtgttaacctgtgcgcccaacactaatgctagacccaggttgagccttgagatgtccacttgacatccttagtttcatggttcatcattttcaggatgctaggacatttttgcttgaactttttcgaacaacagtagctagaaatgtctttattgaatcttaatgcttacctaggcgcccactagtgtcaaggataccatgataggatacaagagataaatcattattatcatgtaatatagatttaatctatgtaaatatgttgagatcttatagccagcccaaaatatctcttggaaactcagcacgcaggccggtgaggtcaatatggacatgctggagaaggtagtcacctcatggtagctctgacttattcttgcccttacttgcaccacatagcacctgtgagtcacaaggacttagtaagaaaagataataatcatataggttattattcaaatattatcatttatacacaatcagaatcaaaccatcacgcattattctaatataaaatccaaatcagtactggtatctgccatgaataagcatcagtatacagatatctggtaatacaaaactattgtaccaataatatgaatcatattcatttaatattataa

SEQ ID NO: 117987 - DNA, 2151 bp, Cannabis sativa
  modified_base (1280)..(1292): a, c, t, g, unknown or other
  modified_base (2093)..(2105): a, c, t, g, unknown or other
aaataacatatatatataaaaaaaaagaatataagaggtgaagtgtcttctttgtgtggtgcatgtggtggttgaattcacaatataaattaaacaagtaaaaaaagtgattaattatttttaatcaattaaccacttttggatttagtaaaacctaaacaagaatggcatgaaacaataagagtattattattatataatatattacaacaataatctaaaattagttgtgattttagtaagagtttgttcatgtgggtccaatctagggtttcttagaacaaaccaattaagcaaagcacatgtgatctttgtccactacttcacatcacccatatgtatccaactaggttttggccctacctaatatatacctaccaatatatatatatatagctttcaatgattttatgactaaacaaaactatattatatgcttcttttcacatcacaaattacctttgtctagtttaaatataaagccaaattttggtactaaaacaatatctttgtagtaaaagtatggccatgaaagtttgtgcactaaaactctcaagtagtttgtggtttaaaaatgttatctttttacactttttttatgtactattattctctaaacattgaaaaagaaaaatgcatgtataatgccatatactttaaatggtttttgtgcatgaaattacccttactaactagtatgtcaaaatttgtattaaagacatgacccaaaaaaatggcatttaactattcttgagtgctttcttgatatatttttaataataaaaagtagtgaaaacactattaaagcgagttcggaaagtaatggtgtaattagatttgtgtataatttgagcaattacacaattttgcacttttatttgattatataattactgtaattgaaggcaattgggagtttcaattacagttttcaatactcatagctcctataaaaattgaatgtaattatactgtataattactaaaaaaatttattttaaatattaattattaaaaaatattattttcttgtgtaatcactaactattttatcaaacatgatactaccagtaacaattcatattaatactaccttaataattacacaattaattccaaatatacccttaataatttttattttcttataaatcatcttgattttccttgtgttaaaggcacacataacatgataattttattattgttaagcacatgtcatgtgacaatgtcacaacatatacatgtctagttggctttgtattattattattattatnnnnnnnnnnnnnattattattagtagtagtagtaaatagtaagataattatatatatatttttttatttttactttttgacttaatttaatggttgttatatagatttgggttacgaattagaatgctcaatttatcaatttattatgtgagttgctatatacatttatgtaaatattaaaaaaattactttaaaatataaaaataaaaaaactccactttattatagagaaatgacatggaaagactctctattgatattgcagcaagaagtgttagttttgaacctactcaattagtgtattatgtttttaacattagagaaattataacttattttttatattacataaaaacttttaaataatttataatactacaaatatataccgctaaatatttaattctattttaaagactataactcattctaaattttttaaaaacaaataatatatctactataattatagtaaacacaataatataacaaaaaaatattgaattattttgatgaaagataaaatgtcacccttctttagaactttcttggcaaaaggtggctaaaaatatattacaaaattctacaattcacttctttaaaagcgatccatcgatgcacttctatctgttttggtattcgatgatcatgtatgttatagttatttatgacattttataaaattttaagaaatttaaaaatatttaacatgttgaaaacaaagttcaaacaatgtgttgtacgcatgactattttgtttcatacgcgtgtaaaatagactgtttgagcattattttctatattgtaaattannnnnnnnnnnnnaaaattttataaaatatcttaatataacatacacaaatataaaaaa

SEQ ID NO: 117988 - DNA, 3629 bp, Cannabis sativa
atgcaatgtaccaagcaaaaatcaacatttaatggaattgtagtatctgaccttactaggtgttgaagtgttgtacacatcaaaagctaacaggaaataaaactaagatattgttaaaagaaaaaaatctaactcattattgaaaacaagaaacctacgtcaaatgcaaataaaatgttacagggaaataaactaaagataaagaaccaaaccgagcatcggacctgacactaatagtttaatacaaccaacctacaatcaaaccaaaccagtgcctaaaatgataatgccaagaatcaaaccttatactgagaaaccaacgaaattaaagtactttttggagctacttctgcattgttcagaaagaaaaaaataaaataaaaaaattggagctgcacttataaaaataagttgcctacataccctttacagggatcaagctccatgtagttctagagcctgcaaaacaaataagttgttagaaaaatatttcataaacacaaaataaaaattgtaagagaaagttattagtaaaaataataatggatctataataatttctttgctgtgtaaaaaactttaaagaaaataaacaaaaaataatcatacaaaattggcagataagtattaaaaaaaatccgttgttttaatcataacaaattcaccccattttgatttcaaattgaataacataaattaaagcacttaatatatattgaaaaaataaatatatcaatctgcagtattatttaatgtggtattttttttacaaaataaaaaatgtatataattatgttaaaatggaagaaacgtggtcttttttagaaaaaaagaaaaaaaaaattgtttgacaaaaaacaaattgaaacattcaaaatctcacccatggaagtacgaaaaaggataatcctgcattcttcttttaacagattgatcctccatttttaaataaagcttactgaaccttttggcctaagaaaattgtttatcacatatgtcgtaaacataaatgaaatgtgataactaaattttgttcaagtaatgataaagccaatacaaactgaacaagtcctaaaaaaatgattgtaagtaaagttacttcaatttataccactctcatcgtaccattgtggcattgttaattaattaataataataataattacaatacaaaacttaaaaataaataacttttaaatcactgatgcagttatcaagatatatataattggtttaaagaaaaatacacaaatttcaactatagaccaaaaccatctagaacagagaatacacatatttcaactatagacaaaaagtaaatatactttcaaacaaaaccatccaaaagaagagagaatacacaaatgtttgatatatcactaccaaacgaacttctatcagcaagtctaaaactccaccgagacaagtgcagtataaaaaccaatcagtttgaaccaaagctaggacaccatcaaacaaataaaaaaactcattcagagaaatcaaaatcaagcccaccagcaaaagtatcagcaataagatatatccctagtgtaaatcaacagttgaaagtgctctaataagatataccaattcacaatggctgatcattagaaacttgaatcttaaaaaacctgcccacaatgttgtttctagtccaaacaagttagttatttagaagaagattcgagaaactcaagatggaattcataccccaaggtcgtgtatagaaatcataaatacagacagcccttaagtaattataatagaccttgaatattaatacaacatcccctccaaagttttaagtgatttttttaaataaatccaaagtaatcaagttgatgttcaggaaagttgaaagcctgaaaagatcaaacaaaatgcaaatgttgcgaaggagcatgcatacaattgagcaaggaaaattaaatatgaaacgaaacaaatagtttacacctttttcacaatccagggtcagcaacccacaatatactccttcatcatctaaggagaaagaatataccaaaaacaccaaaacaatagtaccggaaacacatggaaacaattgaatacttaaaatacaacgagagaaaggagaggcaaatgcaagagcagaaatgctatgtaaaacccagaaagatatctctaagtcaaatgcaagagtggaaatactaagaaaatgtaaaaccaaaaacctcacaaaaatctaatagaaactcttgaaaatagtagaaaactaaggacaactaaataagaatttgaaagaaatcattttaattgtcatgatcacctagaaaaaaaaaattaatacaaaaaccctaaaagagagcgagaatcagtgtaaacaaactttgagtagtataataggggcctggagtagctgaaggtgtatgtaccaacaagtgtgttctaaaaagggtgagagtataaaaaaaagtgtcccaaaaagtgtgtgttaaagtgtactatatatacaagtgtggtgtaaaataaatgtcactaaaataaaagatttgagtgcttacaataaaagaatcacattttaaattagtcatttatctttataagtttcctatcgtaaaataagtaagtaaatatcaatctaatttaacaaatttacatgaaaggcattattaatactaatctaagatttcctaaatatttttaagcaactaaaaacaggggaagcatgaattacttatgtcaacaataaatcataacccaagatttatttcagcaattctaacagttcgcccagtaaaaaaagaggattgcaacatgacaacaattgcagcctaaaaaaccagtcagtcaaagctagaacaccatcaaaattatgaactaaaactcatacatataaatatgcaccttcccaagtgtaaatcagtagttgtaatatctgaccttacatcgaaaaatagtagtacacaatcagcagttgtaatgctctgcatacatcaaaagttacaggaaataaactaaatatattaatccaaatcaaatttctgacctcatactgagaataaccaaccaaccatccatccaaccaaactttgttcaaaaattaggtgttgtcatgttctgcacaaatgaaatgttacggagaataaaccaaagacattgatccagctaaggccattaaacgaccgctcagtgataaagaacagaaaatctgacctcacgctgagacaaaaaacttacaatcaagccaaactagtgtctagttcctactaatgagttaattcataaaatcgagattctaacaaaacaagttcacaatgttgttgcaagttcacaaagtttttaatcggagaaccctagaaaaatctctaaaactgatggatgcttaaggtatagcattatatgaaaagtagtttaagaaaatgttaggcctaataatatcaaacaaaaagaatatggtatgaaacagcatattaagtagtgcatacatcagtaagagatatgtaatggaaactactccttcacaatccaaccacaccaaatagaaaatatagcagagccttcaactcttttcctgatctttaagaaataacatagaaactagaaagggaagtaaaaaaaaaaaaaaaaaaccataaagggaagtaaccattaaaaaaaaaaaa

SEQ ID NO: 117989 - DNA, 1223 bp, Cannabis sativa
  modified_base (1183)..(1197): a, c, t, g, unknown or other
aacagtacgaactccatacaaaacagtatgaatcccagacacaattggacataatttgtcactacagaaaatactggttcttccagttgtaaaggaaaagacgtgactgaaggtccaagaaagtctcggttgacttcaaatgacaaaaggattattaagccaactcgattagatgatgttagtagaagtcagaatcctttttcaggtaatcttcccactgatcccgaaacacaaattctacaaaaattttcaaaaaggcctgctcctcatcccaatgacgagggaatcattatttctcgcatgcccaacattgggccttcggctgagcaaatgattaaagtgccccatgaaaacgtttgcaagtctcgtaccccccataggcatcctgagcccactcccctcccctagcccattactaataatattgggtatattgctgaggatcttatggcccctattcaagtggacaagtatgagcccctccccaacttatttcatgacccagctgacctttcagaatagatccacggtgtcactggaccgagaaaaagaaaagtcagtctgggatttataccctcttattactatccaaaagaaagtgataaccttattttcaaaaagaaccttaagattccttctttaccccccttctcccctaaccagagtaacttcaagcttggtagtggtgcttcttcttcactgtaaaaaaaaaaggataaaaagagaaagaagaggactaataacgaagattaaaagagatcgaagaataagggagctggttcaaaatcaggtaatgacattgcaaaaaatttggaagtggaacttagtcaattggtggaagttcaagtgaatgttgatccaaattttctcatgggcgaggaggcagcccttacgaagccctccacttcccaatgagaatcctatagggaacttttgggctcttgcgagatccccggcaacccaagagatctttgcttaggaaaacaagtacaaacctgattgtatttcttgatggaaactaaagtgagggagttggtaatggttgatttggctaggaaattgggctgcgatggcagttcttttcttcccacttgtggtattgcgggtggtttctattttatatggaaagatgagattaaatgtcaagtttggaaagtggagaattgttggaaatattttaccnnnnnnnnnnnnnnntaccatgtatgtttcattaacatcct

SEQ ID NO: 117990 - DNA, 1326 bp, Cannabis sativa
tcaatagtgctataccaataaatatgaagaccctttaatcttagtttcaagtccaaattatgtacattgtgatttatggggttattattattaatgcatgcagctaagggacttagatatggaaaaaagagaccctcgaacagttgtggcagtcatacttggaggaggagccggtactcggcttttccccctcacaaagcgccgtgccaagcctgcggtaagtcttgtactgtttttccttaattatggtttcactatatcccaaggtattgaaattcactactaatattattattgcaggttcccattggaggatcatacagactgatcgatgtcccaatgagcaactgcattaacagtggaatcagcaaagtttatatccttactcagttcaattcagcttcactcaacaggcatctcacccgagcttacaactttggcaatggaagctttggagatggttttgttgaggtacacaattattcagatcatataccatcatgtattttggaaagcttcactaactatacatctttgttatatggtcaggctctagcggcgactcaaactccaggagaggcgggtaagaagtggttccaaggtactgcagatgcagtaaggcagtttcattggctgtttgaggtattcaagctcagaacttttaggacttgactagctcagaagccttctgaattcgctaacatattcgactctgtttgctttaggatgctagaagtaaagatattgaggatgttctaattctatctggagatcatctatacagaatggactacatggactttgttcaagtaagccaaaatattcgagtttgatttgcgtgaataagccaaatctgagcgcaagtacttctcttgttttgcagaatcataggcagagtggagcagacataactctttcttgtcttccaatggatgataggtagattgtctatcaccattgaactaacatttcattcaggtttctaatcatagttgatcatttctggtatctaataggaatatgaatagataggatacttggtagctttcatatattctaaattagatatgtaaatgatttagcagagagcaatgcacagtttgttttttttacaaactcattttgattttcttatctttcgtatagccgagcctcggactttggcctgatgaagatagataataaaggaagagtcctctcattcagtgaaaagcctaaaggagaagagctgaagagaatggtaatactcagaattatgataccaaaataaaatttgaatttatgtatgaatttaagtacttgactgctaatgctaaattcagtaaa

SEQ ID NO: 117991 - DNA, 1294 bp, Cannabis sativa
attctcaaaactcaacgacgatgatgaaacgtttagagtttcatactcaaaactctgcgacggcaacggagatgacgccactttaatgcttcccagccaatcaagtgaaccgggattaaggttagaattaggaagtggggtttcgaaattggagtagaaaaatctactaacgaatagaacagtgaccaaaaagaacgctacagccgccaaacaaagctccgcaagactcagtcgctttaaaattcttgaatgtattatgttgatgttgttgttggactctggcgctgattctacaggattactgtttttcctcattctgtttcgatcacgtaaaggaaccttttctttttctttttttggtggaaaggaatgtggcttcacagatagggtgtcatgccattaatggctgaaaacaagtttatgcatttgttacttgtgagagtttttatttattttttattattatttggttttgtgtaggtagtctttttttttaagaaataaaaataaaaatttaaaattcataaaaaaattaatgagatttttaaaaaaatctcatctagtattagaatgtttaaccattctatttgaatattaataaaaaaataagaagaaatgtggtgacattccttctaaaccaatcaagtcaacttgtggattactaaattccaaagtccaaataggaaatattatgtgctattcccatgtctgtctcaccatgttaactactattaattaactctatataacttccgttaaatatcaaataaggaaagtaaattatcattattactactttccttttctattttttttaagtctagctacgattagtgtatacttttaattataaaaaacattctttactttctatttttttttttttttttgataaatttaataacattagattataaaaaaaaaattctattgaccaataaaatcattcaaaaaaaaattcctttttccaaacgattatacttatttggttgaaagattcatggcttataatttctgcttgtatccataactttcattggaatggatgccaattttatcttatgacacgcttatgcatgattaccagggtcctattttcttgtcatcacgattcacgatcatccaaatatttgaaaaatattatatgtgaaaaaaaaaagaaaacaaaagaggaaactgtactaaaagaagaaattaggaaatgatagtacttatttttaaacggatattaggaaaataaaatgatttttaagggataacaatagatattttcctattgtaaaaaaaaaaaaaa

SEQ ID NO: 117992 - DNA, 1550 bp, Cannabis sativa
gttaaatggttttagtaacttttcttttctttctcagcgtttaaatgttggtgtcaagctgtttggcaatatagcacggacttcccttcacactcacctcttgatggtgatgtcatgtgagatcaatcatttgttgatggcactatcatagttattattttatattgatagtcgtaggtatttttttgatgctctttggatatataattttagatcaaattatgtttaatatgctatctattttttactgcaggtcatttttgaattctgcttttgagcttttactgaaagtttgggcatcttcacgagatctgaaggttttaaatttgtttcttcctcccccacttttttgtttttttgttttctttcattcttaacccttcatactctcatattataaccctcaggaaactcatttgctgccctttccattccctttcgaaaactagaattctgccatgttttaaatgtgtcaaaagtgcatatgagtttttattttcctgattatgttatgtgatgatcatgttttctatgaaattcatgtgaagtttaagatggaaacaacatgatttattttattatggtgaatggcttaaaattttgtgattgtgagtttacaatctacaaataatgtttgaaaagtgataactatgtacagacttattttatgttttagcataatgccctgttcaatcatagtttcatgtttcaaactgttaactaattttcagtatgccctatttttgtggtatgtagtgattaaatttgtatttatttcagattcgactatcatcagttgatgctctgggccagatggtaggtttgatcaccagaacgcaattgaaggcagctttacccagacttgtgcctacaatattggaattgttagtgatttttattacaatgcctcaaaaactgtatgcaattgtcatgctgtactattcgtgtgtctttctgttaaattttatataattgtttgaattggagcttatgtaggtggtcttaccctttaactaacgttgatacgtcattgatgtcatgctctacatgcatggagaattaatatttacggtgcagttttctgtgttctcaggtacaaaaaagaccaagatattgctctacttgccacatctagtcttcacagtctcttaagtgccactttgttgtccgaaagtggtcctcctttgcttgattttgaggtgattgcattttgtttttttgcttgttttcttcaccaaggtccactgtttttctgtataaaagtagtacattttggaaacattgagtattttagcttccaaaaaaaaaaaagaaaatagattgggtataaaagtaaacattttgaaaatattgggtattttaaccactatttacatgcaaacaataacttcttatgaaattgaatgtgttttttgttggggccaacacatgttattcatttatgagtgtagaaaatagtgattcgaattgtgtgtagatttcatagaataatacatatttatatacagagttaggagactaaatatctactaaatatctactaaatatct

SEQ ID NO: 117993 - DNA, 2580 bp, Cannabis sativa
gtcaaaattacaaaaatacccttagtacaccaacgggatcttaaaatgcaatttatcagtatagtttcacatattaaattatatcataacattattccacattaatacataattaaactagttagggttgctaatctaattgcttaaccttagggtattacatgaatactcatgagtcatacaaatctactaatgatcattgttgtagtatgaataactcttttatgataaacgacacgttgataaaagatgttagttcatatcaatctagtcatgaataatcaaattatacatagtacctttactaagtgtctatccacatatgtgatctaaatcaaatcacacgcactagagtatgggcttagtaaacgtacgtggtaattccatattaaaggttttgtactttagtacactaccgacttattttattcatattgtatgattttaattcttttgtacttccttacaagatcatacctactctatatgaatatatagttttcatatacatgtattagttatatttctataattaacatattcatttatcgtatacttgtatttcatatattttttaatatattatccaataaatacttgcttttagggcataaaccctaacacatatttctatagtctagatgataataaagtgtttgtttcaacaaatacaaccttcttagaacatgactatatgaataactataaactacatagcaaagtagttatagaagaactaatgacaggtaagatttcatctccaccttcttcatcagttaatgataaatcaaccagagaaactacaattcttgaaaaagaaaatctggtgcaacgtcataatgggaggattgtaagacaacatgtgcgctatgaattagaggcacacactcttgtatcaaatacataaaaggatgatctattgactttttaaagaagcaatggaagaccctgaagttgataaatggaataatgtcatggatcaagaaatggaatcattgcattccaataaagtcaaggatattgtagatttacttgaagatgtaaagctcattggatgtaaatagatctacaagaataaaagagatacagatggaaaagtggtgacttataaagtaaggcttgttgccaaaggctacacttaaaggggaggtattgattatgaagatatattttctccaatagtcatgtttaattccatccacatactcttgtccatagttgccatctatgattataaaatctgacaaatagacgtcaagatgacctttttgaatggtaatattgatgaaaccatatatatggaataaccaaaagggtataaaaagaaggatcaagagcaaaaggtgtgcaagttgttgaaatacatatatagattaaaacaagcatcaagatcttggaacttaacctttaataaaactattaaaacatatagattcgaacaaaatattggcgaatcacgtgtttataaatacatcaaaagaaaggttgtgattttcttagttctttacattgatgatatcttactcattgggaatgatgtaggaacattatcaaatgtaaagaaatggttggctgacaaattctaaataaaaaatttgggagaagcgagctatgttctgggcattaaaatcctaagagataggaagaacaagctcttgatactttcttaagcaaattatattgataaagtacttgaaaggttctccatgcaaaattccaataagggtcaattggtgaccagacatggaatcactctttgccaagattaatgttgtaaggcacctcaagagaaagagcacataagaaagtatccttatgcatcttctgtagggagcttaatgtatgctatattatgtactacacctgacacatgttatgcgataggcattgtcagtcattaccagtcaaatctaagtttggaacattggattgcggtgaagtatattcttaagtatcttaagagaacgagagactatatactagtatattcaggtaataaccttaaacttaatggatacattgattctgattttcaatcgacaaagatagtagaaaatctacttctagatcagtgttcactcttggtggtggtgtagttttttggaggagcattaagtaatccagctgttgacacgattttttgtcaactgatccaagaagatcgtaaaaaaatagaggaatgcgctgattagactttgacaaagtaaaactgcaaaaagtaaataagacaccaagatttatagtagttcaccccatgttgtgatagtaatgggactacgtctactgtatattttattgatttggtccgagacactagagttatgtttttaagagtgtgttgacaataatacaaaaaaaaaaaaaattgggcaaaatctatgtcaaaacttatgaacataggctcatgggagactaacaattcataatttcaacaataaatgcggtggtgaccaatattcttgggaacaatgataaaaagaagccaagaaaagacaatggtctcttatccctggtggaatcttctataggtggtggtaaccaatattttaactttttagctattttagctaaaagaataga

SEQ ID NO: 117994 - DNA, 2876 bp, Cannabis sativa
tcttttttcctcaacttatcactatactataattaatcagctcaaaagaaaagtgtttaaaattttacataatgaagaatggagagtaataaaaaaaaactttgattatgtcaacattgaagtcgaatgattcatcttgtatagatttttggctctcaaattttccaatggattattagatagtttagtcctcaatagacacaggcttcctatatgtgttgtttgcttgttcaagaccccaagaatgacttactctaatgttttttttctttttttcttttttttttggctgaaagtgacttactctaatgttaatatcgataatgttttcgtatattttttcatttgtttacagataatgttccattgatcatgcttcctctccaaagaaacccacttacttggttggagacttcatttggggatgcttatcttttgatgttgcttctagaaatcttgatccagtactaacactagtcaatccaagtaggttctttgacatgctgtgcagtctatctcttcaatatacattaacaggtttagacatgcagttcaacatacctcaggaacttctttcacctttggtgtttcgttttagcttacgtcattcagtcggtcccagctgcagcccttcttccctcttccctattttggaggctataatatacataatctgtttttttttttctttattattattattatcaactctaatacattgtgaggaaaacccaattaggaaaaacaggattgcaatcaatgaaaacagagtttcaaaatatacaacaaacgactaataagaaaaaagcatcaaaaatggtgggggaagaataatgtcaaagtcttgcttgcattgccaatatctttgtgtatatccaattttttatgcattacatgacactgacaacagctagctagactttatatagatgacctcgaaataaaaggtatgtagtaattggaaataaataaggtacaaaatgaacacaaaatcaagagcacatcaacatcaacatcacttacttacacatatgaacctttagagtattttctttttgtgtaatcgctgataatcaaattcagagtttaatgcaaccgaaaattctctcagaacagcaaatcaaagacttctcaaaatttcaactttcaatgcatttgaaccctctacaaacccacaaccaaatcccaaacagaactgcacaaacaaacaaatccagcaacaacaccacccaaacatgcttcctccatacctgtttagccttttggcgatcacccacgtaaggagaaacactcttttgcatagacacgccaccattatcatcaaacacatccactgtgttctccaaacttgaatctcttccaagatctccattggtctcccctgacagtctctttttcttcttcttcaaaccctttaagggtttcaccccaagcaaaggtgtaaacccaaaactttgacctctagcggaagaatccaagctgggattttgactaacactcgataaactaggcgttggactcaccaagtccaagtccaagtccaacaccctaactgcccttaaaatcgaattgaattccgcttgagagttgaaattgtcagagctgcgtttcgatctggcgtcttcgaaaccggatttaatacggttcaagaaccatagggtctccgattgatcgaggttttgatcagaaatggcgaaatagacaaaagggtcttcgatcaagaagatgtagtttctttttctaacggtatgagagaacatggagtgaaatggaggacatttctggatgcattgacgagccaagtcttcgagatcgacctctttggtgaactcggcaagaattgtggtctttctagcaatgcaagcgtagtagatgagatctggattcgtaatcattgatgccaaatttcaaagacaagaacaaattgaagaaacacagtcaagatattcaaatcgaatctcgaatcggggatttacgagcttgaatttgaaccccaccctacgagtcacatcaattattggaatcgattcagacgatatcgatttgggattcagaacgaaatcttggaatattttgaatcttttaagcacatatcagaatctttggttttctgtattgagatttctgttcgggcagatcatcctgaatagggtttgaaatggtgggaagaagattggtacaaagaattttgaagagctggatttggtacataatctgtttctgtagttcttaaactcttttatatttaacgaaaaataatcaaaggaatatgtgctgccattgccaatctaaaactcgtataaaattccaatcaatatactttgttaaaaaaatctaccaatgtaattattttaaaaaaattaacttaatttaatattaaaaagtcactcttaatattaattttttttttttcacattgttatgtgttaaattaaataattattttaattccttttttttttttgaaaaaaaacttgtgcttcattggataagcgattgagtacaaagcaagcaagttacaaagaagatagagaaccattctaaataactcatcatctaattcaagacctaacttagcaactttatgagccaacatattagactctctatgaacatgagctatagttaagtttggactgaaagataacaaattcttaacactaattaaaatgtcatttaatatactattattttaattacaagaggtatgtttatcaactatagatttacagtcggttataaagcacatccacatgaagtatttgagcccactggatagcttgaaaaatggccttagcttctgctaggggtgttcatcaaaccgcccgcaccacaccgcactgcaaaaaaaatgcagtttaaaattctttgcggtg

SEQ ID NO: 117995 - DNA, 2001 bp, Cannabis sativa
actttattgaattaaaattttacaaaataataaaaattataataaagataaaggttttggcaatttaaaatttttgattaagaatcttttgttagatgcttaattatatatggaactaccaacacaaacacatggatctgttggaacataattaactaaattaactaaattaactaatttgattttttctttctttgaaataaaatcatttctattatgttactaattattgattttattggaccttgttcttaattctctcaactaattagaatttttcaaaaaatatattcaattacattcgttttgactacaatgaacatcgtttattttttctctaacataaataatactatgatttttctatatataatgaatttagttttataatcaatataattttaatggaactattactgtatgttttgtgtacaaaattaattaaaataagaattataacttgtgattttttttttgtttctatatttctcccacatagaaatgatagtgttattttatgggtttgatagattttaaatatctacttaattttatacatccatatacacatattttttcaaagtaaataaaaaattaaatgtttagatggttattttattttaaatcgaaacattaatagtaacactgaacttatggaaagtttacggattaaattttttacatgttatattagtctattataaatatttttttagtgctaaagagtaaaaactatagatataattataaaagaaattaaagccaatgttaaatatctagtcatagcgacaatgcctaaaaacataatcaagttattttggtatgtgtaaatagaaattgaagtaatgcattacaagataaaaaaaacatttttttaatgttattaacattaaaataatattatttaaatgttatatttaataatattttaaaatgtaatcttatagtttgtaatttttacataacaacacattttatatcattgttattatattgtactaatattttgttaatgttatttttgtgtgttttattttaatactttttaaatgaaaatttcatattttataaggtctatcaattggcccaataatgtaaatattaaccaaaatataccatgtgtcccaataaaaattattttaagaacaaataataacaataataataataataaataaataaaaaagtttcatatatcaaaataataataataataacaataattattttagatttccgatttaaatttatttttaacaaatcatatttattttaaattaattattagggaaaaaaattagaataatctagactgttcacgtgtctattaaactaacagaagttaatggataccaacagaagtttaaaataatgaagttttgagtattaatgccgcaatttttaaaaattggatacttgttagcaacaaaactaacaaaataagcatttatgctgcaaattttccgtcaaaatatgtcaaattcattaaggacatggaaaattatagtagagttgaatttgggtgtaacctaaccattcatccaataccaatgatttgtgcctagaatgcggtttgacttggggtggcttccctttcattatttcgataatcacataattttacacgtttgtttggccatatataatatataattagaagtaattgaagagtgttaattataaattatttttcacataatgtatattaaccatataattaatatttttaagtgagactgctcagaggaatttttattaatttttttttatattttatttataattttacagtgtaaaatttttaattacaaaaatacgtttgtaaggttttaattacaaaaatatactttgttaaaaaaaaaaaaaaactaaaaaacaagaaatcaatctcacgacaattataaataaacgataaaacaatacaaaacaactagaaaaacaatctaatgacaattataatacaactataaataaaaaaaaaaaaaaaaaaaacgatttatt

SEQ ID NO: 117996 - DNA, 1111 bp, Cannabis sativa
atgactataatggtgtataaaggttcaaaatgacagaaattcaaagctaccttcaaatcttaaatgtatggccatattagaatgaaaaaaagaaaaacaaaaaggaggcaatgttaacatactggttcagctcctgtcttccattgcatgctagaaacaccagatggggaaaaaactctgccagctaatgcagcagcatcactaacattactagaatcaagtgagcctgttccatcagcctttgtaggcaagaacatcctattacttataggggaaacaagaggttgcaccatgccactgctcccaactctctcatcacctcccaaaatgtttctcttggtcatatcagatgggacaacaccaagggtgctactaccaggatttacattaccagaattaatagggatgctagatgaaggctggcttgaaagactgcctctaccaatgccccttccaagtccagtgtctgtaagagatggagatgatctgcgaccaggaaagcttcctatttcttcttcctttacagatgtagataaacttacaggagaagatatagtagccccagcactctcagtaaccctaacagaacttgaaccttgcaggtttggagaaccaagcgaaacaccagccagattatgagttggaatattcacaggtgcagaagctgtatgagtatgacttccagctggagtggttgcagttgaagaacttatcacactacttttgggaggcggagtttttgcgactgtatcaacagcactctcctgggaagttggctcttcaactggttcttggacagaagtagtttgctgatgagtggaagatacagtggcctacaaaagaattaacattaacaagtaattaaaacagtatcaagtgaaatgaaaggcgggaaaaaaaactataccattttaagtggaaaaaaaatacaaaaatacaaccccaatttagtgcattttaaaacaatcaaaattaccaatgttagatattcttctagacagtattttttttcttgcacaaatgaccaaggacactaaaattatatggttaccgaatttaacaatcaataacagcaacaaaaagtagatagagaaagagagagataagcgag

SEQ ID NO: 117997 - DNA, 1236 bp, Cannabis sativa
tcaccaacaacatgggctaacacagcaaagaactatccaatcaacccaagttttaataaaaccaataaaacttaatgtaagcccaaataaaagtctaacagagtggtgttggagcttcaacataaaagaacatgccttgtttaggtgttcctttcaagtattgcagaatttgataaacaggattaaggtgtggttgtcgatgactataaagatattggctgagcttattgactgaaaagcttatatcaggctttgagatggtcaggtatgtgagcttccctgttagacttttgtatagatttggattaggtataagctgtcctaagtctttgctgagttttgtgttaggttccatcggtgtggagacaatttagcacctaagtagcctgagtcttgcaaaagttgaatggtgaatggtcaatgcgtgactgaaattcctttgtcacaacgacctatttcaagacctagaaaaaattgtaagtcaccaagatctttgagtttaaattaagcatcaagagaagctttaaatgttgttagttcatgcaagttattagtggcaattataatgttatcaacataaatgagctaggctaagaatacacctaatttatgtctgatgaataaagagtagtcttatttggaatgataaaacccttgatgtagaagtgtgatgctcaatttggcataccattgccttaaagcctattttatccatatagacttttctagttaacaaacaacattaggtgggatcacttcttttggagtgtacccttgaggtagtttaatgaaaacatcttcatttaaccatggagaaaagtattgtttatattcatgtgatgaaggttctaatttttgatggcagcaagagctaaaagtaattctaatgtgttgaatttgacttcaggggcacatgaattaaaataatatatgccttgttgttggttgtagcttttagcaaccagtcttgatttgtatctttcgattgtcccatctaggttatatttcattttgtatgcccattttacaaccaatggtgtgttggtcgggtgggagagaaataactatttatgtattgttagcctccaaggcctttatttttgtgtccatggcatttagccattttggattttttttttttttttttatggcttgtttgtacgtatgaggtaggttctgtgtttgagttgttgcaagaatggcaaccctaaagtggggagaaagtttatggtaaga

SEQ ID NO: 117998 - DNA, 1083 bp, Cannabis sativa
ctagaaccaaacctatttatttttcaattttatcatgatgtggatatcgatcgagtaatggaaggcagtccgtggacatttgatagagttccactaatctttgaaagagttaaaccaggagaaaacccgagaagagtagagcttaatcatctgacttttttggttcagcatcatgagatggtgtctggcttcaaatcggaaagagtggttcgtgatgtggcaaattacataggggagttcgttgaatcggacccaaataattttatcggggtatggagggactatttgcgggttcgaaccaagattaacatcacacggcctttggaaaaaacgatgaaacttgaacgaaagaacgggcttttctgtcatgttcagtttaaatatgaaggtttgcctacattttgctttatctgtggcgtattgggtcactcggagaaattttgcgataagctatttgacacaccagcacatcttttgaccaaggaatacaacctggagctgaaagcagtccccagaaggaagcattacacaaccagttcgaagtggttaaagtcaggagtggctctgaaatcaacaccggcgacaacaaacattaccacggcggaaggcagacaagcagtatcaccgttgattactcccacaaatttagcaaatcacattaaggagccagtatcttcatcttctcctagtcaacagccgaaaactggggtgatggacaaaaattatgggattgtggatagtaagatatcggcccatggagagacagctggagtgatgagtcactcaattaacaagtcaaatcttgctgaggaatcttctcctgatgaggtggcaaagaaaaatagtctcttgattatggatttaaagagaaggaagacaactttagaaaaagtgattgggccggttgtgggccaatttgaagcaatagtcatagaggaaaatgacatttcaaaaaacttgaatggggcggaatctgctggacagacccgccaggaattatgaatgttctaagctggatttgccgtgggcttgggaaccgatggactgttcaattccttgaggagattgtatctcaaaagaaac

SEQ ID NO: 117999 - DNA, 795 bp, Cannabis sativa
tttttttgaaaaaaatatccaatgcacttcaaacacattaacactttcttgtttttaaggaacaaaattattaggaagattatttccaaatgttctaaatatctacaatacttgcatattattgaaattattatagacaagatcaagtgacaaatccatgttagatttaattgaggaaggtatataatcgtgtatacaaatatgagaaatttagataaagtatttaaaattatttatattttttaatttgtgaaaaataatatattattttcacgccgccaaaatataatataatgtgttaacaacttaaaaacaacctttaacatttatttttaaaataacaaaaagccaattgtccgtatgtttataaaaataaaataatagggaaagaaataactatagatctacacaaatgtaagataccaaagaatagagagatggtcatctactttctctctagtgtgtgtcccatttcacttcgtgtccatttagtgttcgtcctagttttacttatattttcactttctctcatttgttcctgtgtgtgttagtctgatcttccagtgttgggttttgttggctggtgttgtgctttttctcttgtcttggtgtgtgtgtctgtaatgcttggtgtcttgtaatcttgttgtttcgttcgtatttgggtggtttcttttggtatttactgtggttggtaagattcggtttggtgtgtttgtttttgtctgtcacaagattttctttgttctctttgtcttgtatttatggagtcaatcattgtttccaactcccctc

SEQ ID NO: 118000 - DNA, 4895 bp, Cannabis sativa
  modified_base (671)..(673): a, c, t, g, unknown or other
  modified_base (861)..(861): a, c, t, g, unknown or other
aaggaagatgaagaagaggggtttataggaagatgaaaaagaggaactaataaaataattaaatcaaactaattatgggcctttatatgtcaacctacacgtgtagaatgggcctacacgtgtgggctatattttaagatacaaaattgatttcttaatttttttcacaaataagatttattatttattctaccaataaataataattaattaattctcattaatctcttatttcacaagaattaaaatgaatattattttctcataatatatttctctctttaatgttatttaagaataatattatatttaactaataatatagtttaatctaataaaactaaatagttaaatactattatttatataattcataattaccattattaatcaaaacaataatttcacaaattactattttttccttaagaaattacttcccatagaaattaattctcactcaaaatttattcatcaaataagaccatccctgtacattgttgtgtagaggtgactcggggactattgacctatattttaaagctccaataaacccaagattactatcaatctcatcaacataataatttggtttattaattctattattattccactataaatatagaattgtactctttgacaatataaaattatatttacagaattcnnncttgtagtccattgatataatcaacataagtagctagccctccaattattagttcataattagagttggtcatactgttttatccatctaattatctcttgattccatacataccattaattcaatgcgaatagttaatctataacttattatagttttggatcaaactattagcaatttcacaattnatactataagagaactaatattcgatccattaaaaaagcttggattctactattgtataatattttcccagccactcatgttattaagctcccaaaatagaagttacaagactcatcctctctgagaaactttaacgagtgaatcaaagaactcaatgaatacaaacagtagttcatgtatacttaagatttaggctggtctactaatgatcaacattgtgatatgataaactctttttatggtaaacaataagttaataaagatgtttattatatattagtccagtcatgcataatctaattatacacagtacatttactacatgtccatctatatatgtgattcgaatcaaaatcacacaccctagaagtatagtgtatagtaaatcgtacttagcagttccatattaaagattctcagaactttaatataccactgacttgttttattcacatcgtataatcttgattctcttgtacattcttacaagattataccttctccatatgaataagaaatttttaggtatttaataattatactcttataattaatatatcatatatcttataattatatttcttataatatctaataaattatccattaattacttgcttttagggtataaatctcaacaatctcccacttgcactaaaagtaagtgcaactcattctataactcttatagatgctctatcgcatttgactattctggttaagtcatatgaacgagaccatcgacataatgtagcaccaaatctcgaggaccaccacattatcattaaattaatatatagaattaaattctagtgttcaaaattaagttttgaaactgattaatctagaatcctctattagtcatatctatttattctattaattaagaaaattaataaactcaaaagatcccataactaatcaagtcagatacttacaatgaatgttttcatttcacatccttatccgtctttatcacttgtcataactaagcgattctcttatttaagatttataattaataagaatatttatttctcatttctcaaacgatactataatatatccttcaaattaattatttctcataatcttaaattctaataactctttcaaatatattcaccttttgaatggtattttagatacactcccagcatatatataatactcttacttaattagatagttccttatttatccaccgtctttgatcattttaattaagaatgttcttaatttatgatttaaaaattattacttgtttaatcttattatacaagtatccataaatttcaatagtgaaacaattatgacattcaaaatttgtatctatctcatattttgaatatttatttatttcaaattatttatccaatacttaataacatcccctaatttccaattagtaattattaattatagatatctatcactttattttctaagaatatctgatatctaataattactaatttttattattgaattcaatctcatcgaaattcaaaatctaaatataataacttaaatatccatcttatgaagtcaatgaccaagtcatccttctctttatggacgtttaattgaactttatcatgtactattttattgattactctaatcaatagcattttaataaggttaaagtttctcacttattaaaatttaatattcaatatcatttttatgtattgaataattcaataagactattaatgcatgattattgaataatcatagttcggctgtttgaaattagaaagtgttaactttctcattaatttatttcttattagaccatgatgttccatatgtcaaaacatttactaatttaaattagttggatattcaaacttttccttggtataccatgtatttcattaaatctcattcattgaaaagggtttagttttattggaaatcatgatttgatatagaaacagtaattgttgctaagaaaaacaatctagttttctcgaaatcatcttctattttaatgagtagtatactctcactaaatatttattacttctgaatttaattgatggttttgactattaaaatttaattttgactcttcaaaattatcctcatttaaattgtcatctttattgagatttatctgtatgaactctttcaatcaattattctcaatctcgatgtagtccaaccacatccattaaaactcttttaatttatttaaatcataactcatatcgatttaaatagttagttacaaactattacacttaatagattcaattattgaatgtttaaatatgagttcatttcaattagacaacctaattgaatgaatatgtttctattaatgattccttaatgaatcattgattatacatgattggaatgaaattctatatccatgtttatgtttgaatagtaatttaacactttcaattaaatctcatttaatctttaagtttattcatatagaattaaaattattttttaactcatcttaaatttaactgtaaaaaaacattgataagtaactattaaaaatagttatttattatttattatttagtcaaaataaataattaatatattaaaatttgattttagaattatactacgagcattgaagtgtttagctgacttttcacacttaagattgaacattaaataaattttattgaaaaaacataaagtgttcgaaataaaattatttaaataaaacaaactttaaatgtgcaactaaaatttagaacaataaaactaaacaaattttcttcaaaattttaaactaaagttgacttcttcattgttctttcaaaatcatcttccatcacgaactttatagaagtcccactttttgaatcatcttcgtcgtctgttcacaaatctacaagaaagagagaaaacaatatcagtagtttagaataattcaatacaccattatttaataacataggaagaaaaataaatcatatttaccttcctctctagcttcgtaactctgacaaaatgttcatcttattaggatgagcatttctctcataggtcaattggtcatgagcgacaacgtacttattgcgtactgccttccaaatgtcacagacatagactaagcactcataccgatctcttatgtcttcattaaatgaagtcaacaagataaacctagcacgattattatcatttttccataggttataagctctcccgactacgtaactcgaatgttcacacatttctttctagtgtgtttcaacaatgacaaggtgaaatagattttctctttgcaagagaagttctatttcaattctccattcgaattagaagttaccatcaaacttatttacatagcaatatgatatgtgtcaatattgaattgttgttccatttttatttgttattagactggaataaaagataaataacgtggggaataagcaatatgatataaatacaacataagtaccataaataaaaaataaatatcaagtttagaatttaaatatgatgcatgagcacacttagaaaaacaacataaaataaatttagaaattccacgataagattattcaaagattaaagttccatcttagagtcagtcaagttaatatcgaataatctaccagacttattcttgtctttattaattgtaactaaaataaatcttattttccttacaaaataaagtattgtttatttggtcaagttatgtcccctagtgtcaaaggcaaggacatgactttgtgagtgtaacctattatttcaaattccatgacttaacttagtggtgccaccttaagggtcaatatcgcactaaaatacatcaatttgtcatatccatagaggaagccaatcttgacaatgtatggttcaacaccttccctaggggagcaaatatgaagacgtctcgaggcccttcccataccctcggcgttggactaataatggagaccatgtgtttcaaaacagatgacaaccctctcccactcactattttaaaatgtgtttgtaacgccctaaataattaggcacgctacccaaaatgcttatg

SEQ ID NO: 118001 - DNA, 2169 bp, Cannabis sativa
tttaattccgcattttatacataaaatatatatttcagtttatacatataaatgtctaacatatctttctattatcatttttttactcaattcatacatcttaaaaaaaaaaaaaatataaaatatacttctatttattgtcttttcaaacaataaaatcgaaaaaaaagtgtttataattttaaaaaatcattgttgtaacaatgttgcatttactaaaaaaatagaaaaaaatgtatagtatttctataaaaataaaaaatattatggttaaactaaaattataatttacaataaattttaaatattatattatattatattatacaaatatatataattaaaaaaaaactaaaaaaataatattaacttagtatataaatatatatgtataatgtatgatttttttttaactatctgagtttatataaatcataaatgtatgtttggtttggtttggtttggttaacatactagcttttatataaattttgtatttatatatgaatgtacattaattatgaatagaacctcgagttggtaacatcatgtaaagcatctttccttgatatgcgatgatgatcactgatcaatttgcagagaaaaaatatgttataatcaatttgatgaggacatccccactgcattcattacaaacaatttacatatattctctgcacaaaacttgataattcatccattcatatctatgatttcaaccccaaaattagaaaacaggacatttacaattattaaattatgcctactatcattttagcaacatttcttcgcgtactaaattttagtggaaattaaaaaatttataagtttttatgcaatgtcttgaaattgtttttctcataaattttttaacatttgtttttttttaaaaaaaaaaaaaaaatctcattaaataactttaaaaaggaaacaaccatatatgcaaacttttgccaaaaaaaaaaactataaaaataaaaattgccctaaagtgatatattattgaatttagatgttgaattgtttattatatgatttaagctaatgaatgaaggctagaataattatattatggagagcaactaaagctttgatggtagtatagttcacgagtaaaacacttatttagttagctatgtatgaagagagatgtatagaggtgtaaatgtaaagatgccaacatttaaagagaacattggtccttgagtatgacagcaaaagcccatttataacatgggccatgcccatgtcataatcaaaggagcttagagttgggagcatatcatttccaactacacactgttttttttagctaaaatagttaaaaaattaaaataagaaattatatttttagagataattatataaaatatcaatctttataaaatatttacatttttacattgaatgttttttttttatatttttacggtattttataaaaatacaaaaaaaaaacaacaaaaaaaattaaagaaaataacatcaaaactacaacaaaataatatacaaataacaaaaaattaacaacaaaagtataacataaaaatacaccaaaagattatatttttatgtatataaaatctaaaaaatcacaaaaatattgaaaatttcgtacagaccgtattttgtaattttttagttgttttttttttttttttttcttgaaattatttttttttttatttttgctctaatcacactccttattgtagttagtgcttgattattttaataatattttatgatttaaatttgttaaatataaattaattgaataaaataataaaaagtaataataacttttattaaaatattattattttagcaaaaaagtagagaattccctatcttttttctattatatggattctttttttatatagtttgagcttatttttttaaagtctactccctattttagttaaagaatgtgtttacagagtatagttaaagatgctataacaataaaaaattgcattgatgcacctctttgtgttttttaccattctattttttttatatgacggtagattatagtaatttaagatatttttatttttttcttgtatataatagtagggaaatttgattttttatacttaaaaaaccttaatattttattcttaaaccaatacatttcaaactaaaaaatatatgacactttta

SEQ ID NO: 118002 - DNA, 1936 bp, Cannabis sativa
atagtccataaatttagataatcacatcgcaattagaatgcaaaagacttccaaagctgttccaggataaaaagaagttaaaatagtaagaacaaaaaaagattccattgtcaacaagtgtccttatatttcttctatggaacacaatgattcagatgcatagcactcactgatgcaatcttccaccaaatctcagttaacaaaaatacaaaagtagcatatcaacttctctatcttaacaagaccccaaaatttcaccatgctgaatgagacagccgtggttaatatacattgatagcattctacttctatacacaataagatgatgttatctttgaacttgtaatgttaaccaactcctttcacagaatgaccatcatgtttcatgattttaaacaggcttaggcttttaagatgccatatgcaaatagaacctcttaacttcattactcaacaaaatcaacctccaaagggctttctcatcaagaaaacaatcacttcgacgctaacgaagtgatgatactacaattgggaactcaaagtataatttatatgaaactagtaactaattgtaatacttaaaacacagacattcagcaggcaaaagaattaaggcaagccgtttgataagaagcaaaagagaacaatgaaaacaacccatttcaaatggaatcaagtcaaaatgtaattgtacaatatacatatcacatcttcaaaactaagctggtaaccaaaatcaaagactcacaaacaataacagacattaaaaatatcaaatatacaaatgtacatgaaaatgaactgaacgagtaccttcttctcgcccaagaagtttcgaatctcaatagacgtgccggtattagagatagaggcattgatgggaaaatgggcgtagacgaatcgcatcttataacggtatcccttagtgacgccggtaatgagattatcgacgtggctgagagccgtacgaatagcggcactggtcttcctggtgccgaaccaggattctatcttgagcttacgagttccggtggcctgatcagtgatgagctcaaaatcgaggtttagatgcttgaaattgcggacaagctttccccgaggaccttcaacctcgatgaccttggcgtgaaccctgatctggactccgtcgggtatgtccatcgtctccgatgagagaatagtcttcattttagccctttcttttacacactcttctctctacttggacgttggaacagagaaagaggcggctccttctgcttctttctacggctaatcgatgaaacccttgtttataaaccccggaattctttgtattatactttcgcccctaatttatgtcaaaattattatggaacccttttacacagaataacattctttcccacaagaccctaattaggactgaatattggatgggttaactggattttgagttcaaaaaattaaacccagactcagcccgtgaaatagtttcaggttcgcagattttagactcgcggattcaagttgaccgggttgctctcccgatcaactcagttaatgttttttttatcacccaaattctttatagaaaaaaaaaacatttgaaattaaaaataaaaacgtaaatctaataatttaaaaccaaacaagtcattcgtcaaatttatgttcattgttcatgaaattatgattgacgaacatgaatgaacacgataataaaagctaaaagtatcaaaataataggattgaacattggtcggtttggtggttttttttcatatagaaatccaaaattcggctttcggtttggattggtgcaatccgaaaaccgacagaccaattcagaatatatcttaaaaccgaccgttttgaacctcggtttggtcggtttaaactgcccaaaccgaacttttttttaaaaaaaaaaaatccaatttattttataaataca

SEQ ID NO: 118003 - DNA, 1895 bp, Cannabis sativa
aatcctttcgagataaatttgaattaaaattattagagaaaatgaataaaattgatttattgttttttctttaaaataatttatatttaaaacaatttaaatcaaattaagatctaaaaaacgaaattaaataatatattcaacattatttttataaaaggtttcacaatataataataattcaagtacataaaataatattattatttttttatttacaaaatataaaacgaaaacattttgtattgaagggaagaccacagtgacaggaatcaccatgtacaatggtaaccatatatatttggtggaaattctttcaactaacaaattgtttttctgaagggaactaattaacctaattagtacagtacgaactaaatacacttagaaggaacattggcaccttgtggaaaaacaaagaatattattttggacttaaagttataggatggatcatctattttgttaaatgataaattaaaatttttaagactcgtttgttacgttatattagattgtattgtattgtattatgttatattaaattagattatatatcataatactatgttaaattttaatttatactaaaatattatatatttaggtgctcataaaagtcaataccatatataattttacataaaaatatataatattatacaatacaatacgatgtaatcaaacgaaccttatttttctaaatgatacaaaatagtatcctaaagttaatcttttattatttttttaatattccaaacttaaaagtaatttttaatatgaatatatatataaaatatactaagtcttgtcataatacttttgtcattgccatagaacttcatttactttattttaaattctaacaaaaatacataatctaatttcttatttaataaatgagaatgttcaaagggtaattttttctcaaaaacgtaaaagcagtaaaatatatatatatatatatatatataaaaaaaaaattgcaatgtctacatcactatagtagtagtactaaaaaaaacttaacaatttgtaccaatataagactaaagaacaccatcgtttaggcttcttgacacaaaaacaggtcttggatttttaattcttttttttaataagcaaaataaacaagagaaatctattttcagctaacaacaatgagacaattattcatctataagttgcttgtattttttttcactacaatttaatattatcatttaaaccacattaactaacaatacatgaaaatattcaagtaaaacattaagtaaaaattaatagatacgtattattacgatattctacttaagcgagtaccggaaagaaagttgacgcgcggcagtggacacaagtagaataggaatgtgttgtgtggtgtggggttataagacacgcgctgaaaaggcgcgtagtacgtaggaaatgtgtgatgttgttgtgaacggccttaaccacctccccccagtgtccatgcaaaatcatataacaccatcctcatttctcctcaacaaaacttaacagactctcttctctctttctcactctgattctctttctctctctgcttgagattgtacggactcagttgacgattctttctttcttttcctctctctctctctgcaatatcgaacgatttctccgtggaaattacgagtgcaataatggcggcagctccgattgtcaccacaccgccaattgcgttgtacgtcggagatcttccaccggacgccaccgaagaccatctgaaggagattttcaaagatttcccgagtatggtctctgttcgagtctgtagggactctcaaactggtcgctctctccgctatggctacaccaactttcttaacgccaaagatggtttgtacattcttctttttttttttttt

SEQ ID NO: 118004 - DNA, 798 bp, Cannabis sativa
taaccttaagagagctatatcagatcccacctaaagtgatttgaatagtattatctctcggtatcaatacaactaaaaggagagtaggtcattagccacaaccttaagggaccgaacctctatgaaaatccttgtgttcttttaccttctaattctaattgtgtaacacgtggcaaatataagtattaatttgactccgctatcagttggccaatttctcaggtcaacacatctctctatggtgccaaaaaagatcacttatataactctagaaaagataaaaccctaatttttgtaacttaaaataggcgggccgcgacattactcattgagtgttgtagcctgtgtctttttaagaatgcccaagaatttcaagatttttgaggcaccccgcaatactacaaggtagtgttgcggcgcttgaagcaaaaattttggaagagaagaattaagggtttcgatgcctcaattgtatcctaatattgatgcgcgccaatcaactatccaaatatgaccttgctaccaaatttttgcttgttagcaccatgacattgaattcttatgttgagtcgctactccatagttctaaattcctcagcattagaagctccaatcacaccaaaccttttggatttctttcttgacttaatttcatgatgctctagtgacaagactttatttaaatctttttacacattttttttagattgcactactacaaaacaagcctttagaggcacttttttcagcataataataaataacgacgccatagggttggaaatttttagaaggaaa

SEQ ID NO: 118005 - DNA, 2471 bp, Cannabis sativa
  modified_base (77)..(83): a, c, t, g, unknown or other
aacaatctcaatagttcggggaaatttctaacggccaaaaaagttcaggtagtacgatttagtacatgtcaaagttnnnnnnnaaaaattactaattagccaatatataaaactaatttgttaatcctaaaaccgaaagctgaattaagggaggcccatggaaaattaaaccgaccaagtgttactaatgtcgataaagagaggattaaattaaaccaaataacgtatctacggaaagtgacaaacaaccatgaaattaaactgattataaaaaaaagagaaagagaaaagccccactccactggtacttaccagtcttatggtgcacctacaagtcgcagatctcgaaaccactccttcttcccacttcccaaagtaggttccacgtgtcagaagttataacgcttaatttaaggtgggtcccaagacaccgaccttctgagtttgggtcccacaagttctatcctttcacgttctacctgtacgtggaatgattccattgggtaaaggcaatcagcaaacagcaaacagtatgtgttgtcccactcgctcctttacctcttttgactgcttattatttccctatttgggttacttaatgaatacgcaccataactcccatcactgggcccaattggcctcatgacctgtcaatataatgaagccagtaccgacttaatatgggtaatatcattttgaagtctatgttttatcgaaggttttttactttgttagaaaaacagattatatattttttttaaatttgtacaaaaattaattttttataaaataaaatttaaaaataacttgatttagagatattataataaaattgattatataaaattattaaaaattgaactcaatgtcttatttttataattttaaaaaatatgagatttattttatcatttaacaaaacagatagttcaattgataattttagcaaaacacagagtctaaaataatatttacccataatttctctattattatcattgttagaggatattactgacgctccataattagttagcaatgttaattaaaaaaaatttcttaagttattttatataggcattaatggtaccttttaccaattctcttattattattaaaacattgttattaattactaagagcatctctaacggtaatatttttggagaatacttgattaggtggaaaacttatctgccaaaatataaggatgatatcctagtggagataaaagaatgctattttttttttttgagcaaaaaagaatgttaattttaaaatttgcattgatgctacacaatgacattaatgctatgttttttttttacaataaaaaattaaaagtgcaatatatataatagtttaataaagaaaaaattatatataataatgtgtgagatcataattataatatttttaaaaggtattatactattggagtgtttttcgaagtaaaaaggccaaaaataatgtggaagaaagacaaaataaaatactatatatttagatgatgtggagatacatagcatccttaaaaaatgctactattggagatgctttaatggtaccatttacattctatagatgatacattgcaattagttagtgatattatctaaaagcttttttttaagttatatgagactcgatatttaatacttatagtgatatgacatcgaagaggatgctagacactaatagtaccttttagcaattctcttattattattataataaattttaaaggcactcatggtgcctaatatacttgtggtgtgtaatattattattaatgtaatttaatattaaattttatatattttatattaataaaaattataaaaaattgataactaattataaagcgttactttatagtatcattaaataccttagtgacctataataatactttattattattagtatattttaatagtaaatttaatataatttaatttaataaataatataaataattactaattaattataatacattatatattattgaacacgtttctaactcataataatgtagttaataagttttgaaatttactatttttcttcaataaaaaaaaaaaaaaaaaccactcgattaatatttatgagctttgttatatgagggtatcaccagtatagttaagcaaatgttcttttccagataaatttaaacaaatatagttgcacaattcatctacctcactttttgaattgtggccaattagatttttcatttttgtctttttcctattaactagcaccggtaacattatatttcttatatttatcttctctctccaaccacatcatacaacataatagaggtagagttcataatagaggtagagttgattaggagtgatcccggggccggccctaggcataggcgggctaggcccgtgcctagggcccacactttccgggggcccgaaataaaaaaataaaaaaaattattaggcttttat

SEQ ID NO: 118006 - DNA, 844 bp, Cannabis sativa
cccaaatgttacaaaaagatgacaactaatatacattgtcatatgttacatattattagttcattacacatatttaatctatatattatattattataaataatataacattagctacgtacgtgggtgcccctttcccaatggtgcagttggtgatccttatcgtccaccacgactactttagactcctatttgatatctgcctcagcctccttgcaggtgccaaagatcctccttcttggtcatttcagttgagcccacttgattgtctaggcagcattgtctcttgatactttgtacaattttttttctagaataaaattgctatagaaactagccaacttgtttctctctatacactaagataaattctatagctcttttattattagcaacaaatcgtatgtaacattctctacgtaaagtttaaacaaattaatggagtaatgctaaaactacaaatattattacttagatgttacacttaaatcttgtctttaaataatttaaacaaataacagaattaatcatatgcaaaatattaattaataatttaaacaaataacataacagaattaatcatatgcaaaatattaattaataaccactatatatgaatcttaattctgacatatcatacatcaatactatgttaacttgatgaaaaaaatttcaaagcttgttgcttaagaaaagtttaagaatttatattagttaagaattttttaagctttattttgtggtattctagttatgcaaatttaatatatatatatatatggaatactttttaatgggtattacctatgaatgattactaagcaaatttaactataaatattaa

SEQ ID NO: 118007 - DNA, 2501 bp, Cannabis sativa
  modified_base (796)..(797): a, c, t, g, unknown or other
aaaaaaaaaaaaaaaacttttacccgtaatttttattaatttttttattttccattttcattttctatctcagcttttataaataactggaataaaaacctaccttttaatctgaatttttctataaaaaccaaaagaaaaagtcctatgtttttaatgcatacatattcttcttatattatatagggtaaatagccgtataagtacccaaagttttatgtttgtaagcgatataaacaaaatgtttatttttagcggcataagtacttaatgtttgtaaaactgtaatttttttctaatttcatcagtacagactatgttttgaatttattaaaagagcatttggaagtaattgataatacacatttctatctatacccaatgatcaagaatttagaccttatatgtgccctgtttaagacaataacatagtttgtattgacgaaattagaaaaaaaaaattacatttttacaaatgttgggtacttatgcccctaaaaataaacattaaattatgccacttacaaacataagactttgagtatttatgccgctatttacccttatatatagggattatttcacaaatacacaaaaacaacaaaaaaattacaaaaatacggtctcacagaattttaaatatttttacgatttttttttattttatttacaaaaaatacagtctttttatgttgtactcatgttaatttgttgttgattttttttttttgttatatgtatgttatttttcgttgttgttttgatattatatagatattattttcatgttactttnntgtagttttcttgttatttttatggaaagtaaatatgtaaaaaaaaattaactgtaaaaatataatttttttacaaaaaaaataatgtcttatataactatcccttatatatattaacacatacatattttgtcaatattatgtatatttcacatatatacaaattatatttataaatgataatcaaaatattttttacatatattcataccaccataactttatacatacaattattaacacataattaataccataaattttccaagatacaaaaataaagaaaatgcacaatattcttcccataagctatcttttttttttctcacattcatatacttgtgactttatctgaaaattaaaagttataatatattgtaagtgacaacatgaaaaaaattaatttcaataataacacattcaaccgtaaagaataaaatcaataagctaacatacgaaaatttaatttcaattattgcttttacttcataatctttataacacaaacagaataggaaaacaagaaatgaaaaaactatcagctattggtaatttagtttataaaaaacttcgttattacaaaataatctattgaacctaatctccctttaaaaacaaaatcttctaggcaaagaactagagaaaaataacaatacaataaataatctgcacaatagataataatttggaaatgaacacaaggatgacaaaatcttataaacatagtttgatattcaatcccaacatatgtaaccacaaagtaaaaaaattagattacaaaaagtaaagctatgttaaaatatgaagtcgaataattataattgacatgcaaattaacaaccacaactaattcatataataacaattcgaagtaaaaatcaaactactattaattatatagagctttcctcaaacatgatatattgaagattaataaaactatataagaattaacaaacagagatgattactattcagaaatagcagactaaacagagaaaataatatagagattaataaaactagcaatgagacttcaatatttttttcttccattttttaggagaactaaagagaatataaatatatttgttgaattaaaactaaaaaaagacaatacactaatataaaaaactatgaacaagaaaatatataaatgtgattatttagaataatagtcatgtcgtgccacaagagaggcatataaagattaatgaaattagtagtgagatcgcaatattttttcttatttgtttatctttcctccaagaaaaataaagacaatatcaatatatttgttcaaaagaggcatataaagacactttaatatgttgaatttagaaaatctctctgtcaaacatttcaagttcacacttgttttttttttttttttgtcttttgttgaaatttcaagttcacacttgttgttttcaggggactcaaaaatttattggacactaatttaataatagaaatttttaccttattaagcaccaccacacactattttcacacacaaaacaaacaaagaaaaaaacaaacggtgaacttgcacaagcaacataatagaaaaaaaaaatatagaaatcaaataaaaactatattaaacatcaaaatcgacataaaaaaacttgcaaccatgatataattcttaactttcatcaaaaaaaaaaaaaaaaactactttaaagtgtaaaaataaaa

SEQ ID NO: 118008 - DNA, 1035 bp, Cannabis sativa
gacattgttaagcttctacaatactaagcaacctacgtacacaaaaaataaacaaaaaataaatgtttaaaaatgttgttaataagattattatattacacttccaaacacgtgaaaacttgtcatgagtaattgtaatacattttattagttactatagtttgaaatacatttatcaaattttagttatttttgtgtacgtaataataatattttaaaattttactttgtatctggtccctattataaaaaacattgtttatttcaaaactaaatatagtataatatatatggatatatagtatataatatatatggatataattgcaagaggggacaatgagtgattttgtcacaaatatatattatatatttttatttttaaactaaatatgattgtgtatacaaacaagagtaacatggaagacaagtagacaacgatgattttaaaagactaatacaaacgacaaggatttgaaaagacccacaacaatgatgagccacattactagttgaattaatttcacaaaagaacctattacttgtaatcattgtgctatcttatcttcaagtttagatagttagtacactaattatccaaacattagtggatatatattgcattttaatcattcattctaaaggtcttagaagtttaaaggtataatgtgagaagttattattaactatatattttgtaatatcaagttattgttaatcattttgtttattattattatttcttttattttattttttgagaaaaattacctcaaaaaacacatcatgtaaaacagaggactaaaaatattattaataaatgaccaatcataatataatttccaatacaaaaagaatcattagcaccattaaaagaaaaaacaaatatagcactagcatcaatttgccaaagccaacaacattaaatacaccattttgtttgttgttgtgacagtcagtagtcctgtgatccgtaaggagaaacactgggtaagctgtgcaatcccacaacgtctggggaaggtcaagtgggat

SEQ ID NO: 118009 - DNA, 2599 bp, Cannabis sativa
  modified_base (66)..(70): a, c, t, g, unknown or other
  modified_base (99)..(105): a, c, t, g, unknown or other
gcaaccaatataaggtttccttaactttatatgtgttttttaccgttttagaaagttcatatttannnnnttaaacaacatacttgtgagtatatctannnnnnnggtaaaataaattccaacatgaggttctactgtaaattgatttatgataatggtaaataatttgactataaggaaatgcgctctttatgagatggtctatgaattcaaaaggctttctctactatcgcatatccctaaacaaatgaccaaactgaagcgttaacaaaatcattaagcacacaatcaaaggaaaactcatagagtgcaaaagaatatggctagatgatttatcgcaggttttatgggccaatagtaccactccctgatctaccacatgagaatcccctttctactatcttatgggtgtgagaccataatcctagtcgaagtcgatgctagatatattcgtcatgattttttcaacatagaatataatcaacatgggaaacggttatgcctcgacctgattgaagagaaacacgaccgagcacaactcaaaaatgttgcatattagcaacgtactgctcgatattaaaactccaaagtcggggagagaagactgcgagtaggtgacctagttatccgcaaagtgatgcctaatacccgcagtcccactcatggtttttttggcgacaattaagaaggtccttaccaaatttttgaggtaataagcacatctacatatcttttattcgaccttagtgactcggtctacggcagggcttggaatgtcgagcatttaaaattttactttaagtagtactcgtatgctcttaaacttagtcaatttcaattttctaagtctacggaggatgtatgtgtaccctaatgacaaatctttgttaagagtgctactgtttatcgcacatttctttcttaattttctcacatattttaaaattcttgcatatcttcttacttggttattttataaattttttgatttcgattagaacaccaagtaattctaataatgcctcaatcggttaatgaagtttcttgctttaagaatttgtcaaaccttcgaagtttgaaatgcattaatttcaaacaaaattgcatcaaaacacagtataaatacacacaattttatacttagaaaatatttcaaccaagtaagatttgttcccatacaaaactagataattgtctcaaaatgcaattataatataaactagtcttaaaagaagtagcgactagacaaaatgaagctttcacccaagaagtgtctacaagttcaagaagtcgcaatattgttgttagcaatgttctcaccaacgttctcctcgacaaccttagcaacatcagaatccacgccttcattaaatgggtcttgaccactccttaagtcactgtaggagacatgttgcaataagcatcgacaatgtccacaactttcaaaccaagtagcaagaagtcaaaagtaggagcctttgacaaagtcgtgttaatatagtcatttacacctttttcatatgattgattcttctcctcctccatttgagcctcgaggatttgattctgcttggttaaagtttcgataagcttgttacttctctccttctcagtctctgcagccttcacttcactgcatctgtcattgccttttccttgtcaaccaatgacaacttcaattgcttcacttgttcctgcaacacaacgatttgcttcttgaacaactcattatttttcagcatttactacatgtctataaatgagcgagcatacttagtcaacccattgatcatgtgctaagaataaccactccgtgtactcaaattcttaatattcaagtagtcaaatctattacaaacattgtgaattatagctttacaagtaatttgaacaattggcaatttttaattccaaagcacattatatctagcataccaattgtaataaatcgtggctgcaatggtactaaaaaagatccttggtttacctcttgtttgtaactttgctattttctgaatgttgatacccacccaactacaaagtttctgcaacactttgctgctgtaatagcagccaaaacacagatgaggatggtcctccaaatcattcccacacatcaaacaatttggtgagatgatattaaaaattctcttaaattgttgatattattagatttaaagattttcgtccaattttgtttacttttcttaataaacgcttaaaattgacagaagtttggagaattcggtttcatatataaaagtttgatggacataatttagtacatggacaatcaccactttaataattaaattggacagaagtagacaaaaatttttaaatctaacaaaaagaatagttcagaaattttttttaataaattgataaatttggggttaccaattgataatgaataaaattgaagttttgttgaatatagtctaagaatggagaaaaataagaaaccaaacagaacataggaaatgtaaagggttgagatgcaaaatggcccttaatttggtaactaagttagtaaatgtccattttttaaaaaaatttaaaaaatggccaaatctaataaattagataataaaaatta

SEQ ID NO: 118010 - DNA, 992 bp, Cannabis sativa
ttaatgaattgatattttgatggaaatataattcattaatatatacatgtgtctgtgtgcatgtgatatcatgaatgaattaagaattaagaatttattaaatatatgattacatgattaattccaacttcgaaaccatattggctttgcttataattaattttatagtcttgatcgtttttattttaatttatctcttaatctctttcaatcatattatatatagcctatgttattttaatatatcatcgtttatatatttatagatcaatatatgtacttatgcactgagtaatattatgttataatgcggaccatgtgtatagtagttataatttatatatatatatatatacatattcttttttcttttttcttttttttttttttttttgaaatcatatatatatacatattcttaaaaaaattgaaatcaattttcatagattataaatgtatattttatttgaaagtaaatgttgaagagttattatttaaatgtgatatatattatatatataatgacaactcttatcaccaaatcaacatgttatatatgatcatgaatgaatccatgaatatgcacgtgctaacagacttaagtgttatatttatttaacaaaataattatgaagtgctgcactcatgcaatttcgtgaaataatatatatagttaaatattttataacttccactaattaatagaatctattactgtacaataatttaattgttttgatatcatcagctccacagatatacgtacactatactccctttttgtctccaattatttattctggtcttccaaaagtaacaacccaacttgcttattatttaaagaaaaaaaacagtaaattatatttattaatatcaataaaagatacaacaatttatatactacagtagaatttctatttaagtattcaagaataacttttaatttgttataaaaaaaaatcaagtcccgatttgggccagttataaataag

SEQ ID NO: 118011 - DNA, 1296 bp, Cannabis sativa
taaagcggtgacatggtactctaaaattacttcaaaaccatctttcttttttctgcttaattctcttatttttgtaattttttattaggtctataaattgcttaaaacctatttatttattttcttcaattttctctctttttattctattttctaataaaaataaataaatatctaatcttaaactaacacaacgcattcgtaactctaaaacatacatattaatcaattaaaataaaacttctaccgtagcattttttttaaaaaataaatctaaaataagtaacaacataagcctaaacacctgaaactaacgaatatctctattagataatatttaaatctctcataatcacgtaaaatttttagggattattttacaaaaacataaaaagaataaaaaaattataaaaatacggttctacgaaattttaaatatttttacatttttttattttatttacagaaaatacggtctttatatgttataatcttgttaatttattgttgatgttttgttatctgtatattattttttgttgttattttgatattattttcatgttacttttatgtagttttcttgttgattttatattgttttcatgttatttttaaaaaatcgtaaaaatgtgaaaaaaaatattttttgaacataaaaatgtaattattctacaaaaaaatggtaccttatgtaattatgaggcttagttcatattataagtgaccatcaccttttgattttcatggagccattgtatagttagagtacttcacttagtccagtccaacaaatttcaaggtttgatagagtacaataacaaatatagctagcattatctgttttttttttacaaaatttattaataggtgatagtatatatattaggattaaccttagtttgttaattaactttggttaagttagtaaaagcttctctgtctagttgttagaacattaattagttttatctaactaatcttttctccctttttctgcctatataaaggcctattgtactaaggcacaacattagttaagtaataagataatcttcttgcttattcttctcttcatttctcatatggtatcagaagtcattttaccgacaacttccatggcaagaccttccacacactctcaagatggtgctcctccatccacaaatgagcctcctatagcagagatccaccatgacatggtttctgctccaaatccttcatcatcagctgtaatacccggtaaaaaaatatacatattttttaaattttatttgttatacaatttgtgtgaga

SEQ ID NO: 118012 - DNA, 1840 bp, Cannabis sativa
tctagagttgaggttcaggaccgagctatccgggtcattcatctagtaatactacaattatctccacaaaaattagaattaatcaagtaagtaaagtaagtcatgtgtttccagctcaatttgaacattaatgaatttgatcataatatagatataaaatagggctacaaatttataaggaataaattggaatgaaaattcaagtttacattttatttatttacggccgcttaattactttattaatttcagaaaagtgcatgtaattgacattctatgaaattcattaattatagtatatatatttagttgacattttacaaagtgaaaaactaatgcttttgactttttattcaaaggaattaatgccaattaaataggactgcttctaagttctaccgtcctatgtggtacggtatcaattagtttcccttcctaaaaacaatggcataaattcgatgccattaatattaccactagaatttaggttatgtaaatatactttaattagatgtctagtttaaaacaagtatttacaaatttggacttaaaacaagtcaaatattgattaaaacataataaacaaaaaagtctaaatttcacctccttatttgtttataaaatgaagactacatgcactataattatttcagacatctagtaaaatttaaaaaaatttaacacgctgaaaataaggttcaaactgtttgttacatgcgtgactcttttatttagaaaagtgtattgtaaaagtattttttaatttattgtgtgcaaatttaaatgtgagaatatcataaattattattattttcaattataatttaagtaaaaaattattatatttttgtcataataaaaatattataaatttaaacacattaaaattaaaattagacaaactaaacattacattacacaataaaatattataaaattaaaccacaattaataatacataataattacattacaaacttaaatatacatttaaaattaaaaataaacatgccaaatacattaaatagaaaaacaataacatagatatgaacatttaaagataatataaagatataataattgtggtaattttagttaattaatataatattgttcttttattttattaatacaataataaataatattttttttggtgttatagttgaagtgaaaatattttttgatattaaatttaaagggaattaatccatatactattttttttaactttttttttctttcaaatttacagttttggtttctaaggtagttacagcgctagttgtaattggggtttttatacgattttttgttgcaatttaagttacagcgctagttgtaataagaatttttatgtagaatttcataaaaatacaaaaaaaaaactgttttgaagtgtaaaaattaaaaagtccctaaatttaatgtggtccttaaatcatgctcttttgactccattgtatataacataatataataaaatatactttcgtgggggttgtttggtggcttctataaaatggagaatccataacactagttagttctaatttctaaagaatatgtatatttacatatataatagaatgttgtggaaaaagaaaaagaagcacatgagacaaatattggggccgtgttggtgaccagttttttgggctccctaggccaccgtccgctgcaattttacaacaatatataagataagtcaaactcacattaacttccttacaatacacaagagaattgttcaaatatgtcatacataaataaagtgatatattttacatttatttgtagagcaatgaataatttttttttttacgtatagataaatggg

SEQ ID NO: 118013 - DNA, 1638 bp, Cannabis sativa
tttttaaaaattgaaaacaacattttgatgttttctgttttctagttttttaaaactcaattttaaaaaactgtttttaaaaaaatttgccaaacagcccctaaaattcctaacaactacattataagattccttcctttaagaatagacaaaacatacaccataaaggaaatgccattgctcaccctgataactattgaatatcataaacaacaaagttaaaaaagtttttgctttggagggaaaaaggccaattaatttttttttttttgtattttgttctttttttttttttttgatttaagcgtttacatattacaaccatatttttacctaggactcaaacccaggacctccaaaacacacacactcatctatgaccacttaagctagcctcaagtggttaaaacaattatatgatgcgatggttgtacgaggtgtttccaggatctaatggcattgaaagaacatcgatcaggatctaattgtattttgctctcaaatgatcctaaattcccaccatcacattgtatcatttatacaccttataaattataaaaataagtctccaacaactatattataaataactacaattaatcacatttaaatacaattaataatttaatttactaatttacaagtaatgatataatagaccgatgagttataaattttatcatcatcaataaattgcatgcaactactcctttttgcgtcatcatataaaatttatcttgtaacttaatgttatgtgttataattacacattatcaatctcaagtacactaaattatttaatttaaaaagaaatatataaatatcgtattatttaaaatgtgaaagctatgttaagatgtcaaatatgctgattttggtgcattttaatattaaactacacgtaatttgattttataaataatataaaaaaaattactaaccagttataatacgaaacataagtataatgttgtattgggctgcttaaaataactaataaggatgctcaataaaataatataacatagagatgaaaaatacctccaacaatggaattcttctagtagctagttattcatgatagttgtaatggtggtccatgtaattccaccaagagaaaaattactataataaacgcgtaacattaaaattaaagttcaaattattgactcgtacgtgttttagaactattcgaacttacttatgtggtgttaggtagaaatgattgcatacatatagtactctctttttaaatttttttttctccaatagctatggactcacatatttagataaaaatttattatttcaattttttttttttatgaatcacgaatttcattgcataataactttttatgttacaccctatggctcttcaaacagtaaataactatacatcttactataaaaaacaagcaaactcttattgttagacattttattacaatggaagaaaatcaagatatatacaactcaattgtaaaattaatacaaggataataataaaaaaattaattaaatatatgttacagcacatatatacactatatatattgcatatatatatatatatgaaagatatagaagagaagattaatagaatacataatattgtataacatatatatatatata

SEQ ID NO: 118014 - DNA, 3301 bp, Cannabis sativa
  modified_base (31)..(34): a, c, t, g, unknown or other
  modified_base (232)..(232): a, c, t, g, unknown or other
  modified_base (543)..(548): a, c, t, g, unknown or other
ttaaaattctgtgaaaccgtatttttgtaannnnttttgttatttttatgtttttgtgaaataatcccttttttataattaattttaaaacaatatcagttgaaatttaattaggagtgtgtttggtaatatttttttaattaactttcaatttttttaattagaaaagtaaaaatatttctcaaaaacatgttttataaaagtattttcactttttaattttttaattganaattaaaattttaaaaatttaaaagaaaaattactttcaaaatttttttaaataatttttttaattaatattttgaactccaacctcaatcttaactttgggacccgaactctggcctctgctctagttccagacacggaccgcgacccagtcccagactcaaacctagacctgacttaaataaaatcaaaaaataaaaataaaagttatagaacatatttttgttttctgttttcaaaattaaaaagtaaaaatgactatagaacacatttttattttttaaaaatacaaattttacttttatttttgtnnnnnnaaaatttaaaaataaaaatattactaaatacctcataagagtattcctaataaaatattaaatttataatgtattattatcatatgttagtactaattttataaaaaataattattcaaccatatgttaaaattagtattaaacatatctataaagataggttagcttttttttagtttagtcaagttattgtttgggggaaaaaatatgggcgcaaagtaaaagcccaataaaatagagtaaaagcgttaaaaagcccaaatagaatgggtacccaaaaactcaagatccgagtacattaaaaaggccaacactgtgcggcccaacaaaaaacctagaggatagatacaaacaaaaagcacaaaagacaaggaagagaaataaacgccgacgaaaattatagaaaagagagatggaaggttagaaccagagcttaccgacggaggaagggctaggcacaagacatattaaagataagagagacccaaagggggtcctccgaccggcttgccggcggaaaactcgtctcctgagcataatagggcaacacaccaagatagcaccttagtaaggagcgaatacttctgtttggaggagacaccaaaatatgggtgcagaatcacgatctcccaatccgccttaggtaagagaaggaattccgacggaaaaaagagatgtagtctacaaagggcgagataaacaattcaaaagaaggatacaacgccgccggaccaagagagagcaaaagaaaaaaacatcaattggctaaaaagtggacacgtagccaggtagaaggaacagaggaaaaggacacgcgtcaagagaagagtaggtaaacagcaggtcatccatgcaatcaaagaacgtaccatataaataaaaaaagaacccacgtaaaaaaggggtgagattaggaactgaaaaagagagaactcacacaaaaaaaataatgattgttcttggctaaaatagtttggcgtcgtttgtgggaaacttgaattttcctttttcagaaaaccttttcgtgggatgatcgatattcgaacaaagaagaaggagaagaaagttctgggaagaaggtgaaagcatggcgaatgaacaggaagacctcgtcctgcatgatgatccaaatagcactcgcgaaacccaggtgaacactgggaacgttaacggtgaaacatggcacccgatcctaccatggtgagagattatggagaggttaaagcaacaagagggtaaaatggcaacacaaggtgcgaaaattgccctccagaaggaacacattcagaggcttgaaaatgaaaacagacagatgaaagttatcctcgaaggataccagcgccctctgcatgcggaagaaaccgacaaccatcagctgggagaaatcgctgagaaagaaaacaacgttaacagtaatcaccctggcaaccgtatccgatgcatgcatgaagaacttgggggaaaagaaaacccagcagtattggaagcttcaacacatctgcaggaccagcaaaggagaaccagggatgaggtggaggaaataacagaagcagaagcactctgcacggcacctcgaaagcgaaccacagagccaatgattaccagaagtccatcaatggcgaataaagaaatagaagagctgcaagaaatgatgtggaataagttactagccttggaagcaaagagttggatgggagtacacagtgaatgggcacgaatggaaggatcaaccctctcgccttttgaaaatcatattttacgtgtagaggctccacaacgttacacagccccaaagttaccggaatataatgggacaggggacccctcagagtatgtatgtcaatttgaacagaaaatgttaaccgtgtctatcccgttggaagacctggaagcaatcaaatgcaaaaccttcactcagggattaagaggccccgctctatgctagttccataatttggcatccggaacgataaactcgtatcaggacctgatcctaaggttccaaacaaactttgcgataagtgtccagaccgagaaagtagacacagatctaacgctaatacatcagcgaacggatgagcctttggaaaggttcattaacagatttagtgaagaatatgtcagtatcccaaagtgcaccgattcagtggcgacaaaggcactaatgcaagggttgatgcatggctcagagctgaaaaaggcaataatagtggaactaggtctgtcattaacaagggccctgaccatggcacgaggatacgtggctttggaattagaagaaaaacgacacgctgaggaggtgtctcgggaaacgtcggtaatgggagatacattcttgttcgagaccaaagatcgaatgccggctgcacggcctcacaatagaaatgagggtcgatcggctaacaaaagaaacgcccgagggacagtgatgacaaatatgggacagacaaggcagctgaatgctccacggagcgaggaggagctacctcgaatgaccattactttaaccgagctaatgaggcggctgaggggaatgaaggaaacaaagtggcctgccaaaatgaccactgatcccgacaaaagggataagagccagtactatgcctttcatggggagcatggccatgacacttatgagtgtaggcaactgaagattaaggtcaataggctggttagagaaggaaagggacattggaagaaaatcacgtgaatcttaagatcaagaagataaactatatgttagttgataaggg

SEQ ID NO: 118015 - DNA, 1454 bp, Cannabis sativa
  modified_base (38)..(53): a, c, t, g, unknown or other
  modified_base (1374)..(1396): a, c, t, g, unknown or other
gggacttgatttatttataacaaattagaggttattcnnnnnnnnnnnnnnnntaaatagaggttctactgtacttgttaaaatgatctacaccataaaaagaaaaaaaaaataatacacaccggttgtagttataaatttttaacaaatgttaataaaaatatgttttgttataaaaattatagaaaaatattgaaagaatcacctaaactaatactaaaattaaagaaatatcttattcaaaaataatatttgaaaaaagagccaaaagaaatggaaagggaatttgtaaataattccatagttcgaggaagtatttttacaaagaaaaatataatattaaggggcaaaatcctcatgtgtgttagtttgtgggtaaaaatcttactttttttttttattattaccttattggattgaaatatgaaaggggtactattagaggaggaggagggagatctcttctaaatatatttaaattatttttttgataaagttaaggtattttaaagaaatattattattgttaataattaatattaatatttagtatactaatttaattaattaatttattttatagggaggtttacaattgctctaactagatttgacaatggtgttggattggaagattcataacttgcttagttgaaggagtttcaaagtcgttgacatagaggcagtggcattaatggtggcatggaattatgcttttttgcttggcttcctattctttttattgagtttgattgtttagtttattttaagcatgtatcttttttgtaatgatttaggcttttaaataaatgaaattgctaatttgctttctaattatcatgagacatctttagttcatattccacatgtggctaataatactgctttatgtatgcacttaaggtgaatggtgagcttatttaaataaatatttatttatctctaattcatgttcgatatgcaatcaataaaacttctcacaaattaattgtacgagtaaatgatagataactgtttagatattactccttattaatgctttttaatgtattaaatactcattgttatatttgttggagtgaaaatagaatgcttcaaataagttacatttattttgaaggcaattttagttaatcaaacacagcaaagggcaattatcaatctatcccaattaaattttatgagtttttatacttttttgtataaaaatattgttttttttttctaaaaatattattttacagaaaaattaaaaaaaaagttaaaaaaatatgggaaaatcaagaaatgatgtactcttatgataaacaaaggggtaactagttaccataaggaagtaattaggtagtttattgttatcccaatttttgcacnnnnnnnnnnnnnnnnnnnnnnngtgacacgtggagtccacttggaatatctgctcgggaagaatggtccgagcaggacat

SEQ ID NO: 118016 - DNA, 2920 bp, Cannabis sativa
  modified_base (36)..(46): a, c, t, g, unknown or other
  modified_base (1410)..(1411): a, c, t, g, unknown or other
  modified_base (2869)..(2885): a, c, t, g, unknown or other
atctttattaataagtaaacctgattatattgaaannnnnnnnnnntagggcataaaacctaacaaaaaagccattcaagcattttaaaatgtggacatcccacccgagatacacagagattgtaaaatgggtctggcagtaaagagttactggttctaaaatgaattaagtcactacaaagctaaagaaacttaaagtgaccttcaaagaactaaacagtaatcatttctcaaacatttaggagacgactaaaagagaaatagaagagctgatagatgttcaaaagaagctgcagacagagcctctgaaccaggaacttacacacaaagaaatagcagctcgacataaatatggacactttaaaaggcctaaactcatttttgtatcagaaatccaaactcagttggattaaagacagagatgaaaatacaacaatatttcatgctagtttcagagagaggagaaaactaaatagaattttgtcaattgaagatcaaaatggagaaagaaccgatgaaccagctaagattattgatgcttttctttcattttatcaccaattgcttggttctaaaatggaatacaggaggaaggtaattgctggtgtcatgaaacatgggcctcttatctccaaatcacaagcagattcattaatgagggagttttccaaggataaagtcaagaaagtaatttttacaatctttggaatcaaggctccatgaccaaatggctataccagttgcttcttttaagacaattgggatttaattggagatgacattagtaaagttgttctatctttcttgcgctcaggtcagattctcaaataaatcagcactacagtattaacacttattcccaaatgttagtgtcctaatacggttagtgactttagacatattgcatgttgtaatgttatctataaaactacaaccaaactaatctgctcaaggctgaaaactatcttacctgatttggtggctcaaaatcaaaggggattcattactggcaagtttattgcacacaatatcatgatatgtgaagatctgattaggcattatggaaggaaaaccaccaaagatgggtgtatgatcaagcttaatttacaaaaaatttcttggaagaaatactttaagctttttcagttccctgataagtttgtcaagataataatgatatgtgttcgtacccctagattctttcttctgttcaatggatcgcttcatggatatttcgaggggaaaagggggttacaccaaggagatccaatttcaccattactatttgttcttggtatggagtatctatcaagaataatgttgagaattggaaccaaaccagattttaaatttcatgacaggtgtgcagagcttaaattgaaccacttgatgtttgctgatgatgtcatnntcttttgtcatggtgatttcaagagtatatattatgtactacaaggactaaagcttttctcttgctcttttggcccacaaccaaatccaaacaagtctgctttttactgttgtggtatggaagatcatgaaattgaacgtatcattgacagctcaggatttagaaaaaaagaggtatctttcaaatacttaggtatccctatttgagccaaacgtataactggtaaagaatgcattgtgttagctgaaaaaatgactgctagaatcaaaacatggtgttcaaggaacttatcactagcaagaagagttgtgcttgttaattcggttcttatgtccattcactcttattggagtcaagttatggtattaccaaagaagactataaggtatattgaagccattttccgtgcttatctgtggaaaggccatcatttgtcccttggctctggaccaatttttgggatcatgtttgccaaccaaaggtagcaggaggatcagtttgaaaaaaaattgcaaaatggagcatagcagcgatgacaaagtatgtgtgggaaattgcaaataaagaagacagcttgtggattagatggaatcactgtgtctatatcgagggtgaggattggtggaactaccaagccccaccccaagctagctggtactggaagaaaatggttgctatcaaaaatcaagttagagcttctatggacattcaacaattcacaactttgcaatacaagatctctaatggatacaaggctctttgtcctactcaaaggaaagttaattggagccaagaggtattgaatagacttaacattcctagacacaacttttgttcatggattgttgtacaagatagactgagaactagagagaggctacacaagctcaacataattggtgaagatttttgcttgttctacagaaaccaaacagggacttcacaccaccttttcttttcctgctccttctctaatctttacttaacacaagtaagattggctcgactggagagttgaatcaacatctttatgcaggatgctaaggtggattgaacgatcccaacttagcaagttcaagaaagcaattttggttgctgctgtagctgcccttgtgtatcagctatggagggcccaaaatgattcactatggaattcaacagagaaatcaatggaacatgttattcgagttataaaagaagatgtgaagagaagagtttcttgaatttggcctaaacatgtcaatccggtagacacaagttagtttttaactttgtaactttaaaagcatttgtaaaaagatttgttgagtttgctatacattgtacaaatagatgaaattagatcttcaaatgaagatgcttgtaggatgtaattgatatttttggactagtgaatttcactgattgaccaaaaaaaatcaattaactgagtcttataagcagtattgtctcaactannnnnnnnnnnnnnnnnctatataatcaagcttccaataaccagatctagaa

SEQ ID NO: 118017 - DNA, 1485 bp, Cannabis sativa
agaaagaggttctcgttcggataccagcttgtagcaacaccaactactatccatcatccacttttttggttgtggaagcttcttccttaaatctttttataaaatttttcagagttttaactggtagttgtttaatgttggttgaagtgctgacctcaaggtttattttcctggctgccataaactaccttttgaaactaacttgcaacttattttagtagtccacggatccaagctacatttttttaaaccccattgtagtggaccctcctaatgtcaacgggtaacataatcagttcacgtcattagtgattctcatcattgtcattacgcgattaaatctcgataagtgatcactaggatctgagtctccattatataagttcattttgggcattttaaaattctttgggagctccgcttcaagtatgtctctggcacaagctttctagtcctaacaatcagactcaaaataatcccccctttgccttaggaagactttggctatatcttttcgggggatggcaagttcagctaggatgcccttattcaatgcactatttgagactagtacaacattcttttttccctctaagtgatttctaagatcactgtgcttggcgttaagtttttatctcaagttgataggaggatccttgtgacccttcccctatttctccctcgactctaggtgcacagatacgcttttttggtctccccgatcttaaggaccagtattttgctttggaaacctgtccctctatgcacctttccttttaaggatatcaggacgaactcttcgtggatcttgagccttcctatttctttcatgaatggctattgggtttgactttggggaaccttcagaagggtatcgaatagggctttgctcctgattcttgtacctctaactttctaaggttgtggagattcctctcttattttgtcttgcccagtcgtcatgttcttagatgcatatggatgcatgtagtttccatcactttttgcatggcaatcattatttcttgcatcatttaaatttcttcttttgctttgccaactcagcttcatagtcagtgcgtttctgtcttaacactataaattcggtgtaactaccatcaccatatgcctcatattcctcttggtttttgtcgtattcttgattgttagtttcatcttgttcttccacctctacacgtgaagctactttttcattctctggcctcttagggccttgaggttgacgtggttgatgtgcattgttccttctcaacaccatcgtaccaagaatttattatgatattccttctatggaaatcttcctacaactctcaatgaaagcaccaaaatgttgaccgatattttcagcaacaaattaattagaattgtttaaataattagaagaaattcaatgcaagtatttttacgtggtttgggcattaatgagccttagtcaacgagtcactgctatttaatatagtagtt

SEQ ID NO: 118018 - DNA, 1054 bp, Cannabis sativa
  modified_base (999)..(1000): a, c, t, g, unknown or other
tcattaatgccccaaccacataaaaatctctcttattaattccttatagctttcttaaatattattattatattggttgccgaaaacctcggtcaacacgtatcatcagttcttttgatcgatctgaagaggggcagtccgagatacgtagctttgttgttcatccttctcattcccaaaagctgagagatagcttgggcttttctcgggttacacccatggaaaaaaatattaaagactttagcccgttaactgcctggcccgaccaattgcaatacaagtttaggcaatcaaggaatgatcttgcttctttgatggtaccttgcccaaatagaataatttcgtcagcgaacataagatgagtgattgccgtccctcttctagatagcctgaaccctttcagggtcccagccttctctttggagaaaagaagtcttgatagagtttcagccgcaagtataaagagggaaggggagagtagatcaccttgtcttaagccttattctggtgtaaatttccgcacaatacacccatttagcagaagtttaattgccgataccgaaatgcaggttttaatccactcagtaaacgtgtttggaaagccaagaaggcggagcatcttgataacaaactcccatcccattctgtcataggccttctctagatcaattttaatgagcatgtatccacctttccctttcctcttcttcatagagtgcacaatttcccgagcaatcattgcattctctgcaatgtggcgacctttgacaaaggccacttggttgggggaaatgatcttctagagaaaaggacgcaatcgggtggcgataatttttgatattactttgtatgttacattacacaaagcaatcgagcgataatcaatcacaagagaaggggattccatttttgggatgagaacaatggaagtgtcattgatatagcttggcagttcctgttggaaatatattttatcaggaacttagatctactcacaannatgttgatttaacaacctaaaattgaacttctaaaacgatgaactaaacacata

SEQ ID NO: 118019 - DNA, 2498 bp, Cannabis sativa
  modified_base (379)..(382): a, c, t, g, unknown or other
atagggttatgcgagcaaggcatagccaggttagggtcggtaaccaaaaccgaggtaaacctactaaggccttgttgtatataaacgtgtgagagcaacacgtaggtctacgccacgtagacataaaaaggcatgtgaacgtaacatgcatgactatagcacatagacaaatagtgcagtggtactattaattatgtgttatacatatggagattaagggttatgcgttcaaggcataatcaagttggactcggtaaccagaaccgagatgaaatattttaaggtattattgtatttagacgtgtgagagcaacacgtaggtttacgccacgtagacataaatagatgtgtgagtgcaacacgtaggtctacgccacgnnnncataaataggcatgtgagcgcaacatgcaggtctgtgtcacacatgcatatatgaatggcattactgtttatatagtaagataaacatgtttttgatattttatactgtcttgctgggcttgggtcacgggtgctctactgtgcaggaaagggtaaagttgtttctgatcaaccatgagtataggagttggacgaagaatgtacatgttcaggccacactacaccaagcgggttggggtctaccagtgatgtaatttttgaaactctgttttgtcgcttaagtcggccaatggaaaaggacttgtaataatgttttgtaaatatttttgggatcccgacttttgtaacttttagtttgtaaagtttaaattactacaagtttattttcattatttgttattaaaatttaaactctgcgctaattttattagtaatcccgtttaaggaattagggtttcttaagtatcttgagtagcgtgcctaattatttagggcgttacaatgcatttcctatgtaacaaattaaactatctcccactactatttattttcaagtcgcgaatcctatagcctttactactccttagcctttattttatttaatgattaaatacaataataacatacctaaatctctgaatatcaccgtgccactcattatatatgtatattagacaatgaaaatccaacttaaatattgttcataatcattcatgaagtcaatagtcacccgttctcaccacttagttaccgtgcccacaatcatttatgaaagtctaatttattaaaattacataattttcatagcttaaagtaatactattcaaataacatattctaaaaattcactatcttcacatctagttaacataaataataataataataataataatagtatatatatatatataacatagtagaaaataataacaaaagaaattggttattacagatttttagttctttctttgtttgttatgaaaagtgtgggactgcaggaatgatcaattatattgacagaaaatttccaagccccaaatagttcttcactggacaatgacctacatacaacaatactagtttcctaccgaggctcccacatcttccttggaaaatctggctactcgttctcgcccctaatgggatccgccaccaactggtcatttgaaattgaatattgatgtagcccaggatatcataacttgtaaaatgggactaagctttatagtccaagactataacggtgttattcttgctgctgcatcctttcattggactggcgttttttctcctattttgatagaagagctctctctcttcaacagtctcttaaatggtgtcatgagaattctcttcgcattgattttaatgaaactgattgtaaagttttggtagacagccttaaacaatctaccattaccaacatccatttacaaggttttgttacagatattaatagcttgttatcttctttccctcaagctactctttgctatgtggctcgagaagccaacacacccgctcactacctgacaaagtatgcttcgggctaaataagctatatgaccataagaacatttcaatttacttgcttctatctttgacttttaactatatatcaatggatacacatgttttcttaaaaaaaaaaaagaaatataaagaatatttataaaattagatgagaaagagaaaaaagtaaatataacaattcttcaaattaagatcacctgtgaaaaattggtgtcccataatatattaaaccaatctaagtgtaccaacttaactaactatctttcttaaaaactattaactatgtaaacagttttttataaaatactcaaattaattgacgtgtcatatttaaattggtttaatacactagtataccatcttttaacagaagatcttaattcatattagatagtggttggtcaggagtcttatggggtcgacttgacaaagacttgtgtttttattttattttgttatgtcttattgtcattcatgggatgaatgcgtgcacgcactctcataggttacgggtgttcataaaatagccgatccaatctaatccttacgatccaatccaatccaatccgcaaagtgcgga

SEQ ID NO: 118020 - DNA, 1018 bp, Cannabis sativa
aatttgtaactaaatattatattttagtcacaaataattttttgttgtaactaaaagtcacatttagtgacaaaattttatactgtgactaaaaaattattacaaaaagtaaaaattttttgtagtgtatattaaacaattattattagttacaggtgtgtgttgcactacctaaatataatatcttattattaattagccatattttttttatttaattatattaataggtatatgaaattgacgagtatgttattaaatactcatatttttttttttgaaagaaaaacactcatatttttaacatttctatatcaatgaaaaaacatttctcatcgaaaaatgtgtcttgctttgatttgggaggtgtgttttatttcccgaattttactgagaaaataataattggatacacgtgcatcccatatacacatagcatgcaccaccatatgtactgcaagaacccacttaacacaattagtggactttcgtatgtgaaagagaagataagaaaatgttggctttcactatcaagatttatattgaccgaagcactattaaagtttaattcttttccttttttttttctttgtattttctttagaaaacatttaatctattttgatgcattggactgaaacaaaaagaatattgctatcagatattatatattatgctaatgctattttgttaataattaaatttattgaagccaaaagtttgtccaataaaaatatgtatatagcactactataaaaattatttttagagacagttttttaaccctttcagcgtcggttttggcaaaattcgctaccgacactgatcagggcgacgttgtagggttataaacgaccgacgccatctatacccctatagcgtcaattattagctaataaccgacaccatatatgactgtatttcaattttttttttttaaattttatttaatttatttaaattacatatttattaatttatatattattttatttaatttaaatttaaattacatatt

SEQ ID NO: 118021 - DNA, 1105 bp, Cannabis sativa
  modified_base (1056)..(1059): a, c, t, g, unknown or other
agaagaagatatggctggccgacccatatgttgtgctttcctagctagccagcttctcagtattatagctctggccggctagctttgcattgttccatacctggctgaccatcctttaatagtgcaacaatttgagtaaaattagatatataacttaccgaattcaagtgctggagaccactggatgtcagccactcttgctctctcgtggcacacatcatgtgctacatcaatcctagaaaattgcaaagcctgacaccatcatcatatgtcgtcaacattttgtaagaacggaagtagttggccttctgatccatctcctagatggagtcattgaaagctggtacagttggggggtcctagccctcctttctcctttagccttcacggagggtccttccttcgtgatatgtttgtcctcaaggacagtctcaaaaaccatcccttgttgggacacttaagcaggaaccacaacttgggttccttctacgagcacttctccttcaaggccaacaggcgcaccttcaattgcttccacaatgcctaggtgaaaatcctggttcaagtccatctctatgaacacaaacatgaagagaagccaaaatttttgaagcaatcagctaataacccagaataaaaacttaccagagttgcattccaatcgataaacccctgtgatgtatatacatgcatacacctatgagccctaaatggccaaaaaaaactactcagacagttctagcctccctttcaatgcaaggagattctcagatagattcatcccaaggctaaaaaaaatttcatacaacttacttaactattcaacatgtaaatagtcctaaccctagcttgaatgagaaatttgtatcctagacaagaaataataaaaagttcaaccaggagttcaagtacttacgtgttgagtgaagagaagatgggaactattgtagaatattaccaggggccttcaaacccagtcgattaaacgatcacaattggtctagagtcgaaacctttgtctggtatggggttcattctgtaacaccctaactaacnnnngcgtattacgtgatttttaaacattctgtgcagctcgttgctaatc

SEQ ID NO: 118022 - DNA, 1387 bp, Cannabis sativa
  modified_base (97)..(105): a, c, t, g, unknown or other
  modified_base (1201)..(1203): a, c, t, g, unknown or other
acaactttcctttcaagtttgaatacaccaaataggaaaccatattaatgtatactagccgaaaatatacaatgaataataaaatatttttgtcaannnnnnnnnccaaaaatggaattaacacatttcaacgaagataacaatgatttcgcttccaatactttgggtgcaaagggagtggcagccaggaacaacggaggtagactttaacattagggtgtcagtataaatttagaacaaaaataagaaaaaaatgcaccgaatgttagaatatttataaggaaaacatgaagctattagaacagaacagaggaaaagtatttatttctttattgaaagtaaattgaatgaatacaaaggaaggaagctgcagtatatataggcagcaataaaccaaaatagaggaaagaaaaacacctcaactaacttacctaacccaactaaatagctaactgaaataactaattataacggttttaataggtcctttcaagatggagtgtaaaattttttgacacccatcttggatacaatttcattgaagtgagatgggaataagggtttggttagtacatcagctatgttggttttggaggagacatggttcattttgatgttgccatttgagactttttctcaaacaatgtgacagtcgatttccacgtgtttagttctttcatgatgaactgagtttgctgcaatgtgtatagcagcggagttgtcacaaaagagagtgaaggggagttgtggttgaatgtggaaatctctgatgatgttctgtagccaagtgagttcacatattgcattgccatgaccctatattcagcttcagcatgatcgtgatactgtgggttgcttctttgattttcaagagataagagatcgaccgaggaagacacaatatcatgatattgatctttgagtgttaaggcatgcatatgctccccaatcaacatcagcaaaagcttggaaatgaatggtagggcagtaggcatagaaaaataaaccttgtccaggagtgcttttgaggtaatgtaagattcttgttgcagcaaacatgtgtggttcccttggttttagaagaaattgaatgagtcgattgacagcaaagcttatatgtcggatcttgtaagatatatgtgtcagaaaataaatgtgcgaagtaaatgaaaaaggaattgagaacttactcaaggatcgnnngtctggattcaggttacgccaagctaaacgagcagttcttgtgaaaacacttcagcaaagttgaagctaaaacctctctttttgctctgaacttacttagcaaagaaggttggtgaaaatgagtttgtgaacaaatgctcaatggtatttataggcaaacaaagaaaaggggtaatcatttcaa

SEQ ID NO: 118023 - DNA, 784 bp, Cannabis sativa
catatcaaacattgtcacagggtctcaacaaccatagaactcagagtccatataaaatacaattcaaccgttttaaattccaaaaacatttatatttatatgaaaataaaataaaaagagattaagaaataaaaatagaatgataagatgtacacctttttaaattaatttattatttgaaaattatatttcaaattacaaccaatttctcatgccttaaaaaaaaatatgaaacacattgtggtggtcatattttgagttaaaaaatactgagttataatttacctatgttcataaccccgttcgtgggatatttatattattatatattataataaaattttagtaattagagtaatatgcgtgtaattaaaatttatcctacaaaaattatcaagatgctgttgaaaaagtgggacgtgtttcaaaagttttgacttttcaaatacagatatgagaaatgctttgggcacaaacattgctattaggcatagtagtgtttgagtgctagtgatattttttaaatattatttttttaaattgtatgtgatttggtacttaattatactaatagcagtataataccgaagaaggtattaaataccaagggtaccttttagcaattctctttgagcactcatgttgtctagtatttttataatagggtgttcatttaatttaatccacattattttactcatagtacatccgattcgcattaggtggcgtttggttagaggtaatgaaatggaatggaatggaaagaaaacaattttcattccat

SEQ ID NO: 118024 - DNA, 1288 bp, Cannabis sativa
tttattccattccattcctattcttattcccattctcattcctattcctatattttcattcctctcaaccaaacgcctccttagggctttggtgggggctttcggtggtggtcacaatgacgggaagggaactcagggcttcagagagagattttaattttttttttttttaaaggagtactttgttattataaattaaaaggataaattatttacaataatagagtatagtaatagaggtaatttgggtgaccctttgacatgaatattataagaaataaggaaagaagactagaaatatccccaattaaatcattaaaagaatcaattgtagaagaagatgcatggatagaatgagtgatgttttttttttaaaaaaaaaaaaattgaaatagataaaataagtatgttaaaatgagtcttcaaaaaaaaagtatgttaaaatgagatagattgatatcaaagtatttgattttttttttttaatacggggtaaaattttaagcctatttaataaaatttcctttaaagaaattagaaattataataatgctggatgatagatttactatcatctgacacaaattaaatggactctaatggtaaaagaataaatttctaaaagcaactccaatacaaatatcttaaaaaatagccaacaattttcacatcatcttaaaatattatattttattttttcttttatccacattatttttcactatttactctttaatttactccaatgctaaacaattttaaaagtcatgagaatgaatccatactctattgtttaatatattattaaattacttttaatattacattaatacactttttggattgaaaaattataaaaaaaaaaatagaaaaataactcacctacgctgcttaacagtagcaattatagcagcccacaaatcttctatagtggtcaagcaatcttgattgattcttggactgacaaaaggctgatgagcaacgtgaatacatatagcattggagctactctaatagactcttttgttacttagactctcaaaagctgtcaaatttacatcaaaattttaaagtacacatacatatatattgtccagatcttaaattgaaagtcaagtacacatggcttgcaatagtagtagaaaaaatatcaggtcaaatccaacccgattgggtgaggtcgggtcagacctgattaagcttgtgaggcaattggggcggggcagggcggggcggggaaatgccttgtcgggtcggggcgggtcagtggcgggtcggggcagacctg

SEQ ID NO: 118025 - DNA, 1156 bp, Cannabis sativa
ggcctttccgttgggaagctcgcggtaaacgcccacctgacgttgaaccataccatgccaataacaacttgaacctctcacacgccatcaccaaaacttttaggaagaaaagagaatcatcagcaaacaacaagtgagagataatcagtcttgaagtaccacaaggaatcccatggagagagctctcaacataatcctttttaaccaaagtactcagacctttagcacacaacaagaataggtaaggagacatagggtcaccctgtttgaggcccctctcaatcaaaaagaaccatacactcccccatttagcaaaacaacatactctactgttgaaatacaatctaaaacttttctaatccactcctcgtgaaaccccaattgctccataatctttttcagaaaagaccattagtcctggtcataggcttttgacatatctagcttgacaaaaaaatacccaggattaccaactcttttttttttctcaatgaattaatgcactaaaacccaataaaagcgtcgtcagtaatcaaacgactggaaagaaagacactttgttcctcagaattcacataaggtaaaacttatctcattctattagtcattattttagtgataattttataaatgacattacaaagactaataggacgaaaatcaacaggcttggaaggagaatcaaatttaaaaataagacaaataagactcttattaatatctttgagagttgaagaaccattaagaaaagccaaaatagctacaataacatcctcactttctttatcccaattcttctgataaaaacaagttgtcatgctatcagggtcaggacttttagaaggacccatttgaaaaagggaactcttcacatcttcaccagagaaaggaagagttaactgattatttataagtcccaagatcttaacatgatcaatagtaacaactcaatcaaggtcactacaagagggaataactgaagtgaataatctagataaatactctacaaaaacatccttcatggcatctaagagacagacactccatcagagttaagaatcatagcaatcctatttttcttcttcctactcgaagcacacttatgaaaatagaaagtattctttgttagacttttatttgggcttacattaaattt

SEQ ID NO: 118026 - DNA, 804 bp, Cannabis sativa
aatggactacaagttaagaattctgaagaaaaaaaaaacaattctatattgttaaagagtgcaactttatatttatagtggagtaataatagaaataataaagtagattattctattgaagagttcaataataattaagtgtttattggagcttcgaaatataggttcatttcatagtaccctacaccttcatgaccaaaagctctaagaaaaagtggctgcataagaagaagctcaaccatatcaaaatcagcaaataagcaaaatgcaaagaaagaattttgagatatgttttaactaattttgactaatttttttttaagtaccaaaacaatcttttaaaggagtcgactccaaaaaatttcctattgtatgacaaatactatatagatcgttttcagcctaacttattttcttttggtgcttcaacttgtatatcttcaagctttggtgtctccccaattccccaacacaccacacctaacaacaactcaaattcaaagtcattatttgacttcaatcatagattttgtttttttttttatctattattattataccttttaaaattagttgttgtatttataaattaatgggtttgatctttgtcttgtagttatgggattgttgttttatattagctcttattagtagtcaactaggctaatagtttataatattttggacaaccatttattgtaaattactaatacaagacattgaaacacatctcttatgaacttttttttggtaagtaaacaaaaatgcaaaacttttttttaatggaaaaattatctttattaa

SEQ ID NO: 118027 - DNA, 1301 bp, Cannabis sativa
  modified_base (1245)..(1248): a, c, t, g, unknown or other
atataataagagaatcgttaaaagataccggtgtttagcatatttttcgtgttacactgctgttggtataattaagtatcggattccaattaattatagagtgccacttttaaaagatgctggccaccgttaatatatccaactataacacgctctatatataactaccaacaaactatatttattttcatttaataataatgttttccaatttacgtacgttactgggtaaaatgatttatttcattatcttttggataatacatcttacttgtttttcatatttgggtgggacaacaataattaattatgaggtaacaacacttatcagtactaataactcatttttctccgacatttatatggttatacactgtttattcaaataattatataaaagaaaaccattatataacacactactgtatgtacccaaattacccaatcagcttaagccaacccctcaactagcatttaataaataatttaatttatatgtgatagtcatctttttaattatctgtattatatatattatatattattagctagctcgccatgcacgacctttcatccgacaagtgtaccagccttatatttataacagattgatatatataatccaactttaagagttatatcatcgttgaaaattgtgacaataatttgataattacgtgagatataatatataaatataaatcatgcatcattttatccaaacctcacattttattaaacgaaaaaaaaaaatcagagaaaaacgacattattagttatatttgactagttctgtgtgcgtaatgaacaaacatatcatcatcaagttaaatcaaatatatatcatacaatccagataagtatttctgctatatgccgcctctatatatatatataaatataaaagatatagaagaaacaatgattttcttctcaaagaattactagtacttttaatttacatctccaaatataactatactggcgatcaatattgcaaggtatgtaaaatagctacgtcttaatttcattgtatgccaagtactcagaaaaagagacaagatatgtattttgtgtgaaatataatttagaacaattactcaaaaaatttaggggcccaaaaaagtaatacaatatagtatatagcaggtcgccataagtttccctagaaaattctttcaataatttattgggtaaattcatttttagaccctgtgttttacaaaagttatcaattggaccctnnnntttgttaaatgacaaaattgaccctatactttctaaaatggtacaaataggac

SEQ ID NO: 118028 - DNA, 2244 bp, Cannabis sativa
agtggatttaaaaattccatagaacaaaggaagctattctgatttctagggttgtagtgtttttctctctgaagaatactgaagaacacttttcaactcttactcaatcaatgcttatcatgttctacttataggctctctctaggttaggtttagaattaaatggactttagaaaagaacaatggaccataaatcaaagctttggccgaattcgacatgtgcgcatttaggctttgatttctgccattttatttcatttaaatgaaacaatactatcttttccaaaatataatttatctaatcatttttatttaattatcaattttttctgtttgacaattattaataattaccaaaaaaacttctatttcaatatatttattgataagaccttcaacgagtcttaattaacaaacaaacactaatctccctatacttctcaaatatgtccaactttagagaaaattctcaaacaagatattgtcttactttagaattgtaattgacttaataaatcaattaactgagcctaagggataatattaacccaaattgtgtggggaccatgagactatgtaagtaagctcctaataagctaatttgaaatctactaagtaaatttctcgacttattaattcatcatgactccactagagtttgttgacaagaattcacctcatctagtttgcaaattgaataaagcaatctatggtctgaaacaggcacctaagcctagtttggtaaactcacaggtgccctactctcctttggttttttgtgtgcaaagttagataattctttattttacagggtcactaatgctcaattacatatgctcttgtctatgtggaacataaatttcttatagggagttcacctcatgttgtatcatatcttactcaacaactaaatgccatgtttgctctcaaagacctagggcctctctcatattttcttggcatttgagttcagtatactactcaaggtattcaaatcccgagcaccccaatgctaagattaacaatttgtcaatctaggtgccttccaagtatcaaatcgactatctgatttttgcatcttttttatcttcataaaaaatagggaaataggtccttttggggaagaaacaatacttcttgggtgctaaaaacaaggcttagtacccaggttgacacctggggcaggcccagcgcccaagttgacattttttcaacctgtgccaattttgatgatggtttttgagaactattttgatcattttcttcgtttccaaaaaagattgagatacaactatttccaaggaccaaacaaaacttttcaaaggccataactgcgaccaagcgtccaggttgacacctggtgctaggtccagcaccagcacccaggttgacatattgtcaacctaggctattttcaatcaagttcaccaaaagttattatgggactattttttatgataaaaaataatttagattcaagaaaactcggggagaaaaccacaaacctaagcccctataaacaaggcgcagtgcccaggttgataatcaatctggggcgctgcttttaattgctcaaatttcaaatctgattcgatcaatgaatttggaatggtaaaaaacgggacaggatacctcgtcttcaagttcaagagccttagaagtatcaaaacgtaatcctgagagctcagaaatagggcatccgacacccaagttaacaaatggcctaatgcactaggttttacttatccaattttgattatgtttcgattgtcgtctagtttttcacaataactaagattcatgaattcagagaagtcaaattcacaactttaaatttctcatttccaacatgggaaactcactcaaaattgaagaattttgagtctctcatttttgcagaaataacatcttcgagaactggtaaccagctttgccaaaatacagaaataggctaagtgatgtcaaaatatcatttaggcatcttaaaatgcatcctttggacatttttacacttactcatcatccaggttgacctcatatgtcaacttgggggctgaatgccaacctgggcgctggttcatgaactatcttcagtaaaatagccataactcactcaatattgatctgattggtgtgatagaacttgcatttcgaagataattcaatgctctatcaagtcatgtataacacttcaatcgtaattttgaagatatcaacaccaaattttaccctaagggagttacg

SEQ ID NO: 118029 - DNA, 1394 bp, Cannabis sativa
acaaagatttttcatttggagaatttggaaagctagtgagaaaaatctctgatattttagaacttatgaaattgtataaatatagtttacacttgaatgaagatgaatggtgcagagtaagaaggcctttaatggaatggggtctagtgaggctgctaaagcaatcacatgatattgtcttttttaagtaccaatatataaaagagtgacatatttcatacaatttttctgttttttgatgcaactattttgttccaagtgggctccccttgttggtattttacttagtaaggtttagacaaatcacatatatatgtgccagttaacaaaacttccattaatgagttagaagacagactcatgtgaactttcaaatgcttgtacttcatgcaaattacaaagcaaaatcaattagacttcacaaccactagttttgagttaaaaacttttgcaagaaatattttcttctctataaatataggcatattaccatagtactaaatcatcaacttttctcatattctctagcctttctctaaaccaacaacaaaaaaaaaagcttgttaacatggcttttggattgcctggttttgttcatggtaagaaggcttttcgaagatctctttcgggtattaaagaagcagcttcaaagtctacaaccattccaaaaggctactttgcagtgtatgttggagaggagcagaagaagcgttatgtagtacctctttcgtatttgaacaagattgcatttcaagaattgttgagtatggcagaagaagaatttggatatgatcatccaatgggaggactcacaattccttgcagagaagatgttttcattgatataacttctcaattgaaatgaatgtagtttgtagtactagctagctaaaacagttttgtacatataccatttctccttcctaggaaagagagaattgtttggttactgagaaatttttgaatagaaagtgaaatttgattattatgtcctttgacttgttctttagttcattttgcttgttaatcttgaacaatatgtttgttaattatatcccagaattaaaatctattaggcatgaatgatctgaattgttatcacaaaatctctcagcagttaaagaaaaacaactctaaaaaagaaaagaaaaaaatattatcatgggagggagatattaagtttcacatatgcttttgtcctaatgagtagtgaaaatcaaacaaaaactttgttcaatttcaattaaagaattatttttgagtaaataccattttggactctgtgttttgtaaaaattaccaattgaaccatctattttgttaaatggcaaaatggaactttatttttcaaaattatacaaagaggaccctgaattaattttttgtcaaaataa

SEQ ID NO: 118030 - DNA, 621 bp, Cannabis sativa
aacaatataaacttaaataaaacagcataacttcacaaaagaacaatttttataaaatagaaacgaaatggaaataatagaagttcaaaatagaaatagcttttataaaaaaaaaaaaaaaaaaattaataaaaacttaaaaatgaaaaaatataataaatgcagtatatatgataattcttaaaaaaatattcaatgccattgtacttgcagtagatttttctttaatacgatggttatgatgcctctcaaatataagagcaaaggccaattcgcttgtacttataatttctactcatgtttttttattcttaacaaagttaccaagtacaattttattttgaagaaaaaaaaatgtagatggataagttttcaactcattatttgacatgtgtaatgtgcaagtgactgtttccacagtccactaaggaaatagtacattacgtaattttgagaaatattaagggagaagaaaatggttaatgaattgtgtgttttattaaaagaatagtatctatttatatagggtaaatactattttaaaccctgtgttttgcaaaagttacagattggaccttgtattttgttaaataacaaaatagactctgtattttttaaaat

SEQ ID NO: 118031 - DNA, 1211 bp, Cannabis sativa
tgcatctgcaaaaatggtggctaccaagaaaactatctttgttaagcctactcctctaggctaggttgttgtcatggacgacgttaactactccttccaggggacgcccagctgagcactaaaaaggatagggaagcatctgaagttggtgaccaattgactaataaaacccatcaatgggaataacatgttgaggaaaacctccaagacgatggagaaactaaagagatattattataaaaaaaagaccttgaagtggtttggatgtctagtgagctcgctaaagctcaatagaagttggcagcgcaagaggcattttcactacaaatgtagaaaatgttggcaatgctacaagccaagcttatagatacagaggagaattttgaagaaaatgctccaaaagagcctgtccagacatgagcttcaagacagtgacacaaaatgtctagaagaatatatagtcgctttgacaaatagtgcaaaagaacattggagcaatctacgacttggaagttgaagatccagaaccatgtgtcaggcaggtcattgtagttgcattacctgtaaacttcaagatgccacagatggagttgtatgaaagcatgacggacactagggcccatctaaccaagtaaaattgtttaatacaagtggctagaataagtgatgatgccaaatacttgtgtttcttactaacattatttaaatctagtgaggattggtgtaagagactggctcctggatccattcacaactggaagaagttacagtttacctttcgaaaatagtttattgctgctagagattacgacatggaggttggatccttaaccaacctcaagaaaaagccagggaacagcctgaaaaacttcatccaatggatgatggaagcagtcgccaaaactaaagtaactgatgacatgaagcttgtagccttctagtttggactaatcgtaggctccctcttatggagcaaaatgcaatgaaagagggtcgagacattgtccgagtccatgtctagagcctaatgaatcctcaatttggaagatgcttatgtacaagcttttggagtcactttagcaccaaccccaccagttacaacaccaacctatactctgtaagttgtagtcccaaaagccatacttttaggaacacagtacacaacactagtgtctacggacctgctacctctgggcatgcacctatgcaga

SEQ ID NO: 118032 - DNA, 1104 bp, Cannabis sativa
gactctttttatatatgtaagataacaactctaaatcacatcacttcttggcaagtttgaaatttttagcaattgccaatgtacaagcttgtcatctcaatttcctgttgctactatttaatgagggcttaagtagattgcattcaaatatgtatgtataaacacatatggtattttttatcagttcaaacttctgaacatagttttcaaagaatattcacaagaatgacttgaattggcccactatgaaagaaagaaaaaaaaaataacataacatatatactatcatgaactggtatacagagaattggggtatgtattaatttcctattataaaaatcaatatcaaaagttgaaataacaatcaactccatttcaacaaaatttgggaagattttagaattacttcataaaatcagtaggcttatttcaccaaaatttggaaacctaaataggagccttaagggtccatctcaatcaactccatttttaaatgagaatataagttcatagttgcaaaaagattgaaaatgagttagaatcgaaatttgatatccaaggttcacaaattaccattcttaagaagacatttagattgtatatgatagggaatcgtttttaatatgaaataaagcaaaaactattataagtttattctttttcaaaatcttagaaacaggattctccaacttctgcattataagtagacaccaacatttcaggcatgcctaatcctcccttaggcccctctcctctaataaccacaaccttcccctgaacaataaaattttaacaaaaagttaatacaacattcaacttgttgactccaataaaatgatacgatgttaaaaaaagcaaaagcaaacaaactgggatatgattagttaatagaaaaaaaaaaaaaggaggcccaataagactggtttaattagtatgtattgattacatatactatgaaagtcgtggcctacaaatacaaatagaaatatttaccttaacggcccgtttggtacgcaggactggattgggttagacaggctaatttgtccaatccaatgtttgggcatgttagaagtctggataactaatccagttaacctcatc

SEQ ID NO: 118033 - DNA, 1318 bp, Cannabis sativa
  modified_base (728)..(731): a, c, t, g, unknown or other
caaaataataatgtacaatgtccaatattgttttatgactacaattcgccgcaagcatgactgctccaatgtttgaagaggcgagggaattaactaagcagtggaaaaccaaccaaagtgattaattatatttattaactaattatagtgctattaaaattgcatgatggcgtggcaatcaacatggcaagcgctgagtggaaaatgtcaaaaacatgccactaagttattaggttaatgaaaagagcattattattaagaattagtggtccctaatattattattaaattattagatgatagtttataaatggtttatctttttttataataattaattattaaattagaaaatgtaatatcacttttaaattcactaacgatataaggcacattctaactgcccttagcattaatatatataatgaatgaatgatatgagcatgtgttgaaagctttaagcaagtatccattaaaaagtttccatagcatatatgcttaatcatagagtcatatatttataatctatttgattttcttaaggtattataagatttgttaagaaacaaacaaatagtagtgtttatataaataaatataataatatttgtttgtatttttacagctcatcaattcatcacttaggatatttggattttactttaaaaaagttagaaccagaatgcttggagagaaaggttactcatttatatatatatatatttatnnnnatatatatatttatacatataaaaaggatagaataattagttatctagatataaacactactatttgtttgtaaggatgctaatatgcataattatgttgatatgtgaaagactggtcctctgttgatgtagatagtcatataaaatgcttactaaagttttccttataataatttgggccaaaggagagagctttatatttatttattaccaagtttatttcatatgataagtccctatataatgtgtagagcttcttctgagatctgaggtgtagctaggaagaagtagaatgtgtttctatcgatggaaaaaaaaacaccatcaattaaggctcctaaccaccctcaaaggcttccaatattccatgcataatatatatatatgtcgattatataattactacgtgtatattaaataatagcgtgggctattggaagttctttgaggaaggttataagtcttaaccattattattattatgttcatatactactcgtatttcatgaatcatgatttaaagaaacaacaatatctgcacacacaacacatttgtatatactcacaccatgtagatatatatatat

SEQ ID NO: 118034 - DNA, 1831 bp, Cannabis sativa
ccacatggaaattgaacacttgtgttgtactttttcaagaatcatatgttttgattctgttgacaacataatctaaaagatagactataagattcttataatggctgaataaaggtgttaagtattgatcccatagtggcctgtaaatcttatcagactgtacaccttttttgacatttttgtcttctcaagctcaaagatcgaaatgaatgaattttatgttagggttttaaaagtaaaaaaccaaggttcatcatcatattgtctttttttctttcacatctttaacctgtgtttctagtttatcttagccttcttttttgcataaaactcatccacagacgaatataaagtgttactagcttaccaggtctgcaatatttccaacacattctcctttagcagtgacatctccaatattttctcctttagcaaaggctttgtaaatgggtgtacgagttgatgtcgatgtcacagcagcaatgttctatcaggaaaaaatatacttagatataaaacagagagactcaatcatgaagaaaagatgctatgacaaaactattaaaaaccttcgccacattagctgcacacgccaaaggaagaaaaaggtgaggcacagtggcagttgccaactccacaccagcacccaactccatgagaagatcaccagcaaatcgcatctgaatcacaaaatgacgggcaaaagattgcttgactaataagaatatgcttagtaacaatttaccataaacttgataggatagcaacttaaactaattctacctgttttagatcataatcaaatttctttccctgccgggcaaaaagcattttcccaacacgaccagcaccatcctgcattcatatattcaattcattttgacatttggcatagacaatttccaattatctcatgagtaggactagatcataataaattgcatccgtatgaaaattctcattttgccattttttcctaaaatccaatggaagattaaaggtcagcaaaacacgagaaaatgaactccagattaagccattaatctgcagttatgttataaacttattttaatctagatgcataaacttcatgcttattaagcagtttcagcgaattccctatgattaaacaatgcaggcatgtgaattcaaatactgatgcatttcaagatgtgagattagcttcaggtccaaaattatctactttcaagtgcatatgttaacaaaaactagcttgatatatggaaggtgacttcacaaattcatacagttttggaaagctaagctacagcaataaaaagaaatcttctgccaaactatatgaatgcttctattaccaagtatataaagttaacgttcttgagatcgattggcaaagaccattaacttacaagcttaaccataaaagtgacacaatgtacagtatcactcttaccttgagaatccaattaatagcgatagcaccaggggtagccctatttctggagacaccaactgaatttaaaagagtttgagttgtgaaaacacccattgctcccccaaagaagtgctgaaacagatataggcagaatgacaaaaatgtatcatttactggaagcagaaggcagctattagcaaggtttaacaagaactgtactttcaaattatctagttgcatagttagacttttacataccttcaaagctctccatgtcatataggggacgtaggatggggttacactatcagggaaaccctctggaacaacataggatctaacaaatgctaccaaaccctgcactcaaatatccatatattattaaatcatagcagaaaaattctcttcaaaacc

SEQ ID NO: 118035 - DNA, 3330 bp, Cannabis sativa
gtctgctattttttttcttcaacctctaaagctcgagccacgacagaaccaaaaaattgacgacaaatgacgaagcctctgctatctttttgttcatctgatatcttaatccagctactccaactgtagatccaagatcccaatctcgaaaactcaaggttgacaccacttgaactctttttacttctttgtttctatgtgcctcacttgcttttttttttttcgtgcagtcggcgttgaacaacaagctttggcatggtgtatagtttttaggtttattttgttcatatttattttttaactattatgaaaattttctaggtttgtattgagctctacacccatattcgagctatgtattgattcatgggaatattttagttcaaaatgttttgtgttttttttaattaatctataaatcaatttttgtgttgagtgtatatcgattatgtatatccatttcttatttaattttatggagctgatataattttttttgggtttatttttttttattttatttttgacatttaatcccggtttttacataaaaaccgggataaaaagaggtcttttatcccagtttttaaaaagaggccttttatcccagtttttatataaaaaccaaccgggataaaagacctctttttatcccagtttttatatgactttttatcccactggcatatatcacggtttttattttagctaaaaccgggataaaatgcccttaaaaaatgggataaaaagcctctttttgtagcagtgtacctatcattaattaaatatggttgggagatgagcaacctcattgattcatatggttgggagatggagctacctctcattattacatttggttgggagttgagatttttcttctataaatatagagctcttagaatagcatttgtaattcaatacatacacttcagtacatgcaattctgtgtctatgaattcagggcgaactattcgagtacaactttgtacaattgggttcattgggaaatccatgagagagagcatctgtatagctaaatttgagaaacacttgacagatattattagtaggaagtctgtatctgtatttagtatattttctactcagattaataatattagctgcctcctatgaagtaagcgaattgccgaaccacgtgattctgtgtgtgtgtgtgtgttttttttttcttattcaccgctttgatatatgtatttatcgctatctttcgctatttattgctttcgcgcacaacaataggatgataaagatagagaatgatgtagggtttggggtatgtaggcttaagccccttttttttttaataacttttaacgtcagtgtaaaatttatattgtctttaacatgtgttgttaatgggatcaatacttgtaatatgatgttattaacgaattgttgcgttataacaaagtgttgcgtcaattaatgtttgatgttatggggtgacgcaaaaagtcatttttggagtaattaacgtgtaaatcctcattattttatagacattgatcacactataatagaatatagttgtgcttgtgttcgatccctgcgaaagtacagatgctacatttttattttgcacttttggataaacgtagcttaacaagactcggaaatcattatgataatttcaataaaaataaaaaaaaaactcggaaattattatcattgccttcatgtgtgctatttggcacttttggactaaatatgcttaagcaataaactccaagttcacaattgcctttttagcatttaatgcatgacctaagtatatctttcataaagttagataatatgtatttttaagtgggtctttttgaataggaacggaccaattttgcattacttggagtaggtagctatccttgattcttccctaaaggcctttcatttcaatgtacttactttattccacattgtgaatgttatgggcccggcaattccgaccccaaataaattttagtactaaaaatacaaattaaaacaccaaaaaagtatctagctttgaataataaagattgcttgtcgatattgcattttagaaacacgattaagttttgtttttttttaatactctctgatagtttggttgtggaaaaaagaaaaagtaaaccgaagcctatgaaatagtacttcttgcagtgtcacaagcaaatattattgatatatagctagctagtgaataccaaaactttagagaaattaaattattatacacatcaaacccccatgataattatatatgaacacgtatacgtacccattaatatatactttgaaataacaaaattaataaaaaaagaaacaacaattgatttttctttttcttctctttggctttggaaaaatataaagaaaatgtttcattggataggtaacaaaatgcttaagttattatttcaataactaagaacagtactagtactactcatagtcatcatctgttgtaagaaaagatcacctgtgatatcatctaagaccccattgagtaaatgtttctcaacatctcttacaacttcatcaacttcaacgaatgcaaacatgtcttcattccaacccaaatcccacatgcaattcacatggggatctttgttaaacagtacatcactttccaacatcctaggcagatactcatccacttcacaatcatcctctacaccgttcctaccgtaggatctcaatttctcaaagtccttactcaattgtttgactagccaatcaaagcttgttatcttcaccaaacttatactaacacaacaaggatataatgccaactcatgctttctccctattcttctcatcagctcatacccacagtctaatatcagctttttgtcttcatggtcaccaccatgatcatgatcgccattattggggatatggagcttcaagagagcctctgctgtgttaaggaacagttgattcttaatgagtatctgcttaagctggttttcactctcgctcagcggctccactactacaataagcttattattattgcttatagtgtccagtactgatttctcatgattcatcaattcacctacttccactgttgacatgtccctagtggcttctttgttgttattattggctcctgcaagttttcgagagtgaaatttgatgactctatatgatgtaagcttagcttttaattatattttcaggggatttttctatgtaagtgatattaaattttaagaaaacaaaagtaccttttggtaacacttttttaatcagtttttctgtttttaaaattgaaaaagtgaaaatatttttcaaaaacatgttctatataactgtttt

SEQ ID NO: 118036 - DNA, 1997 bp, Cannabis sativa
aaacatacaccatattttaaagcttgtcacaagcttcgaaacggtatatagaacttccaaaacagacacccgaatgaaaaattatgacaaaaatacgatttgtaatctttaatgaatttctaaaaactataaaacatgaaatctcaattttttcactcatcgaaacactacaaaaacttacccaaatcacacgagatccaacagcaagagtgttcaacctaaactgggaaggcctgtatatcattaaagtagtggtaggaaccagggtccataaattagcttggcttaatggttcgctaataaagaatcaatggagcagcgagcatttacggcattactaccagtaattttattatataaatgatgtattaatctttgtaatgattgatcattgttatgaataaaaattaaattttttcaagtaattataaagttttattttctttaaaattacttggaggcatatatgtatatagtaactagattcctcctagaaatatatactagaatgctgaaaacctaaaaattaaaatttttttacaaaggaaaggataattgattaaaactgtttttggacaatatgaagtcaagaattgaaaaaccttttctttgagagaaaattaaattagcaattgtaagtgagattctttctcataaagaaacaaaaagctatatgtgatctgagtaaataacgactcgcatgattatagcatgtattataaacgagatgcaggcgtgtcttgagaaataatacataagctaaaaaatgaataaaggattaattattcatataagcaataaaaaaatattcaaagtagttcttaaaagaactattcaaaatatttgatgtttgctaaaagaactattcaaaatatttgaagtttgctctgaacatagcagattacaaactgctcacgaataacatagcatattacacactgtttgcgaaaatatggtagattactgttcgctgactacagatataacaatggattacatgaaatatcttgagttaaatttgagaaaatatttaattgtgaatttaaacgcaataaacaaacataaataactcaaaagaagcaggataagaagcattaaaataaatacataagttagcaatgttggctatccaacaaaacaaaagttttacaaaaaataccacaagggtcaaactattgtctcgatcgaagggtcattgttcagaaataaaaataataaaaactaaatttacatagttagagatttagtgggatatcttcttcttcaacttcctcttttgcagcatcttcatttgtcttggtctgctcgctaaaagccagcatctcctcagtgccatcctttaagaaacttaaatctatatttggatttgccaacaaagccctataaatggaatgcttggcaaccgaattacatctttccttggcattggcctcgactcctttaagtttctctttggcttcagtaagctcttcttggactttttgatgggtaccaaagaacaattctacgaagtcagaatctccataactattctaattcacaaaaccctatataaaaccaatcgtttttagcttaaaacgtaattaaaccataccttaagctttttcttttcaaggatttgttatcccgctactacaagagcttagatcactagattttggattgaaaatcgaagaaaatagatataggaggagaaaattttgacaaaaaaaaaagaacgagggtttggttcttcgttctactgttataacttcaaacgtatttcatttcgttatatatataataataatgtaatattattaataatataataatatattaataataataatatactaatattaataatattattaataattttattattaacagatatcttattattttttagccattaataaatctctatttttagagtatttggcaaattttgagtatcctaaaatacccccaatatttttaaaatcaacttatcccaataattccatcaatat

SEQ ID NO: 118037 - DNA, 1963 bp, Cannabis sativa
  modified_base (1914)..(1922): a, c, t, g, unknown or other
accagatattttacatgattttgtagttaaaatctacatactccacgagtccttattattagaaatattttctggatacaaaatacaatcttaatatttgaaataagaagattttctctctcaaatttgtcgtcccttttctcatggattctgcccctatttgtagaatataggttggcagttattctttttgagattgattcgtttacaactattaatgaaacgtggacagttattccccacgtttcatttattcacacatgtgataatatctaataaccactcaaccgcttcttatttttatcctttagacggttatgctgactcaaaaagttgtatctcgtcaaacatgaaatctccttcttatctatcttaatagaaaaacacgctaagtggtggggaatatttcatctcgctatatcccttcatttgtattattcatgcgaaatgatcatcatgctatgagtaacgcgaggcgatttgagtgtcataagttcttctcttctcaggagagggttaataattcacgaggttcttgactgtctcgtctcgtacattttattactctgtctatcccgaggtaaatatgtggctcgtcaatctcagtctaatagttattattcttttatcacgtaagactaagtagtcaacgagtttgaatatttctatccagcttgcatttaattggaacgtgttaattaaattgcatttaatgatttagcggctttgttataatcgttgagttgattcatattccttttgtaggacatgtgtcagcttttagtacatagccaaattttggttataataattaccccttaaaaagtattttttaattaaaaagaactttttaaatgattacaggggtataattgtattagccccttttgaaaaattgcatgtcttgtgttttggcgatttaggatttcgaggtacatataatgctctaactattctcattttgcaatactcccacccgttagattagatctcctttaatcaaatggtgatcattgtagggtataaaattaaaattgaagctttatttttctattttcattcttcaaaccttcgagctttttgcacaagaactctaaaaaaaattatcttgcatgccctcatggtctcttatatactttctgcgcatttaagttgatcacgtttacagttttaggaatcttttggacctagtttctcaatgtttgagatttcgatcacgaagttctaatttttctagctatttcaaccaagacagtaagggtacactttctcttcttactaatttttctttttttttgtactcgtaatctctttttcgtgatatctgcattatttagtaatttcaggtaattttgattttgtttgtctcgatagttctagggctaacaaattttaggttattcgattcatagattttggggttgaacgcgtattttatctttccaaaaattagggttatatctataagtattccctaatctattccaaaaatcgcagtcccagaattcctagaattaaactactatctaatttctatagttccattcaaaccaaaaatacgcatacccaaaacaattctcaaattaaatgatgaaaatatgagatatcatcgtattaaaaccaatcaagattaaatttacagtcgctctataatatttttgcaagaaatagctgaaggtaaacgccgtttttttacaagaagctgcctagcctgaaccccaaaatttaattgatattcctttagcgagacctctacttttacctcaagtcactatttctttttaaccaagtgattttgaaatcattgctttgaaagcacgaaaatcaaagaccgctaaagatcctacaattactttcgaggcagaattaaaatcatagtttggaagattgtgtagaatccaaactgaagagaannnnnnnnngactcagatcttggtgatactcttctacagaaaggatacaa

SEQ ID NO: 118038 - DNA, 1325 bp, Cannabis sativa
gctaatgtagaaaaaaaaataaactccttttaaatattaaacttagaatattaatcatgtcgtagactagacgaactccgtcgtcgatccttgaccggaggtctagtcttccacgaatctcgacgtagattagtggaagattttgtacaacacgaaggtggttgagatggaactttgggcctcaggcgaggtgaggcgagggagaacaagaacgagagacatagaggaaacattggttcaaaattgaaaaactataaaatatggtagttgaaaacttaattacaaaattatggcataaaaaatcccataaaaatgtaaaaggaacaaaaagtccataactccactacattaaaaaaaatatatcataaaaaagtaaagtctttaattttttctatatttagtgtaatttctactaattcaaattatgcaatctaaatagtgaatactaagcttctcaagtaaaggatctagtactcaagcactcacatgcatcgcatataatatttttattttttacctaattatgagattctatcattaaatattgtctaatattattttatatgtaaaaatattgaatcatttatataatatataaaagaacataatttattttatttatcagtaatttgttctgacatgcaatttcataatttttgttgtggtattagagttgtattcttagcatacgttggatctacatctatttagataatgcaagacacttaaaaggaatattaaacaatattatgatatatagattaaatataaaaatattaagttatttataaaagtataaatattactaattaactttgagatagaattttatattctaatttctttgagagaattttataatattggatgctaatgaagaagtgtgaaatgtgctcttagcgtggctaacaaacaaccgtactgttcattgttgattgttaagtcttttgtttcagtgttcaattattgaagcgacttgtttgcaggagacagtttaacaagattgtataatattaaattgtgagttcaaaaaaaaaataatattaaattaagtggttttgtttgttccttcaaaaaacaaaatagttttgtctggctagtaatttcttcaaattacctatacaaataattcatacatttttataggtcccgtaatcgtaatgtactttcacggaatgtattttgtgatgtacgacagctgttaaatgggagagttatttgatctgaaggcttgggttgatataggagtaattagggttaaaaaatggtaacgtaccctgagaccaggagaattttcataaatatgggaattgagggtatagttt

SEQ ID NO: 118039 - DNA, 2796 bp, Cannabis sativa
  modified_base (2763)..(2770): a, c, t, g, unknown or other
caacgcaggagtcagtatcgcaacaacaaaaacaaacttgagcaaagaaagtgagtccaatgaaaagagaaaagatgaatccaaagatttagctaaagaaaagaagaagcaaaagaaaaaggaaaaatatgtacaagtatacttcgtttatatagagttgaatgaaactcatgaaaatatatttctcacaaacaaaaaagagggtcgctttttgaagaccaaaacccatgagaaacgtgaggagcaaacattattaaaataaatattactgattctataaagacatcagtcatactactgaagagttttgacaactcaaggatgagattgaaagcctcatttcttgaggttacttctgacaatatgtgggaaatagggaaaattaacaaaatcaacccaataacttaaaccaaaacaagaacatccaacaaccaccagttgatggcaaggatattctagtaatttctagaggttctcatctttcaagaaccagtaataatacccaaaagaggtacattcaccacataaagaattagagctcgatatttactactgaactgcttaaacgtgcaaaacctaaagaacctactattattttcactaagaaagatgcatcagatgtccaattctcacatacgaatccacttgtaataatagtatacctcacaaaaaaaaaagaataaaacaagttttgttgataatagaagctcaatcaatatcatgtataaagaaatattgagaaaaatgggatagagagtgttaagttaaagccgtgcatagaaagtttgtgtgaattcacaggaaatagtgtcgcgagcttgggaataatagaatttccattaacaatgggagagccacctttcttaataacagaaatgcaatagtttttagtgatctaccttcattatgtaacatgacaatgggatcatctactttgactgggatgggggaaataagctctataaaacatttatctttgaaattcccaaatcggtctggaataggcgctgtcaaaggggatcagttaacagtgagacaatgctacattgtagagttgaaggaaagagcaatgactcatcaagaaatagtggttataactgaggagattgataacaagaaagttgaagatttagattcaaggattatttattaagaatctcaacttgggcctgtggaagaattggaagaggtgatgttagatctcagtgactctacgaagattattaaggacgaaccaagatcaattttcttggagccacttagacatggtcgggattgactcgaatgtcatatgtcatcacctcaatattgatccattttatcctccaatgcagcagaagagacacctcctcgactcaaaaatacaaaattccttaaaggaagagattaatgaacttttaaccaaaaacttcataagacaggcattttaccctctatgggtttccaatctagtgttggtcccaaagccaaacagcacatgaagagcttgtatagacttctctcacttgaataaagtatgcccaaaatattatttctacttgcccatgattgatcagcttgtcgatgccacagccgggcacgaactcatgttttttattgatgcatattctggaaatagccagattagaatgcatgttgctgattaggagcatacaagctttattattaacatggaactctattgttataaagtcatgccatttggattaaaaaatgcaggagctacttagcagcgtcctataaaatgggatgttcgaacatcaaattggtcaaatatgaaagtttatgtggatgatatgttggtaaaatctataaaaagcaaagaccatgttatcgatctcatcgagtgtttctcaattctaagaaaatataatatgaagttgaatccaaaaaagtatttgtttggggtatcttttagaaaattcttaggttttatagtgaatacaagaggaattgaagcaaatcccgaaaagataaaagcttcgctcgatatgcctttcccaaagaaacttaaaaaagtttaatcattaaatggaaaaatggttgcactaaacaaattcatcttgaagttgatagataagtgattacaatttttcaacgtgttgtgaggcatcaaaaaatttgaatagacgaaagagtgcaaagaggcatttcagaacattaagagacacttatatacccaacatgtacaatcaaaaccagtagctagcgagatcttatcagtatcagaaaatgcaattagcacagtattagtgcgagaatagggaaaagcccagttaccagtatattacctgaacaagtatttactggaggtagaatctagattttcacccttaaaaatctcgcactaagttttgagtcatgcctcgaagaaactgagattatattttaaaccatacccaattcatgttttaacaaatcaaccattaagttgggtcctcacaaaacctgatgcctcagggagcttgataaaatggtcgattaaattgggacagtttgatatatcttatcatccgtgagcacccatcaaaggacatgccttgtcaaatttcttgattgtagggataaacattaagaaaatatagaagagattttaaatctataaatctgcaaataatttgtcgatggctcatctaatgacaatagcttgggggcaggcataatactaacatcacttgaaaactacatgttttattatgcactaaggtttcagcttcctgtttctagcaatgaggcagaatatgagtgttgggttttatgccnnnnnnnnaactccatttcaatgtaatctatttt

SEQ ID NO: 118040 - DNA, 2048 bp, Cannabis sativa
  modified_base (403)..(413): a, c, t, g, unknown or other
aggatctttgactatttggattgaaataatgtataattcaaatcacatctatttttggtaatagagcgttctatgtaattaagagtttaattctgaatctgtagtgtagtcagaaaaaattaataagttaggaaatttacttggtaaatcggacctacttattggaagcttgattacatagggccatggtccccacactaactgggataatattattttgtagtctaaattaattggttttcattaatcaattagaattctaaataagactatgtcttgtttgtgaattttttcactaagcaatgacttatttgagaataaaggatattttaggttttttttttattaattaaaagactttgtaagattaatatataagttaaatgataattttatttgatannnnnnnnnnnttattaaatagatagaattaatatttatagagttagaattaaaatggcatttataaaaagaaagatgagttaaataaatggcaaaattgaaacttgtggggctcataatatggcctgcgacttaagtccaataaagccattatttatcttttttaattctatttaaattctaaagctaaccctaaaatgaatcctataaatagaatatgatgactcttattttcataacctacatcagtctcttttgtcagacaattaaaaaatagaaaagagcctttttctattcaaaattctcttcttcttccttagaatattttgaagccatagtgagttgagagtgtgcccactcatgttaaagcaatacctagcatagtaaggaagactgtatctaaccaaattgaaggagagaagattcaagttcaaatcttgataatgctctgctacagattggaatcaagggctaaaaatctgaatggaaggattaattattattctgctgcatcaatgtaaggatttcttaatctcttatttgtttatttcattgttttaggaaattcatgtttaggatgttagattatagattataatcaaacatacatgtttataaatctagatcttggtaaaataagttccaacaatatatactagaaggaggttggagttgaggaaggcaaagctaagggctttggagtagataacagcagagctcgaacattgagcaagaaaagtaggtggtgcgcaagttctactcgaatggagaaattcatcactgagagatagagagaggagagagccaccgagagaaagaaagagcgagggttgggcgacggacgatgaaacagagaggaagggacaatgaatggatgatgcaatatggagagaaagaggcaggaagagggacaagggcggtggtcttttgaagtaagaaagaagaagaagaaaacctaattttgattttggggaagacaagatggggctatattcatttaaagaaacatatattgcttcgactagaaattgacgctaaccactttagcatcggtgcacattagatgcataggtagtttgcgtcaattgccaaccgatgcaatatgtgtatataattttatttttatttttatctttagcgtcggtattcgttttagtgtcggagatacaacgatgcaaattaatcattattttgcatcagttaccaaccgaagcaacaaagtgagggttgacttttgtgccaatcaacatctttgactaggtatgttgatcgacgcaaaaaatcttttttgtagtagtgtaaaacgctatttaatacaagaaaaaatatttaattcacaataaatattcacaataaaataaataatattttgacgactcatttgttaaaaaagaattttacaattatgaataatttataaatacaaaaagtaaggttcatacagcatattacacatacgtataaaataaaataaaaagtacacatccaatcaactgtttgaatcttattttagatgactacaatatatactattagggaaattaatttgatttactatacttaaaaaactttaattttttattcttaaaccaatacattttaaactaaaaaaaatatgacacttttatctaaaacccaaaaatacc

SEQ ID NO: 118041 - DNA, 2163 bp, Cannabis sativa
ctaaaattctcaatcattactacggtagttttagggcatggagcaaaacacatctcgtgtctgaatagatgttctcgcttcaaaagtacttaataaattttctagtttttgtaggacttactctgcatccatggataccttaaggataccgcctactgttaagcttatttcttttttatgctttaaggggttggcctactcccaaccccactgaaattttattcctttttgaattattttcatcctaaagaagggggacacacagaaggatggtttttattccctccaagctcatctgaccaatgagactcctattctgttcaacttccaaaagaacattaaggactgtcgtcaccagattttcttctcctctagcttcaaggcttttgagcttcctaatctcttaattgagtggacccagattccttcactgctctggacaaccccaacccagctcttcttgaaccacgctgccatttttgcaactctttccaaggaggaacttaacgtagggaacatggttacaaaagccaactgtcggaggacttggcttattcaaggccaccaatcaattaaggacactaatcttttaaaagtgacgtgtctgaatgcttggaataaggaggccgagaggaagctctgagtggagtatatctaagaggatgaaaccaagtatcaagccttccagaggaggaaggagcaggaggatctcttaacatgtgcccagggtgcagtagatcaaaagatgcagaagaaggccgacaagaagttggtggctctgagaccatcatttcctttttcgtccctaactttggtactcccagagctagttcctcaggtgcccgtatgtcccctctatcctttcattatgtccctcatgttaggaattatgctcattcacagccagttggctttgataggaggctacttagagtatggaagcctcactctcggtaggcctatagggaaaaagagcattactttcccaatatcggagatttcttgggtagatcccgtatggggtatgattctccaattctaatccttctgggccatacttgccaccttaccttgagctagttcctcccttttgatagttttttaggagatgatgacaccaacaacattatttatgagtttactaggacagaattagattgtctgggtaggattagttctttctacatgtctatatctttgtgattttatgtaagtgttccttatgtttcttccatttttgtctacaactaagccaattgatgacatctttgcctccttggatgctttaagtcccaaaaaaggcaataccattccgcttgctgacttctcgagggtcatctcctaaaggtccaagcacgacaagggcttctgatctggaggtcgtatgtgtggatgacaaggatgaggcagctccattcgagcgtaaatagaagaatgaagttgatgaatccgtatcctcaaagaagctcaaggcggccaagatgccttctaatagcactaaagattcgagagtcccttctgaggcatagacctttcgaggcgtcccatctattatgctgactcttatccatcctgacgaggctcattaatagcttaggattgctaaatgttatcccaatttttcccacttgacgtggcatgtccacatggccgatatcagtgccacgtggcagtacaagtcaccaacaaggaggtcaagtcagcatcctagccaacagggggtcctggtactcaaccgggatgacgagctacaaaccagccacctgaaaagggttggtcggccacccatggccgatcctatggccgcatagcttctggaaagcacaaggtcggccagcctgcatcctgtaggtgcatggccagccaaaattagacctggcagggctttggtgcttaatcttacacgtgggttgtaagctagactatgaatcgggccttaattgcccacaaaagtagatagaaaatacctattttaaaggatattttagtcttttgtatttcagcaatttaataggtaaatatttctaattttatctgctaattaggatttaagctctcatatataaagagccttaactcaaccctagggccctaagtcataactaagtctcattttagcctaaagctctaagtctgataactcacttcatctctctctctctc

SEQ ID NO: 118042 - DNA, 1223 bp, Cannabis sativa
agtttctctattttctaatttacctgacaatgagtaagcatatggaaaattggagctacatctatgatgttatgcacttcaactattagtttgataacatcagccccaatggattgcatacaagcaataagattgctaagtttttctgatgaaggtttgctaccatttacatagcttgatacaattatttggctgtttaaaggtttgtgttcggctatggctatatcagaagccacctgaaatttatgagtttcactttaattagataaagatctttatgcatatatatgtatgttgacaaaaattaaaagataaaaaataaaaattaaaaaaagggaaacatggaaaaatacctcgtactccatttctacgaattctacatctgattgaagagccattttcaacacttgcaaagaagttttcttggagccactattgccaccggtccttgattatgaaaatgataaaaatataatcatgctttcctagatgttaattagtccatttaccaatatttggcttattttcttaattcaagagggaaaaaaaaaatccaaacttttaacatagaaatttcataattttttttattattttatggaaagtcattatcaaaaattgctttttactgctaaagagtaacatagcatacatttatttcacacaataatatcacatgcatcttatttatttattttttttgaaatcatatcacatgcatgttaaatcatacacgaaaatagtaagtccccaagaaaaagtaaatcaagtaattaaagatacatcctacattattgtgttcacccaaaaagtcactgtcataagcgtacacttatctttcggcagcttattttgttggcagaaaacccatccatgtaataagtgatcacagtgaaaccatgtgataagtgatcacaaaatttgtcaattttttaataaggaaaaaaaaataatagaaaacccaatgaatatccattttagattcatttatctaaaatatgattctttatactatatatatatatatatattatagactacaaacattaagacgagagttgaaaaaaatggtaaaacggtaaaacttaaagagtttatatttagggttaatttgacaaatgcacaaaaacaataaaaatacggttttacggaatttcaaatatttttacgatttttttgattttatttacataaaatacagtctttttatgttgaaattttgt

SEQ ID NO: 118043 - DNA, 1648 bp, Cannabis sativa
tatttttataaatatttgtatgtggactgtataaatgtttaatgggccggcccaaagtatttttgtaattttttttccttttttgtatttttttgtttttttcccttaatataacttttgaaaacttaatgatatttccttagaaagattcttttttttctctctctcttcttttttgattttagatttaagggaaaaataaaacaaaaaactaaacttgtttacaaacaatgacattgtttgaagcgtctcaattttgtagtaggtttaatttttcataatttgaaggttgagtccaagagattgctaagaagataatgtaaagaattggatgagtagagtggcttggctatttattattgttattccaatttttgatatcatgacgtggcatgtttacgtggatgaaaccaatgccatatggtagtacaactaactaaaagaaagaccaagtaagcacctgagtaaacaaagaccccaacactaaaatgaaaatcaagtgatagactagctccctctaaggagctgcctggctagcgcagggacaaaccatggccagccaggctagcaaccatagggacctggccgacaaggggattctctacaagcctaactaaacactcctacacgtggccaggagtaataggctgcaaattgggcctcaaaagcccaacaaaattactgaataatatctagaattaacggcattttggtcttttgcaaatatataacttactataaaatttctaagggatttgaatcataaatcttgggtttaaggcttcctatataaaggccttagcctttgactgaaaatctaagttgcataagttacctctaagtgagaaacatgatctcaaactctaagtatcttataaactctctctcttcctcattctctctcacactcttaccttaggctatctaacaattgagttttgctaggcactgattgatacattgtaatcctaagggtactatagcagatcccacctatattgatcaggatagtacttccctcagtataatacaattaaaagaggagtagttcattactcgttatcacaaggggcccaaacctctatcacaaatccaattgtctattgcttttcattcttatttgtgcacacatgtggcaagcatcaaatctgcatgaccccactctcagttgatccctttttgaggtcaatagcttggtgctttcattgagagtgtgtcaagcatgagatctgatcaatcgcatggtgatccaagaccaacatcttcaggtctcccacaagaccaacagattggagatccaagaactcaagttctagtcacaactggagtccccatgattaccgcagatatggttaatcttgtcaccacaataggcacaataagtctagccaacacagctggccaacctaacacaagcaccccagttgattcaagtggcagcccgatgcctcctagtgtagacccaccattggccccttccactcaaggaagcaccaaggggcaaccacccctagaacaataacttcaccttaaatctggttccacaatagagagaataatgtctaggagtgggtgagccagcaatttgcgagcctcacctatatctaggagaagaccttgagttggccaaactcaaggaagctgtagg

SEQ ID NO: 118044 - DNA, 4549 bp, Cannabis sativa
gaggtgggaaacaagatacagcgttattgtgttgaagttgttcaaatgcgagaccggatcggtggttccatcatacgatgagacatgtgggtttttaaatcctgagggaaaaggggtattcatgagatctgggtggtacggatcaagctcctcatctgagtcgtatccatattgtctccctaattcccccacctgatatctcctaaacttaccctctaactcatctattcgtaattggataggatcctctttctttggacagagttgttggcaacgatcaggttttttctgattcaagtgctctcgcagatccgattgggaataattaccggcagaccttgttttactcacagatagtgtcctacttgcggacgtcgtcttgttcatggactacgtcctcgagtgactcgcagatttactggtcccatgccttatcgatcattagctcgtcgagtactttctcctctttgagttgatcgactgtgggtccttgaacgccctaaggtcacacttacttcttcacgctatgttctttccccctaagtgtggtttgtcgtatttcccctattagggtctgtacgagccctctctctatgggttcaggaagaacactggtgatttctcgcaggtgacctacgttctcctgattgagtcccaagatcttcttcattttcatgaggaatttcttgttcatcagtttctggttgcctcctgttctcatttctatgagagggttctagctgatcattctgattttcagggggaatctcatttttcttaggttgttcttcttggatattttcatgtctcctggttcgtgagccatggggcctgcctcgtggtcttctcactccaagttcaggttgattttgagtgttagtcccctgtgtcgccctagctacggctgcatcacgctctagttcagtgctcccccctgtgcctcctctagacgacatctaaggcggtggttttctatttcataagtgccctgtcccatgggctgagtacttccacgattgggcttctcatccctcattccaggattctggccattcccacgctgagttctcctcgagcgtgttgtccgcgtactgggaccaacgtcaggttgggtcctccgggaatgtgtggtctgagtgctgggaccaccctcaggctgagtcctcctggagcggatggtctgtctggactgtgggttggaagaccttctggagctcatgggctctttcccataacggtgatgagtttccttgtgtggtgtattaaccttttctaggtttttagccatgaaggagatggtttttcttcaaaagaaaggagggtttttactgagcttttttcacgaaggccctcaatgaaagcaccaaactgttaacgcagatttttgttaaccaaaatttaagcctaatagtgataatctcacacacaaaaaaaataaaacagtaaaggaaaaagtatgaacacaaaggattttttacgtagttttgcagttaaaattctgcatattctacgagttaatcttattagacttttgatagcttttcagggccttttctctatgatttttttgtcccttttttgatctaacttgccactatttataatcacatagtaggcagttaattacagagttgaccgtgatctttacaacgtttatcccctgaaatcgtgggatttgattacatattacgtagtataaatgcggtaattatttgaatatcacacagttgtgatttatcctcttttactgggtcaaaacgatcgtgtgtttaaacacgtcttaaatcataacgttttgggaggcctcgacaggaattcggttccaatgaccttgatagcgagctggaactttttcccctatctttccgaggtcgataatttacacctcgttgcttctttgtttgaagacttaacgcttcattttgacaattgcaatttttatttacaaatagcacctcagcagtcatttgaatgtcagcttttgactcatcaagactataagtcttactgaaagatgtctgaagttaattggtgaaagacacaggagtgtgccttcctatagcgatataagtgcctcgcttattaggtcttgagtctgcccaactattatacttagtttgtatatcataccctaaaatgtcttctcaatcgatatgcatggctttcgtcttctcaggtgtaacaaagttgatgtcttgctttatgcatcaaatgacgaatggtttctcattaatacacgtggcaacaatttgtatatctttacctcacatatgaccttatagtcagcgagttgcaagtatattttgttatttacgcaattaatgagttattccatcaaaagagatttcatcgatccatatttcccttaacctgacacgtgtcctctattggaatggtagtcgaatttagggtataacaatacccataatatccttctcctttcccttataacttcaccatccatactctccattccatccataccaatggtggttcgatgggagtccgatggtggcctgatgctacccattgttttatggttttgtacataagaaaacggtagcatcaagccaccatcgaaccatattctacatttacaaattttaagctccattcatcaagctcgtcgggaaggcatcgagccactatcgaaccacatcctacatttataggtggcatcaggccatcgtcaaatatttgtctttaacctttactcattttaacaatagaaaggcattgggccaccatcgagcttggcaaaaaaactagttttctgtccaaaactcagatctgaccgtttgttaccctaaatctaatatcaactcatagataacagacattaatcatacaatttattcctaaatcaataaacctataaataaaatcatacatttcaatcctaaatcacacataatacaattaaaatgaaatagaaaacttacattcaaagcgcgatggtcgtggtttgatgatcttgggtcttgggttggtagtcgttggtgggttagtggtatttggttagaggcgctgtcattggcagccattggttgctaggttctcgtgtgcgtgagaagaagagaatgggagagacagagagaatagaggaagagagagaggagggtgagttatgagagaggtatttttgggtttattaaaaaagttgtctatctaactaatttaaatatacttaggtttagtgtatcaattttgcccaaatgcttgaatattaatttaaatttctgtttcttaatctatggctcacatatttggagacaccatctttaatgaccgcatagttttatcttgagaatagcagataattaggacttattatcagaagtaggcttttaattactatttttgtaattatagagatatatttgaattctaggtatattgattatgatatatatgagattttatgatttttatatcttatgctcagtaatagtggaatacgacgtttggtctgtaaagttacttagatatggtttagtatcttagaattattggagtaatatagttagatatttggtatgtcgggtattttcaggattatggattagatcattttactcctaagtaagtacattacttgttggtacagtaatgagtgattttcattttggctttagattaattaatgggaattagtaatatccctaagctatattggatattatatgaagaaattaaatagaagaaaatataataaatcaagtccaaaaccatctctttctctctttcttatttggccctaaggagacccaagaaaccagtccatttgcttcttaattttgggtatttcagctagtttgaaggtatttaagaatgctaagaactaaggtaagcttctcttcaaagtttctttgaagttcatatttaaaggattagattttcatgcaaatttttatgcttttagattctgtatgtttgagatgagttgggttgagtttctcgggttaatatgttgttgtttgtgtgatttagagtacgttttggtggttgtagttatgtttgagcttgtgttgaggttttaagctcaaagctccctctaattgtgatttttgaaatagtagcttgatgatagatttttcagtttgcatatgtttattatgacttagtttggtgttctatagcatttggagaaataaggttttttttttttatgtttttgcagtaaaaaatggcagatcgtttttacagaaatggtctaccatttttagcagtttgggacccaaaaaatggcttaattacttttaaagagtgttcgtatactatatattagtcatgttattatacattgttattacttacaatgtttacattaaaaattattgcacgtgacatatattaaagattaaattttgtatccatcttgaagattatgcaaaaactatatttatatatcctttgtaatattgtaaaagaaattgctaaataatttattttttatggatgaataattaataaatttttaagaaatttataataatgttctacttgttcaacgtcattccctgaagtgaatgcaataattttaaatgat

SEQ ID NO: 118045 - DNA, 1837 bp, Cannabis sativa
  modified_base (1028)..(1028): a, c, t, g, unknown or other
tactatgttttactcacaaataacattttattgtgagtaaaagtcacatttaatcacaaaaaaattatgttgtgactaaacaattgtcactaaaaataacagttttttgtagtggaataccaaaacccaacttctcgaccttacaaacccattctttgaagtttttctttcttgccttgaccttgccggaaaccaacaccagaacaattgttattctccctctcccacgaattttcgcccattttcatctgattctccctcttccgcaactcttcatcaataccacatagtcgcaggggttcaccagttcatagttgggttcatcgtggttcaatgggtctgtcaaagaagaagaaggaacgaggaagggagagatctgatggttctagtcgttgaagaagaaggaggaggaatagggggagatatgatggtttttgcagaagaagaatgaggaataggaggaaatctaatagtctgttgggttcgcttgttcatcttctccaaccacagatgaagaagaaggaaccccgatggttccaaaagaaagaagaagaaaagaaaaaaaaacaaagaaattaaaaaaaaaaaaaaaaaaccttattttttttatgattttttaaatattttaatcaattaaaattatgtggactactaaaaatttgttacgtgtacactgtgacatatttaccgtggcactttctagaaacttttgaatggaaatggtaaatagctaacagaagtgaggtttgaaggattttaccactaaattaatttatgtgattaagtgtcactaatcatagagttcagataatattacctacacaaatatgtgtaataacgatttaattatcaataattttagccaattaattattatcgatgttaaatattttcctaaattatgaccattaatgaaatatgagattttcgttaaacaaatagcaatttactccttaatgtatttgtactgtcgtattttaggcaaaatataaaaaaaaattacacttactatgggattttaaaagttnttatgataaatatgacatatttaagtttgatcaatttatatggtatttttttttattttcagatccttttatggtatttgatatgtcatatatatgtaaattaggttttcaaatcccatatttgtcaaggtagatttatttgtcactgataccgaaaaagttgccggagtttgctgtcagtgccagaaaaatcactggagtagcagtcgatgtcgaaaaagtcatcgaagttgctgctaacgccaaaaaatttgtcaaaattagcattatcactaaaaaaattaccaaaaaaatggttcttcatcaacaaactaataaaatctagtaatacatcatatttttagcactattaattgtacgtttgttatattatttgttacaactttttagatgagatttgagatgaatattttaataattagatgacatgaatttctcttggacttttgactaaatattttttttttgaaaactaatagaaggattaacaatatataataaagtgaaacgttccatattatattgtggcaaagtttggccaaaaaatcacaacaacaaatatccgagcaccaagaaatcacaatgtgattacaacaataaaaaaacaatatgagcattgacaatatacataggtatatacattttgtgcttaaagcctatatacttactaaataaataaataaaaatactatttttttcatacaattattatttaatttgttgttgttgttttttttttctttttttgaaaaaatgaaatatcaacttcattaaaattagcattatgaatacaagatggcatgaaggtc

SEQ ID NO: 118046 - DNA, 1824 bp, Cannabis sativa
  modified_base (1769)..(1775): a, c, t, g, unknown or other
acaacatgtaaacataaatggcttcttatcatttattgataacaaatcagattagattaaaatgaattttatttagggcataaaatcccaacagccgccacgtcatagtgcgaggaatgggataagagaagatatgaaggaatgaaaagataaaaataacttcactccgacaacatggacctactgtctacagtacttttgtactattaactaccacaaatagtaacttgattgtaccttttcgtacctttttattttttaattaataaataaaattcacaaccggtgaataaacctacaacaatcggttgtcaaataaataaaaaaattcacaaaaaataataaaaattttaatagtacgtgggacctaccattccgtacaacggactatattccgtttaaatattgggcataaaacttgctacctatatatatataataagatacataaaaagttatattagaatatatccacgaatttgggcaaacataattttatggaaatctactttgattcccgaatcatgtgacttttgcttttggagtggattattctgaatatataattatgaaaggcttatgtgggcaggataaattcgatgaatgatattttgacaataatttttaccattatattcactccaaatgggataattggattcttgcgttaaggtgaataaggtgtatggtgatttttcacaaaatcaatggacaatgaaaggagtagtctattcatcttatatatgaaaatttatcttcacacattaacaatattagactaactataatacaccatcttcacgtttaggtcaaaaaagtgtgggtataaagaacgacttttaagacaccataggaccgaacgtgacatttggaagaatcctacaaggccaaatatccggaaatttgtgagtatacacatcagcaaatttgtgaattttaaaataggtcaaagaccccaacttagaaactgacacacattggtagaaagtctcaaatggaggttaaaggaaaaatagcaaaagtttttagtttggctcatctttttgaaccggcggcactttgggctcacaacaaattagaagcgactctaataccatgatagaatttggataaagtgtgattaaggggcatggcgtaccaactcaaaactaattggtaatgagaagagtagcccatatgataatttatttccaaaaattaacaatgtgagactaactctaataattaccattttctctctctatttctctcatgagtaaattctcaggctttgtatagcttctcagctatacacattataagttttgtggaagagactatttgaaagaaatccttttgtggcttcataaagaataataaatgacaaaagaaatatctttattgctagtaggtgtattatgataaactctatcttccattctatatatacttattggtcttagattgtagtccttccccaatctacgattaagagaatcaattaaatttctacaatttacctgtgaaaggggaattataattatgggatccatggaaattctttaataaagattttactaagagcaagaagtagggtctaggctattggaatattggagtttggaattattgtgctctaggcaagtaggaatgccacaaacccggcccggcccgacatcactttggcccggcccggcccggcccgactccctctttgtgcctagcgggtcaagcccggcccgagataatggggccgggttagggccgacccgtttttttttttttttttnnnnnnnaatacttattattttgttttgtttcatttgggtatttaattttggtggt

SEQ ID NO: 118047 - DNA, 2993 bp, Cannabis sativa
  modified_base (27)..(29): a, c, t, g, unknown or other
tagtcacaagtaatattttgttgtgannnaaagtcacatttaatcataaaaaactatgttgtgactaaaaagttgtcagtaaaagtaacagttttctgtagtgaaagatagaaattatcttaacgatgtcgaagggatatggcctatggcgatggtggaaactccaacgagtaagccaacgacgcactccttgtgaccgaaagtgtcccccatctcaagaggatgtttatatgagttatatgattcactgctgctgctatcatggtctcctcctcttcctcctccaatatggaagatgaaaaaattagaccatgcacgcctgatcaaataaaaagtggactattatatatttacatgagcaattgagcaaagattaaaaagtatgtcaataattacttaattccaaagcaactttttttttttttgctaaattagtagtaagattaaattttaccaaaacaaacacatatagagcctaatagcaataaattaatggcttgaaagtaacaaaactataatccttttacaaagactctcaccaaactatatcctttctttttttttttttttggcaaaatcatacacaacctattaacatcctattgtattctatgtataccagtactaaggatgggtaatttagattcctaaaaaaccaagtttcggctcctccaaatatgataaaccacaacagccaaaatcaaagaaaaaatttgcttcttgaaaggagaaaattggttctgctttagccaactcaacaacaaattcaggttggattcctcaatatcccaacccaccctatctttaatagattggatacatcttttcctataaaggcattcgaaaaataaatgtttcgaatctgatgataaagatgcaggtgacagaaggtggaggagggggacactggtgtacactataggaggctgagggagtggtggaggtggtggaggtgtaggcattgtgggagatatgaccgaagaaggtaaaggaataatatatagactcgccagaacatgtatcaggcacagatgatatgacagaatataccaacaaatcatcatcctccctctaaaaagtaggagtagttgaagatgaaaaataaggtgtattttccacaaatgtaacattaatagaaataagatatttgttgagataagaataataacacatataccctttctgaagacaagaataacaaagaaagacacactttaataccttagggtctagtttggtgacatttggatatgaacatcgcgagcaaaaaaatttttgccaaatacctgaggagcaactggaaacaatgacttactaggatttttttaaaatgggaccttaccattaagtacagaggatggcatgcggttaataagaaagtatgttgtgggaattgcaccatcccaaaaaagtttaggaacttttatttgaaacaagagggcacatgctgttttaagaaatctatttttatgttatgctacacaattttgaggtgcagtatcaacacaagaagtttcatgaagcatgtcattagaggtcatgtaagtttaaattgagcagatgtgtactctttggcattatcacctcaaagtacgaatagacacattaaattaattttaaatctcaatttaaaaagcatagaatatagaaaacaactcagaacgatatttattaaatctaatcaaattacacgagaataatcatctacaaaagtaacaaaagacctgaatccaagttgagacaaaataggagaaggaccccaaacatcaagatgaactaacttaaaaggaatactagcacgtttattgactcgagaatttaaactaacgtgatgatgtttggctaactgacatgactcacaatctaatgaagacaacttactatattggggataaagtttcttgagcaaaggaagggatagatgattcaaacgataatgagccgcaaaagtagaagcaactctcagacaagcaatagaggttggtggaagtaggtcaagaacatatacaattacaagtcaccagattcatgtcctttaccaataatcttcttcgtcataagatcctgaaacaaataatgattggaaaagaatgagatgcaacaatttagattacgagtgagttgactaacagaaagaaaattaatggacaaattaagtaaatataagactgatgacaaagtgagtagaggtgtaggaacaacaatgccagatctaagaacagaagatggtgatttattagctaaggtaactatagaagtgggacgatgagactagaaagtggaaaagaaacaaaaattacctgtcatatgatctgtggcactagaatcaatgacccattttgaggatttagaaagaaggcatgaattagagttacttgaatcaacaatcgcagcgacagaaggagatgaagacttatgtgtttcttaataccttgagaactttgcaaattcatcaccagaaataaggattaatttttcagatgcatcactagtgctaacaatattagcaaattgttgttgtcaatttttgaactgtaatttcctaaactcaaacttagtgtgacctggtttcttacaatagttgcacatgatgctcccataatttgttgttcaattattaagtccttgtgaattccacttggtgtagagttttttcttagtgcagaattgttacgactcaccaaggcgctattaaaaggagctaaagagataattctggtgtgaagaacacgagaaaacacatcttgtaaagaggagatatcaaaaccagagagagcttgtgactttgcagagtcaaatttagatgagagttctgcaagaaaactcataatagccatcttctctcgttggtaccgttgaattttcacatcaggactaaatagaaataacacattaagctcttaatatattttttaaatgccataaaataactcataagagactgatcttatttctccgcacgataaaaggctttgcaaacatcatatatgcga

SEQ ID NO: 118048 - DNA, 1739 bp, Cannabis sativa
tacccataacataattggtcacttaattttgtatcacactttataatagcatatacattatacatatgtgcccacaaaaggatttttaatccaacaaattagaatataatttgtttaatctcaattatattcttgaataaaaattctactatatatatttatagttatatataagaaatataaaaattgaatagaaggacaaattaacaaagtgatacatattgaaaaaaaaaaaaaaaaacctacctgtgtacagatgtttttgtgactatacataagcaatttcaaaaatttatgggatgaaatatgaataatacaagatatgttacaagcttttttttttttttttttaaatcctatgttacaagcattttaaaaaaaatatatattactgaaaatattatgtttattagtgaacatttattcaataatatttattatttttctaaaaataaaaaataaactataatgaaatatttttttttaatgaaagcatgaatttattaccgaatcaaattaactattacaagaacacttaaaaatttaggacaagtatcagttcacatcttaactcttattgaactagtaagagatttagccaatacataagtcatgctatttacatcacgcgaaatggtctgacacgaactacgtaccacacgaagagcaactaacggagaaacaatctcaataataataggcctaaaaataatattactacttaaattacaaacacacaatgaatttaattccgccttagaaatcaaaaggaatgtcacgaaagaagggtgaatggggcagacgctcttactattattataaacgtttattgagtgaaaaaggaacacatttacgtttataataaaataatttgtagtataaatatttaactttaacccggcccccagctacaaataaatacttaagtttaattttttgcagtaataatatctaagttatacttttagaactcagtaagtacctaaccgttaaatctcattatctacgtgttatttttttattggtatatttagaactattttttttaaaaaaaaatacaaaatttaatgacttggactagggattgccacttcgtaatttatttaacacttaatagttaagtacttacaaaaattattgaattataacttaaatataattagtaaaaaaaaaacttaagtatttatttacaactcaaaattaaacttaactattttgccacaaatttatcaatataataatatggtaaatgtcacaaaaggagattaataattataataataatatttgcaatatgattgggcaataataaaatggcgccttttacaacaaaacaaataattaacaatgaattaataacgtagtatatacaaataaacacactaaaaatatccttcaattcaagacagagaaataattcttgggaattggagtgttggaatgaaacagatgcctttaataaaacactcgatctgttcttatatattatagtagcaaagcaaagattattttttgttcgctaccaacactgatcggtctcccaagttcggcgtttacggctgggaaatccagaactaaccggccatttccgtccgaataaccggcgatcgtaatcggcgcgtctatcgggatcggacagcgtggaataagcttcatggattttcatgaactcgtccgccgaagctgaactttgactattagctacgctagctcccacgtcaggatgaacgaccctagcc

SEQ ID NO: 118049 - DNA, 1958 bp, Cannabis sativa
  modified_base (1928)..(1931): a, c, t, g, unknown or other
taaactaagcgggctttacaaatccgttttgtgcagatggcaccgttgagctaatggaattgacaatgagcagagctaagacttatctattttttagcagatccttaatgagccaaaatagaaggatttcagtacctccaaccttgctaactttcaactagaaaaggggatccacttacacacatctatcagtttcagcaaaagatggctctaaaaactgtaagtttggtgatcctatttaagttattctctactaccttataggggacgactctcactttgtttagaaaattgtagcccagatctgtatcgaacttcaaagatcttcgtaaacattaagtatctaaacacgactgtaacagctgtaattacatcaagcttgagtaaacatgtgaccggaaaaggcttgtgagattttagcttcatttgcggggtaggtaactttaaaataggttctgaggatttttgagaccgtagaaactaccgaggaagatgtacaactcaccatgaagcaaaaaaaatgatcaggcggtacaaggcccactgccacactgttaattttttaatgttgcatgaccattacttcccagctgtgccaatcatcttcatcaaaatagatttgcagatgctagatctaccacatgaagatgcgcgagtaattgataccaatttcatgttgactatccttattcctagagccaaatcaccgggaaagaatatggatgtatttctaaagcctttggtggacgaattaaaagaattgtaggtgattggggtcgatacaagagatgctactaccaattcaatgtttaagatgcatgcaactctgttgtggactgtgaataattttgttactcgcaatagcttatctgggtggagtggtcaaggttacaaagcttgtactacatgtaacgaagaaacttgtttcatgagagtgctcggtaagacctcctatgttggccatacaagattttttccgtctaatcatcgaatgagatatgattgcgcattcgatggatcaattgagaagagacgtcctcctagaagatatacatgtgaggagatattagaaaaagtaaagaccctaccaagtaaagttgttggaaaacacatgtcttttagttatgtgaaacaaaaaagtggcgaggatacaagtaattggaggaaaaaaaagcatattttatgaactttaatattggagttcaaatgagttgaagcgtaacatagatgtcatacatattgagaagaaagtatgtgacagtattcttggcacacttttagattatgacaaatcgaaagacacccttaatgcaagacgtgatttgcaaaatctaggtgtgcggcagtcattatggatctacgaagatactaataaaaagttaatgaagcctcatgctcctcatgtgctgactattgaagaaagacaagagttttgtcaatttctgaagggagttaaattgccagatgggttttgttctaaccttaagaagaaggtaaacaaaaaagacacaaatattgttggattaaagtctcatgatttccatgtgataatgcagcgattactcccaatttgtgttgacaagttttttggataagagaacatgaggtaccatcatagaacttttccaattattccaaatgttatgttcaaggacagtaaatgtgaaggattggaaaaggctcaagaagatctcattcatatattgtgtaagatggagttgatctatcctctgtcctttttcgatattacgatccatttagtgctacatttttcaaaagaagttataatgggcggcccagtattttatgagattgatgtacccttttgaaaggtacatgaaaaaattaaaaaattatgtcaaaaataagggatatcgactaaaccacctgaactttacggtttgtaacacttaaccacaaaaatcgannnntggcggctaaactacctaaaccctggt

SEQ ID NO: 118050 - DNA, 6981 bp, Cannabis sativa
gcagaatcacttgacgaaatcgaagaaaaatgagttgcggcaaacctaaagttggtggcccatcaacaaaagttggctcattacttcaataagcaagtaaaggcacggaagttttttgtgggagatattgtcctcagaagagtgttttctgaacaccaaagacagcaaggcaagtgtgctcagacctaactgggaaggaccatatcaagaggttgaagtactagactcaaaagcatacaaacttggatggtatgacaaaaatatgaaactcattctagtaaaaggtattggaatggggaacatttaagaaaatactaccagtaaaagtaccaggttggatgaccactctaaatacaagatctaagaacatttactcttaagtaaatggccttctgagcggaccccgcctggaggttcgagtgaaatgactaagtactcaggtcgaacgaccacctcagaaagtataatttctttttgcaatttcttttgtttaaatttagctaaagattggattagatcaatataatagctttcatgtaagttactacggtaacaaaaatgttacgaccaatgaatgaatagagatgtctatttaaattaacattgtgtcaattttattagcaagttatacatttaccataaaatgcgtacaaaggtctgcttgaatccaaagaaccgaacagacaaaaaccatacttgtgaaatgcaagtgaccaagagtcagaagtctgctcggtcacttgggggcaactacacgcataaaaagcattggtaaaagtaaataacaacctcaaaaaagaaaacaaacatagttgcacaaacaattataacaacacggaatgatattcattgaaaaaagataatgaagcacggtaaatctgggattaaaggctgcccagttagccagttgtcttaaaaatgaaaaacataatccaagtttaaaaacctcttggctggacattttgtctcaaaagaaggcctataggccaaacagacatatactaaaaaaaaggaagaaacaaatattcaaacggcaggagtcacaggctcttggtacggatcgccttggtctaatggggccagaggatcaacactctgagcagcagagatttcgttgctttgatcagctggagctgtagaggtagtcgcctcggggtttcctttggccatcttagccgcgcagaaatcaagatacatgctcttggaatcaccaaggtagtcaaagtttccttcaggattggcattccaaaaatcgtagaaaaccttaagagcagctatctccagggactctatctccttcacgagctcctcctccctggtttgcttatccttgacatcctcctctagtttggaaagaagagtccggagactctccctctcatccttgagattattgacctccttggacaaagagatattatcagcctacagttgctcggtcgaaggcatatcttgcagctctttggttagctcctcaatcttggtgttagatgcaagaagcttcttattcaccttcccaagctcattcctcacttccgtgagctggcttctcacctcttaagtttcctttctggccatatccacctccctctgcagtgtgttggtggtagcaaggctcttggcagcagttgatttggctcgggaataggcataagccaccttcacattgacctgtacggaaaaaatgttagagtctgagctacacaaaagagaatgagataaaaagaggagatatatacctgagtaccttccttcaagactcctcctagaaccagctccaaggataattcattgtccgccccagacagctgatcactcacttcaagaagtgatcgatttaatagtactggaacatgtctttacccctgttggcctctgtgctcagtaccacgattgtttaaggggtcctggctttatcagacccgtctgagctcccccctctggaactctttaacttcgagaccttctgagccggaaggtccgcaacaggtcgctcctcataaaggtcaatgacctcatcaattggtgccctctccttggatggagtctcgctgtctttagacttcttggcggggggagacagacccgagttgtctcccactctcttattaaaggcccggagcatcttttgagacatttctacacggataatacaatgcagttagaagcagatataatatatgtgaaagcataatataagagaagtaaatgcaacttaaaataccctactattaggggacgtcatcatctgaagagtcttcttgctccgccaggatggcttttccttttctctctattaggggtatatggccgagtaggcaaatcaggttccctaatcctgatagcatgttccactggtgcttggtcggtcgggggaactttcctcttattcttgctcggcttctcctgctctgaatattcttgagcatacttctcctgctctgaatattcttgagcatactactcctgctctgaatattcttgagcacactgcttgactccattgcctcccctcaacttagcctcatgcttgagttgaatgagctctttctccagctcggcttggcttcaccttcttcttcttcttctccttcacgggctttggtacaaaatcatctgggaagagcctgtacttcacaaagttagcctcagtggtcaacaaagtgatattttgagcagcctttggcagttgaagaattctttgtgccctgtccctgagccccaatgtgaaaggagggcgacagtacgagggaatctgctggaactgagtgtgaacggtatccatgccctgcatgaagtagtactcgtccataaaatgccctattttttttacgtcggagtccacagtacccttcagccatttctcgtccaattaggagaagtagaagtaccccggcctgctttgcttaggagttgacttcaggtcgaagagccaattggtgtcatgcagagatggctcaccccatccttgggaagcatagaggatgaacatggcagataagtatttgatgcactttggtgtgaactgggtcggtcagagatggtagtaatccgtaatcctcttgaagtacggaagcaagggcagcattgcaccctgcttagtatgggcacccgaccaagcacagtatcccagtcttggatgagtttgcccagttatttggagaagggaaaaagcactccacacctcccaggtatccatccttctccaaactcctcatcttagcttgggttactatagatggaggagacacccagcgagcccctaaggtaccttgccttctttgaggaaccacttcggtgtactcctcagtgacgtagtcatcaccctctaccaagacatcactgacctcgaacaccggttcccctacttcatggtagcctccgaagcacaatggccaagtagctccctcttcctcggctttagatggactatcaggatagaccttgccttggtcctccatctcttggacttcaacgtcccttcattatcctcctcctcagtagtaggctgggtctgttcagtgctcgacatcgtggcaaggcgtgccacgtgaggatcagtagaggcaattctccacattgtttatttagtgtgggccatcatcctatccctgggcgatgtttggttagtatgcctagcaacagttacagtaaaagtggcgataggaatgccaaaggcaacggtacttggtcagcccacggggatagtatcaactatgtttggacggacaatgtatgtctagctggatggcaagtatcgtctccaccccttcatgagttcccaaatgaagcgttcgtagccttcacccgtgatctggtcgggatagaaatgatgttgcacctcagtttttggggaaggtgtaccttcactgcttatctcccagtcctcgaaacttgaattagaaagcctgtcactcgatgaggacggactgggacagagatgaggttggtcctcgtataaaatttgaagaagatcctggtcaatatgatgttctcctccccaaaactcaccagggttcatctacaaaagataagacacaagatgagtttttggccgggatatcgaacataaaaaaacaaagtataccgactaggtccaatcaaaagattaaaaaagggaaatttcgcgtgatttaggttcataacccagaatttcaaaacttcaaattaagggttaatcttcactaaacaccgaatgggcaagtgagaaccgaatatcgtgaaaataaagtcagaatgccacagcagttaagatatatggtcaatcacaatcaaaatctcctatttctaaacctagattctctataggtttcctagaacaagttcaagactattgaattttctacaatggaaacccagaaaattagagattcaagtattaaagtggaaaaaggatgttactctgttaagctttgaggttgctcggatgactctgattggcactttctagaaattctttgaaggatttgagagaaaaatgtgttcttgttctgaaatcaccaagtaagaaattgctaaaagtggtttactaggactttttgctctatttataagcaagttagtgaagggttgtaatcattttgaaatttaaatgcctcaatttccccccaaaagtaaacattgggaaatcaagtaatcaagtacctgaggaagagcaaccatcaaagcatgcaatcgttggaatattttgaggtacgaattaaccagcatttattagccgaatatcgaagagacctttggtcggaatcacattagatcaccaacaggcacatcgaacatgtgccacccgttcagacatgtagtcaaaataagtgaagtctacgcgtgacttcaaaagtcccgtgcagacttgggggcaaatgttatcccattttttcaccacgacgtggaaatatgtactagtggcacgtgtctgttattccttctgcttgatagaagaaaagttctgaacagacatcgagtaatacatctgcacgcacaaagtttacttgaccgatcagagaaagagaaatttgatccggacaagaaatgaagtcatttctctgagccgtgcatcaagacttagctacctcaaggttgatatcatgaagcccttgcacaaaagcaatccctacaatcatgggatcgtatcaaagggatatggcaagctgtctgaatccctcatttcatgtattctaaatatgtaatgtatgttcttacctattatagatattgtaagcaaaagggaaacctttcctcatgcatttagccctataaatagtgatctagcttcactgagaaagggatcgaaagaattgctttagagagatctaagagaaaacactcagagatttcattgtgagagctttgagagagggaacactgtattatttgttctcaagtcaatacaatctaagaggagtaggcaattaccgaaccaaaggggcaaaacctctttaaaatcctatattctttattgcttattgatttttgctccgtcttaattacatttattaatcgcttattaattgactcagtgtcgttggctaaaagcgatgtcaacacttctaataaatttcattctcttggcgaggccccatattgactagtagcaattctaaaggattgttgatataacgtatactctcgtgtgttctttacttaatgttcatttttactctttgttggctatttgtttaaatatatctctattttgctcaaataatcactatgtctgtttaaacatctggataatagtatagtatttaattaattaatttagtaatcatagaaacgacaattcaattgatatcaaagtagttaactaaactcttagtgagatcatgtggttattttttgtctaatcaagtttgtgtgaaatttctttctttccagaaggtagttcggtatctcgtcccctacttcttaatgacaaactatcccaactggaaagtgaggatgagggtcttcattagagcacaagataaaaagacatggaaagaaattttatttggatggtttcttcctacagagaaaaatgaggatggtagtacaaaggtaaaatcttaacttttgtggaatatagaagaagaagaagaaaagttatctagttataaccataaagctcttcatgctattttcaatgatgttagagaaagttttattaaacttgtatctacttgcatctttgctaaaaatgcttggactattcttcaaactcattttgaaggaactacaaatgttaaaaagtctagatttatgattgtttatcgagatttctggaaactgattataaatgataagaactgaaaaacaaataattaaaaaataaagagtaaaaagagacacatagttttttatgtggttggagcgttcattagcattagtccacgagtcagtattattcaatagttcttagcttgaaaaagccttttggaatacaaagaatatgcgttctcaagtttgcctgagcaagtgttgcaagagaatttaacccttaatccataggatccgatgggtatttatagtagtttgagaattacatttcatttcccttttctctattgggcagtgttgacctcaaaaagagatcaaatgacagcggggtcatatgaatttgatgcttgccacgtgttatacaaacagaacgaagaagtagtaaagaaacactactacaaatctgggctttagaggcagtttttaaggcctttcagcgttagttttggtgaaattcgctaccaacgctgatctaggtgacgctatagggtctaaaacaactgaccctgaatggtaccctatggcattagttattttatagtaactgacgccatagggtacatatggcgtcggttcatagtatataatcgacgccatatacccacataatcgatgccatataccctaacaaccgacgccaaatatgtaataattatttttttcagttaatttaatttattttaattatattttttattaatttatatattatattatttaatttaa

SEQ ID NO: 118051 - DNA, 1816 bp, Cannabis sativa
aattagaaatgttttgatatttatgtaaattattcaatattaaataatttaacattcaagcatatatgaaaatgttcaacttttatttataaaagaaatgtctttatatgcatttttaagatataaaccctaacaaatgtgagacaccacatgagtgtaagagccaacatgaggaggagccaaggcacgggttgagctccccatgcgaaaagctgtccactgtctgctcagacctgaggagctcctcgcatgcaaccggaagctccccgctccctccatgcagacactaatgggaacttagctccccgatccctccatgtgcacaccaagggcagcttagttccccactcccaccatgtacacccaataagagcttagccccccgctcccaccatgtacaccaaatgagagcttagctccttgctcccaccatgtacgcccaatgggagtttggctccccgctcttttatgctgtctcaccatatcgccatctttcaacttccctgtctcacttcctaattttattctcttgctcaagcactctccctaactcactccttcatgctccttcatgctcctcacatagacaatgagattttaatgaacataacactaagctaaattttctaaatgtcttcttcacaccatgagtgtaaactttgaagagaaagataccaaatgaatgcatcatttagctaatttgtagcctaactttatgcttgtaacttgtatatatttctttgacttgtaatgcaattctcataaaatcaatttccttcatggtatcagatatagtttccatcctatctcttgaaccctatccgctcatctttttcttcttctcccattcttcttctcactctcaagcaaggccgaacgcaccaaatttcaccctaccctcactatcacaaatgtgaaatctcttattcctatcacattagataacttgcaggctctatatcacccatgggctgccttgtttaccaaccttactcaggttcacaatctttacgatcatattgttccacccacagaggaacttgccaaagcaacataccttgctacaaaaatagctaaccctgccaagtgaaaacattttgacgctatgattctccagtggacatatggcaccatttcctcggaccttctccttgctatccaacaatgtgatgacacaactgagggagcacagaaacaactcgaagctttattttacgataataaggcttcacaagcaaccaacctcaaagaagacttcactggtgtcgttcttgaggaacaccataccatcgacaactactacaattaccttcaatctcttgcagatgttgatgccccggtgtcaaatgggcagctcgtgttacgtctcataggttccttgccagagacgtacaatggtacagttgatttcatccaaaatcaagagcctctaccttcgttcaaaagttgtcgatgaaggttgaaaatggcaaaacacatcatcaaagcacgtgtttcaagtgaatccagaatccgcggtggcacaaacatggttgcagtaactagcaatgactcctcctttgctcctaaatgtaacaacaaaaataacaaagggtgcaacaacaacaaaaataaatatatatatatatatacaaataatgatagaatatatgctaaatatattccaactgataaaaaggtacaagtagtgggaacactactttttatcctactcagggtataaattgtaatgaccgctttagtaatctaaattagtaaaggcaattggcactaatttttattattttactattatttgtgaatttatttaattatg

SEQ ID NO: 118052 - DNA, 2418 bp, Cannabis sativa
gaaccatgcaacataaaataatatttgatctttattaattagcaaatctgattatagtgaaatgagttttatttagagcacaaaatccaacactgtaaagtttgaagaattacatagagaattaataatcatatctatatgaaaccaaacccataacctaccatcagaaccctttaatatggaaaattaataaacacacaacgtacacgtacataggaaagcttattcattattgagttgtttatcttattaattagctcttctgcaattttttcttatctctccattggatccagtgagggggctgatgtcacccatcttaaccatggctgaggcaaaatcagagaagaagctggtctggctattgacataggatctgacaatggagtcagctgatccactattgaaaagctcttggtcagagtggagtagtcctttcttctgaatgaggttttggaaatacttgttatcgaaggctttcggggtttggagatcgagtggggccaaattgttgtcaccagtgccagtggttcttgggcaattggcttgccttgttcttgcgaatgaaccatcgatgttgctctcgttgtatatgtgagccctgaatgatgtgcatcttgctaacccaattgtatgggctcctgtagtgtaataatccaagaaaaaacaatacccaataagaaaggcctagctagaacaagggaattttctttaaattacaataatttcacatcatttttatgaaaataccatttatgattacaaggcaagattataaatatacaattaaactgtagaaataataataaaaatcataaaatgatttaagttttttttacttttattacatggattaaactgtttatatatatatatatataacttaacaaaagttaaattcttatactattaattaatttgtgttcatgatatttactcttcagtcgccagtcaaacataaaagcatgcaaataaatgatgtaaaactaaaatgtaactatcatgtataacaaaaagagcgttgttattgggtatcagtagtgcctaacatctttagacatatccctttacaattagttagtgatattccctgaaagttattatattaatctatatgacactcgatacttaattaaatcaataacaatattaacacataggaaggtgttaggcaccacttgtaccctttaacatttatctaacaaaaaatatgttccaattgtgtgtcaaaaatttatgtaaatttggcacacacaaatacataaaatatattttgctaaatttaatagaagaaaaaaattaaactaatttctatatatatatatttatattattatattaaattatagcattaaattataaatcttttacaattatttattattattttacataataaattaatcataaagtaattatatatatttttttccatttttaataaaaatattaatcaatattaaattttgtaattaattatacattaaaagaattaggggtgcacaaaatatgggctaaatcattcaacccggccaatccaatctattttttgtagtagataattatgttaggtatcatgatttattgagctaacaagtgataagctatatgattatgagttggttataggtttaacacatttaactttatataaccgaacccaattcttgacaaaattatacatacaaatattcattatatatttttataaattaattgtgataaacttagaaaataaattaaccaaaatatattattaacgcatagttcaataattactctattatttctaccaacaagtctaatataagaatcaataactatattaattttactacccacacaatgataatattaccaccttaattttttttaaaccctatatttacatacacatttatgtatttatatgtatctttttttttatgcactaggctaaaaataattttattatgtttgtaataacaatattaaagcctaaaatattcatattaacacaatgaattcaacccaatccatcccctatattattgtactaagtagggttgggttgtacactaaaaaacattaaacagtttataacttacccaaaccataattattgaattgacctattaaattagaggccaagatgcaaaatggccctaaatccaacaattaagttaataaatgtccatttttaaaaaaattaacaaaatgtccattctgttaaaagtttaaaaaaagttttgtatagttattttacataatagtatatcgtttttatgtgcaataatataataaaaaaaactgaaaggtagtatatatatatacattttttatttaaatagctgaaaggtagtatattagtttaagattgtagtatattattttaatgtgctatagtatataatgaacgaaagacggaaattaaaaaat

SEQ ID NO: 118053 - DNA, 2151 bp, Cannabis sativa
  modified_base (629)..(634): a, c, t, g, unknown or other
  modified_base (2100)..(2114): a, c, t, g, unknown or other
tttggagctgtcattttctcctcaaacaaacaaatgaaggcagccttatctaaaccactacaaggtaaattattctaatataataagtattatacttttcttatagaaatgattaaataatacgtacaattccccaaattgtatagtagatatcattttagattattttttagttttaagattatgcttgaaatctacttatgaaggtataaaaggatgtaataataaaaagtggggctgcaacttaaatagtttaactaaataattctaagtggtttttatctggataaaccttaaagaattttaatagttatgggttttcaaaataaatatatgatccgctttagcgtggtgggttattttaatttgtactattctgttaccattaaaatgctaagaagttagataaagagtcaaaccaaaggggttttcctttggggtttgactctattacaattatattctaaaaatttttagttttaaaaattaaaagtacctattgcttctaactatctcatttgcaggttcttttttagttttccaggcagaagcagttgctttactagtaggtttacgttgggctcaagatgtgagacttcccgtggagagggttttttctgattcacttnnnnnngtctcagctttggagggtcagacagtgtatttgaatgaactgggagttatcttttctgatattaaagttttatcgtctagttttcttggggcatctctctctgatgttagccgcaactttaatgttgaggctcatagattggctaagcatgcccttaggatagataatgaactttcttggattgaagaaatccccccacctattgtgtaaccttgttacctttgttatttcaacttttatcggttaccccaacaaaaaaaaattacaaatttatactttcaaaaaaaaaaattataaagattaataaatttatacagaaatatacccattgctagttaaatttttgttaatttgatttagttattttcttatcgtcctaattttttttattacttatatttttatagggtgatctatgttataaagtcacaattgcctaatactctttttttttcttcagaaaaaaatgtttgatactttttcaatgatcttgtgagtgtggataaagatcgcgactattagttatctagtaattttcaaggtcatataaatttgatcaaaacaaacattaacaaacagtcatataaggcttagttgcaggggcctggcgttgacatatattttctttgcgaatgatctaatcttggtgagtagggccacgatcagcgaggttagaggcttttcgattcgccttgagaagttttactcttggtctggccaacaagttaataagctaaaaacctccatcttttttagtaagaatacgtctgatgggcttaaaagagttattaaggaagagctgggagtcaatttgccagatggaaacattaaatacttgggtctccctctctttagatccagacaaaaggacgctgactttaatttcattatggacaacctatattccaaactgcaggggtggaaggctaaacactttccaaagcagggcgttccaccctaatcaaatctgtgggcctctcgatgccgatgtatgccatgcaaacaataaagctctcaaattgtatggtttcttagattgatggcatggtccgtgatttcttgtggggttttgaaaaaggtaattgtggagttcatttgaaagcttgggataagctttgcttgcccaaatcttgtggtgggctaggggtctaaaaaactagggagatgaatcaggcctttttggccaattggggttggaacctaatgacaggaaaccagtcgttttgctgtggcatcttagaagctaagtacttaaaaggcaaagatttccttaactgtgactttaagagtttggactcttggttttggaagaatgtgatcaaagccaagaccattttaaggaaaggagcttgcaaactagtcactgatggtaaagaaacgaacatctggaaggatccttgggtctgtcatggcaaaagtttcatcccatcccccattaatgttggaatttattttacaaggatctnnnnnnnnnnnnnnngtatgttgtttaacaacctaaatatgaactttctaaa

SEQ ID NO: 118054 - DNA, 1808 bp, Cannabis sativa
  modified_base (1766)..(1779): a, c, t, g, unknown or other
aaatctaacatccaatatatgattggatcggatctggataggcctaaaaacattggatgtgatccaatgaacacccctaattttgggtataatacatataagaaaaggtatgtttcaaataaatataaaattaaaggtaaatttgattaattgatgaataaaagaggcatttttcaacttacccctaaattgatggtcacccaagttgctcaataaaacaaacatgagtgtcttgtcttgtaataggaaacaaaactctctttaagtattgactttgaaaagtctaagtcgttaggcaaggaaaacttaataaaatgagcacctccaaccacccggcataaatgtatatatgccgtggaccgtggttaatgctccaagtatactctaatcaacacaccattttgaggttttttctaccgtgcaccgctagtcacggtattttttttattttttatttttttatatatatttaattaatatttattttaatgtattaataaaattaagaatttatttttggtaaattttatgatgcacatttttaagagtgatgtacgaatgtactcttatttgtttcgacaccggataaatttttttagtctatgtttttatatagtgtgtatattatagttatttaacacattttataaaattttaaaaaatacaaaaaaaaattaatataccaaaaacaatgtacatttttaaaagtggcgcactgatataaaacgtgtttgaacgaaagtagtatatatatattatatatagtaatataaattatatagtacgtaattactgagtaattacaataaacaacttaataatagtatgataataaatagtttattggtaaagtatataatcatcaccaatgatgatttctgaaattctttagtaattatgtaattacaataaacaacttaattaatagcaacatgataatatattaaaaaaaattgcaaaatgataatcaataatttatttgtacaaatataattttatttaatacaatattatgtttagtattaacttgtattaataagttgtataatataatatactattttaccataaactgcaatcccgaccgtgatcctaactcttgatgcggacactggttccaaaccttgacactggccccaaaactgagacccaggcctcaaccctagaccttagcccagcctcgaatcccgacctagctccgaactcaaacctgacccttgctgtgtcgtgtgtgtgccaatctacaacattgtgttgagcttggtccaaacttatatatttttgtgtcgtgcttgtctcttctgcgctcgcactggttttgtgtcataccgaaaaacccaacccacatctatagtaccagggtaggtccaagcatatggcagtttgggccattgacaagaccccttatattaaaaggctcccttttttatcatccgaccctttatatatataatatatattcttttttgataatgtatagtatacataataaatattcataaaagaaaatatgcatttataaaaaaattataaaattttgtggtcccaatatacatgattttaaaattcttgcttattttaaaatttatgaagtatattttttttaaaaaaaaaataaaatttacaaaatattgattgatatattttattttaataaaaaattaaattttaatttttcaccgaacacccaaactacttggccgactctatatatattggagaatattgtcccacatggattaaatgtgaaagtattgagccatatnnnnnnnnnnnnnntactccactcattgccaattggttttgag

SEQ ID NO: 118055 - DNA, 1512 bp, Cannabis sativa
gccaatttgcgaaaggaagctttgatttcggcgaatgagctggtctctgaaactcccaagagctcatacgcgttctggttcgagaactccgacctagctgactcggcgccgccactgaaccactgaactctgaaactcggatagaagcaatgcctcgaactgctgcagtttggtctaattaatatcctggagatccaccggcggacgtttaccccggccgaaatggcgccgcccgtcatcggttttctctatgtttcagcttttgaaaatttcagaaatattttttttattatactattatccttattttggcaaatcactctatttacccttctttttatttttttacgaatttttacattatatttattcttttttaatcaattttacagtcaacacttatttttttgtttccgcttctctctaaacttctctctaaccacggacaccaccattacacagcatgctaatttcttctttgttcttttggcatattttatctttgtcaaattcaaaattggtacctacctagaaaactaaattacaagtttctcaagtgaactgttggagaaatttaaataacaccaaatataaaataaagatttgatacttagaaaacagctgagtattcaaccaaaattgtccaaacaaatagaaaagtaatgaaaacaatgaatataagaaaatatagtggttcaattagatcacggtctgattaatacactgttgtaagaaattttttgtcttattttattcatgtcggatcactctttcatatacaaaggaagtgtcttattatttacacaaaacttaatcggttatagaatcgttttacattaaatattataacattaaattgaaataaacgtaagggagtaaatgaagaacagtttaaattcgttttactaaatgcaaccgcgtatgcgactttcatagcgcgagttgcctgttcatcttctcgcacaagttcgcaggcttaaggtgcgttttatcacaataaaggaagctataacagaccttgtattaaggtatctgcatcctaattgaatcgcgtatgtggataccttattagcgttgataacataggacatgcgagttcttatcgagtcatcgactacgatgggtcacttggaccaattcgtttagtaaagaaacagtctttattaagtcgcaggagaagactactttggtcatcgcatatatatctcaataaatgcgtaacttgtatacttttttcttagtcctgcttattttacattatgcgaggcgtaataatgcgactaaactctatctcgatcacatcatctcgcgagtttgattcaggggaggcttattctcgaggagcctcttcttgacagctcagcaatcctcaagggatgcgtgtccacgtgtcattcttatgggagcttgatctcgagtttctaggcaaaaaattcgcactataacgcatgcccctatttttgcgactgacaactatgtcatttgggaaactatgagagagagagagagaga

SEQ ID NO: 118056 - DNA, 1538 bp, Cannabis sativa
catatgcctcaagtcaaaaattaccattgtaattttttcacatggttgaaaaatacaaccatattttcacatggttgaaaaacaaccattacccatcagaagataccattaaattaatttagatgaaaatagaattactattacagcatcattattgagattttttcttcaaaatcctaatttgttcattttcaaaatgctcctttacaattagatcaattgtcaagtttatatttttacctaaaatttaattttcttcgatatatagagtcatgtccaattttcttttctcattttgagctcgtagcatttgaatctcataattttgttgggagtcttgttttttgcgtttgttgagaatttctataatttgttgtcgttcttgtttgatagcatcattaattgctgaagttgaattcttgactggaattggttgaggttgttgttgagtagaacaagcaccaacattcacatcattaggagatgctgatgttgaagactcaaaagcagaagaagaattggtttgtgtaaaaagtcaacacaaaaacaaatcaaatttgatgttttgaatttttataagtattgtgacttaatattatatagattagaatcaaaatttgaacaagtaattgattaccttgttgtgcattttgagactttgttaaccccaattgctcttcactttcgttgttgtgcttttttaccgcaattatacgatgacaacttaattgtttcaaaaaacaacttttaacttttttaaatattgtgccaagtgtatggcaggggagtttggtcgaagttcctcgaatcagtaaccctgaccatggtgaatcaataatagaaaacttttcgagaagaagaagggagaaaattttaaacttttgaataccatattagtgatcaaaagagtgatcctattattcttgtgaactgagtatatatacacaagtaattttgatcttaactaaacaaaaagagaaatcagttagttggtagttacaaccgaaaataacaacctataacaaccaaactattctaataaactaacagacgaatagttttaataaaatgggtcctaattaagtagctacctaatcaaaaatacagactattaaagattctttccaattacattcacataatattgtttataaaacagtgagtgaaatgaaatattaagtagaaggtgaaatgcacatacatatataactcaccaatttcacttgaattttttccaagtgaaattccactaattccatctaataaaatgctatcagaaaccagttgatttaacccaatcaaactaataattagaagatcattattacattcctcaatgtcattaaaaatattgacaaacgttgttagaagtatttttcagattctttgctttgaaaatactttgtttgttttgctaggattgtcaaattgatccaatttaaatgtttgtgcaaaattgatccatagggccgtgagcacgaaaaaagggaattttacaaaaatactgcttttggaccaaaactttacaattatactgg

SEQ ID NO: 118057 - DNA, 3382 bp, Cannabis sativa
  modified_base (3124)..(3133): a, c, t, g, unknown or other
gtaaaataaattccaacagtttgggcgggttagaataatattcaacacgcccaatatattcattaggcggtttaagtttttcgtaaagttattcgggttgtattttttgtcgatttatttgttttggtttaggcaatttattcgggttgggtggtttgttaatttttttgaactgccctatcgactactacacaaggaaaaaagatttatcggccaaattgtatttttaacctccatgtaccaaatacaagtaagaaacaacacccatggcttcccacaagccatggccgaccactgccattgttcgggcctaactggtggcagtggtgtcccattagggtttcggacgtcgaaatgagatttttgagttccgagacctctaaaatatgactcaccataaaaaaaaacaagttaaaacacccgggattccgagaagatgcacaggcgagcactgccatatggccatgtcagtgcatgcaattcatacaattcagcataaactactttcagtaagatgggcataactctctaaatttttatccaaatgacctgattcaacttgcattggaaagataatttcaaaatggatcaaagtttgtatcacaaccatggctgaattctgaagttatcgagtccaaaattactcacaaggtagactagtatattttactcgggatatgagtaatgtgattaagcgagggttgttgaaggatactaccatagcccatgtggcattgtatgcgagcattgacactctaaaatacatgtttcaatacttgtcactaaattcatgcatttctagccgagaggagacattctatcactccatttcaaattggtgcattctcaattgaaaataacaactttcccaatgtttgttcgatttttgcctagaaacaaggagatttttatagatatttattttcttgtaatattttattcattaaaaagagtagtatacgagatttattagtgagataccctgacatgtggggaatcactaacaaaccctacagcctatatatagataaagtaataagccgagaaggggacttttggattttaaatctttgggaccttcttctctctttttggatcttcctcttcgtgaactactccttgaaatttacttgacgacagccaagaacatcacattatttccatcatctttcttattgagtccaccatacttagtcgacatagttctcaaaacatcattgatacacatctttctttacaaattattgatttattattcccaagaactttacaaccattaattttgatcatatttatgaatatcaagtctcccctgagtcttacattcataaatctcgattaagatttcacgtagaaattctttgctgtatttttatccacacactcttgaaaatatataactctggtgtgttgaatctaatcaataaaactaaaagtagacgtagtcccattatcatcgcgacatggggggtgaactactataaacccctggtgtacatttaatttactgcaattttgttagtcaaattaattcaccgtagttctcttttattttacgatcttcttaaaacagctgacgaaaaattacatcaacaagtaatatagatgattttctttttagttgcatagatcttaatattttttccattcaaattttgataagtaccaaatgaagcccttagaagtaggtcgtcaacaactttttatgagcaattgagattgttagatttaagaacttctgtgtaatttcattcacttttactaactcaacgattggccatgtaaagtgccccaaaaattttgttatctaccaaattatattccccaaactttgatacatacagaatcgcgtcgtctagacttttatctgcgttaaacttctgttaataaaatttaacaaaaatccttaaattcaacaattttaataattctaaaaaaaattaatagcccgaaaaattcaaaagcataatttggtatatgcaaaaatttgagggacaaaatcctaattagcgaaaaattaaataagaagggaaatattgagtaagaaatatcactgaaaatatatatatatatatatcaaagcaattactatttttgaaaattaataacttttaactattaaatatcagtaaatatatcgttcgaggaacttagagcatcttcaacctatacatcaaatttgagatcacactaacactaaatttggtgtcaaaccactccaaccacaacactaaaaactaaactaaaaaaatacttattgttatactaatttttttttttaataaaatagaatattttttaatattattttagtttactaaaatcacaacaattattatatttatgtgttatctcaaattttatccacttaacgaggtatgtccacatagtcaaaattgaggacacgtagattacaacttgtcaataataggacaaagtcaccttacacggcatgtcaactgtcaagggttctaaagcaatcaagcaaaactatcgagcaagaataagcaaaaggagttaagcaggccatcatgaccttggctgaccatgtccggccgaccaagggaagcttataggtcagccagggtaaccttgtagcctggccatgccttgagaataggttgaccggccaagaatgactgttcaaccaaggagacctgacctttgtggggaaagatgtataaaaaaaaaagatgaaaaggcttgccagaccatacctggccggcccatggaaggttacaggccgaccatatcctaaaaatagtattggccgaccaacttatgcagacaactcagaacaaccgaacaaattgcgagacaggtccaacaatccattaagatagggatatttcctcaagatatagtcctatattctagagatttagttatcattttttgtaatttaaataatagataaataagatgttaatatccctattttgaagggatatcttgacctatttagtttatgatttttttttgtaagccctacactatataaatggcattagatcactctctcaaaagctaagtcattctacatggactaaagggtctccacaagtcctctttcatgctcccttaagcctcctacacgtgcaagacctctctctctctctctctnnnnnnnnnnctctctctctctctctcaatcctcacattccatcaatgtctcttagacactaagttaagtatcttcttaagttcttcacaagatcttactagttatttatatctataccactttgttttcgtaattgtgatactgaagagagccatagctagaaatcacaaggtattaacctatgatctgtgttgtattatctcaagagtgaatacaattaaaaggggagtaggtcattactgttggaaatattttacc

SEQ ID NO: 118058 - DNA, 1154 bp, Cannabis sativa
  modified_base (1121)..(1125): a, c, t, g, unknown or other
aatatatattattcacataatattatatattaccacattttaatctatatgttattatattaaaaataatataacataatgcagatatcatctataaaaatggatatacaatataatttattcaatgcaagagtcattccgaccaaccaacgaaaatatgagagtcatccctaccgatacaatattcttctcagcacgattcaaattaaatataattttgactcgtccaatggaattagcctcttagttatattcccttagctcctaatcttttatgatcggctgtttcctttgcttttaacaccatggatttctcattggctcattgatatttctctcaaagactcaaacattaattataaatatttatggacaccaagctgtacgtaagtaatcacttaatttacttaaaatgaaagaatttattcacaaattgatttttttttttatttttgttatattaattaattaagtcagtcaattttatgtttttgtttttgtttttctttttaaacaaattatttttggcaatacatgtccaatattgtttttcttgaatttcatcccaatattgttatatctcttccaacaaatccaaatcatatataccatactacatatatgttgtatttttactttaaattatttttaaaagaagagtactgttctttaatttacatctcttataagttagctagggaggcttctggccgatttagcttgatagttgatagtacgtactctatttacctaactagaacttattatttaccaaaaaaaaaaaaaattattcatatcccttaagaattaggatagcagaatatatatatccatttaaataaaactgaaaatatatatatttatatatatatatataatataaaatatatatttttttcttttcaatcaagtaagagtgttgtggcagtagtactactaattgtcgaaccaattaaaaaaaattaatttggatttttaccctatgaacttttgacatgtactaaattatactctctgaacttttaaggtcgttaaaaatactccatgaactatttattattattttttgggcttttttcataaatgtacaacaaaaacaaaataattacaaaaaatgtgcnnnnnaaaattattttaaaaacttatacattttg

SEQ ID NO: 118059 - DNA, 2095 bp, Cannabis sativa
  modified_base (2066)..(2069): a, c, t, g, unknown or other
atcgttttagaagttcatattttggttgttaaatcaacatacttgtgagtaaatctaagttcctggtaaaataacttccaacaggcactttgcaaatgtaatggaaaaatccaaagtgttcgaggattgctataaagataaaagtgttgggattttataccctaaataaaattcaattttaatgtaattttatattacttataaatgatcaaaaattattttattacttgtgtatattgcttggttcatgcttatatgtttaatatataaattctgctcaatctcgaatatatgactattcatgattatagtattatcaatacaatgaaaaataattgtgatcatatacttcagacacatttactcttgagatttatcagtgtactggatttacactgacgtcataatcgacgatgtcatttactcacacttggccaagtggaatgtcttttccaaggtattagccaagtaatcttgtatcagatgtagtattcgcttatacattgaacttgaccgatattaacactggaaaaaatatcataaacttactgttatatcatttctaagtcaatatcatttcattgactatagtttaattgatcttaatcttaaaatggttaagctttagcctaattgtagtatttgaatgctttgatatattcattactagcttacctacctgtctagcctacacttacatcttgggaactcggtagtgcaattgaatgaaagtgttaatcatagatatggacatctataacttctatgtttgtttaggagtgaaatgattgtttcctttgagcttggctaaatgtgataaacgattgagcactcattttagtaattacattagtttaccaacatatcatttataaggatctaagtattttgaagataaaatatattgaagtttaaaacattaacgttgacggtgagaactcttctataaagttatggttgaaaatcaaaggttttaggcgagattgtattaaattgttttattagtaatcaagaacatgaaaaaattgtggagaagtaatggagaatatgaaataaaaattctatatttctctcaatgtgcctttcttacagtgattccaaccccatccaaatctaaaatgggggtatttataggtgagcaatattggctctcatttacaatatagtttcctagttttctgaaggtgacatatgaaggacatcctacctttgcaggtggtagctataggaggtggtcttgtgccatgtactgttgtcgattgtcaggttgtcctagggtacagggtagtggctgcaatatactctttgtcgcgtcgtcagggcttgcaagcgaggtgtctccattgtactcgtcctctcataatgtccaagttttgtaggtagcgtggccatacccatgtgtgatatccttttgattctcttccttacaacttactaagtgttggccatctcccttagagatgtgatcactaattggaattacccaatgtgtgtgcactgccgagatgcatgcatacaagatgtcgtcgagaggaatgtatgcatgctgtcgagaggcatgcatgcaacgtgcccagaggctacaggtgaatgagtcgagaggcgcaaaagcatgtagttgagtggcatgcacacatgtcgtcgagagggtatgagaggccttgttacaagagaccatggtgcgaggtgcttgctacgagaggccatgctgcgatagaccattctacgagaggtctgcagcgacatgttatgctactaattaaaggccttaatgtgagaggcttgatgggagatgcctattgagagaggcaatgctacgagaggccctactgcaaaaaggggccctatgaaagggtgcagtgcgagaggcatgtgttgaaaggccttgctgcgagaggccatagtgcgataagtctgatgcaaaagtccccgctgtgagaggctaattgcaagagacctcgctcttggaggcctgctacgagaggccttgcttggtgaggctttgctacgagaggccttgttgtgagaaaccatggtgtgagaggcctgttgggttttatgccctnnnnaaaactctatttcaatgtaatccaga

SEQ ID NO: 118060 - DNA, 1803 bp, Cannabis sativa
tatgagacctgagatttagaggtggcacattgattagttatttatttaatttatagtgatatagcacctagaaaattgctacacaccactagtgactgttagtactaaattttcaaaatttagcaaattagcaaagcatgcgtaaagcatcaaaaatttgaaacttgtaatttgatagaatatacttgttaattagttatataaaaaaatgtactaactaataattaagaatatatgtaatatgtgtggtaatcgttaagtctatattagtgtaattgttttagctggagacgaactttgatatattttttttttcaggtataataattctaacatgattgttttaataataaagtacataatacacccacaaagctgacgattttgtcaaataataaataaataaatcccacgattttgaatagctgagaaaactcaaaataattacactagaattactgttttttcttatgatatattgaaacgagttaaaaataattgttattgatattttccactggaatagttgttattttctttcaatttttgaattaactcaaaatagttattcgttgttattcttagaaaatttccttccaaatttaattttccattaatatgaggcggaccaaacgggaaacccagtcacaacaccactcatattattcttcccggccggaactccaaccacagaagacgaccccattgacgcagaagacgaagccgcgcacgatcgatactccgactttgttttcactgacagattgatgatcccgttcctttccccattctggtctctcaatctgtaacttaagaaatgtaagtaattctccggtaggtacccaccggaaaagtcggacatcggaaccgaagcagttccgatgagtctatttccgatcgccgttctgcagtgtacctcgacggtcaatgccgcagcgtggtggacggccggtaagtcaaggacgagtttctcattccagtttgggttgctaccgcctttggtatcgatctcggttgtttggaaaacgtttctgctattggatcgaacgatgacgaaggcgtttttcttgatgaatctattgtcgatcctgaggctttcccctgataagatagtgatttcgatagttggcgatgatgatgatgatgctgatgaggaagagtaagacttggccattgtagacgtacgtaagtgataaattttgtgaagctattttctgaggtatatgtatttatgttagaaaattaataattttataggtttgtttgggaggaaggttaatggaaaaaggagagaaagagaatatgtggttcatttttatgaactgctacgaaagttcctaacaaacgcggtcttttttaaatatgctcattattaatctactcattaattattaaagacgtaggctatgtttggtagggaaggagggagagttgaatggatggagaatataaaaaagggagaggagagtaataatccatataaaaaagagagaggagagtaataattcttttatgttgtttggtaggaaggatatagattgattgaaggataaatatataattattaaattataaaattgttattttatccctataattaatttttaataggaatattcttttttaataatatttattgaggatatttatgtaatttacaatagttgaataaggagagttctcatccttctattattaaagagattacaaattagaaatttgagtggatttgctatccttttagtttttctttctctccttcaatccctcttgccaaataaaggatttgttatctcctcccac

SEQ ID NO: 118061 - DNA, 3821 bp, Cannabis sativa
aagtttggggggtttagccgccaatatccctttaaaatataacagtttcattattatgtccctcctgttagattctatttattttattgttatcaattagcatttttatctctttaactttcaccaatacaaatttttgtcccttaaatacaaaaattaattttcaaaattataatgttctattaattttaaaaaaattatcaaagaacttgataaaaaaatataaattaattaaaaaaaatattaagattatttaaaaaacttaaattattcctaaaaaaaaattcaaactttattttatttataacaacgtatcttaaaaaatcaaatcaaaactattaaaaatctaataaataatttaaacaagttaattttttttttaagaaaaaatcaaatttaaactcatatcttaaaaaataattaaaaattcaataaagatataaaattatttttttaaaaaaaagttagaaattaaattaaaaaaatattatgtttacttaaacaaatctaaattttttgtaaaaaaaaaaaaaaatagactaaaatgtattcccgtaaaatttagttttacacaaattaaatttttaatatttttttacatctaaataaatattttaataaaaaataaataatttgtttaatcacttatttaattttaaaatttcaatttcttttttaattttcttaattattcaaaatgattttttaaaatctaaattaattttttttgtaataaaaaatagcaacttttattaatgatagcaatcattcataacaattaaacacactttagcagaacaatcctcatactgaagtgcacgacctgaagaaaacaagagctcctggcaagacaatgagctgctttgtttgcagatcgtttaacataacaaatatcaaagtaatccaaagacaataataaatcacacacatcaatcactagcaatccaaattgagacaacataagaatgttactttttatagcttgaacacacaatagactatcggtttcaagaacaacactttgccaatcatgtctatcaatccaactcaaagccttcttgataccaatgatttccgccacttcaggttagaccagacctatctttcctaaagtaaaagcttcaatcattcaaccagtattgtccctggctaagcatcccaaaccaaaacgtccttcttgagcaaacaaggctcgatctacatttaccttgatcttattcccattgggtctctcccattgctcatatttaaccccatccgtagcaagatgagatagagaaaaacctctacgttcttgagcaatcttatattgatctaggcaagatcttggagacgcaacaatacttgctgcattagagactttctactgccaaacgacttcattacgtgctctccaaatcgtccatgccaccatcgccagcttctccaattcatcaaccttcccccggtttactgccccctacaaccaactataaaaatcagcatcagctgcgctaccaacgtccaccagagatcttttccagcatgatctcgcaacaagacaagccacaagcacatgaaaaatagtttcattatccaaattacagacaggaccaattgcacttattggaacatgtctcttttgcaattgaacacagcttggcaaacaaccagatgctgccctccgcaaaaaattatagaccttagggggcactttaagatcccagatagtacgccataggttcgatggttgaacagcaggccaagctcccttgagcacttggagatgtttatacgcactattaaccgtgtaacctccatgtttctcaaacttccagcaccatcgatcctccaagacattatcactgagctgaattgaaaaaataagagcctcgtctctatcctgaaaaatatcacgaatgatatcttcatcccaccctctagaatcaattctcataaggctgctaacaggttagttaattaaagcaggatgattggagagaacaaatggattttcatcagggagccatggatcatttagaatagagacggattcccctgatccaaccgatcgacaaacacaagaaaccagcaattccttcgcttcaactttactacgccacacaaaacttgggttatcacccaactcagctttcagaattgttgttgtagagtaatatttggctttaaacacacgccccacaagagaagagtcatgagttaacagtctccaaccctgcttcccaagaagagccaaattaaaatctcgtaggtcccggaatcccaaaccccctgcatgtttgtgacgacacatacgattccaactcatccagcttgtacctttagtttgagttgaacccgtactccaccaaaacttggccattagtctttcaagctctttgcaagtatcaactggcagtaaaaatacattcatagcataattaggaagtgcttgagcaatagattttaataatacctctttgccagcccttgaaagcatcctcccttcccaaccattaattctcttccttagcttgtctttaagaaagtcaagaatggcattttatttttaccaatcgaatatggaaggcccaagtaagaaccattttcatctgcttcaaagatccccaacaagtcacagattgtatcacgaagaccaacagcagtgttgcagctgtaaaaaacagatgattttgagaaatttatcttttgtccagatgccaattcaaaagtatgtagcagctccttgatgttatatgcttcctcctccgttgctttgcaatatatataactatcatccgcgaacaacatgtgagaaatatttggagcatggcgagcaatcttacaccccgtaagtagtccactatgctcataactgcgtaaaaagcacgagaacccctccgcacaaagaataaacagataaggagataatggatctccttgtctgatcccacgagaagcaacaatagggcccatttcttggcctccatgagcaatgtagaatgacacggaactaacacaaaacatcactaaattaatccatctgccatcgaatcccatcctctctaacatagctctgatataatctcattccaatctatcataagctttactcatgtctaattttagagccatgaacccatctcttcctcttcttttcctcttcaagtaatgcataatctcataagagatcatgatattgtctgaaattaatcggccttgcaagaaggcactttgcgtctcagatataatggtaggaaggactcttttgagtctattagcaataaccttagatattatcttgtataggacattgcagagggctatcggtcaaaaatctcccatgtcctgaggttgcttctttttgggaatcaaaaccaagttggtagcatttaaaccagtaggaaaacaactagattcgaaaaaagacttgacaaggttaaaaatatcattaccaactacagtccaacatctttggaaaaatcttggggtcataccgtcgggtgccggagatttatctgggtgcatttagaaaagagccttacgaacctcctcaaccgaaataggctgcatcaaatcttcattctgaacatctgttacacgagattgaacgaaaagaaattgactacttattttgacagggtacgatttgataattgttaaagtttaggggcagagttgctaatttacaaagtcacgttagcatttcaacagaatatgggacagaacctaatagaaggactaaattataagaatatttttttattttaggaaatatatttctatttaaggaaatatatttctatttaaggaaataaaataaataattgattttctgataa

SEQ ID NO: 118062 - DNA, 2276 bp, Cannabis sativa
  modified_base (26)..(38): a, c, t, g, unknown or other
  modified_base (2223)..(2236): a, c, t, g, unknown or other
ttgtacagcttacccggtatttcccnnnnnnnnnnnnnggactactgactgtcacaagcagccatgagtttgaggtcgcagcagcaatgttcatatcagctgcggtgccacagcctggtggacaagataactcattttgattgtattttggaatatttatgtactttgtaaaagcacttttggttccgaatgaaaacattttggaaatagggggtccccgtaaatattaatacttgtctttaataaaatcaatgcgtttattttaattgcaaaagaaaatttaattagccacacttttaatataattacataaattttaaaagaatagttttataaaagtacacacgtgacgtccctgtgggacagggcgttatacattcactcatactctcttcatctatttcattactataattatgctctatgtacatagaacaaacttattgagaatgatagtgataactagtgagatatagtgataacacaacggttttgaatataatggcaactacaagtgaaatacgatgatgacaactattttgaaatcataagatgagttttctatgttttctatagatttatcaatatagatttatcaattgtctttttatatatatatatatatatgtgtgtgaggatatagttttcaatttctaatagtttttttttattataatatttgaagatatctcttagagtaaatgattataagaaattaaaagtattcccacatatcatttgaatttaaatctgattagatgtaactctatctattttgtcattattaatttgatgaactattttctttttgttagatattttacaaattcactcatttataaaagtgagtagttaacttattgtttgatgttctttatgtacaaaataaacctattggaaaagataatgacgatgacaagtgagagacaatgatgcgactgcaagtgagattcggtgatgacaacggtttttaaatcactacaaaaatcaccctagctcttcaatgaggagaaatttcatcagtgaaagggtgtattttcgtcagtaataattatcaaatggcgacatgtcgttggtaatacttcgtcggtgataatatgaaaggggaaaaaatggagagactttcaaatttggagagaaaaatgaagaagggagaagatgaaatggaaagaggaaaagatgaaatgaaatgaaatgaagaaggaggagaagggagaagatgaaatgaaaatagaaatggggagaaggaggggctcgatgtatttttttctacatgtttttcaccaacgacattcactaacgacaaaattgttggtgattaatttagaggaaagaagcctacctaaacgcaacgggaaaatttcaatttgccaatatttattgacgacattgtcatcagtgataaatttatcattatcactaacgattatgtatatgtcattagtaatatccttgtttttagtgaggacattttgtcattagtaattgtggcgtcagtgatgcttttatttcttgtagtgaatcataaacatgataatttttttataaaatttatcatttgttacattttttttattctaattcaatttattcaacgatttagtattttaaaaattaacccaataataatatgtatatctataaaaaaaaaaactaattaattaaaaattattatatattaagtttaaaataatttatacaatgttaatttattttataatataagtgtaaaaggtgaaaatttagtaggataattatttattatatatatatttattggatatagggacattagttttgtccctggaagcttttacaaatcgtagataataaatctaaaggtgataaaggactagatgtatggtaatagttaatatttgggctgcatcaaattatttcttgcttatttttaataatgttttaaatgactatagatctgaccaaaacactaactgtgcacactccaattttttttttcatacaagatagaaaagaaaaaaggtgaagagttgaagtagatccagataaagtcttttttttcttttcattttattctcttatatttttttggtgaaaattatgttaaaaaaaaaaaaaaaagaaatagcttacttctgaaaaagaagaaaaaatagggagggaacgaggcgtttggttgggaggaatgaaaatataggaataagaatgacaatggaaataggaataggaatggaataaaatttnnnnnnnnnnnnnnaaattgataaaaaaataattaaattttttttcttgttaca

SEQ ID NO: 118063 - DNA, 1033 bp, Cannabis sativa
tcgaggaagtcacctcattgtatctggatgccaagtcttcagctaagcttctccaagagcagcaagagaaatacatatcttgaaacactagtgaacattcctgtgattttgtttttttgttttgtttattttcatgtggaagtaggaacaaatgggtcgatttggttatttggttaaaatatgcggctagtgagcctgagtaatgagttttcatcaaggggttagattagaaaaggggtgttaatttattagcatcttatgctgcttagattctttgtaattgtaacttaatgtgcaactcgttcaaggtattattctcatttgatgtggcatttgcaaggcaagttttaaaggccagggtcatagcattgacttgttcccgtggggaaaatagtgtcacgactcatctacaaagcaaaattggcctacatggcactatccaggtcagcataggcatgcttaacataaaactaaatcaaaacccaatccatttttttttccttctctggaaccatcaggaaactaccaccactaccttaacccatttcttcaacacacccttcagcccccaccactgcccaccaccagcccactgaaaccaccaccaccatcacaccacaatcactaccattattaccaccacactaccattacaacctctgttatcaccaccatgctagcattaccagtgccaccaccaacaacaacatttttccaaaatcaaacaaaaaataataagtcaagttttgaaaaaaaatccggattacataaaacaaaactaaatccaaatacaaatattcaatccaaataaaaccacgagttttgatttgttgaactcattaaacataatcatcattacacaataaactcaacttcaaatcaaatagaaaaaacaaaggaaaaattacttttcttggtcgacggtgagagaatagaggtggatgagatagaatggagagcaaagagtaggcggaacggaataggagatgacgcaattggggccgaaaaactttggagagagagagagagagag

SEQ ID NO: 118064 - DNA, 1201 bp, Cannabis sativa
tgcaataggggtttctatacgattctttgttgcaatttaggttgcatcgctagttgaaatagggatgtctatgtaaaatttcgtaaaaatacaaaaaaaaaactgttttaaagtgtaaaaatgaaaaagcccctagagagagagagagagagagagagagagagagagagaataacaactaacagttatgtctttcattgaatggtaacaatattacaatagtaaagtaatgaataagaaacgaatagaggtatatataggaatacctcatagtacaaaacacagggacaagcagaagtttcctaatacagatagttaacaaactgttacctgattgtcattgaccaaaaataaaaagttacacctaattgactatgacacaaacataacaattctccaccttgtctttgtaatttcaagtcactaggcacacattctattgtcaatatttaataggtttaggcaatgatcaaattttgctgcagggagtgattttgtcaacatgtctgcatcattgtcatcagtaggaaccttgatcaatttattcctaaagaataggaaaatatatgaagttaaaacttagcctggggctagcttaaaataccactgttgggctattccagccagggttgccagaaatattcggcattgcacatctccatatacttgttggagatccgtttggatcttaaagtactttatgtgtgctaggtaatcttctttccccatgtacatcttccaagttggcattttgaacttgggtaagggcaatacattaatgtatgcagagaatggtgactcccttgattgtcaagttataggtcggacgactttgggctggacaggtctttaatcatgtttttgagttgatccaactatgcttctataaatgggcccactgtgacgtcttcttgtctagacaacattccttggccggccaaaacttcatggttggagaggtatgtttggtcgactaactcttggttggacaactagtattgatcagccagtctttgggttgaaaatgtgtcttgaccgtcgatgagattctcctggttagccaggccgatttgtgggctaataggaggttgatcgtaccaacttcttgagtttgattgatccacacgcctgaaactattaatattacgtggaccactaaaaatttaccacgtgtacaagtgtgtacatgtggacagtccac

SEQ ID NO: 118065 - DNA, 1360 bp, Cannabis sativa
ccgccacctgcgccgcctggcgcaggtggattgtctatattcttgtcgggtggacaaggacaggtggtgggtggagctgtggttgggccgctggtggcgtctggtccggtggttctgatggcggcgtcttttgccaacgctgtttttgaaaggctgccgcttgaggttgaggaggaggaggaggagagcactgaagctcctccggcgtcgcagtcttcgggtgttactgcggcagcagagggcggcgttgctttttttggaatggggtcatcgatatcatcgtcagtagctgggaattttccattttcgggtgataatttgttgggttggggaccagctaataataacatatcaactactactgttgctgctgctactccaccaagacctccattttagttgtttgcataaaatcttgatctgaatttaagatgatgatgatggtggtgatggtggttgcagtatattttatatatttatatatatatataataataataataggtgttacccttaattttttattaaaatctctttgttaattttttatctaaaaatatgtcccaaaatatatatttagagatatttgttatacttacaatattatttttataaaattttcaattattttaaataatttactaataaaaataattttagtacactaaactatctagaattgtttaaaagtttataaagatagtattgtaattataataaatatcggtgtaaaaaataatcatgtgattttaaacttaaaaattaactaaaaaattataattggtactcatctctgattaaaactaatcatcatttgttcttcttcattatatatccttacatttacaaatttccaccataattaaatatttttccagaggttccttaattaatttcctaagctacgtacaagatatatggagttgtagtactagtgttgtttattgtatacaattttataaatatttaccaataattattatatattcacattatataatagaaataaacataaatgttaacgattttaacattttaattattttcaattgattttctaaaaaaaaaaatacataaaactaaatataaaaatacataaatcaatatttatactttgatatattactgtttattaaaagtttataaataaatttaaaaataaaatagttatgtttatttttttaagaaatacttatgttgataagttattcagaaatatgttttaaaaaacaaaattataactaaacgtaacattatgtatattgtaataccctagaattaagaaatggattagcaaaaccttaattagataattatgaataattgagaaattatattattatatagttcaatatatgag

SEQ ID NO: 118066 - DNA, 1504 bp, Cannabis sativa
aaatgaaactttaaactcagaattgttgagagtaacgaaagggaaagaactagaggaaaataaagagagaattcatttatttatagttgaggaagtgtgtacaagagagctatttatacagctcaaaaaataagctgcttacataggagtaggactacttaacacagtgtaactaaactaatgagaagttaacttactacaagaatgaacaaacagaacatctaactatccacaagagtggcacatttctagcccaagcctagcgcaataatgtctcaccagaaaatgttgttgtgcactaaaactaaaataagaacacaaagaagccctatttagtctctatcaaaatggaagtgaaaaaactcagctaaactgaaaattccgagtaaagcaaagaactttagtaaaattcttcagcagagaattttgtcagaaaaaaaaaaatggagcttacacttatgtttagtcctaaaaaaactcagctaaattgaaaattccgagtaaagcaaagaacttatgtttacacagagaatgtttagctcaatgcttacacttatgtttggccctaaaaaaactcagctaaactggaaatttcgattaaagcaaataactttggtaaaattcttaaacagagcattttatcacaagacaaaaaaatggaggtttaacaaaataaaagataagagagaaacccacttgcctgctcactaagaaagctcttaagagtctcagtcctccaatttctaggtaaatgaaccagacatttgctaagcacagggtccaacccaacaccatcaccatcaccatctgcatccccatcctcatcctcatcgccacccacagtctccgtcatcattatcacctcattcgaaaccgaagccacaggcttctcttcatcctcggatttcttctgtaccttcttggcacgctccgaggtcgggtcccacgtattatcgggacgctgacggagctcttcctcgccgtgagcgtagcggcaggtacttccgtggctgcaagagcccgattgacggcggaagaaggagcatagactggtcttccagacaggagtggctgaagggttagtagggttaggttcctggtccttctgatcgtcctccctcttgcgcttctcgccgagagaagtatcatcggttaatgcagcgtcggaaggttggtctgggagtgaatcattgggttcggttagggtttgagttggaagtggttcgttaatgggagatggtgccgccatagctgagggactttcaaatcaaattttgagttagttatgactctgagagtgagtgaggactgaggactgaggaccactttgcaaattttcacaaataaggcagacccaaaccaaagcccaaccagccatcatgggcctagcctggcccatttatgaaaacatcaaaaaaaaaaagtatttttatttccggaaacttacaaaaatactggaatttgcgttaatttttacaaaaatactgtcacacggaattttttt

SEQ ID NO: 118067 - DNA, 956 bp, Cannabis sativa
taattgtgctagcttcatgaaacatgaaacatgagaatattttttaggttcttatttagtagaacaatatggagatataaatacaaataataaaatatagtgataataaaggataacaataaagatgatgagaaatacattgagccgatccacgaaacaaaattgaaaaagaaaagaaagatattgtttagacctctcgtttaggggagcagatggtatagcagtaacattgggagaggatgggcatgagtggcgtctacacttcaagtgtagtcaacgaatcagatatgatggatataaatagatgtggcttaaggttataatataggtagggaaaaagagaagaattagcaaattgttagtcgatatttttgtttttctaaaaaaagctaaaatttgattttgaaagtataatcaacataacttgatatgagaattaaaaaaatgatacttgatttaccgttttaacaaatgagaatgtgttgatatatagatttttttttaaaaagttttttattagttattgaattaattaatattttatatgattaaaaatgtgaaaaaaggagaaaaatttagagtaaaataaaactattttagagtatcacatcaccgcctcatacttctcatttatatatatatagatttattttcaaatatacgctaatataaaaatctaacagcatttactttttgttaaaaaaaaaaaacaaagctatggagacaccaatcaagcctctattttgctttcattaacgtggtgtttcgatctgccccagtcgagcctccgtcgcaagcatcgcgaagctgtcgaagcttagccctccgacctgttcccaaacacttgcaggttctctcaaaattgtttcgtgacattttgctattttacctcacatcactccattaacaacttttgttatggttctccttgaaaatagactaaggggatattcata

SEQ ID NO: 118068 - DNA, 2051 bp, Cannabis sativa
  modified_base (2004)..(2004): a, c, t, g, unknown or other
gacccagccagaagtgtggtcgacgaggacgtcggaccccgtaagggggtgatagtgacactcaatagtcccgtgatctgtaaggagaaatacgggtaaggtcatgtatgattattctaagactgtgtaggtatgagactacatagttaaggagggcttaaaatggattgattggtactacctatatcaacaaagtgcatcttgttcttcggtagcccatcacgaaagaactccacggttaagcatgcttgacctggggtaatttcaggatgggtgacctcctgagaagttttcttaggaagcgtggcagtgaggacaaagcatgctgaaaacactcgtgttggtctgtaaggtcagtcttcagtccataaagcaggcagagtggcgtaaccgtgtaaaagagctatcatttcgtgggtgtaagggcccaatagaggcttgaagcggggacgttacactttagcttcccaaaaagtcaagtttcggcacctccaaacatgataaactatcgctgccaatactagagtaaatacatgcttcttgaaaagagaaagtcggttttacttcagccatattaacaacaaattcaggttagttacttgagtgtcccatctgatccaatctttgataactttgagacatttctttctataaagacattcaaaaaatatatgttcaattgattcagtataacatccacaaatttgacatacctgatccgtacagactttgaaacaaaatagtttatcttttgtttgcaaacgttccaaaatcgccagccaaaagataattcgatgtttgcggatattaaaacgcccccaaacttgaccataccagctcacattctcctctcttgtactcaacacatcataaccaagtctgatagagtatttgcattgcattagttggtatttagacatataaagtttcattttgttcttcacatttactatttgacgccaataccaacttctttgagcagctacctcataatcccaccaaatttaatataaatattattttattaaaattttaatataaatattgttaataatttaaagagactacactatatactattatattatttttattagaatcaaagtacttttttgagaaaaataaataaatccattaaaaaggcttttataagattaatataagcataatccatcgatgatatcctggacagaagaccagaccaccaaattcaagaagtttttaataaaagagcaaatttagctaaaaaatgggcaagagcattactagcgcagttacaatgagaaattgagacatgggaaaaagacttccaaacatgaagaatatcagtaagagcaatatcatactcattgcaatcattcctcttatttgaaagagacatcactagacgcagacagttagagaatatattgatacgagtaaatatccaaccacacacaaaggagaagcctatgaagaaagaaagaagcctccgccacatgaggttcaagcaaacctgagacagggaaagtagctaaacataaatatcaccatcttgtcgagataccatcgcccttaaaccaatctgccaccttttatgtaccaacataaaaaaaaattgtacgcccccaaaatcatttcaggaaccagaaccccaatatgactaggagaaatcagcaaatagccactagagctggcggagcaatcgtagtttgagcttcttggcactgccacaaatagctaagagcccatctactgactatatcatcaaaaagaaccttattatcatgcacaaatgtattgcgacgatgccatattctcaccccaaaggataaaaaattcttcaacttttacctggataaaatatccatataccccaaccaaaagttcatagaaactagaagtcatcttcaaactatccaacccttcaaaccccaaccgaatcgaatagatttagagaaggacataaccacaaacaagacaggtaatgctaggatttttaccccccgaactttgacatgtacnaaatcatgtcccctgaacttttctagccgttaaaaataccccctgaa

SEQ ID NO: 118069 - DNA, 2529 bp, Cannabis sativa
atgactcccaaacaatcagctacaacaaagaccttctttagagaccatctttgagctagcaagatccccattcgaatagctgtagcctcagccaattggacagaaagaatgcctggcaagaataaggattcaacaacaatcaagtcaccttcatgtcctcttattactgcacctaaaccacaccccaatttatcctgaattatagaagcatcggtattaattgtcacatagtctgtaggaggaggttgccaaacttttttgattcgaacaacctgctctgaccgaggccttagcacctccccaaaatgctcaaccaacagctcttgcgcccatttcacccaagcacggtcctcttgaactttgtgttggaagaggaatttatttttacgttgccaaagaagccaagaaaagcctatgaaatttatcatttctgtcttagataacttaccccataggaaaaataaaatatcaggagcagaaggaaacccttcaaaaaccagatttttgaccccaaacagtttccataacctttgaaccttagtacacgaccatagggcatgacaaatgtcatcatcttccttcttgcaccattcacaagtagtatcaacagacatacctcgctttgtgagttccactttcgttgggagccattgattgaacacgcgccaaatgaaaattttcattttaggagtaagcttagacccccaaacaaacttccaccacacgttcaaggttgatttattcgaacattcagcaagatccggatggagaaatcttagtttgtatccactagcaaccgtatattgtccatgagggttgaagctccaagtaagccagtcgggtctcgaagtgattggtataataccaagcacccaaggtatgtcatctttatgaaacctgctgcaaacctcatttaatttccaagtgcccgcctcattaagtagtttatttagggtggctccttcagggagcaagactttagaacgaagggtaaaagggatgcctctaggaagccaagcatcttcgttaattctaatagtagagccatctccaacacaccaccgagaccctttaaataagatctccctaccccaaagaatacttctccaaactatagaaccaaagtggcctatgcttgcttccaaaaagttaccgtggggaaagtagagggcttttaagactctaaccattaagcaatcaggcatagtcaacaacttccacccttgttttgccaacatagcttggttaaagtcttctagatcacgaaacccgatacctccttgttccttaagtctacaaagcttcttccaactaccccaatggagtttgtgttttttagtagtagagccccaccaaaatctagcaatcatactttcaatatccttgagaatgccttttgtaatccgaaaacaactcattatatagcaaggaatagcttgtatcactgctttaatcaatacttcgtttccggcttgagaaaataggcccatcttccatccttgaagtttagcttccaccttatccctaattctgccaaacacttgctttttatttcttcccacaaaggaaggcatacccagatatttagtgtgattttcaactaaggaaactcccaactgaacggctagcaatcatgccgagaatgaatcaattttgctcccaacacacatttttcagttttttcataattgatacattgaccagagagtagctcatacctttctaaaacctctttgatcgccttgcattcctccaagttagcattgagaaagacaaggctatcatctgcaaaaaataggtgggaaagcctttgatccaagctaccaaaccgcaaaccatgaattttgccagccctttccgcttcatgtataaggcatgtaagcccttcagaacaaaggagaaaaaggaaaggcgaaaggggatccccttgccttaatcccctttctgggcgaaagtgacctatgatagagccatttaaaaggattgagaaggagaccgatctcacacaattcattatcttcttagtccattcaccctcatatcccaagcaatccatcatagcctctaagaaatcccattcaacgagatcatacgccttggacatatcaagttttaaggccatcttgctcccattcccgaaacgcccttttctcatacaatgaagactttcaaatccaatgatggcattatcttgaataattcgaccactaataaaagcgctctgattctctgaaatggctgaattcatgcttaatttcattctgttggcgaggcactttgacagaaccttatagaccacattacaaaggctaataggacgaaactcggacatcctagtgggttgcttaacctttggaataaggcatataagagtctcatttattgtactgcagtccgaattattgttgagaatgtcaagacaggcagcagtgaaatccgagccaattaagtcccaatttttttggaaaaaaagacccggtaacccatccttccccggggcctttaaaggatggatttgaaataaggtag

SEQ ID NO: 118070 - DNA, 2541 bp, Cannabis sativa
ccagacaagaaaactcccatccaaaagtaaaaacaaagaatccaaaattaaaggttctaagaaagataaacatggcatacatctgaacgaacgcgtctagggaccatggagcctccaatctgaatgagcccatcagtagtgaaaaatgtgactttcccaccaggaaaccattgaatttctgggaaatcatccaaatttatgtcatcaatttgttcaacacaaaattttcaaaaataacacaagggaaagtgtcctcattcatatatcaatcaacaaaaaaatcatacatagtacaaagttttggttcaaattcatgccatagaatcacaaatgcttcaaaattgctcttactttttactaaacaaaaaacaaacaaatagataaatttgaacttcttatgcataataaaaaacaattcaagacggcattttcaattgaaagatatttaacagaagatgatgatacccttcaatgcaattgaccttaaatttaattggacacaaagtcatgagtttgtttatgtatgacaaatcaagagcttctcagttgtcatatataaacgtccaataagcaataatgaatttagttaatattaaaatataaatatttatttgatacaataccgttacaataatctcctctccaattacggtataactacccaatttcgatcaaactacaaacacttctttgataccaatttgtgatccaaacaataattacgcagatcgattaagaacatgctgttattaaaataaaaatgtaagaacttgctgaaagggaagaaaaaaaaaaccatgtaaaagaggagttaccggagtcgccatcggaccaagggaacaagccggaagactcatcggagaaaaagtttgcggaattggaggaggaagctttagcagaggatcggagaaatcgagaggttggccggcgaggaaacgaggaacggggaggagaagaggagaagaaagacggagaaaactctttcgagaagagagagatcggtttttgaacccaagacactaccgaagcttccgccattgaagaagattacgaagagagagagagagagagagagagagagagagagaacgaacggagccggagtgaaagggaatcgaaaattagaagagtcagaagccatatgtggaggaggatgaccacgtggatttttgcaaatttatttttatttatggaactatatttgtaatctgatccaacggtcggattgagaattcgtttttttcttttttctttttaattcaaaaaatttagagaaatttacatggtatactaattttttacaaaaatactgcttttacaaaaatactgctatacggtaaaaatactgctatacggtatttttttacttttttactgtatttttttataagttcatactgctgtatactgtgttaagttttcactgttgttctactggtattttttagttgttctactattattttgagttgttttgttttgtattctactagtgttttataaaaacacagtatttttaaaaagatttttgtgtgacagtattattgtaaaagttaacccaaatttcagtatttttgtaagttttccaaattttatgaaaatgtatatgggtgtgaataaatcaatccaatttactgacaatcgacaattaaatattagatatccaattattattgaattagattattattttttaatatctaattggatgggatcgaatcttagatggggtgtccaaaaatctaatacatcgtacattcaattgaactaattaatattttttatttagtttgaatgaataattagattttatgttattatatgtaaaaaaaaaatatgcatataaaaaattaatttaaaattttgttttttttttattggatggatctaattcaatcctgttaagacagttaaagttagttagcttaagtcagttaagttagttagcattagttgtccttaagtggttgttgttcaagttgttactttcttttatgagcttgagtgagctgtcaatttgtttgtgtaactaactctctctctctctcttgattgccttgtatataatcaagctccttgagcttagtcctgtaatgaatcaattctttctgaatctctctttctcagtttcttctctctttttctctactcttttcttatttcattttctttatcatgttaagaagaaacttcaacatggtatcagaactatttccgccattaatggaaaatgttgctgcaagcaatcaaggtaatcatcacactgcagctggtcctggttctgtcaacaacagaggcaaggaatcaagtgaatcatccattgtcttcttcaaccacaacctttctgttaagctaaatgatcacaacttcttgctttggaaacagcaagttatggttgtgatcagagttaacagacttcttcctttcattcaaggtgttgctcctgttgggttttgtgccctaaataaaatacatatcaatataatcagacttactaattaataaagattagaaattgtattttatgttgcatggttcaca

SEQ ID NO: 118071 - DNA, 1488 bp, Cannabis sativa
tctcacattgattattgctttccacataagtgagtcattatttctcttgttgatctccatgaaatcacagtattgtatgtatttatcatcaatgactctaccctggaggttgttttcatctgtcaaagctttccaggcccatttcataaggaagccttattggataatttcggtgtttcaaaagcccatgcctccttaagttttggatttacaaattttttcccaagaaactgtatgaagttttctttactctaggctatccccccaccagaaattcctcaaggatttgtctaccttatttgcaatagtcttggggatgacatttgatgaggaaacatgtgaggataacgcagaaccaaccgattatatgagacaagctcgtctagcaattgaaagaagcttcgacttccaaccttgtacctttttcatcactctgtcagtaagatagttaagatctttgactctatttttgggcctaaacaaaggcaggcccaagtagattgcatctttcttcattctcttcatattaaggagtttaataatcttgcacgccttgtcttccctaactccttttgagaaatatacaaaagactttttgaaattcacgacctttcttgaccacttacagtacgcattcaaacactgtagaaatgccatggcttgtttcactgttgcctgaccacacaacacaatatcatctgcaaacattaagtggttgatggtagttccattcctcccgatcttgaatccaacaatgtttcccttactttcctcgtgtaaaataagtctagataagacattggcaacaataataaataatgatggggagaggggatccccttgcctaaggccaaactctggcgtaaaacttcctgagatggcaccattaagcaagacttctatcatatgcctttttcatgtcgagtttaatcaacatgtagcccttcttgcccttcctcgtacccatggactaaacgatttcccatgccaccatattattctcggcaatgcatcctcctttaacaaatgcaacttgattaggggctatgatatctttaagcagaccttgtaatttagtggcgagcactttggatataattttgtaaggtacattgcataaagtaattagcctgtactcatttattgtagtagggcaatcagtctttgggacaataacaattgaggagtcatttatgaaaaaaggaaactcattagaaaggaaaaaacacataatcatatctttgaggttcggaaggacaacattcaaatgatggttgtagaatgagagagacatgacattagggcatggggccttgtcctatcccataatattcatagctatctttatctcttactcattaggtatttcattcagcctctcagcctcttccgtcgagatatgattacttagattatcatgtgttagatattaactgtaaaagaattagatatttagtaatttcctattttattggtagtttccctttt

SEQ ID NO: 118072 - DNA, 1715 bp, Cannabis sativa
gtatgaagtcaaggcttctgaagagcattactctttaatgattggacttcttacacgttttggtcgcactgaagaggctcaaagattcattcaactgagttcttctttatctgcttagaaggcattagaagagccttcttgtaatctaatgtatagatctcttgtaatctaatgtatcatactgatttggtggtcataattgtatttatacagtgttagggattttttctattttaggatataattacctcaaataaacattttttctaatacatagaaaaataaacatttaaaatattaattttaaagtttgttatttacaaatatacttttgagatacaaaattaaacaaaaacagaaccaaccggtggtgtgaaagacacgctcgagtggggaatcatatttcttgagatcctaaattatataatttcttagagcaagtccaaggacacggtaaaatcttatgtatgctgtgattttgttcgaaggatacagcaattgtgctaccattttaaagttttgtcaacagtgcacgacatataatttaattatgccatagatcactgtattttttttataatttaattaatatttttatatagttatattattataattataaaattaagaattattttttgaaaaattttacaatacacatttttaaaagtggtgtacgaatctactcctatttgtttcggcatctgataaatttttttagtctattttttatatagtagtgtatattatagttatttaagacattttgtaaaattttgaaaaaattagactaatttaatacgccgaaaactgcatttctttaaaagtggcacactgatatactcctacttgtttcgacattcgagagatttatttagtctttttttatggtcgtgtacattatagttctttaagacatcttgcaaaatttcaaaaaaattagaaaaatttaacacgccgaaaataaaattcaaactttctgtcgtgtgactcttttaaatataacaattgtggcaatttttgttaattaatatgatattaattttttttattttattaaaaattaatataataataaggaatattttttttagtataatttttggtgttgtggttggagtgaaaatactttttgacgctaaatttagtgatagtgtaacactaaatttgatatatccttagagatgctcttacatgaaaagtaacaccaactattattaattttttttgttttttttttttgtgagatactgattttgatccaacattttataccaacaaaaataaagtaaaaattatcagatattttaaccaatgactaaattaataatgaaatataatttagtattttattgataatctcacatgcaaagagtatgagaaaattttactaaataaatttaatattataaaatacgaaaaataatgttgtactctggttatttttatttttttttaattttttctaattaaataaccatttatgtgtcttattactattactattatttgttgatgtgtttccgtataaatgacacaaataattaaactaaaattttaaaaattaaaatatatcattacacaatcacatatatatatactaggtgaatgtacgtgccgagccacgtattgctagttttatttaagattttggtctttttaagattttgaatgtattttatttttaaagattacaaattttttatttgaaaaaa

SEQ ID NO: 118073 - DNA, 1803 bp, Cannabis sativa
gacattagtaaaatcacattcagttcgttacagaaaaacatttatacaaaacagtaccttcacacacagttgatatcttacaataatttattttatgtgacggacaccatagatacagtttacatgaatacaataagctatgttccctcacaaaaattgttaacatagctatgctttacactaaacgaaactaagaagagcaataacaaagaaaaagaaaataacacaaatacaatgccacgcatgtcaaaactagatgactcataattcattatgaccttccttttccttcaaaaagacttcaatttgttcgagtgcctggcaaatattaaagaaagcaaatttagaaggcacagatcattccacaaaagatatcttatttttttcattggcaaaggataaagagaataaacaaacgcaacaaataaaacaactcaggaatgagaaagagacctcaattgcaataacagtgggtgtgagattagatacatctctttcacctaatttggctgcaatatctgtgcaatagaaaaactagttattagcacattaaaatgttagaacatcattctaatgcagtaataccaaggtaaatccaatactccattctgacatttcaattttttttatactaattaattaaactttttacttttgtggatctttctagtataaaaataccagtaagaatggcaagcatatgaaaaagcaaacccttaaatgacttactttccaaagaaactcttgcattggcatttgcatatgattcacccctcagttcaaaaagactagacaagcgcatgaaagtctgaaaggacaccgaattcgaagtcgtgagaaaactattttgcgtggccaattatgatccctagcatttcatgcaattcctaattcttcagaggaatatgaaggaagaaaaaaaatccttcttaactgtaccttggagtaaatatcgcctgattcattaggcagaaggggacgtgaaccagttccaacagcagaaattctttgagccaatgcgtccaaaggcacatccagccaaacagtaatacctttctgcatatatttcctgatacaccaaaataataatgagttaatttattactcagtaacatgagtaactgagatcaactacactaacaaaagaggaaaataaatttctagaacataccagttgatattacgaacaactgcacctccaccagtagaaacaacaacacagcgcattaatgagagctgacgcagtacttccgtctataagcaagtaaaattaaaaatcatggacacataatacacatctctgaattcaaaaataaatttgggtggtgactaattttgtcaacaaaaattattattgtgcttcgacaaaaattaatcaatctagtagtcaataggcaaatgaaagtttttaagataaacagccaaatagaataaagcacacatcaattttatcacaataatctacatttatgggcacataaaatggttattaccaggaatctattactctaaaatcaaaaaagtccatgaagaacttgtagaaaatacattacaaacttaagaattatatctgaagagtaaatggaaacagtttgcaactaactaacctccttatctctgaagaagccctctccatggagcttaaaaatttcggccaccgaaattccatcagcttcctgctctatcaaagtgtcgctggggcattaagaaagacaacagaaacagaacattcagcataaagtaatatgtactggatgttagacaaaggcagtagaaaagaaatatgcaaacatgcaagacaag

SEQ ID NO: 118074 - DNA, 1029 bp, Cannabis sativa
  modified_base (315)..(316): a, c, t, g, unknown or other
  modified_base (964)..(977): a, c, t, g, unknown or other
gtaatattagaaaaatttgagtttttatgattaatttttctatttaattaaaaaaatttctcatttttacattatatgggctgggattgtaccattaactgaaaaaaataacaaaaacaagtttttcaacaaaaaaatgattaattaaaaaaattgagtttgatttaaatattttttatataaacatatttttgatatagtgtgaaaagatgtattttttggatatttttttaattaagtagctaaattaagcataaaaatttaaatttctcttttattatcaaactaaatctaatggtttaatatttttaaaannaatatttatagttaaatttatttgatacctatcaatgcgtaatacttattgaaaagtgttccatatatacaatataaaggcacaactaaaatgttgtatcaaggccaagtcatgccctttgacataggtttcgtctctcttctttatagagtgtttgttcttcattttttagcgtttgttttgttgtgaatctccatggcttctagtagtggggttgttagtgaaatatctagaaacaaaatggttagatatttgcttggatgtggaggaggatcatgagactaactttttttataaatagcgtgataatacactaaatatcgagaaaacacaaaaaacaaaatttcaaaaaaactgcttctgggttactgccagcaaaaatggtagactgtttttcagaacacaccctgttgttttctgctacagttttgcaaagcatctcatttcaaaaacaaatctaccccaaatctcaaaccaagcttcagaagacctaattaaagtccaacaaatatacttcaagtgataataacagttataacacaaaattatgaaaacccaccattgttgagcaaagtttgagttcttgaactcaaacttgcttaacaccacaaccctgttgggtcttgtgccataaataaaactcatttnnnnnnnnnnnnnnttactaattaatataagatcagaaatcattattctatgttgcatggttcaca

SEQ ID NO: 118075 - DNA, 2130 bp, Cannabis sativa
gtttgagtaaaaacatctggtacaaccagttctaagtatagagggcagtgattagaagaagaatgctcaaggttgattaatcgtgcacctggaaaaagacgattccaagcttcaacaaaaagcgcccaatccaatttggcttcaacccaggatagggctgacctcctctcttgtcttcttgagtgagtacgttgtttaggtcgccaattacacaccatggcaaaatagactcagcggctaacgttctaagcaggttccaagtttcatgtcgcctcccatgattcggttcaccatagactccagtgagtctccatttcgatccctctcctacatcaatgcttaagtctatgtgatgatttgagaaacccaaaagagtaccctcttctttgttcttccacataagggccatcccactacttaaaccttgggcctccactacaaataagccttcaaagcccagttgacattttatcacttccaccctttttttttatcacactttgtttcacacaaaaatacaaaattgggacgcttttgagaaacgatctctttaaggaattgaaagcaccgttggttcctaagcccgcgacaattccagcttaaaacattcatgatgaatggcgggcctgttgaacagaacccgccccaaccaagttttttgaaaagtatactccatatgaacccatagttgactcatcttccatagcctcaggcccatttgtattcctttcaacgttctcatcttcaagcattgacccattctcattgtgaagtatagttggcccatctgatttctcactcaaaggcccattagaggcattaggctcaatatttgttctcctccttttcgtatccaccaataaaagtacaggatttgtttgtgactcatcattatccactagtacagctttatcttttgactttccttgaacagagctgcctatttccactccttgattaccgttattagttgtagaatcatgaatgatatcctcaccatttatgaccataaaatttgtatgtcccatgaccacagattgttgattatgtgctgccacattaatattctgtcgactaccagaattaaccggcaacagctccaccgtcggactgaggttggttgatcttgtgaccactcccgaacgaagccactgggctccagaagcatagttacgtcttcttggtgcagccttcaactccttattatatggcttatcaatcaaatgtaagggtgtgtcaaataacctttcgcagaacctttcagaatgtccaagtatcccgcaaataaagcaaaacgttggaaggtcttcatacttgaaatgaactaagcaagaaaggccactcttctcttctaacttcagtttcccttgcaagggttgatcgactcttattgaagatcgaactctcaaaaaatccctccacacaccagagaagttgtttggatctgttttaacaaacgttcccacatagttgccaacgtctctgaccaccttttccgacttaaagcctgaagttatatcatgtatttgtacccagaaatccagcctattaagagagataagtcggggattggtacctggttttacccgttcaaacaccaacggtattcgatcaaaagtccatggacttccatccattatttgctctatgtccacttcatgataaaactaaaaaatgaaatggtttggccccaattctttcacgtacattcccctcccgggttgccacaaagtcaacattttatgttgcattgcctgaaagtctatagatctctttgtaagaaaccttcccactaagcaccaccgatcatctatctcagaaagttcaggctcgtcatcgtcatcgtacattaagccatcaaaatcatcctcttccttactagtatgcccatattgatcagccataacaaaacaaatcacaagcgtaacgtaaccagcaaactatccaaaactaagcaccacttgactcaccaaaacagagagaatacacaccatgtcaacagacaagactcttttcacctagttagttataaagaataacaaatatataaattattttataactgctaaaagagtttatgagggtgtgactctcctttttctcttccatatatatgtatttaagttcaca

SEQ ID NO: 118076 - DNA, 4088 bp, Cannabis sativa
  modified_base (26)..(40): a, c, t, g, unknown or other
aggatgttaataaaacatacttggtnnnnnnnnnnnnnnntggtaaaatatttccaacagaatggtcattgggtgattgtttgaaaccaatgtcaaggagagtggagctgagtttggcaaaccattgcctggatgattgttttaaaccatataggcttttgtttagtttgcaaacagcatttggggggagatcaccatcatggacatagcctttgggaatggacatataaacatcttcactaagatcaccatgtaaaaaggcattattgatgtccatttgatgtaattcccaattatttttgcagtgagagcaaagagaagttttatagtgttaaagtttgcaactggtgcaaaagtttctacataatcaatgccatgttgttggttgtatccttttgcaactgagcgtgctttatgtctttcaacctctcctttggagttatatttgattttgtacacccatttatttccaattacatggcatccagggggaagggatactattttccatgtattgtttttctttagagcaaaaaactcattgcccatagcttttagccattgagaatattgtttggcctggctataggaagtaggttcaagctcgatatatgcttgaagtatagcatttcgaaattttttgtggagtctattataggataggtatttgtcaagggggtgtgcagtggagttttgacacacaaagtccttgagatggtctgggttatttatttttctgcctgttttggtttttgtggcagcaaggatttgaggggagcgttgttgtgcttgaggttctgcagattttggtcctggaagtgttgatgttgtagtttgctggtgtgaaataccaggttcaatgtctataggtactggtgttgcagcaggtgcagcaggacaaggcttggatttattttttgtagtgtgctgagagaaaaacaagttgagatcatgagtagtagatcctttgaggggaaaaacattctcatagaaaatcacatctctagaatggaaaatggtgttggtggctatatcaagtagagtgtaggctttcattccattgggatagccaataaaaatggaagcatgtgctctccgagagaatttatgtctcttacttggtaaggaagatgcataagccaagcacccaaaggttcggagattgtcataagcaggaggtttgttgtatagcaattcatgaggtgttttgtgttgtaggtgaggtgtaggtgtcctgtttatcaagtagacaccagtttttataaaatatggccaataggcaagtggaagagaagattgaaaagctagagctcttgcaacatttagtatgtgttggtgttttctctcaacaactgagttttgttcagttgtttccacacatgaattgtttgtttggatacctttttgggcataaaaggatgacatattcaattctttagcattatcacaccgaattgcttttatatttgttgagaatcgtgtgtgaacaaggctataaaattgaggtatgagctgttgaacatcaactttggattttaacatataaacccaacaaaatcgtttgtaatcatcaactatagttaagaaataacaaaaaccttctatgctatgtatgtgaaaaggaccccatatatccatgtgtataaggtcaaaactggaggctgcaaaatagttattggaaaggaatggcagcctcttttgtttagctaaatgacatatagaacatggtaagactttagtggaatctttgaaatgaagcaatttattgataaagtttgtagtagtcatagaggggtgtccaagtcgggcatgccaagaatggacattattacaagatttattacacagagattgatgaaaaatagtaggaggcaaatcaggttgctgcagcaagaagtagagatgaccaacccttttagcaatcccaatcctcttgttctgagaaccctgaataagacaacaattttgcgtaaagaaaacactgtgagatagtgtttggagaaaagtgggaacactaaataaattgaagtgaaatttagggacataaagaacattgtggagagttagtgtatccgaaaatttgatacttcctgatttttgtattgtgatgcacattccagtagggagtttaatggaggtagcagtaggtttgttgttaaactggtaaaagagatcaatattacaacaaatgtggtgtgtagcaccactatctacaatccataaatttttagaaaaaggtttgattttaccagagatgttggaagcaaacggctggtaaacatctgcagttgagaaagtgggctgtaatttctgacttaatagagagattagagtctgaatgtcttcttgtttggtgatgttggccaatagagaaagaggatctgttgatgaagatgcttgattggccgagggttgagtgttgtcagttttcttcttatcaccatagccaggtgggaatccaatcaagaaaaaacatttttctttgcggtgccctggtttatggaaattggtacaatagggtctcatgcatttgttgtgcccttggtttgcagcagcagctgatgcagatggagtttgtgcaacagctgaggtagatgggtcatggacagtagcaatgagtgggagaatttggggctttttgagtttcctctgtcgttcttcatggataaccatggagaagactttagacagggagggaaaaggctctatgaggagaatttgtgctctaacagggaaaaaagactcattcaaacctgttaggaattgaaggacttgttcttgattcaagaacgcaagattatcgatagaagtagcacaagtacacgggattcttggacaaatttcttgtatatcatcccacatacattttactttagtaaagtatgaacttacagtgtcatcaccttggtggagagtaatcaaagcttctctaagctcgaatatacggggtccattgccttggtcatatcgtcagttgagctccttccacatttctgcagctgtgtccatgaacatgatgctgctcttgatatcaggggaaacgaagtgtaggatccaggacatgaccatctggttgcaccactgccagttgttgtgcaggggatcgtcgatcggtggtgaaggcagagtacctttgagaaacccagtcttgtttcgagcaccaaccgacaattcaaacttgcgacgccatggctggaagttcttgtctgaaagaggaggagaaaccagagtgagatcgggatgatcgccggagttcaagaaatagggacttgaactgtcttcgtgaacgggtcgactttgaacaattggttgttgtgtattattgtctccagtaatgtttgaaactggaggaatgattggaggattgggtggagcatctggaatgttggaagaattgtgcggcaatggagtttggccggagcttcgtgaaccagtagctcgagttcttgccatagaagatgatggaagaagaaattgcagagaatcagagagagtgaatttcgtctgatactatattaatgtaatgaattcttattattattaattgaaaagaaaaacagagtatttatacaagaggtgtaacaagattattgttaaaaactaacaagtagggaatcattcctaactaacagaatgcctaactaacagtaacagaattatgatatcctaataaagtcctctttcccatttagtaaacccctatttataagaataagatagtgattactcgttaatcttaataggaagttacaatcgtttgggataaatatccacgtttacagtcaattgaatatacatgttggataaatacaataactctctatattcaaatataaaaaggaggggtttgactcaatcaacctatgttgttcacgagcagtgtgatggaataatactacaaaagtattatagcatatctcaagcagtcatgtaagcattgttgacagtcaatcactcacttatttggatgataaataaatatttgattattatttgttattaattttttcttgatcatttcgcaagcaattcacataacataaagatttgctcagtaaatgttggattatattttaccaggatctaga

SEQ ID NO: 118077 - DNA, 861 bp, Cannabis sativa
  modified_base (42)..(58): a, c, t, g, unknown or other
aaaaatgtttaaaattttgtaaaaccgtatttttgtaatttnnnnnnnnnnnnnnnnntatttgtgaaataatcctaaaaaaaaaaactagctcaattctcaatttaaatagatagatcatttgggtgtttaacacccacacaattaagaagatgagagcactctgtaaatatgatattcaaacaattttattttcattatggattgtggtccacatttggtccagttaatctatcattaatttgtgtatttgggatgcaattgaatgttatgaacttataataacacgtgtgaattttcaagtgaaactaagttaagtttgatttcacatatgattttgtgtataggtatattggactgtgagtacaacaaataagaacccacaatactttccagagccagaaaaatttgacccatcacgatacgacgacataagtacttttccaacttttacatttgtcccatttggaggtgggcctcgtatgtgtccaggcaaagagtatgctagacttgccattctcacattcgttcacaatgtggtgaagaggttcgagtgggaactagtcatcccaaacgagaatattgtaggcgatatgatgcctactcctgaaaaaggactcccaattcgacttcgatcacattattaatattattaaattcttagatatgttaagttcaattgtattagatactcttctagaattcaaatatagtgtgcaatgcttacactcgagtttcagcagaaatacaatatatattatatatatatatatatggaagaggttccaatggttacatttttattgtaaccatcatggttacatttaaataaataaaaaataacttgtaacctgaaagtaa

SEQ ID NO: 118078 - DNA, 1648 bp, Cannabis sativa
gtggactaggagtgttcgaaagaacactgataccacgtacaaatctcttgtgtcaagttatttaattttttgcaaatatttttatgttctgcgtgttctgttttgtcgttgcaaaattggtttctgcagaaacagaattacattctgcttccgcagacgtatattgttttatatttttgtatatattattgaaattcgtaaaaaactcggttttttaataacattaccaaataacgaaatcatagatgtagaactccgtaaagcttgaataacataaagacagacagtttccacattcatattctgccagcctttatatttgatccaactaagtgattctcaaacacccatcgcttcagctaattcaggctcaattgcaccatgagaagacaatgtacgtccttcaatgagcaggcccttatcgtctctagcaactaaatccagcccaaacttaaactcaaaattgaacaatgctgcatcaacattaaccttgatagcattagcttgtggtaagaaccagtgctccgtcctgtcacccgccttaaaactgggccatgacgactcattattagagttatgagcacatctacattgatcaagaaaatttctagcctttggaaccatgttctcttcttgaaagctttttccattgcaaacgatttcattcctagcattccagattgcttaacaaaccatagcaagtttgcattgaagatcatattccaaagtattaaaagattccacacaccagtcaaagaaagtaccattatgagcttctttggtaccgattcctactctatcccagcagcgtttaaccactctgcaagtgactaaaatgtgcgatgtagtctcatcttcctgcaagcagacatggcacagaggagtaatagcaacatgctttgtccgaagctgagttttcgtaggtagacaacttcttgcagcccgccatagtggatttttcaccttgggagggacctacaatttccacattttttttcgagaaggcagcgtcctcattgtcgaaccaatgccctttatttttctaaagtagagtactttctttgtgttcttattatttctaatttttgttttatttgttagtagctaattgttgaatactcactattctaagtgagtattcacatatttttatttgagttatttaagagtatttaatactggaatgaattttggtgttgtctaaatttctccgacaagaagatatatatatatacatatataacaaaaagtatgtatatattaaactaaaaattcgttattgtattctaaaggttatatcatattgtatataaacaaagggaaatttgaaaaaatatgcataaaatatcctaatattttatgcctaaactaatacaattcaaaatttaaaatatatgtccactttatcaaaaacccaagaatacccctctcataacaataccccaactctctctcttcctctatctctctcggttctctctcaacagaacccttcaccaaatcaaaacccacctgatcaccgcctacaacgccggcccctcaccactgcctacaacgccggtccccttccaaatcaaaactgaccacttctcactgcctaccgcctacaccgccggccccatcaacacccttctccaccacccacgac

SEQ ID NO: 118079 - DNA, 2372 bp, Cannabis sativa
aaatattctaacatgttggagctatcttcgggattcatatctctgctaatctctcaattggcttagtagcttgtaagtccggccctatttttgctgttattggtttttttgaggcaaaaaataagtggaaaagggggtcatgctgccattccttaatacacaatagatcctattttagcttcttcaaatgtaattgttagtttgcaacatcttgtttctcgtgaagctaatccttcatactctcaggttctctctcgttaagagtttgtaattgtattttatttttccaattacaacaaatgatgagctttgatgtggatcaatatcttgataataaaactttcacacatattcaaatggcttttttttcaagctacaaagttgctccactaatacatttgatttgttacctgtaatttcagcttaaggaaaaacatcacatacatgatttgatcaatttattctcctgttatgcatgatatccaaataatcaaatgaaaaagaaagttttctaactttgatcgactcaaaatgacactagtcaaaattatcttgggcaaattctctttataaaacagtaataatatttttacatttaacaacgctagctgaaaattcaggaccaaataaagataaaagctgaaaacaaagtctcaatgaatgattgcaaaacataatcataaacataaatgtttctagtttcgtggatcaagaactgctccagtgaaaacaacaaggttaggaaaactcttcaacaatcatataaacatatgaatggatggtcagcaacaaaggaatcaagtggagtaggcatataatctggagcaattccaggtatcataccaaaaacggcagctagtggaggaggttcagaattcagacaagaaccgtatgacataccaacaaaggttgtcgcaacagcccttgtcccatcttcattcacttcgataaaagacttgtgaagcatattctctatgaaaacgttggtatcaggagactgagagcacaccatgtttgggaaatttgcactagccttactgaaaggcagacttaatcctctttccttgagtaaattcttagcatgaagttcaacatcatatgataatttcatcttgggaattgacacacgagaaagttccatgctccttagatggttattaaaactcatgggtgacaacaattttggattcaccttgaactttttcactgtattttgaaatctgtatgtgtcatgaggaagaaataagtacatagagaattgtgtttggtttccattattacctaatgctattctttcatatgggagtttgagaaccttgaaatcatcaagaaaagcataggagtaagaaacattatgactattcatgaaaggtacttggattgtttccccattaagaaggcaaaacttttcatcttgagtcttcgaagccataaaaggtacttcccatgatccctcgaaagataatacacttaaaagacaaagtgggggtgtcaactttacactctttgacaaatatcgtttaatgagatgtctaactttatcagcctacatacaaaaattaacagtggtcaatatgaaaaataataaaagaatcaacaaagacaaacaagtacagaattatagattgtacctctggctctaacttaaggtcgacatttttcacttttgccttatagattgtttgagtgatttctttaaaagatggaactaactgagagttattatcaagccataaggagtttccaaccaaaaaaggaggtttttgttcaatcttctgacgttttggttggtgaattgtgggaagaggggaaggggtggaggccttagagacagaagaggtgagaagaagagtcatcatacgacaagagttttggttcaaatcttttatttctttagaaccaagaaacttcaagaactgctttaatgtcttaccttcagcaccagtagccaacatattgaccaccaagtttattgaccgaggagacattaaaacgtttttagcactactctccttcttctctatctcgtcaagaattaattgtgctacaatttgggtgcaagactccatgactttaacttcactttgcactgttcaatggaataggagtagaaagcaagaacaaaattactgaaatgtaatactggtaggatcgagtagtttatataatagcagtttaaggatttagatttattttttaaaattaactaaaaaacattaaatggtgggatccactcatccaagaattgtactgactgttttgaaaaatattagggagtttttcaattatatacttaaaatataaattatttacaaaaataccataataaatttcaattacaataataccttgccacatcattaaaaaatacc

SEQ ID NO: 118080 - DNA, 1658 bp, Cannabis sativa
  modified_base (141)..(141): a, c, t, g, unknown or other
  modified_base (1598)..(1623): a, c, t, g, unknown or other
ttccgggagcgtatggggctccctatgtcttctccgggaggcatgtcccggatgctaccctattacagaaagatttagcaaataatttaaatgctaagctatttgatctacgtgtccttgtctggttggtccacgtatatngggcaaaatcaggggcaacatatagaatatgaatactctttaaaattaaataaattcaattcttatcattctatgtaaggaatgatgaagaggaaatacatgtctcctgtgtttaaataacattaatcatattcattgttattcttatacttggatgtttcaatcaattttcttaacattctttttggatattcaaaaatcaacataaaattgtattaataataatcattttaatgattctttagtgttattcacataaatataatatatttttttataaatataaaatatttatttcagaaaatatttgccaagatctatatcgatattagatttttttttcattgagttcaatgtcttatttttcaccattttagaaaatacaagattcattttatcatttaaaaaaatagaaagtccaattaataatttttacaaaatagaaaatctaaaataatattttatatttatatttaattttctcacaagtaatactaaataatataaaggaaaataactatgagctatttctttcattaggtttactcttaaagttttaatgagaacttttttctaaaaaaaaaaaatcaactaggagcttcctctacatctttcttactatccttcaagttctccatctaaactctcccgcctccctaccaatatatagctggtagcctggtaataatgagaggttaaaatggaaaataataaaatgaaagaaaagagagagagatcaatcatgttaatactgaactgacacgtggtataatcaacgaaagaaaacaattcaattaatcgattataaaattaaaacgtgcaactgtcagccattttacaatttatgctccccatgtcttgttttttctaattgttaaattattttatataaatatctatttttattttatggcttttgactaataagaatgtccaagttcatttatcaaattttggtttagttgtaaggacagcaatatattttaattctaaaagattttcataacgaaaacggccggggtaattcgaatcataatttttgtacatatggcattttctgatgtcacataagccatttttttttcgaattattttatatattagtataatatatattttatcaaagttttatttgtttttaagcggtagttagcttgatattttatttgagaacaaaataaataaataaatatttgaagaaggcctgtaattgcggatagtcttagaaaacgacaagaataactaaatgcatagctattatgtatgtaaataaaacttccttggtattagtaatggtatacacaataataatatgtatataataagcaaatcggtggccgtcttaatcatacgtgagtcattaccaaaatttaagagagattattagtagttgttctcctaaaaaataagcaaaataaaaattaacaaggtgtcgtttggtaatacttttatttttnnnnnnnnnnnnnnnnnnnnnnnnnnaaaatttttgtttttaaaaaatttgtttttgaaaa

SEQ ID NO: 118081 - DNA, 1865 bp, Cannabis sativa
  modified_base (490)..(490): a, c, t, g, unknown or other
gtaaaaatataaaaaaaatatattctttgaacgtaaaaatgtaaatattttacaaaaaatagtgtcttatgtaattattcttttttattaaggttatagatttgtttgattgtgatttagagtttgtctaatgaaactgatttatgtggtacgtaattttttttcttttgttattgtgtttgattgtgatttactaagttgttctattttattttgtatattttttcaagatgataaaaaagaagctaaagtcgatgatcctaattttgttcttaataaacatcatagtaagaggagagcaagaaggcttctaatgtgcgtcaagcagatgattttgatgattttaagatcgaaaagattgtctcgaaagctgttccaaccaaaaaaaaaggaagtcggttagtgaggatgctagtgtgtcaaagaagagtagaactaaggcccctgatacagattctaatttagtatgtcttttatatatatatatatntatatatatatatatatttggttgatatgtgtgttgtcttgttgtattaagttttgttctttttgtataaatataaaactctatgtttgttttcataaattttgatagaatttgtctttcattgaatcttcgttttttattgttaggaaaatatttgtgaatcaaaacttgttgatgatgagaaactgattaatatcattagcaaagataaaaagaaacctgttttgaaatcacttagcaagaagaagagtcagagtcctgttgatgcatctacgcttcgtgctcccttagtaatatttcttatcaaatgaagctggttttttcattttttgatttttcttgttattagattttttgtttatagttttatgtttcataatttatttttgtgttaagaaaatcttttttgtttttctgtatcttttattttttaattttttttatttgattatttttaagtttattgaaattagtttccttaatctattctattagttgtttatttttaagtttttttttttttttttttctgtattgtgtaaccaattttttagtattttattttctttgtaattttattttttgtttgtttgttttcttttttcattttaagaatattatttcaaaattcatgtcaagaagaggtttgtagggaaccctcaactttacaattcatataatgtcatcaaagatctcaatgaaaaacttctagatggacagaacgagttgttttggaagcctctttttggtcactttttggatgttagtaatttcaattatcagattcagctcattcatcttgttcttttgcgtcaaattcacactgaaagagatgatgtcgagctatggtttaaattgggaaacaaggctattaggtttggtattgaagagttttcattaataactagtttggattgtaagaaatcatatgatgttgatctttcaaatcgaaaaagttacttggtttcaaggaggagatcttttctatgcatggaactattgaaaaggttactgtgagggatgttaatttgcagtattttctttagcagtgtattggaagatgatgaagatatggtgaagattgctcttgtatactttttttctagttatttatatggttatcgcaaaggcaagaagattgacaactttatttttgctatggttgatggagataattatattgaagttttcaataggtttaggtggggaatgtttctatgggagaagacattttatcacctaaagattgcattcaaggatggtaatgatattttaaataactttttaaacctaaactattcaacattggtagaatatgtcattttttcctaaaacctcattctacccctctcatttgaacaacccccctctctct

SEQ ID NO: 118082 - DNA, 1096 bp, Cannabis sativa
agagagagagagagagaggaaacgggggaggcgttctattttttattattatttattattatgtatatatatattttttgactctgtcaaaatttacaatcatgatgttttattttattttcttgcttgatactctttctttaacctaatgcaataaagtgatttatgtggtttctaactttggggttattaattttttttagagttgatgttgtgggcttttaatagaacattcaaatttgggactgatagttagatttttgtattttatttttttgaatttcaatacttgtatataatttgtgcagtaacaattcttggtattaagtgatatttcatttggataaaaataaaaggtcatttctttgaaatttaagtggataattttaagattatattgtgtgtgtgcatagggttatgatagttgtattatgtaatgtatgtattgtagaattatttgggagtgacatatatgattggtattattgaaaaatgactaaagatatatatttttgttgaagcaaaaggcaaccaaggcctaggactagtaattggcgcatttctcttctagctaaaattttcaatgtgagtacaaaaaatagtaatggcctttgtcaatcaagtcttacaatgcaaatagaatttaattttatttattatttaaattttatcatattacatatcataattaattcgtctaataatttttattttagtatggtgggaagatctcttacataaaacatgagaacaaggaagtacgtgaagaacaaacataatacatcattaagttgatgaagtctaaataagtatattcactattaataactaattaaataacatagttactcattattgttgctcaaagtatatgtatatagtaacaaaccttagaaaatataattattaatgtttattatttaaattattgcaatatctttgttgttaatggtgtttaaataaaaggagaattttattcttttagagtccgtttagtacgtaggattggactgaattggactaaaaaggattggactggactgaataagattggattatgctgaaagtaatcttgtgtttggtttaagaatagact

SEQ ID NO: 118083 - DNA, 1981 bp, Cannabis sativa
  modified_base (77)..(81): a, c, t, g, unknown or other
tgtaataaaaccaactttgtaagtaaaaatgtagacataagcgtgtagaggtatttaggtaataaattatgcaaaannnnnttttcatgtaaaaatttctttaatcaagcactaagtgtgctgttaatatatttgaatacatatatagtttttctaatacaatttattttttggtatttattttgagataattttagcttttttatttgaggataatataattttaggttttaaatttttgggagcaattttatcaaaaaaaaaaaaaaaaagacttcaccagcacatatataatgagtatatgccccataattaaataatattctgattagaagaggttgttccgctaattatgatgctttcactgtgccaatatatttgaatatatagtaataaaaagacattattaatcagttaactttattttatttttattttttttggacgaattaaattaactaatttatctattacattgaatatagtaataatattcccttttcaaaatttctttattttattttatttttcaaaaaaagatttggttggctgattagtacgggcggggggcttggttggtgacagatcacacacagtcacacacacttgtctacatgaagaaaataaggaagtatcaacagaatgaatgttgagatcggaggttctaaagtctaaaccaagaaagaaacaaaacttaaataattgtaatagtatataaagtaatagagattggaaaaggcatcttacatataatatgcatagttgatagtcacttttatagatcaaaatgtattgatcactaaagaaagaaactagtggtcatgcatgtgatattatgttttaggtcaatatagtatatttatatgtatttatccttgaaaattgacttattttttttgttttgatgagccgcaatgatgtaattgaagaccacagagcccaacttgctgcattaaaaataaataaacatagcctaatccgacccacccacattgttgggatcttttgttttatatatatttctaagaaagtagcatgtggttgagattttattgaaaacaaaataaggctatatacatatcacaagataattccatgatattccttacagaattaattaccattacaagcccaactgcccaagcatttatttgggtattaacgttaagatcttgattaacaatgataaattgacgaccaacaaaagtggaacagtctatgagatctttgatttatctaataagtcatcatactttcgtttaatttcctagctatcacttatgtaatatttaactttctaagtttaacacaaaaaccaccccttttattttcagcaaaaaaaaaaaaaaagttaaaaacaaaaacttttgatttttttttttttggcttagaaaacccatatgggaattttaatctcaaccagaatatagaatcaaaactagttttaatgtgttgcccttaattcatcagaccccaaaacttaacagtaatttttttttaacacatgaaagtcactttaatgaaaccttcctatatattgttttttacacaaaattactaaataaaactagatcaattgacaagaacattaaaaaaacatctgtaagagaaagaaaattagcaacatattatttaatatcattagacatttagccttatccaagtgaactaatagaagtaaaattatcaagtgtagtattggtaataactttttttttgcttttaatagtataaattggttcatataaactcacccaaacctaagagtagtatatatattacatacagagagaatagttccaaaagagagggaaaggatgtgcagtatcccacatgtacgttatgcatgcttgatatttgtccaaaaggcaaaagctgagcatcttattatgcttcaggccaagaaaacagtgacacacatcatgagctgtgctgtcatgtccctacctcacccatgtgtttcttttttttttttttcaaa

SEQ ID NO: 118084 - DNA, 1416 bp, Cannabis sativa
tgtcaattctatcaccacttattttactcagctgcagtccctttgggatgaactcaatgagtttcaaccattcacgccgtgttcttatggctgtacttgtggtgctatgcaatagatccaagatcactatgctcgtgatcagatcttgcaatttcttactggccttaatgaaccctatgttggtactcgtgatcaaatcttaatgtttgacccccttccaccactctccaaggttttctccatggcggtgcagcaagagcgtcaacgttctcttgttcttgcaaatgctatggctatactgctgcctcatcgaaccgtcctcagtccaccactaatagaaacctcatcctacttgctctcactgcctcaaactaagtcatttggttgagaaatattactttctccacgatttccctcttggatatggtgacaagcgcaaacaacctgatttagccaagtgtaatcaagcttcgaccactcttattactggataggacacaacctcacaactgcaactcagtcaacaactcattctacttctgagccagcagctccagcaaccatcaacttctagagatgttctttcgagtgcctctaatgtgtttggtaactctaattttttctcaactttttagattgttgatagtggtgctatacaccatatatgcaataatattagatgttttactgctcttgattataatattgtcgctactttagttactttgcttaatggtcagcaaattaaagtcattgtctctagtattgttcatcttaacaaagatattagcctgaaaaatggccttttttttccctgaatttaaattcaatttattttcagtgactggttttttgaagaataatcctaacttgctgattttttttttattcttgttgtgttattcaggcaccctctcagaatttaatgattgggacggctaagaaagttgggaagctcttcttctttgagcaagaaatccattttgtttacttctgatgcattagtttctacaaataataattgtactaccgataatccttggcacttttgccatggacatccttcaatgttcatttctaattcaataaataagacattacaattttctacaaagtcttatagtaaacattgttctatttgtcactttgttaaacaaaaatgtcttctttttaattctcaacataatatggctgttgccactttcaatttaatccatattgatacttggggctcttttcatattgaaagtattgagggatataaatatttttttttaccattatggatgattttttcggtttacttgggtctatatgcttactaacaagtctgatgtttcctttcttattccccaattttttaagtttattgccactcaattttctatgaatataattttataaatattaaattaa

SEQ ID NO: 118085 - DNA, 795 bp, Cannabis sativa
aaaaattttactttcattttttgaataaaaaattaaaaaacaaaagtgttactaaacggcaccaatgtttttactcgtttaattttcgaattggacaagatcgaaattaccatagtcagatttattttagttcatagttttcagattgagtttcattagatctaccaaatcccctgctcaacaggcatgttctttataaatctaactgcatcttccaaatcccctggtcgagtcaacagattgataacacaaccatagtgttgaactttcagaacaatgttgtacttctcctgcatgagtttgaaacagaattttacctcagtttaatgggttgcattctaaagattctcacactcttttaagtgtttttatagagctttgtggtacttttaaatataatggggtgagtaatgacgtaatttaactgaggcttttctcattttttgtaagggacaacgctaaaagttggcagtacgctttgcaaccgaattctattattacttggtaagatttggcttgaaaatttctgtcaaaattctttcctccctccaaagttgctaaattgaggggagaaaattattaatttttgatagaatgatggagaatccttgtatgaagcttgggaactattcaaatagttgttgatcatcatggtattgaacagtggatgttagtgcaacatggtgttgaacagtggatgttagtgcataattttataatagtttatgtcttatattgtggacaatgtcccacatggaataaatggtagagaattgagccatatataagaacatg

SEQ ID NO: 118086 - DNA, 1637 bp, Cannabis sativa
acatacattcagataattacttcaagatagaacataaaccactacccaatcgaaaaaaggttttcaaaaagcaaaactcgaaacatgcactcaacaacaatatcacattcttgaagcgttttactacgtcgcagattcacagtaagaaagagccaaattctagctcaggaacatgtcaaaaaagggtagaaacaaaaatgtttcacatttgaggaaataacacaaaagaaacacaagacttggagcaccaaaaaccttgttcaagttccaactctcattttcatgaaaattaaatgcggaacctggaagctgagctaaagatagaacagttagaaaattatcaagaacacaaaacaaaaaataaataaataaataagagtaaagactcaaaattcgtccattgttacactttcctaggaaccaaagaaagtcttaccttaaagctggtgaatcgtagtagtttcggaaaggtgggggaaaaaagaggaatggatctcagtggtgtgggtatgtaggagggatgaatgagagtccgtgatagtggttctgaccggcgagaggaaagagcggttcttcttgtgagttagctaagttgctcctccaaatctgggccaccgttgctactcacaactaatatagggcttggcttggggtttcccgtttcctttcttctctatttttaaagattgcgccattagcgtattacattacatcataatccaattctttttgggttgggccgtacttctccctcaaattattatcattattattattattattattattaatattaagctaattagtattttttttccgaactttcacatgtactaaattatattcttgaatttttttagccgtgaaaaattctccctaaactattaagattgttagatttaagaaatttactaaaattagataaaagtccttaaatctaataattcatggggaatttttaacgaacaaataagttcagggaacataatttggtacatgtcaaaattcgggagccttattattattataccatctttgttttcttttaaatgaaaaaaaaaaaaaaaaaaaaccactcttaaaatcaagctttgaaccattgaaaaccaatgaggtggcattaaaaatgttcaaaaatcaagtttttagtcaatcactgaaaataatcgaagtagcatcaaattgctttccattttgtattgaatttcttgagatttatttttagattgaggaagggaatttgaacttgaggtgtggaaccactaaattatgtaaatgataacaatttttttgtgaattttgatttatctgttttacatacttttctttttttgaactctacttgttctattcatcaaattgtaatgtgtatgtgtgtcatcaagaaccatcgatgtatttttgtagaaaataaaaaatatcatattttcatgtaactatggaaaattaccaattttctacaaatatttgtcaactttttttttttttgaaataaagtaattcattagatagcaatatccgctatgacaatagactgaagagcagatggaatattgctctcagtaaaaagacgatcagaccaaaaacaagcaccgcgagcaacacaatgtgcagccttgttagcagatcgtttaaca

SEQ ID NO: 118087 - DNA, 647 bp, Cannabis sativa
aaaaaaaaaaaaaaacactcccaaaggtgtaattagtaactagttccctatgatcctacacgttaagattaaaaaaaaaagtgcaccaacctcatttattattctacatgatctagcgtctacatgctgcacaaagtcacatgttcgttgctgaaacagtatgctatattttgttaaactaatatctatcaaactcctaaatgaggggggggtgacattacatcttcaagacaagcttgtaagagttgaaataatttaataatgtctcgtaataagattttattttttgtgtctgatattagactgtaagagtctgatattagatttagtaaaatagtacgtgtgatgttgatgccatgcaagtaattggaagttcttaaacttgatgttagttccaacctagggacctagggttggtttgtatcactatctcaagggaaagacttttggttcagtttaatgaaattatggatattttgtctcccacttgctcaatgcttccaatagtagtaaataattcctcataaatcaagttcaaaattgatatgaaaaaattgttcataaaacaaacatttgagttctgcctcataaattattcaacatacagtatgtaaaaaatatatagacaggatttttttttttttttt

SEQ ID NO: 118088 - DNA, 2831 bp, Cannabis sativa
tctccctcttatgatgtatttcgtcgagtttatcgcgaggatcagaatcgctcccttctagctaatacctccagcttacaaactcttcactagatggtacatattctataagattcacaaatttgaggtgcccactctggaggagattctctatttttatggcatgaagcctcaaacgatgagaaccaactacgagaaggtgggtttctacaagttggagaggtacttagactcgcactgtctcatcagacatactaaacgtacccacgacaataggagaggacaagcttctggaagctagttggttgctccgccacccaaatcctttgacaaaggttgaggtgatctaggagaggtatgttgtagtgtacccagatgagggcgccccagcaaccagtacctctggaagaggtgacagacctttctgtgtgttccatacttctcatatccatcgcatatccaagatggaccaagggggtttcataaatactttttcaatttagaccacactaagtaccccatgagtgaattcgtagatatggtagatgagatcattaggagccgtagcaatccagagttgtctctagatactattagggtggacccatttatgaccatgtctttcccacacttcagataatacgacaactttgtcagttaggaagacatgaccttgtttgctcacggggaaccttatagctgctcactgaatggttgtacctaggaatatgttgttgtatgttgattgtgcttttggaattattgtttaaatttggcttgttaaccatttgttcatcatgcttacagatactcctaaaacaaaaatgttgaagtcactagtgataagatcacaaagagcctggcaaggacgaaggccttcaaaggaaaagggaaggtcaagactaaagcccacatgacccgcaagctgaagcctttgtctacttcttcttcatctgacatttgggatattctcctcccgcaaaggctagcaccaaagcttctaattcctaaactctcactggggtagacaagactcttgccacaactggagaggattctaaggaaccaactatgtccgggagtggtgcaacctaaataggccatctcgatccaccaacttaggtagaagatttgccaacattagtcgtggagggaaccatctagaaggactcggctggtgctaatgttttggatgagagtctggacagacttgtcttccccaggaaggacacatctgtgactccaaagcgcaagactccacccctactgtaatgactgcatagttaaatcatgggaattagcatataattaagaggtttaattattattattatgtgattttgtgccacttagtagattttagagcttattgtcaaaaataggccttaggaatatattttctcaattacggagatatattcagatgctatattcattatatgttttatgtaaatttttatgaatttcatgttttatgcttggtaatagtggaatgcgacagttggcttatagagtaatttagatatggttaaatactttagaaatagtggggcattatgaatacacatttggtacattgggactatgcggggtttttaggttggaccaaaatacccttagagtgacatgttacttcatggtgaagcaaaggggtaaattagtaattttaccctagtttgtctttagtgacaaaaggatttttattaatcctttaattatattaggctatgctgaataagatagattttatcctttaagtttattattgctcaaaattaaaaattagaaaaaattggagaatttcttctctctctcctattgggtcggtcacctagaataccaaggaaaacaacaattttcttcttcaattcagaccaaaagttagagttgttgcagctaggattcataatgtattgatggactgattcaaggtaagccctaagttttcctttctctttgaatttttaagatttaagctaggtttaaacatgattttggtgagttgtgttctattcaagttttgggtgattcagagttactttcttaagttatttggagttagtagaagttatttatgcttgattttgttggccatggtagtgttgaaccaaggtttgagttgtaaactcaaacatggacctttgatggtgaaatcaaattcaacggttatcattgattgagaatcttagaaaagagcatttcaagtagtaggtacgattatcacgaacttctagatatgccttttgaactaaccaacgctctagtagtttttatggatctgatgattaggataattaagaattttcttaaaacacacgtcatagtgtatgctaatgatatccttgggtaccctttatcaaaaacaatgtagggataacatcgatggatggttttacagtgattatgggatcataatcgacacggggtaaggttgaattggttaggatttggctgaggtcagagaaaattattggaactaatgttttttgggtttagataagttttggtattacaaaatggaagggttatttcaagatctcaacactatcaacaaagctagttaagaaaaagtagcgatttatgtggacagataaatgttaatatgatttcaaagagctggagttacatttgaatataactttagtgttagcttggtcatcaataagagaagttcatgttctattgtgaggcatccagacaggatttggagtgcgttctattgtaagttgatagagttactgtttattcaccttgtcaattgaaggagtataagtagtactacttgttatcccaaattttgcactctcacgtggcgtcacgggaatggtgac

SEQ ID NO: 118089 - DNA, 1572 bp, Cannabis sativa
gtgaacttgtcccaaatctttgagagagaattgagagatcagaccagatatgagcttttgaataagggagtgatttgggccagtaacaagaatatcatcaacgtatactaaaaggatgatagtattcgaaccagtaccatccacaaagagagaagtatcagccttggatggtgtaaaaccccagccaaggagagtggatttcaacttgtcattccatgctctcggggcttgctttaagccatagagtgccttattgagtttgcacacatgagtgggaaactttggatccgcaaagccttgtggttggctaatgtatacggtttcttgaagatgaccattcaagaatgcgtttgccacatcaagttttctaatttcccactgtgatgagatagcaagagtaagaataactcttactgtaaccggtttcacaaccggactaaatgtgtcttcaaaatcaatgccaggtttttgaagataccctttagcaacaagacgagattttaatcgatcaagagtaccattgtcattaagcttaacccgatgaacccacttattcccaactaaatgcatgtgtggttcatatggaacaagagtccatgttccttgggaaataagagctttgaagccaggatggttaagggcagctttaagagatttaggttcaatcgggaaaagagattcaggaagcttatgtcgagttgccaaataagctttgggtttatagattcctctttgagaccgagtaatcatagggtgagttctcagaggtataaatgagccagaaacaccagatgaaacacctgtagcagcagcagcagtggtatcaggatgctggcaagctgcagaagagactctttcaagattggagtcaatagtagagagcacaggtatgctggtgtcatttttagtatgcgcaggagtggtttctaattctgctctaaaatatgcttcagagttggcaattggggcaactgcagcagctggtgcaacaatatctgctggtgcagatgcagaagtagatgtgtcaaccggttcatatggcatattagttgctggtgaaaatgcattgtgctcaggtaacataggtgaaagaacacagtgagggacactattagaagctgcattattgtttgatgtagaaaattgagcagtaggaaattaataggtgcagaagttacctgagatgaacttgtgattctggtggcaggatagacaagctcattaaacaccacattacgagcaataaacatcctgccagtaggcttttcacataagtatcccttgtgtttaggtgaatatcccaagaagatgcattcttctgatctatactccaatttgtggtgattatgaggtctcaaatgaaggtaacatgcacatccaaaggtctttaagatgctgtaatctagtggttgttggaacaaacactcaaaaggacttaaatgatttaaaacaggagtaggcattatgtgtatactataggtagcacattgaaaagcatgccaccaatatgacatatcaagacccgattgagctaggagagtaagacctgtttcagttatgtgcctatgcttt

SEQ ID NO: 118090 - DNA, 2670 bp, Cannabis sativa
  modified_base (31)..(40): a, c, t, g, unknown or other
tttcataattaaacataaacaactgctaatnnnnnnnnnnactaagcgggctttacagttaagtaccctgagtcatagcaattgacctaggaaggctccctagtcctacaccaaggtttactttggaaacttcagaatgggtgtttggatcctgccaaattgttcccaacacaccatccttcatcagtattctgaaccagaaagtcaagaaaaatccaagtccaaagcctgagaactgaaaaagagtcaaaacgacctcccgaaagtcaaccctggcgcccaatgctcaagttgacatctcgagctagggttttagttttcgagctcgtcttagtgaaaattactcaaattttgaacatagacacaaataagacctgtcacaaacatgttagaggcactggaatcagaatcgaaacacttcctgtttgaggcacttgggcacccgaaacctaggtcaacttggtgatggacccagcgctcaggttgacatggttttaaccttgggcacttccaaccacttttttgaaggcatttcccgagaattttcctcatcttcatcgaaaattaggaaataagttctttcgggaaagaaacagatcgaattggaggccaaaactaggacccagcgcccaggttgacatggtgttcgatcctaacgcccaggttgtcaacttgggccatttttgtaataccctacttgcttaggcacgctacagtggttttctaaatactctgcacgcctttgctaatcaaagggtttccaaaaagtcgtgacaaattaaaatttttgaattaaactttatctttaaataaatacataaccttacataatatctaggtactcgtttaaaagtttacaactatatacaaaatacatttttcataaaagtgtcgcccaacgactaaaaaataaaagcccatgtcttctcgagattgaacactctaggcctaaccatcccgatatgtacaatcactcgtaagctctgaagtcactactgctcaaccttctcctttcccttacctagacatgtaaccaaatctgtgagtcgacaaccttagtaaaattgtataaaacatataaacatatagtcgacctgtagctagggaccaatacacctacgtacaaggcttcaaatgaatcaagaatgttcttaacagaagtacaacctctataccacatgcactaagtactctttcaatactagtgttggtagggttgaaccgtaccttgagtacaacttagttttttaccacatgcactctataatcgtctcgtaatagtgtcggtaacactgtgtcataccccttaacattatatactataccaatgcactccgtactgcaataattctagtattgatagtatacaaatcacataattcaacatgcatattatattgatacacacatacatacacatatcttatactagtcttatctcgttttcaaattcaagtgtgttggtcaacctgaatgcgaaattttgcttgttgaacggaggccctatgtcacatttttcgtaaaaaggttaaataacatgctataatgttttcggtgacttaaactcaaaactaaaagtttccccatcaataaatagtgtgctagtagcctaaatgtcaagaaaacacaaaaaaaaaaacttcagaaatattacccaaaaaatggaaggtcatttttgtaaaaatagcagaccatttttctgggttactgccagcaaaaacgggagaccgtttacgagaaaatagtctgtcattttctattgtagttttccaaaacatctcatttcaaacccaaagcaaccccaactgtcaaaccaagctttagaacacctaattagggtccaacaaacataacccaagcagtagcaacaattatagttcagaattacaaaaaactacaattgttgagctaagtgagttcttaaactcaaacttgctcaactctataatcaaccctcataatccaaccaaagaagcttcaaacaaatctaacaaaccttaggaaacaatccccaaacacaaatgattcggacaaaacctaactcaggatttttcatgttcaaatcaaacaaaaagctttaaaactcaaggggaagaactctagggcttatctcttgttttaatccttcaatccttgttgaaaattacaaaaattgatgaagaacagtggttggttccttctggttcttagggccgaacaagggagaataagtttgaaataatgtgtttttgtgaaaaacttaaatttatttttcttttaataatctaataataatctaacttcagctcactactaagaaataggcttttggtgtcggttcaagggacatttttttaaaaaataaagccgacactaaagaccaccccaactctttggtcttggtttataactaacacctataataactttaagtgtcggttagtagaccaacactaaaagtataaccaagaccaaaaaaatattaaaaaatatacatatagattaagtatagttgtcggttcataaccgagactaaaagatgctttagtcttggttatgaactgacacttataaaacatgaattcaaaataaaaaaaatccaaactaaaaaaacccatttcaaaatcctaccctaatcattaaaaaccctacccacatttcaaaactactcaacctctctctctctctctc

SEQ ID NO: 118091 - DNA, 1148 bp, Cannabis sativa
aaccccccccgccgccacaaccttccccaaaaccctctccctctccctcacacgccgcttcccagtcctccgccgcaacaccggagctagaatgtcagcttcagcagcttcaagctacgccgtggctttagccgacttagccaagtcgaacaacacactcgaagccaccagcgccgacgttgagaagatcgataaggtgttctcggacccttcggtgttcagtttcttcatgaatccaacgatcgaagaagaaaagaagcggaaaatgatcgacgagttagctgaatcgatgaatctccttcctcacatggcgaatttcctcaatatcctcatcgattcgaggagaatcgatctgattaacgatgtgactaaggagttcgagagggtttataatggaatgacggagactgaattggcggtggttagttcggtggtgaagcttgaatctcaacacttggctcagatcgctaagacggtgcagaaattgaccggagctaagaatgttcgaatcaagacggtgactgatccgagcttggtggctggattcacagttaggtatggaaattctggttcgaaacttattgatatgagtgtgaagaaacagcttgaagaaattgctgctcagcttgatttgagtgatattccagttaatgtatgagtttttttttttaattattattaataattttaaaaataattataaatattaaaaaaataattttttttaattaattgtatgctattaataatatttgcaatgattataatatttgtatatccattcctaacattgttttgggttttaatattgatattagtttaattattgagtattgctaattaattgtaagacaatatgtttagaggtgctaagtaccatttgatgctcaatagcaatagcaatgctttttttttttgagtgattttctaatttttaacaatgagtggtcaaatactaataaagaaggataattagctttatttgtatgcttgaaaatagagttaattagaaaattttgatattttttatttataaaaataaagtaaatattattttaaactttgtgttttgcaaaaattattaattggatcgtgtgttttgttaaatgataaaatagattttgttttttttttaaaatggtacaaat

SEQ ID NO: 118092 - DNA, 1876 bp, Cannabis sativa
  modified_base (45)..(64): a, c, t, g, unknown or other
taaatgttatttctgatctatatgaataagtaaatctgattatannnnnnnnnnnnnnnnnnnnggcataaaacccaacaaattggtgttaagtaggtatacaagatgaaactgaaggaaaatagcaaaattgacaaacacaaagtgcgactggtggctaaaggctataagcaagagtttggcgtggactacaaataagttttttgatccagtagcgagacatgatacaattagattggtgatcgcgttggctgctcaaaactcatggccttttttatagctggatgtaagattaacattcttacatggagaccttgaggaacaagtatttattgatcaacttcctggctatgttaagattaaaaatgagcataaaatgtataaattaaaaaaagactctttatggactaaaacaagcttcacagacttggtatagtcgtactgaagcttattttttaaagaaaggtttttataaatgtccatatgagcacacactttttattaaatttagagacaaaggtaaaatactcattgtttgcttatatgtggatgatctgatttatactaaaaatgatggtgtcatgattcaaaaactaagcaatccatgatgcttgaatttgaaatgactaattttggactaatgcactattttcttgacatagaagtagtgcaaactgatgatggtttttttgtttctcaaaaaaatatgtccaaaaaaatttagacaggttccaaataaagaattgcaatgttgtgggcactctaattaaagttggtttgaagcttatcaaagatccagaaggaaagaaggttgacaacactctatataagtcaatagttggaagtttgatgtacttgacacaacaaggccagatataatgcatggtgggagttttattagcaggtatatggaatgtccaagggagatacatcttcttactacaaagaaaatctttcgatagtagcaaaatataactaatttcgggctattctatcaaaaggaaaaaaagcagatttattttattttactaacagtgattatgctggtgatttagatgataaaagaaacacatatggttatatttttatgatgggttcaggagaagtttcatagtcttaaaagaagcaagcaattgtcacattatgaacaactgaagtagaatttgtagcaacaacaactagtgattgtcaagttgtttggatgagaaagattcttgaagagttacacttcaagcaagaaggagccaccataatttattgagaaaatagctcagcaattaaattttttaaaaaccttgttcttcatggtagaagcaaacacattgatgtgaaatactattatttaagagagaacagtatggaaggtgttattgatcttatttattgcataagtgaagaataagttgttgatatattcacaaagctcttcaaattgcttacatttcaaaaattaaggaagatgcttagtgtatgtgctttggaaaatcaagtttgacagacgataataaattgagtgttcgcaaacacatcaatttaagaaagagaatgttaaataaaatattattaggtggattttttttatttattgtttattgtagcatttgtggtcatatgaccaagtctttaggaacagtgtgttcatgggtaaataaccgcatcaatcaagtattgagataaatgggttaagctatttgttaggagctagtggtctagtgtaataatgtatattagcggtcctactttctaatatttcttatcagctttgtataaagagctccttgatttttttttagaaaattagatctgtaacacaaagaagaaacaaatgagatcaagttacaagatctaaacgagatttgaaacacaattgtttcaa

SEQ ID NO: 118093 - DNA, 1492 bp, Cannabis sativa
  modified_base (62)..(65): a, c, t, g, unknown or other
  modified_base (1440)..(1444): a, c, t, g, unknown or other
ataaattatttaaatagttataaataatttcataattaacataaacaactgctaatttccannnnaactaagcgggctttacacataccaagcacattatgaaaacgatcacgaataccttgagtagcattaggtgagaatgacataacagttttctcagtattcagaagttgtcctgacgctctatgataatgatcaagtactcgattaacagcctggcaagagtcttctgtagcttgacagaatagcaagctatcatctgcaaaaagaaggtgggatataacaggagcacccttcgcaattgataaacctttcagatggcccatggtttcttcatgtttcaataaagctgatattccttcagagcatatgagaaacaaataaggtgataacggatccccctaacgtaagcctctcttaggaataacagaacccttgaccgctcaattgaggttgaaagagagagtcgcaggaatgaaaccgtgggctgactgggagaatttgggcaccaaaatgtttgaacaatatccctgcaatcagtatctttgagccacatttgctcaaattgaaaccttgtacgcctctgagaagaaggagctgacagatgaggttgtgacacagtatatgcaattgctctatgatccgaatggtaaaaatcatgatgggaaagagtggcatcagtaaaaaaatctgaccacttattatcagtgaaacctctatcaagtctttctcgaacaacattcgcatgatgatttttatttgtccatgtaaaaagatcgctagtaaaagggatagccctaaaattacaacagtcaatagttcttctaaagttatccaatagcatgtcatcatctctaggaggacccccatctttatcctcatttgaaagtaactcattaaagtctccaagaaccaaccaaggtaaattagaagcattagagacaagctacttaaaagattccaagtgttgattctcaaatgtgtttcaggtgctccataaaaggcagtaaagtgaaatttgtggaaattatcggatgaaactaaaacattaaagtgattcattgagtatgaattaagagttacatcaatattagccaaccataacagcaataaaccacccttcaaacccaacctagggacttcaagtccattactaaatttaaatgaagaacgaaaaacgatcaacgaaattatattttaatttagtctccacaagaaaaagcaagtcaggacgctgctctttgactagcagcttcagaaatctgaatgtcgaagggtttcccaatcccctgacattccagcttataatttttattgctgggggtggggctgcattggtgcaacctctgctgaacaagatgactttccttcaactgaatttgttgactgatcagaaacatgttgccaggatgacccatctgttggaatatattttaccannnnnttagatctactcacaagtatgttgcttaaacaccctaaatatgaactt

SEQ ID NO: 118094 - DNA, 1345 bp, Cannabis sativa
gccagaagggtcttcctcgtcggtgttatgttctcgctttcgtccttggcttctttgttctcttctccttcttctctctgattttgtggggtgcgagtaagcccatgaaaccgaagatcacagtcaaggtctgagttctttctattttattttttctctgctatgttgatttggttattcggcgtgaattttgaagtgggatcttattcagttactcatttgggttttttcttcgtgcagagcattaagtttgaccaattcaagatccaggcgggctctgactttacgggcgtggctactgatatgatctcaatgaacgcaagcttaaagctcactttccgtaataccggtacattttttggagttcatgtcacatcaacaccattagatctttcttattccgagatcacagtagcatctggaactgtaagtcattaaatattcagcctttactcattaacagttatatctttatattattcctcactctaatttgggcgtctctttcatttttcagataaaaaagttttatcaatcgaggaaaagccaaagatctctgagtattcctataatgggtaccaaaataccattgtatggtagtggagctagtctgagcagctcaactgggacgactactctaccagtgaaattaaaattggatttcgtagttcgatccagagcttacgttttgggaaaattggttaagcccaggttcaacaagcatattcagtgcaatgtaacttatgatcccaaaaagctcaatgttgcaatccaactcaagaatcattgcacatatgactgaaggtcaagttaaaactgaagcacgactatggaagatgttttggacttctgattttattttattttattttttctttggttataatgatgtattattggtgaatataatcggtggaagacagctcagcgggcaactttaggatcgttcgggcagggaatcaaaatgcggttttagattttttttttctgcccgaaagtgcccgaattacaggttggacttggcggtggtgacttgtgggtgatatactctcctgtgatgtttaattgcttttacttttatttatttatttttatatgtaaaagttaagacatgtaatgtttgttctcaataatgatatacaattcatttagtaaattttgttattgagcttgtcttgatcttttccattagtgaaaattgtgcaaaggaaaacgttatatcggtctgaattagaatgaatggtgttctaaaaggggaaatttgcggcaaaagtccctaaaaagttcacgttgatgctgattagtccccaaggtccgaaagtaacggcaatagtcctcaaggtca

SEQ ID NO: 118095 - DNA, 1849 bp, Cannabis sativa
  modified_base (317)..(323): a, c, t, g, unknown or other
tctaaaaaattctaaataaaacaattcttcgtacaatttttcatatataaaataaaaacacataaaaaatattttcaaatgtatattataataacgaactaaattaaacaatactcacatttaaaatatagatttaaaatataaagaatacaataaatttatagaaaactcatcttataattttaaaataagtgttatcatcatttcttgtagtcgctactacatttaaagttgatgtcattaccgtattatcatcatttcttgtagtcatcatcaatatccatcctattactcagttttattattattattattannnnnnntattattattattattaaaacaaactaatttcaaaattatttcctcacataacaatttcgttgtttaaattattgatattaatattttatttgatattaaattattttaaaatcttaaattcttattagtagtcatgatattacatgatgaattagttattttagttattaatataaatgatataaaatgcaatatcttttaagtaagatatatttatttagtggaatatttagtgtgacatttaatgtgaatcattacagttgttacaccaaaacgtagaagattctacaccaaattagtttaaccattggagatggtctcagcaagtccaattcaacaaacgaacaaacaactaaactatatgtttggtagcaaagaaaaaaataggaaggaataaaaaattaggaagataaaaaattgacaagaaggataataaaaatatatatctactgaaaaatattaatcttcaatgaaaatataaaatcaacaaaattacaactctgtgctcaacaatacaaagagtataataatgattaaatagttacaactctatttcaaaaaatacatgtaaaatgaagaatacaagatgaagaaaatagtgcaactcaaaaccaataagcaacaagtaaatagcacaaaataaattgcataatatataaagaaaatgtgagagcaatatcaacactaaaaccacaagtgacaagtaggggaatcaacaaacttgaataaggttttacaatttagtccaaaagctattattgccccctaccacaagaacttagggaagaaaagaagtgataataactttatggatttatcaagcttaaaatatttctagcaaggtacaatcttgaaagaacataagtggtacaaaaatgaatcatataggtctctgtttatagtattttggtaaccacaattttaaatcaaacactcatcttatgcccatatttcaagccataaatatagacatgacacatggataatagtcttgaacattgaatgagtttatgaagtacaacggatatctggcttcaggttaagcagtaataaacagatatctatctcgcaccatgtcccaacaatggcactgataaaacacagcattgcgaggtagcaatattttgagatcatctgggggagcaactaggatggcaaaatagcagactgaaactgtattgctagaaagggtagataatgaatttctaaagcttgcaactcatttacccacacacttgtgagtatgctaaaagattaagagaaataagaaaaatgtgatttatatcctagaaatctcaaaagactagtttaggagttttcatgaaaggcaacatcgaggacaatcatcataactaatgtcttgcagaatgtgaccaactatttcttgaaaactgatcaaaagacgtgagccatagttgggatacataacctcggtttcaaaaagattatttcttgataagatcaaaaagtggttatcaatatttatttcactatatccacatgttgtaaatgtgaaacgtgggga

SEQ ID NO: 118096 - DNA, 1384 bp, Cannabis sativa
ttaagcatgcttaagcgagagtagtactagaatgagtgactttgtaaaaagtcctcatattggacccctaaaattttatttcgttaaaaaaaataaaaaactgaaataaaagagtaataagaaggactctatcttaatagattaaaaaaatagccatgaaacatcaaactagttgctcatgaaaattgttataaccttaacgaagaagaacatcattagccactcctagagttacaagtaaccaaaccaatgatcagctctgtaacgaaacccccatcataagaacgaagagcgaagtagaaaaacaattccgatgaaggcaacacttacaccagcagatattaagttgataaagaaaaagaaaacattaaggaaagaacatcacacttaactattggaaaataagacaacacagaaacaatgttatgaaattaagaacagataattgtcacaacattacaacagcaataatgttcaaagagagaatttaaagaaggcctacttgtgtataaataagccacaaaatcttgggggctggaattgtccaattttctgaaatgaaatctttgagactcagtgatattgattagtattcttgaaaatagaaactctaaaaatcagtgaaaaggatttttatttttctggaaaaagaataaattcaaggttttaaaaatagcaggtggagatgaatagttacctgtattcaaagtctgtcttattgattccactcattcattacatcaaatcactcttcaaaattatggattcccatatgagttaaaagtaggtagaagcaaccattattctggaactgaattcacttccacctgatcatatctccaaagtgataactcagtcaacgatgagagtctttgtaaattcaattgaaatcgcttcaaacaagggaaaatctcaccattgtgatgatcatttgtattgataaacgaccaatctgatgtagttatgtttctgagatgtatctcttctaaaactcgaaaagaactctttaaagaaatgccatgaatttcacaataagctctgtgagataactttttcttgatcaagctgtcttttaagacatcattcacttctttaacatactcaagccttgaaataaacaatcttccatgaagatttgtcaacttacccaactctttgatcatattgcaaatcatcggtagcatctcttttaagggtgtgtcatcgatgatgtaaagatagcgaagaatgattaactcagatatgttagtagacaattgagcaagtttttggcaacttcccaatgagagtgcttccaacacgcaaacagatacgtcaattgaatcaggcaattgagcttcataaactacttctttaagatcttcaagccacttcttcacattgt

SEQ ID NO: 118097 - DNA, 1363 bp, Cannabis sativa
catgtagaacttcagaatatgaagttcaagaaaacagagtaaagaaagaaagtaaaaccagaacatatacctttattgaatgaaatggagtatttatatacatcattgatatacataaccgactctgtttatactgtaaaatgtgcctaacagtagttaaaaagttgttacaaaataacagaaaattacccacttaacagactctatactactgtattgacacctcatgggcctattccaattcatgcacgattttttcatgtgaagtctctccttcttttaaatcccgcgaggccctttgaaatatccgtttaatcattgcgtctattttttttatcatcgaataattgctcctaccatattaaaaaaaatatcaaaatgtttaccaataaagaacagactaacaatattttgttttggctttgaaaatattttctatcatggttcagaacagtttataattcataatacatagcatacaataagtaaagggtatattaaaaaaatgatatgtgttgaataacaatatcatataattatgtatcgaaatagaataatgcaagaaaggctgccattcaagaaactatatattttccaatacattatataacttaaatattttttacaaaattagtatgacttactttagttgaagattttccagaatcacgtttagtctttaatctcttttcattatctttcttgctccgctgtctttttttcaaagccatctaaatatttagacatataaattcataaactcattataagtaggtaatttagtaacaaattcaagtcactgccaatgcactaacaattaaaagacatgaacttacttccagaagttatgctaacatacattttcatcattaaaaataacacaatacaactatagtactatatactatatcataaatttaaaatttaaaatcaacccatattaaccaacttagaagaaatccacaagaagaaaccctttcctagaaattttaaatctgaacaaatttagagaaaaaaaaaatagcttaatctgaaattctacacaaacaaatatgataatcaaacttgagatatatgaaatgagaacatactttgctccgaaaagtagcgtcgttccccactaccatcattatccggcattgtagctgaaatttgaaacccaaccaaagattttgagatttgagtgaaacaaaaatcttgtttcagaattttttttttttttttttgaaaagaaatatttagtgagagatagagagattttggatttttcttttgttataccgaaattaaatacagtaaaattggaacgaattaccgatagaataatctggctgagtcgcggacaatgtcgctctctttaaga

SEQ ID NO: 118098 - DNA, 4198 bp, Cannabis sativa
  modified_base (66)..(69): a, c, t, g, unknown or other
  modified_base (187)..(188): a, c, t, g, unknown or other
  modified_base (1297)..(1304): a, c, t, g, unknown or other
  modified_base (4130)..(4140): a, c, t, g, unknown or other
aataattatcactacattaaatattattaattttaaaattatgatattaaaaaaaattaaaaactnnnntaaaattaacatacgtaacttgacacgtaacatatatatagtaaatatataagggtaaaaactattttagactctgtgttttgcaaaagttatcaattagaccatctgttttgttaanngacaaaatagaccatgtatttttctaaaattgtacaaatatgactctgaattgattttttgtcaaaataaaacttaataataatctaatatagagatattatgataaagcttgttgcattttctgtatttttttgcgtaattttttttcttcttagagttggctatattcaaaataaaattgttgataattgagcttagggttttatttttatcattatagaaaatatagggtctattttttcatttaacaaaacaaagattttaattggtaatatgtaaaatacagggtttaaaatagtatttacccaataaaggtaccccacaaataccattttactatatttaattttaattttgttttttttttttcttttttgctttatttctttttaattttatttctatttcagaggcccttcaagtcgtttttaagacaaagaatggtatcacatcacgttttttcagagagaatggtgtcacatcaagtttaaaagcatatcttatcgttaatgtctccaaattttttaatgggaagaagtatttgcttcacttttaaggctattcatttacttatttgattttgggccaattcaacttaacaaatgagtaattgtacttatgatttttggttgcacatatttaaatttttaaattatatttttaaaactactattaaatatcaaattataacattaagtaagttataatttaatgtgtaagttatatttttggttgtagataaatattttctttacgaattgtattttagttgtttaagctattcttagttcggtctctatattttttatttttggtttatttgttcaggagtatcaatttatttgatattctttaagtaatgtttctattagtaatgttaaacagcctgttaacaaagtcacgcactgtatggcacgtggtgcttgttatttttggtcatgtactctttttactgagagcgatgttccttttactctttagtccattgtattagcggatgtttctatctaataaagattgcttttattcaaaaaaaaaaaaactactattaaatattaaattattatttacatattattttttttatttatatatttaaattaatttnnnnnnnnaaataaaaatttaataacttaaactaataggaactgtcacatagtcattggcttaatacttaattgtcaagtgcctatataagtcaataaatgtaacttataaattgtatcatccaaattaaatttaaatatttatttactgttaaaatttaaatttaaatatttatgttataaattggtcttaataaaaaggattataaagttactttacccatttggattggcacatcaaatagcactacccaccggcaccaacaccactaacatattcatttggtcaaacaaagcatccaattatacttggcaagacttaatggagcaaatccttattgattgaagacatatgctatggaatttttattttatggaaatatgctatggaatattgttgtgcaccattttatgttgtttaacgtcacatcataaccatcagcatccgtctctaatggaaattgcaaatatttggcacaagtatgaaaatttttgtaaaaataaatcttctactaatgctcatcaaatattacataaaatataaaaaaagtgtaagaattgtggtttgtttagtccgtgacactagaggaggttcaagctcacaagactgtcaatcatggagaatattctaaaaaagtatccaaattctaatctttttcttcacataggatcagaaagttttcaaattctcgctttgcaggaacgctccaaagctcgcatctgtccgattcttcgagcccaaacccattttggagactaaaacccaagcttgggttctcatccagataaatattttatacatgtgggttcggtgtgttagactttttatttggacttacattaatttttattagttttattaaaaattgagttgattggatagttctttgctatgttaactcatattgttagtgattaatagttaattagcttaacatctgtatgtgtaaagcctaattggaacagaagtgtggggttttctagttaactgatcaagcctttgatgagcaaacccattccaactagggttatgtagctaagtcccatccctaactttataatacatattgtctcatcacaattgtatacttttaataattagatagataaataaaattgcttctgatttagagatttagagaggaagacttagttgatagtattatactatcaaattgttgcaattattatggattcatcaagtatgtatacctaattattatctattattattttttctgtattatatacaaattttgtattttggtttattaattcattctcctcttgatgcttctaattgggataattgtgttgattgtactcattgaaaattgactaaaacaagaaagaagtatgttaaccatagtcaacatttattagaaattatccacaatgacatcagtggaccatattccactatgttgtataagaaataaatattttatccccttcatagataatttttctagatatgacttcacttacttgattaaagaaaaatctgatgctcttgataaactcaaaatctttcaaattgagattgagaaacaattaaaaagagtcattaagattgttcttttggagcgtggaggaaaatattatagtcgttattcagaatctggacaacacatgaggccttttgctaaatatttacaagaaaatggtatagtcgcttaatacactatgccttattcacctgagcaaaatgatgttgctgaaaggagaactcgtactctaatggacatggttaaaagtatgacgagtagatcaaatatgttagtattcttatggggtaaagcactcatgactgctacttatatcttgaatcgtgctccaagtaaatctgttctcaaaactccttttgagttgtggactagaagaaaccctagtttgaatcatctttgtgtatgggattgtccagctgaattaaggatttatgatcctaattagaaaaagtttgatccaggaatagtttaatgttttttattggttatccaatgcgctcaaagggctatcacttttactgtcctactcatggtatgcaagttttagaatcaaagactgctaaaattcttgaatttgatgttgcttaaaacattccttcagcatctcttgaaacaagagtcatcttgtaacgccctaatctatagggatgccatgtgtgtgattttataaactagtttcgtattaatagattaattaataattaaaattcgtgataatattaaaaacttcactaaaataaaatactaaaaaatagacatcatatcgacactaaacctatgttccggggatccctgttataaaagttttacaaaagaactatatacaacaacaagtcaaaatacgaaatcaaaatacaaaggaaatacagcccaaaaaaactcctgacaactcaacacacaggccaataaggtcgatatgtacattgctagagaagactatcacctcatgtctgctctaacttttccttgcccttacctacactacagaacacacgtgagtcacaaggacatagctcgaaaaagtaacaaaggagaatacatgaaataactaattatccatctcactattataaaataattaaataataacattcaagagtggataatgtaaccaaccatatgcatggaaataaaagtaattatatatcacgtttcctaattaggcaaacccgtgtcataatctagtatcacacataatgtcgttgcatcacctaatcagatgagcttgtgccataacttggcaccaatgtatcacatcccttaaccagacgagcccgtgccccaacttagcactaatatattattggaaatattttaccaagatctnnnnnnnnnnncaagtatgttgattaacatccaaaatatgaattcactaaaataatgaaattaaacaca

SEQ ID NO: 118099 - DNA, 828 bp, Cannabis sativa
ctataggtctgtagtcactagctacctttgggttctcaagttttggaattaaagagattattgtttcattcatagaactcgaaagatggccattttggaaaaagtcaagtataacaacggagatgtcttcacccaactgctcccataagcctttgaagaaactagaaccgaacccatcaagactagggctcttagaagaatggatgctaaacaaagcctctcgcacatatttcttttgaaattaatcgcctttattagtttaacttgttgttccacattcagaatgttcagaatgttcccctggccaatacaacttttgtatcaatttccttttttgtcgagctcttacttagcttggtttttatttgaggaacaaagggataaagttataagtggaggggacatttgaactagttctggaatgtcgtcaggtattgatgccgagtttgcatgctcttgtacctcttgatgtcgtcatgtagaacttgggtttcgaagtatttaaaattttttttgaagccattattatttgggtgcatatattaacagaggtgattttaggttaaggtgggttaggctcacgtctagggcctactcatcttgagagcacaaataattctgttttaataatgtaccaattttttttaaaataatttacagtataaatacttaagtttaattttcgattgtaaataaatacttaatattaatttttggcagtaataatacctaagttattattctggaacttctgtaggtactgttaatttttaagtaaattgtcacgtgataattttttatcagtctaagttattaattttttatttt

SEQ ID NO: 118100 - DNA, 984 bp, Cannabis sativa
  modified_base (30)..(46): a, c, t, g, unknown or other
  modified_base (548)..(554): a, c, t, g, unknown or other
aaaagaggtatgtttcaaataaatataaannnnnnnnnnnnnnnnnttaattgattaataaaagaggcatttttcaacttaacccttaaattgggttttgaagaaatacacttaaaagcccaatatatatgcgcccaaacatacaaaaaaatggtagttttagaaacttactccaagtttatgtcatttttataatattaataacaaataaatattggtacttttataatttaggtctttacaccacatattaaaatttatttttttttttaaaaaaatactagggacataattttaaaattaatctcacaattagcactcctatatttatttaagctataccgtcctattttaattttttttttgggaacgctacccttatttagtatacgtacctttttacttttaaataactttatctaattgtccttttctttattttttttttgtcttttgctcctttttttcttattaattaaatatgaaatatacaattgttttttttaatatatttaaaaatctgtctctccttttttttttcttttttnnnnnnnaaaaaaaaaatttaaaatatttttctaatcacaccgattattatttgagctcaaaaattatacatttataatatatttttcaaaagaatcattttgacatatgaaaagcatatatttttttaccgttaaaaaaatgattaaaatcaaaagtaatcttataatttcttttctatttaattatagaaagtaaatttctaacttcaataaaatttaatttaataaattactatcttttaatggttattttatatttaaaagttacaaaattaacttctaacctaattaacagattctttggccatacgtatcccttaaagaatattcaagaaagttttgatttttatatgagaagtagagtaagattcattaccgaagatctctttgtgatcatcgcatcatcaacaacagtaaaaaaggtctagatcattac

SEQ ID NO: 118101 - DNA, 1845 bp, Cannabis sativa
tataaatcacgtaatacgcctaagttagtcagggtgttacatagtgtgattttattgtcttattctatgtacaggcaacttggtctaggaaaattaaaaccaacttctataacccttcaattagatgatagttctgtgaaaattcttacaggtattatagaagatattttgattaaagtggataagtttaattttctagttcattttatttttcttgatacccaacctattgagaatgttcatgcccaaatacctattattttggtagactatttttagctacatctaataaaattattaaatgtcctaatggtgtgttgaaactatcatttgagaatatgactgttgaattaaatgtgtttaacattcctaagtttgttgagtgtgaagaaatagatgaagtgaacatgattgaatatatttttgacatagaaataaatgaatcatttgaaaattgtgcaaaatatttcggtatgaatttaaatataagatgaatattttgctagagtctgcacctttaatgaacattgaactttggaagacaaaagttgaacctttttcacctttagaatgtgtttaatcaatttctaaacaaccaaagttagatcttaagcctttaccaaaaactttaaaatatgcatttttagaagggtctaatacttttcttgtcatcattgcatctgatttagataaagagcaagaagcaaaattgtttgatgcccttagatagaacaaagaagccattggttggacaataggagacattaaaggaattagcccaaccatatgcatgcatagaattcatttggaagaaagtgaaaaaatctctcgtgaatgccaaaaaagattaaaaccaaacatgaaagagatagtaatagaagaggtgattaaaatgttagatgtaggtgtcgtatcctatatatcatagttcatgggtgagtccaattcaagttgttcctaagaagttagggattactgttgttgaaaatgagaaaaatgaattgatccctactagagtacaaactgggtggagagtgtgtatagattataggaagttgaataatgtaacaagaaaagaccacttccccttacccttcattgaccaaaggctcgaacgcctagctggccatgcttactattattttcttgatgggtattcaggatataatcaaatccccattgcccttaaagatcaagaaaggactacatttatttgtccttttagaacttttgcatattgtcgcatgccttttggtctttgtaatgctcctgcaacctttcaaagatgtatgattgtaatattttctaacatagttgaaagaaatctcaaaccttttatggatgatttttctgtgcttagatcctcttttgatgaatgtctgccccatctttccgttttttgaattcgtcgcaaagaatagaattttctccttaattaggaaaaatgtcattttatggttaaaaagggaattgttttaggtcatgtaatttcatctgaatgaattgaagttgataaagccaaagtagatcttattttaaaacttttccctccaaaatgagtaaaagaaaatagatgattcttaggccttgctagttttaatagaagatttataaaagactttagcaaaagttcacgccctttatgtcatttacttggaaaagaaaatgcttgtgtctttgataataaatatcatgatgcctttgataaattgaaaactcttttgactactgcacccattatttgacctcctaataggaatcttccttttgaaattatgtgtgatgcttctgattatgcaattggtgctgttttaggacaaagaattaacaagttacctcatgtaa

SEQ ID NO: 118102 - DNA, 2788 bp, Cannabis sativa
ggtagagatgacggtggcaaaatgtggcggtgaagggtggattagaaagaataaaaagaagaaaagaggctcgatgatgaattttattcagcattgacttttgtcaacaaagctaggctcgcggacaaaagtttttaagtaaaaaaactaaaacatagcgtttaatttattgtaaaaagatattctaacgagcctaattgcgccaacataatattttacctaattttacccccatatttttactaagtgggaattgaaacgccatgcaatagttttgcaggcgtatttatgcgttgacaaaagtaaaaatgaacaaccaaaagttggaaacttttggcggttagttttccaacacttttgtcgctaagtaatgccccaataaaagtaaaatatactgtaaaatttttggctccatttggctattggttcgaaccttttgctgacgaagtaaagtagttttgccggtatagaatcctttgactggcaaagtaacttgccggcaaaggtgttttccatagagaatctaggggaaaaagtgccgcattttatcggcaaagttcattgcgccagtaaaagttgacttttgccggcgcagttcatgaatttcgctggcaaaatgtaattttcttgtagtgatatccattctactttcttcatctactaagattatgcctaagagacaaccttgtatttacagctggattactagagcatcatgacgaggtaattttatccctcagagatcatttttggtgaaagtaattagagcagctagaaaatacatttcctcaggtaaaatgtagttgacttcgtgttggtgagctcagagtctctttatcctttcaatagctttcctttcttgatgtgtgatgttttcctagtgaatagttggttctacactccctagaaacgtgggattatgtttcaacactgtcgcttttcctttgaatgatgtgggctccacccatgtttgctgcctcagttatccttgagttttttctcaatgtaaggcttctcaactcgcctatcatgactctttttcacataatgtcagaggcctcctaccttgatctttaaatgtatatgcctgatcagctacctgcaatcatttttatagtgacctacatcattgtgaaaggcatagtgcttcacccgatcgatctcttctttcgattggtgcaaccattttgtgaggattcctccatattggtttgtctttgttttcttaatataattaaataggcaatgcgtcgagttcgacttcaaattctatttcgattcatggactcttatctctctatccccttaatttaattgtgctctggtctcaaattatagctcttgtagaatttctctccagtacggggaggctgattcccttctggtggcgtcgagatccaactctccctactctttgtctatttttgctttcttgttctcatagatagcgccgattgttgatgctgaaaattctttacactaagatcatcccaattaaatattacaactctactttattacacaatttctcctaaattggcgatagttcttctctttgatcgctgaactaagatttgagtgaagtgcttttttggagatgcaattaggcagagttttgactaactgtgtggtgaagaatttgtgctccatttgaatgttggggtcttctaattatagggaggagttggtactgcgctgtaataccctagaattataagattggattaccaaaatcctaattagataattatgtattattgagaaattatattattatataatttattatatgtgaatttatatgatttatgatattttaagaccccgttggtgagccaggggcattttagtaattttgacgcgggaagggtaaaacaatagaataaatttatttacgtgcttatggaactatattattatatagtatgcctgtgttgtcttttttaggtgtgttctgacaggttggcacggtatagtcacaaccaggtatttcggcccgaaccgggtttcgggcccgaaatgcaatttgggattgaattattggaattttaattattgatgtataatcagaaaatatatttgagtttaaataggtgtcaaaggacatttttgcccttggtttatgcatcggctttatttggcccttgggggcaatttagtcttttgacctttatgtgataaatgataaaaaataagtgaatattttagaaaagaaaaagaattttctagttttgtcacagccccaaccaaccctctcaaaccctctttgattttcaaagttgaattggtgaaaattgacttgatttggagcttggaatttgtgaatttttgagcttagaatggaaggaagttctagctttatttgaggtagcttttaaagattttaaccttgtcttccttgctgaattttattgatgatagagcatgaaattagttgataatgatgttgtgttgcatgtttaatgaattggtgttgttttgatgaatttgggtgtgtaattgctagttattgttgtgcgttaaattgttgggtttggatgagatgttttgtgtattttctaggttggtaatggtgttttaattagtgatatgctgctggaaaaatatatgagattgaaggatttaaagctcaagttttagagcttgaagagttgtgagtttgagcatgatattgagttgattgtgcaatctaaaattgagagttttatgttgatgtgtttaatgcatgaaatggtgttttagactctctgtttaatgattgaaaacctatgtgatggttctaagtttt

SEQ ID NO: 118103 - DNA, 1711 bp, Cannabis sativa
gagagagagagagagaaatgaagggtttgaaattgatgatgaaataagggaaaaagtgaatttaaaagaaggggaaaaaagtgaaaaagaaaaaagaaaagttggatgaaaataataccacatataatatgccaatataaccctgcaaatatgtaaatatatatatacatacaaagcaatcaaagataatgacagctgcctggcttttgagcattaggtattagtggtgtctagcattctcaaaatatgtcgttttgcgattggttaacgatactttctaaaaattattatattataaattatatgtgatctgatacttagttaaactaataacgatattaatacataaaatggtgtagataccactaatacctagcatttatgtgggaatttatgtatatagcttttactttgactagttatatatattatatatactgaaactcagattattaattaatgcattttcatcttgttttaagcacatatatatatttgttaagtattattagagattagagattgattatagtccttattatccaacatttgcatggatatacgtgttgtatgtttcctatatgactataatattgtatatttgtatagtattttttttttttttgtttttccaatgaatattaaatataagtatatataaaaaaataaaataagtagggatattattattttttttccttccgtactaacattttatatttttgagtaattataataactcaattttttaggaagtcaatttctaacatgatgagtacatatgcaataaataaataaataatctgattagccttaacatttttatatgaggttattattaagttttaatttgacaaaaaaaaaatgagttctgtgaattattttatgctattttaaaaaaacacagagtacaaaattatcatttaacaaaataaattgtctaatcagtaacttttataaaacacgtagtttaaaataatatttaccctgtatattataattatagcaagcatcattcttgtttttaaaattttagtttatagtactgaaaataagattcattaaacactcagtcgaacatgtgcgtatattttatatataaggcgtgaaataatttaagatgcgtttgctaatatttttttaattatttttttatttttaattaattagaaagtgaaaatatttttcaaaaaatatattctataactctgttttcactttcaatgttataattgatcggaattaaaactttaaaaaatttgaaaaaaaaaaagagactttcaaaattttcttaaatatttacttggaccttaagacccaaactcggatcccgacctgaacccgaaccctaatccgggatcctggccctagatttggactcaaacctggggtttaatttgaacccaggcttagaaccgaaccccaggctcgaccctagaccctttccccaaccccgaccccatactcggacccagacccacttaaataaaattaacaaataaaaataaaaattttgaatgctacacttgtattttttgttttttttttttaaattgaaaaataaaaatagttatataacacatttttattttttaaaaataaaattttacctttatttttgcgattaaaaaaattaaaactaaagtattactgtgacagtcagtagtcccgtaatccgtaagggaaaataccgggtaagctgtgcaatccc

SEQ ID NO: 118104 - DNA, 1315 bp, Cannabis sativa
tttagggcgtaaaacccaacacaatttggggttacagaatcctaattctcttgatattaaaacctagagacctattgcaacatatatatgcatagaattcctaacagttctaatagacactaacaaactcaaaacagtgggcctgaggaaattagagtggtaaaagagtttttggatgtatttcctaaagaattacttggttttccaccacaacaggagatagactttatcattgacatggaaccgaagcaaagcaagtttccaaagaaccattttaaatggccccaacaaaactaaaagaattgaaattacaacttcacgggatgcttgaccctaggtttacctgacacagtgtatagcactgagaagctccaattctgtttattaaaaatgaagatgaaatgtttcgcatgtgtattaattatcaagaattgaataagtcagaaaaagtatccactacctcgaatcgataatttgtttgaccagcttcaatgaaagacattcttttcgaagattaatctttgcttgggctatcattagttgaaaatctaagaggaagacatcctgaagactgcattttgcactagatatgggcattatgaatttctggttatatcgtttggactaaccaatgcttcgatagctttcataaacctaatgaattgagtattcaatgattttcttgatatttatgttatagaatttatcgatgatattcttatataatctcagtcagaagcagagcatgagcaacatctacaaatggtcttgcaatgacttagggaacacaagctctatgctaagttcaaataaagatagaatcatgatagatctaggataattaaatttgttagggattgaccaagtccgaagagagttatggaagttagaagcaacatgggtctaatccggtactatcgtcattttgttgaagggttttcaaagatttgcacacccttaacagaattaaccaaggaaaattgatagtttccgtggaccgacaagtgtgaaaccaattttcaagagttgaagcagtggttaattacaactctagtattggctttaccattagagcaggaaaagtttgtggtttattgcaatgcctatagacaggctctggggtgtgttctaatgcaagacaccagggtcattggttaagcttctcttccattgaaagagtatgagcaatgttatccaatgcatgatttagaaattcttgtagttgttttttctttaaagatttggcgtcattatctgtatggagagtgttataggcataaatttaccctccccgtgagaaagacttgtctataga

SEQ ID NO: 118105 - DNA, 903 bp, Cannabis sativa
aacaataagtattatcgaaagtttatggggcaaaattattaattatcctatattttaacttttctttatatatatatatgtaatattatttttatatttttataaaatgaatgaattaaattaaaaatataatatttaaaagatatggaggggaaaaaaaaattaatatatggtaatgtaaaagtttgaagtaaaattaaaaaattgaagttttggttggtattttgaataatagaatagagaaacttttgggagtgtgctaatatttaaaaaaaaaaaaaaaaaagattttgtttatggtcataaaaaatagttgatatgaattaactccttcatgtttagtatattattaaaattagtaatatagttaaattttcaatatttaagcagaaaataaattaaatataagaatattatagtttatttatatttgatatgaacaattttgttcattatattgaaattttgtagtaatttagttattcgaaattttatatattttttatttagtgtattattcaaatgatagaattaatatataattatataaattgaatatgtgatactaatgatatttatatataaattgaatatgtaatgctaattatgtcgatcaatatgtagtccaaaaacaagtacagcccacgcaaaaatgataggtcgacaagagaacccaatggattgggttatagttgagatttcttggcgctaaatgtaaacaagttgagttagggtcgactaatgcactccattaaaagggattgttgcgcagtgttttaatattgtgtgtaccatttgcctttcctcaattagagatactcttgttgggataggattaaattttggggttttttcattagtgtacaacaaaaacaattatattacaacaaatgtgcaaaaaaa

SEQ ID NO: 118106 - DNA, 3733 bp, Cannabis sativa
agtgaagtaacttttagtctagaaatatcattgacatgttctatatatgcttactttatttgaaaagaagatgacattatgaaattcttttattttggatgtttatgttactttttgtaatgatgatacttaaattttaaagtctagacttttttatgtagtgtatattcattagcttatagaatctgctataaagatctcaaatgggaattgagtttttctttttcaacctacttatacaatacaaaagggtatgcagacattaagatgtttcaaaatgacacctaccttgtattagatattccacaagatccaagttttgggtgacttcttctataagagaaggtgttgtgtaagttatgagtgtgtttggtaatacttttttaattaatgttttgttttttttaattaaaaaagtaaaaatacttttcaaaaatattttctataaaataatttttattttttaattttttaatgagaattaaaattttgaagaaaaaaagtcactttgactcttagacctaaggactcgaaccttgacccctgaatttgaactcggactccggttctagaccttggatcttggcctcagattctattcttgtaccctagactctaacccttaacccaaatttggacttagactccgattctgggctaagtctttgaactagaccctgattctagcccaggcctcaaatacaaatttcgacccaaactcgatttatataaatttaacaaataaaaataaaatttacaaaacattttgagatgagtgctcttataaagtcttagccaaaaaagtctatatttttagtagctttctcaaaaaactcttggccaaacaagaccttttgaaagaaattccttcttttcaaaaagaaacaaaaggacgaaattgaaaattttcaaaataataaagggtttttaagcaaatagtaattttttagataatttaccgtacataacacctccttctcatttccgtctctcttccccctttattcggcccctgctccgttctccgccgccgccacccacaaacaaaaattttctcaccgttttccgtcgccgtttgagctcttcaccggccaagctctatacgatcgtcaccctcagcttgaaagtaagataataatctgtctcactatcaaaactatagtatttgtttgttgactccaattttttctctataaataaaattgctaaaccccaatttcatttttaagtattccttactaaaatggcagaaaataaatcctaagaagctagaagaggagtttgtcatttcaagtattcatctttttacagtattactttcgatttttgaacttgcaaatatacacttagttatttcataatgatgctttatatgtataattatgtgttcttagattgggtattcttatacggtcaaaatccatgattgaatccgaactacataatgagttttgaactcgtatgataatctaatttggatgtttttcatttttgttttgtgacttttaaactcatagaatgaggcaattcggatgttttttcctttattcttttgtcacttaaaattcatataaagatgtaattttgatgttttttcttttctcttttgtggaatgaaagacttaccatacaaagaatccaaaagacagaaagttcagaagttggtcaagctcagtaatgtggaaatcccatgttgtatctaggtctttctctagtggctccttactggaatccttgtttttcaagagaacttcatgccgttactatgcaaaagaggcttcatcttcatcatcagaagccagacctaaacaagtggtggattttcaggaagaagacctctttgtaagctctggaatcagcagacccctttcagaaatcctcaaacacctcaacaagaaagtgcccgattccctcatcaagactcgggtcgaaaatggactctcctcaagatatgtaccttggcatattgtgaaccgaattatgaacttacatgctcctgaatggtctggtgagattagaagtgtgtcttactcgcctgatggcaaatcggtatctgttatttaccgtgtgacgctctatgggactgatgcagagatattcagggagtctacaggcactgcttccttagaggacacaagttatggtgatcctatgcaaaaggcagaagcaatggcatttcgtcgagcttgtgctcgattcggccttggtcttcatctttatcatgaggatatgctgtaatctaatccatctaaatccattatttgggattatagtttataacaggtgacacccttatacacacactcatccaacagttgaccctacagggcaagtgtaatttttcatgtcatgttgagatgtgtaatcaagttgagattttgtattggtgtatgagactttatgttctttaggaaaacttttgaactcacttcttgttttcgatcactaaaaatatgtaagatgatgaaagtatgttaagtgagtttgttagattattgattgcatgagttgacttagttgcttgagtatgtaaataaggaacaaggttctcaatcatttatcttttggatttgtattagtttagagtattttaggtttagtttcttatgttttgcttgttttatttattttgttcggtttagtattacgggacccgtttggtacagtttttaaaaaagttaaaataactgtgagaaaaatatatttagtacagctagtataatctaattttttaaaaaaagtgttttaattaaaagactaatgaatttgtttgtcttaaaatatattttacttatttattatatattaaaaaatatttacaataaataaattataataaaataaataatatttaaattttttatttcttgaaattattttataatttatatttttaatattaacaaaataaaaatataatttaaaataataattacaaaattgtaaaaataataattcgttgtgattttctatcattttgcataaattattatgtcttcaataactaaaataaatcacataataacataatgtttaacacttttttaatgtcatgcaattttagtctgattcaaataaatcacataataacataatgtttaacattttattaatttcatgcaatcttagtctgattttaaattacgtctcatttcattcttaagtgtaaaataaactctcaatacttaatcaagattgcatgaatttttttttttttttgttataggagaaaattgaagcaaaaaactattaaataatcactttggtttactagacctaacaaataatcatttggaaaaattacatctagatacatattttttttttgtaatcacatctaatcattttgtgaatgttacttgattctatggcccctataaccctatttaaatccctcctttaagtccatgaacatccaatttaacattagtaacaactaatggttttataattctgagacatattcaaatgtgagacatagcgtttcagctttgagaatcttttggctcttctatttttgctctaatctaccttatagtttttcttttaataagtttaaattgattattccaattgccaaaggttttgtttatttattgggctttagtttttaattttattctcagtttcttttttgtttttaattgctttcaatgccattttttttccgttaaaacctttaggaggcgtttggttgggaggaatgaaaatttaggaataggaatgggaatgg

SEQ ID NO: 118107 - DNA, 1076 bp, Cannabis sativa
tttaacatagtattatataaaaatatgatatataatacaattcaatataatacaatacaatacaacctaatacgccgttccaaacgaactctaaaggcataattttatacttttaaaagttcaggggtatgattatatcaaagttcaaagacaagatttagtacatagacaatcatcacattagtaaaagtctttaaatttagtacaagatttagtacaagtctttaaattcaataattttaataattcgagagaaatttttagcagcttaaaaaatttaaaaggtatgatttagtacatgttattggataacaattctaattagcttttattttgggtttcttgttcgatctctgaacaaggcaatcaattgtttgacttatgctgctttttattttttagattatcgatttagtgagggatttatcctagctattatactattttgttagcgaatttacacatttaataaataataaattttcagttaattttcttgacagaaataaataaataatttagttattttttagataatgcatttaatttttgattctatatattaatttttcctttttcttattttcacaataacttttttccttttttcttttcttaatgataagatttatgtttttgctttccataattagaatgataaaatttgtacatatataaaaagtgttaaaagactttattattacttccctttccttcactttccaaaatattctcattcttctttattgtgtaattaatttcttccaaacatgggaaaaacataatagaataatgatgtttatccataatcctttagtaggagatatctatctactttacttcatatatgtaaatgaatttctatattattcattaggaagaatattttttaagaaataatactaaggataatagtaaatttttaatttatacaatgccaacttaatcataatatactatgctagccattttttatagaaatttttacatgaaaaattcattttacacaatttattacaaaattactcatacacgcttatacctacttttttacttacaaagtttgttttattaca

SEQ ID NO: 118108 - DNA, 1899 bp, Cannabis sativa
gatttaaagattttatttaattgtcttcaattttattaatttagtaattatttatgtactaaattatgttttaaattttgatatttactaaattatgcttctcgaactttaatacatattaaattatgtctcttaattttcatctatctgaaattttttttattaaaattgattaaaaaattttaaatttaataatttcaataatttaaaaagatttttaacaattttaaaagtataaaaaatataattttatacatattaaaattggattgcaaaaattttatttaatttatgtccacattctctctttttaagaatgatgagaatccaagatcttcagagtcactcaacttgttttattggaccccaaaaggtatggtgtaaaatcactttatataattggtagaatgaatacattgccttagattgaaagcttagttttttttcttttttttttaatcacaaaatttgatagtaagttttactgtaatgtatgtacacaaaccaaaatcaactaaagtcaacatttataatggatttttacataaaatgaaattttggaaagagtgttatttggtggaatacagtataaaaagtgctgtctccaatcattgacagcaaggataacataactattagatgggtatttcgatttagaagcttaaatgttcttctaaatataaaaaattatattacaataacatgaaccacagatagtttatacttgtttgtttcccgggaaagttggcggttgatgatgataatatatatatggacataataatcttataaataaataaaagtgtcggtgcatgtgagaatatgattacccactttttctttgtttggaatttaaaataaaataataaaaattaaatgaataaaatcataagagaaatgagatttggaccaatcacatgtatcccatcgttgccacgatcatcaccgacgaaataggttcaatagtcaatttaattcaaatatatatatagctaagctcagctggctgctttgtttcctttttatgtgtttttgggtcccatttttattaatgtatctaatatttttgtgtgggtgtccaagtgagaaattttgtggcaagggtcttatcgaaaatgaggggaatttatagtccttagagcacttacaggggctctttaagttttcaaaaatattgattccgaattcggttcagtacagaattgggttacacctgaatccggtctactaaaattgaaatttatttatttttctctcgagtttttcgggttttgggttgggtgggtttgccatgtgggtgggttctcgagtgtaaatgtgcactactattacaaaataactatcatatattatagtttaacttaaaaagacaatttagtcaatttaagtattttgtttactagggatagacatttctcttatggtgatggggcccgcggggacccatccctaatagattggggatttttcgtctaaatgagaaacgagacagagacgtgaattactttttgttctcaaatgttaaaccctgacaggaacccgtttagtattttattttatatttttagtaatattttatactttaaaatttatgtttgcatttttaagtatattagtatattttttttataaattttaaattgtgttttagataataattagtttattgtaataattaatttttttcctactagtcacaatgattttatactactaagacgtgaatattaagattgttttcgtgttaaatttggttaaaatgatcccctaattaaaaaattgaaaacgttctacttttacggataaattttaacaagtttttccttactcttacacttgtttgtattctcttaaaatctcaccctacacatctcaaaaaatagtgaaatttcacaggga

SEQ ID NO: 118109 - DNA, 1215 bp, Cannabis sativa
actcagaaattctcattcactttctctttctctcttcatcttcttcttctttcttctcttctactttatattattttataacagtaattatttttaaccaataataagacatagggttgttaaaaaaaaataataggatatagaagagacaataaaaatgaagactaaacaaatttaaatctttttaattatgagaggcttgacccttattttgacaaagtagatgtatgtggtgaggttattaacttattattattatgtattaatgtaaaatgaggttggattatatactgtcgatggtggtccaaacgtgataacatagtcatagtgtccttcatttaatttaataaaacaaactttttgttctttttttagttaaaggatacttttaattactgattctctgggcaccttggattttgagaataaataaacctttattttccattgagactccactctccacccttttgtgtttctgacttgttaaacatttaggttatcttaaacactatttttatcattgtatttactatgtaggttccaataagcatgaagaataaagtgtgctttttttattttttatttttttatggggcaggaggaggttcttctgcccatatgtatttctttaagtggaaaatttgaatgaaataattgttaatattaatttaagaaaaaaaaaaagtttaaacaatggacacaagatccgaaaattggcctgtcattataagtggttaaatggcatataataaaactgtaacaggttagataagaatattgctcagtcttatataatatataaatctatttatgttcatatatataaataatataatattgaatgatgctatctatacacacccatttgaaaaaatgatgatgtacatccttgctaattatttacggatgtttaattttttaccaatcaacatagctaatgttagtttttatgcaatttttttgtcttggctatcaaatcctagaatttgatcaaaggaatatggatatctaactctctcaatttcaaaaagtggaacttaattaatgataatcatatactattaatcatctttcacttcttaaagaaaaatcgtaatccattttagaactgagtatcgattggattggtcagttttttcattgtataaaaatctaaaatttagtttttagtctggattggtacaatttgaaaactgactgaccaatccagaa

SEQ ID NO: 118110 - DNA, 1766 bp, Cannabis sativa
  modified_base (599)..(600): a, c, t, g, unknown or other
  modified_base (722)..(723): a, c, t, g, unknown or other
ccagccataaccatcctggcagcacgcatttcagccatgaaagcttcttgggtgttcctgacagttggttcgttgaccctagagacattgactaagtgactgaaattgtcgacgatgtggcttatgtcggtttccactctctgcatcaaagctttctgtctctgagccgccgcggccgctgctgccgctgtaggtccggttcctccggcgcctcctgctcctcctcctcctccaccacctttattcatctccttctctaactagggatttgattatactcacaatatactatacaattgggaattaactaactaaatctaatggtgatgtaacattctacagatttttgtgtgtgatgatatgatttcagtctgagctctccgatggttttgttggggttggagttgttcgggatgagaggggactggtctggccattgggcctcaaggcccgattttctgtaaatgtaagggaaacttacaaaaaggcccgattttctgttaataatgtaagggaaacttacaaaaatattgaaattcgagttaatttttacaaaaatactgtcacacggaaatattttcaaaaatactgtgtttttnnaaaacaccagtagaacacaaaacagagcaactcaaaataacagtaaaacaactaaaaaataccagtagaacaccagtgaaaacttaacacaatataccgcagtatgaaacttataaaaaaanncagtaaaaaaataaaaaataccgcataacagtatttttgtaaaaaaatagtgaaaattagtataccatgtaaattttcttaatgtaattgagttgttacttttgagggtgggcctctagctgggcgttaagttggagcgggtggggactcatgcttctactaaatttaatagggataattacacgaggcactattttttataaaaaaaaatacatttttacttttacaatttttttttttatatttttacggtttttcataaaaacaacaagaaaactacataaaggtaacatctaaataatatcaaaacaacaacaaaaattaacatgcagataacaaaaaatcaacaaaaaattaataagaatataacataaaaagaccgtattttctgtaaataaaataaaaaaaacgtaaaaatgtttaaattttgtaaaattgtatttttgtaatttttttgttgtttttgtgtatttgtgaaataatcccaatctaatagagattaaaacaacaaaaaagaatataaaatatggaattttaaataattttaaaattttttatgattttatttataaaaaaatatagtcttttaatgtatttttatgttgtattcttatttatttgttgttaatttttttattaaccacgtgctattgattttttgatgtcccaacatacataaaaacataaatcatttatctattgtcaaaattttatgatgaagttaagattttgtagttatatgtgtaatataaattttacaaatcatttacacatgagtaatgtgagacaaaacatacacatattttttttaaacaaattcaatcacacacctaacatttatttaattaccaaaatatattttaattaagtttcattttttataaaattcaatcacacacaccacatttatatcttaccaaattttatcatcggtttggtaattatatataatgtaatgactgctttagtaatttaaattagtaaagacaattagcactaatttatattattttattattatttataaatttatttaattgtgg

SEQ ID NO: 118111 - DNA, 1860 bp, Cannabis sativa
  modified_base (1807)..(1818): a, c, t, g, unknown or other
aatgttacaattctcttacacctattactacaacttctgttaactcataaatatgaacacgtggagggtccaaatgcattatatttatttattttattttaaaatttaatattctttacataaaaaactaaatgctacttgtttcaaaaaacaataagagagatgcaatataaaattaccatagctgagtgaaccagtacagtatatggaacatgattatcgaattaaagtgccaatatcatgtaaaaattattaggcgaattgttttgttttttttttttttaaaaaagtaacatttaatttctgatatcaagaatatcaagttttaaaataaaaataaataaatgtaatgcatcttgatcctccacgtgtccatatttatgagttaacagaagtagtagtaacagatgtaagagaattgtaaccttgggtattttttcctccaaaataaatataagatatttaagtgtataaaatctaaaatattaggtatttaaaccacaatttaccctatattaatttatgttgtggtcttagaatagtaatttatgtaattttttaagtgtttattttggatgccacattaaattatattcactacaaaaaacaactacttttagtgataaacttttagtcacaacataatttttgtgtgactaaatgtgacttttagtcacaacaaaagttacttgtgactaaaacatagtttttagatacaagttgtcactaatttacttttagtcacaataaatattgtgaataaaagtacatttagtcacaataaattgtaatttttgtgactaatacctttagttacggactttttagtcataacataaaattaatatgatttataattagtcacaattttttttttacttttagttataagttttgttgtgactaaaggtaatatttttgtagtgattatatatcttatatattttatcaaattgtgaggtatatcacattttcatagaatactatgttaaatattggttgatattataaattttatatttatatacattacaacttccaaatttattctaaaaagtataaatatatagtactatataaaatatgatataacataattaaaataattaatatttactctatgaccatacaataccactcgaataaacgaaactaaaatctagaatacataaatttaaatgtatacatatatgtattataactggttcaaatattataaaataatttaataaaatgttaaaaaaaatattagtgtatctaataccacacaaggagttatattgatattgatacaatattaaatatcaactttataatcatattagaaaaattttaaaaaatattaatggtgtctagtaccacctaagaaaccatatatattcctaatacaattaactctatggcgtgtttgcaatactattagagatatgattaaaaatattagtagtgtttaatactgtcgaaatagtatcatcattagtacaattaaatatcagatcccacataatatggtataataatttttatagattattactaatctttcttaaaattagccaattattagatattatattaatagggtgttggacactttaaaatatcaaataacaccattacataaaatataatattttatgtgtctaaacatacaaaaataaaaaatatacataacaaattaaaaataatttattaaaaaaattaagaaaacacaaataaaaaaaatcaaaagatgacaagatgtcatcaatctccttatacataaatataatatatatatatatatgtgtgactattcaatggttannnnnnnnnnnnaaccatatggttacattttttttaacctgtaatagcaggtta

SEQ ID NO: 118112 - DNA, 1122 bp, Cannabis sativa
  modified_base (1093)..(1095): a, c, t, g, unknown or other
tgagtagatctaagatcctggtgaaataatttccaacagtcaagtcgtcataatgacacctgaggagataatcgaacatatggtagcaaggaagcttgaaggcatggaggctatgattaatagaatcccaggagtccctgcacctataaaaaagagcttagcaagtagcttcgtagactccccattcgtcgatgctttaactctcgtggagatgccgaagaagttcgtcttcccatcaatgaagatgtacgacagaacaacaaaccctaacgatcatatatcgagttataagtaaacaatgtttacagtcgctatccctcattaattgcgagatgcttgtatttgtaaggggtttggttctagtcttgtagggccagccctccaatggtacataaacctacctaacaattttgtttcttgatttgctcaattaactagcatatttgtggagaaatttaatagtagcaagaagttggagaaattgtctgacaatctttataggatcaaataaaggatgggtggatcactgcgagattatgttgctaggttcaacgcagagaaagtatctgtaacctcatgcaattctgaaaaggcctaatggtaaattctgacctttataaagaattaacaaaatatccttgcaggactatagaagatgtactagccaaagctcaggcccaaattaaatggaaggaagacgagtccaacacgcatagagcacaaggagagtggaacacaagtacgtacgcatcatgagcatacccaacttccaggaacaacagacaaggatagggaccgatgcgtaggtttccttcaccaaggccaagagaacacaataaatttacaatatattaaaatatgtatacaattcacattctattcaatagtcaaagataattttaccttgattataagtgtgtccattctacaggtacgtgatcattattattcaattccacacatgatatatagatttaatgcactttaattgtgtgtgattttttatcttcttgttgtttccaaattcttttggaaaaatttaagttataaataatatccttgattatttaaaattattgcattcacttcaagnnntgacgttgaacaagtagaacattatta

SEQ ID NO: 118113 - DNA, 1769 bp, Cannabis sativa
gtaaaaattaaaacaaattaagtaaagtggatatacaatgtaatttcctcgagtccgtgggtctgtggtcatggtggtcgtggagagaatgaaccaaagttgtgggtggtgggcagtgggttgtgggtcgattgtgtgcttctccgtgtgcgtatttacaaagagcaagagagaggaggaaagagagagagagggttgttcaaatgagaggggtagaatgagattttaggaaaaaatgacatattctactaatattgaatagagcattgctattaggcaccagtagtgcctagcaccttctcgacatgtcatgttgcgattgactagcgatactccctaaaactattatattaaattacatgacacctgatacttagttgaaccaataacaatattgacacataagagaatgctaggcactactagtgtcctttaacatttctttattgaatagtttaggtttgaataatgctaaagtacacctttggtgcctacagagcaaaaattttagtaaaggcataattaatcaaatttcccatttataaatggtatatttttacaacttttttataaaatccgaactccgtctccgactcaatctcttcatcagccttgtttggatctctttcggtttctgccactaactcatcatcggtaccctacaaatataatcaacctccttcattaattatcggagatcggagaggaggaactccgtttagctcattggccggataaacagttacttcactcgcaacaggtaatttacatacggtttttgaggctactaatgaggattaaatacagagagagacgatggaaactttgtctggctatttgagttttctcaagtgattctctctgttttgtatagagttctacattcacattctacaggatatgatttagctttcatccaattctcttttctttcattttttcttctttttaataatagttaggtttgtcatgattagtttttaatgtttagcacttctaagatttagaatttgtgttatattattactatttgaaacgttataatatgaatatgtgttaataatcataagcgactttgttctaatctccatggttttgagattttgttctgtctttttccatttgaaacgtttgggccagggccaaagaaagttccataattttctgattttggttcaataaaaaaaattctgtttctttcatgtgaatcccaattgtatggcattcgttcctgcatatgttttatttcggaactgtgttaagtttgggaaaattccatatcttgttgttgatgaagtgtttggtgacattgagaaacttctctccaaataaaatctaatttatggtgtttctaggcaatttgaattgtaattactttaactagtggcaaataagttacccggaacaatgttgtgatgttgattggagagataatttgtagttgtttcaaaatttatccggtattttaataggggaagcgaaataggcattgcgtcatttaatagttaccaattaataatctgtttagagaagttttgtaccaaaatggacaatatttcattgaacagctaccaactagtaacttgtttagagaagttttgagcaattatggttttttcatttgcatctcttcagcattagcattgttttagtatttgacatgtttctgttaaaactaatagagtttttaaaaatgttttgttaatccactagaaattctgttagattggcatttattatataggtaagataagataagataagataag

SEQ ID NO: 118114 - DNA, 1807 bp, Cannabis sativa
aaatcatatgtctaattaaagatgacatgtaccaaccagaatagattaatcaatgatgaatatgtcgaaaaaataagtttgccaattagagaaaagtcatattaaacatctagatcaaattaaacagcactacagaattttaatttgatgatgatgacataaaactaaaaccaaacaattttcgctataattcagaagcagcattggacaagaataaactaaatgaatattatgattatgaactgttatttgtaccattaaaagttattcaagtacagaaacatgttcaaacaactaaccttggagaacacatctcgatcgcgtaagctggaagcagaaaaagataactgcacgttgcattgtatcaccacgagtgagcaaaatttagaacattaaaataaattttaaagaaatttaaaaaacaaatgatgataagcttaactaacactgtacttaatcagtctgacgacaaataaattatgcacaaaaaatacataaaatgaattcaaagaacttctaaaacaaactaaaaataatctaattaggataaacaacgggttttgaactcaattcgtacttcgtacactggaatttgcttctaaagtcactttgagtagcacgaattttcacacttttaagaacaataatttaaaaaaatcactaaaatgatgaatccacaacattcaaataataatgccagagatctccgaacaagttcatagctgtatccaattacaattcgaaaagacttgagctcgttttcgaatctaccagtgaaccaacaaaacaaagaaagctagaagaaaaacttaataagaatatctcaataatataaacggagaaactacaaaataagaatcaatggcggagtttgagagatgagaacctcgatctgagagaagcagccctggtagccgcgatacagaaggaatcgttcaacggcatcgtttggacctgagttgggattggcatgagaagcagaggtgccgccgactgccgaccggccaccggcttcgtcggagcagcagttacccatttctaatgctcttttcaaattttcttttttctttttcttttttcgtttgaaaaacacaaaataataataaaaataaattaaattaaaaaacctacgagagactgcgggtgagactctcctcctcttctagtcgcgccttcgcttaattattattattactttactgttattattattattattaaacattcataattaattaacttttattctttttcatccttttatacctctcgcgtgttctttccaaagaatttgtttatgagccatttttacggtgaggtaccttttataaatttttagtggttttttataatatttacttggaatataataaataggacatgatattaaattgtattgttaataatattatacattataaaattattcttaatagagtgctaaaatgtagtacataggtatattttagcacattttcataaaaataaacttcagtggtaaagtataaagtagtccaaatttaataaatattaaaatttatgttaaatttatcacaatataagtcaaattttattttacactacaataaatataatttttttatttacttttttgtcatttattaatgtaactaataactttacattttattaactttcaataaaaatttaatgttttttttacgatttttttacacttttttatatataaaaaaaagttaattttaccttaatgtatgagaacaccattataaattttggatcaaatataatatttacttatttttttttaattaaatttaactta

SEQ ID NO: 118115 - DNA, 2151 bp, Cannabis sativa
  modified_base (328)..(329): a, c, t, g, unknown or other
aaaaaaaaaaaaaaacttgatacacatattatgtcatgcaacttgtctctttttctcaacatctggtaagtataatttgaatttaaaacactaaattattatcatttctgaaagcataatatgattattatttgtccattttttatgtattttagagagatacatgttttagagtagcttgcttttcatataaaataccatattatatatgtgtctgaaataaaaatagggggcatgtatcaaattcaaaataatatttaattggataaatattattttggaccttttattttgtaaaagttacaattagactctctattttgttaanngacaaaatagaccctgtattttttgaaatagtacaaataggaccctaaactgattttttgtcaaaataaaacttaataataatccgacctagaggtgttagacaaaaatgattaaatttttagcatctgttcgtgttgaaaattatcttcaagttggttatattaaaaaaaatatcaaaaattgagcttggggtcctatttgtactattttaaaaaatataggatctattttttatttaacaaaatagagagtccaatctgtaatttttacaaaatacagggtccataatagtatttatcttatccaatttaatttgcataattaaaggaaattaaatattgattttcttaggtcaattgttggttatgtgtatataatgttttgcataaaagagtagaaaatgaaaagtattgaatattgtctatatttagtcataattgattggaattaatcattggttcatatcttttatattgttatgtatataacagattttgtggtatttttatggtagggattggagctaaaatcatgatcttagctttatatggaaagtttgaaagattttgtctgatatgtcaatacagattgcaattctgtcgcagcagattggggcttattttaggaaagtttctaacagctataaaaatgtatttgtggttgtctctaggatttttctatatcataaataggacctagagagcaactaaatatttttcatctcttctagtcttattgtttgatattttcctctttgtgagaagagagtttcttgtgtgaaaaccttctaggttttagtctctgtatttttgttctttcaatgtcagaataaggtgaagagtttcattgaataagagaagaagtctttgaaagaagaattatccatgacttactttcagagaaagtaagcacgctcatatcaaaagttgaagagagttcactatttggtgtgattcagagatcatattggcaaaataaattacaaataattgtggttaagctttagacggagtctaaacttgtttaagtcaattctctgtttgtaatttttgagactttactaattagtttttttttttggcgtagcttcgtggactagtagtattcaaaaaaatactgataacacatataattctgctgtgtcaagttttagtttctacactatttattcatgcaactctgatttttgcagtaacaagtaacaaacatgttactgtaagtcgttgcagtttctatttaattataattattgtagaattaaattattttttgcaaaacaccaatcttcctaattattatacataaacaatgtgaaagaatatgaaaaaaattgatgtgtggtataatataaatatgtaagataaaaaaaaaaattaaagaactcagaatagagtagctaaaatagtcaatagctaaatgatttagctaagaggtaacaaatgatgaaaaatattctccctcaaatgaggtattatagccaagagttttagctcatgaacattgtttagctacatgtagaagaagcactattcaaatatagctataaatattatattaatattttttaattttttttataatatgtgtgtgctattattattatatttatttatttattttcttaaaatgaataaaatatattaaagtaaattatttttaaatgatatagagaacatatagagaaatgatgtatgcagtggcggaaccagacaaaaatctgaggaggggccaaataggaaggtcaagcgaattgtatttttacctatttctttttagaaaatattaataaaattaggctatttaaaaattttataaccttga

SEQ ID NO: 118116 - DNA, 1238 bp, Cannabis sativa
  modified_base (198)..(202): a, c, t, g, unknown or other
  modified_base (1200)..(1207): a, c, t, g, unknown or other
gtccccgccccattaggggtggtacctgcgagtacccaaacccgtggatataattgccatccctaactctaattttaaacaaaaaaaaaacctttatactctcagtttgtctttccctttcgatatttgtatacagtagaacctctatttaagaatactctattcaagaataacttctaatttattatatatatatannnnnatatataaaaaaaaaaattaatcccaatttaagccaattataaataagaataacatctaaattgtaatcacttctaaatggataataagattaaaacacacaaaaatatccgattcaaaattgtagctaaaatttataagtaatattaatgccaatttttttgcaactaagcctaaactttgtaacattatttgatgtataacattccttcaagaatatctcgcctctataatttttttttttatataattttatacattttatgttttttattaatattatttcaaatttattttattacataattgtttatttggtatgttttgtggtagttttatttatgtgtcagtataacttgtttagtaccacatatagtagtttgacgtttaaagtactttcagattcatcctaagaataatatgtagtaaaagtgacaccgtcgactcaaaagaattcttagataaattttttattcacaacaattattatttagaatgttttttctaattttggaatttaaattcctattttcattaaatagagtgtaacattaactgaatttcatatatttttataagtggttctttacttcactcacttgtttattcaaggatctaaggagttttaatgagataaattcttattacaatttatttttaaaatttactatctcttaaacacaacatatattctaaattacttattttaacatcttttaaggaaattactaattgttttgcagaagctctaactttattggtaagactaagatagattcaaaacatcttattttcagacattaaaactttcttatctagttttcctagaccatctctttcttatattagttgtaattttatattgcacctcaaattggctaaatatgtcctttggatagataatgagttttgttggatggaatagagccctcctcaatgttggcgctttctttttctaatcaattaaagtgatcatgtcaaaaatatatatatatatannnnnnnnagcaaaaaactacgtgcgaggcacgtatact

SEQ ID NO: 118117 - DNA, 1597 bp, Cannabis sativa
gtatttattcgtgttagaaattgtatttaagttgattatattaaaaaaaaaatattgtcaaaaattgaactcaaagttctatttttatcattttaaaaagtagtgtctattttatcattaagaaaataaataatctaatcgataactttggcaaaatatatggtccaaaataatatttatttttttttaaaatacaaatacaagattatgagttctttgatcttgtatatctcgtgtgtttttaataatatttgaaatatgttgaaaattattaatcaacaccaagacacaactccaaatctactaaatgaaacaatggtgacaaaacacaacaactaaacaaataatcaaacacaataagaacacataaacatgaacataaataaaaagagaagaaaaataccaagttttatcctagtttcgatcttagagatcaaatcgattcctagtcatactccaactgagagtcattatcatgataccaatatgaatgtgttgaacttgtacaatcactaatggcagagatcaagagctttgtattctgtcttgaagaacagttatagtttttccccaaaaatcccgagtatacccttaagttcttagcctcaaaaaacttgattctctctttctaaatttacaatacaagctacaactagaaaaaataggataggagctatttataaactatcgctcgaacaaaattataaactgtcataacagaaaacttagtgaactaattaaaccagttccaactaacttaacaacggttagtcaaattagttattcttttagagaattaacttcttcaaaatatatatttatttattttatatttcaaatatatatttggtatcttaaaattaaattttatcaattatttgaattctaaatatttaagatttttatctttttaacctcaataatttttataaatataattgtgttagcctctaaataaaacctcataaagcaaataaatggtaaataaggatatattgtgatgatatttaaaaatatatatattttaagaacatgttcacaaaagatttgatcaataaggataatgtaaatgtaatatttaatttatgaaaatagtaataaaaaatgtaattttagaaattagaattgagaatgaaaaaataaaagttatatgtagaaatcaaaagaacaaaaataattaattaatattaatatatatgtatatgtaatatataatttgattgtattatgaggaccatgtatgtcattatcaattatcatgaaataatagatcagtttagtttagtgtgtggtctaccttctctccatatactttggattttggagattatattttcaatatcataatttaatttatatgccatcattaatgaccacttcttaaatgttcttttaaaaaaaaaaaaaaaaaaattgataaagagcactaataatattcaatatttttttaatttttaatgtaatttaatattgaattctaaatattattttcatttaataattgttagatgtatatgtatatgtgttttatattagatatatgttaatttaaggttttttatttttatttttatttttttataaacattccttataa

SEQ ID NO: 118118 - DNA, 950 bp, Cannabis sativa
gtttaggaaaattagtaaagtggtcatattttttgtagtataaaatgtattgatttaaattttttttttaagttttttaagtatagaaaatcaaatttgcttatggtaatattcaaccaagcatgtgataggcaaagaatctttttattgctcttttttaatgaggaaaattatgatgctttggttaaagaaaataactacgagataattaataatcaaacttatattaagcatattctaagttctaacctatcttaactgaaagaaaaactatatatatatacagttacagtatacgttgcacaagtactaaattattagttaaataaattagtggtaacttatgttaatacagtactttctctttttttcttgggagaatagtccaattaacgtttcttgttaattaagatatatatagaaaaaattaattggaccttggaaagaaaataaaaatatattttaagcaatcgacttatgttgttgtcggtggccactggccagcacgaaaactgtttctttaagctattctactaattatgattctcttattaacttcttaattagctgtcctttttataaatcgaaaatataaaaaattaagtaattaaacagtgctatgtatgtggtatataaatagcaaagttctctttcttttagactttagttgttaagctagcttttaaacaaaaccaactttatacatatgtggttgtttgagtaggtgtaaatgatcaaatatactttcagatttagctaattattacttttcaaaaattatatggaaaattttggacaaaaatttacaattttactgtcacgttgaattttttataaaaatactgtctttctacaaaacaaaacaattaaaataacaatgaaacaactaaaaaacaacaataaaacaaccttaaaaatttaacaaagtacacaatattttttttttttta

SEQ ID NO: 118119 - DNA, 1794 bp, Cannabis sativa
aaattgtaattttattgtaattttttgtaactttgtaactaatactaatacctttagtcacggaccttttagtcacaacacaggccggaatgataattaataattagtcacaacttttttactttttgttacaagttttgttgtaactaaaagtaagattttttatagtgatatacattatgcatttatatatatatcattaatttagagagcatatgacatgatgatacgaaatatggccccaattcaaacgtagtggcaacaattttgaaacactgttttttgcatcatcaaactatgtgtggaaaactattacatattctacctagctaattgtacattgcattatttagttatttgttttcgccaggtatttatgttgaaacaaaacaaaataaggcccactcgaagagaatatatatgattacatagggaagcaaaatgaaaccaaacggagaattcaaatcgacctcaaaaggatctgcaaatatacataaatttatatacattggagctcgtattgggtcatcatgaccacatatttttttatatatacatatttaaatattatatatatgtgtgtttgtaaatcggtggttgtactactaaactggtagctaccatatatccaccccaaacattgtggctccaaagagttgatttttttattatataaaaaaagtagtagtgtagtggaatttacaaaaaggtttgattgatatagatggatcatataaaggtatataaaaagtggttttgagagaagaaatatatggtaaaaatgctatcctttctatttgtggctgttctagcatgcaggtgaaaaatcagtggttggtaccagaatccatgtttaaaacaaaaaataatttgtacatcatgtaaatattcctgtcatttgtcaaaacattatccacacaggtatatactgactaaaaagcaatctagctaattgacatattatttgtgtggtgttggaatttatatgtccacaaagggctattacaacttatttataatatggttctaatattctatgcatatatatatatacattataattttgttgtggttggtgatattttaagcttaatatcagattaatatataaagtgttacagataagctagataacatgtatatataggatatggtatataacaagatatatagaaagcaaattactaatggttccacttaccaaaatattgttctaattatattctttcaaatctatataataacataaaaaaatagcaaattgttaattcgatcgtgatcacaaaaattaagactttttctattttgggttataatactactaaaaataaacatttataccattaaaagaaaaaataaacatttttaaatcttacatattttaaaaatactatatttaaaattttttatttacaaaattacggttggaaaaaaacaaacccagatgtgcatgatgaagtgagctacacatgtggatatatgcacgcaagtgagattcacacgcgagtggagagaataggcatcaaaattggctgacgcgcggaggactgtagcatcagaacgatcgtcaatggcccccacgtggcaagtttggacgtagtgggctttgttctgttggcttcttttctcaacacaataataacgcaaaaataactaaataacaacttaactttctgtaatatccagtttatctacatatattggtatttggtatattaagtgtgatacaattatattgttattattattattattattattgttgtaaaaatgatatatatattaaatagtgag

SEQ ID NO: 118120 - DNA, 965 bp, Cannabis sativa
gagagagagagagagagaaacggtcatgtggtgatccgaagaaaaataagcgagagagtgagagagggaggtggtgagatcgtgatggtcactcttgcagcactagcttccacgaagaccaagattcgaggagagcttttcaacgagtcccagttcgacacacataaacagacgcatcagatgagacagcctagcctaggattaagtggacctaagatgccccttgactctttctaatggataatacttatattattgctgttatgattcatatattttggagaactttcctgcttttctgttatcatttattatgatccacaaataatagcaactctaaactttattacttacttatctttaagctaatcactccacaataatgtagtttgtagtaattgctgtttctaacaaacccaataatgtaactaaactagacaactaccaccattggattggattagcttcgccacgcatctcattattgatagttttttatttcctccaaaatttggtagtttgaaaattgtgttgatgatttgatgttaatttacatgctatacaaattattcccctttaataattcagattaaagtaaagtagtgtttcttccaacccaactttttttttttttatctttctcaatttttcagtttgtgtttgtagagcaacagacattgagggccagtatataaataacagtaactggggtgtccctgggcctgaatccctgcccaacaccagggctcagctgttaatgtgtttgtatcaagaatcacaaccaacatgatagtgaaataaaccattaattacatgttccccctccactaaaatttaaggagagttttctgaagctattagaaaatctagaattttaaaatagggcaatttacactaatgtatacattatataattttattacaatatatgtgcaaaataatttattttcatataatcatacatt

SEQ ID NO: 118121 - DNA, 1742 bp, Cannabis sativa
gtatttttgccaccaaaaataaacattaagtatttaagtgtataaaatcgtaaacattaagtatttatgccgcaatttaccctaatttttattaaaatataatataaaagatataaattacactaataaaaatattacattcattctactcgtaggttcatattttacttagattcggtttcttcattcaactgattattattaattaaaaattatatcataaatggttttaaggaataaactattattcagtattcacctctttaaagaaaaaaaatttatatataatgcaggtagttatatttttttcaaaccaaaccgcatatataatttttatctttttttaagttacaaccgcaccacgacatcttaaaattacaaaattatactgtaataatatagtgtaacgcagtgcaatttaagcgatttacactatcattattatcaaatattataataaaaattttaaaagcaatctaattaagttttaacaatacaaaaaaaaatatattatcaaaattttaacatatattctatttatcaagtccttatattgaattgtctctagaaaataatataatatacacatatattgcaaatatatgaaaaaataaaataaaaatcatattactttttattatataatatggtgccgtttgaactataattattaaatttaaaaccgcaaaccgcactacacttcgcgttttggcaaaaccgcactacaaaagattttaaactacattttttatggagtgtggtgtggcttaagcgatttgtgcggtgtaggtgttttgatgaacacccattaaatatggtgtatatgtaaattttacctcatttttatagaagtaaactctaggaccatatctgagaaatgtataaaatattgtgttatatttgataaaaaaaaaaaactgtgacatatttagattattgtgctgcataattgcaaaaatgtaaatttaatgtttaattaatatttttattaaaatataaaaactaatgattttgttattattttattatagaaaataaaatatatataaatacattataatttaatgttataactacatataataataaaataatataaataacaaaaaagtaaataaaaaataacatatttattaggctaattaataatttttccccctaaactttgacatgtactaaatcgtactccctaaacttttttggctgttaaaaatttcccccgaactattgagatttttaaatttaaggacttttgtctaattttagtaaaaaattctacatggatgaaagttcaaggggcatgatttactacatatcaaagtttgaggggcatgatttggtagatatcaaagtctgcgaagcatggtttagtacataaacaataactgaaaacagtaaaattgaatgaaattattaaatgctacagcagggagtgcagcacctgctgcgaattcagaaaaactgagtcatgtcaagctttggcatctcagattagggcatgttagtcaaagaggatttgaggagttgaataaacaaggtctgttcaaggagaaattgaaagaagaacttgagttttgtgatgaatgtgtattaggaaaagcctgcagactgaagtttcctaaggttgagcacaacaccactgaaaggcttgcctatgtgcactcagacctttggggaccctctagaattcaaactaaaggaggagctcactatttcataagcatggttgatgatttcagtag

SEQ ID NO: 118122 - DNA, 1385 bp, Cannabis sativa
  modified_base (1345)..(1348): a, c, t, g, unknown or other
tatatatatatgtatctatctctctcatatacccctggacacacacatgcacaaagttttaatttttcagttgatctagtttacttaccctacataacttaatacgcataactgagcttcatttatacctttaatttcactacaaaacaaaaggctatccttaaaactaagaaagttataatttggcattcaataaaggcatgcctttgaatttcttaaaacccgtttaaatcccccagagtccagataattgacaaataaagccagcaataaatccaatactcaaaatttatacatgagtacataactacatatatataatgttatatttaaaaaataaatacataaataaaagaaacaaacccctctttagggcggtcggtagcagaaacgggctcatctttggcggtgaccgcgtggttaaccggcggtggctgaggatggatagaaaaagtctggaaggcggatggagtagggtgaaaattagggttttggtgaggagcaaaacgatcattgagctgaggaggcggagggtgaggctgagactgagactggtgctggggctggggttgttggtgttgctggggcgcagtggggtgagctcggaagatgaaatggatctggtttcggatgaaatcagccttgtgggaaaggtcttggcctagcttcttctccagctcctgaacaaggtcgtttaaagagttgattccgctgttgttggacgattcctgaattagggtttgcagagcctgcgaaatttcctggtccgttaccatttctacttctcactgctttcatatatttcaccctctttctctctctctctctaaaagaaaagcttatctctctctctctcctcgatcttacatttctttctctctctccttggtaatgacaatacagtccacaccgtatgagttttacctggctaccgcaactgttactgtttgatttgtgaaggtctaatcaatatttgctacgtgtcctaaagagcatctgtattgggacaacactcattcttgctaaaaaatattgttattgggcactagtactacttagtaccttctaaacatgttgttttgcgattggttagcgataatctctaaaaattattaaattaaactacatgggacccgatacttagttggaccaacaacgatattgagacatagaaaggtgtttgacactactggtgtcttttaatatttctcgtaaatacacacatcatcctaatttttttttttaatttctctctcatccactttgaaacattttttgacaaaaattacttcgatggtgcaattacccaacatgatgttggaatatattttaccaagacctagannnnctaacaagtatgtttttaacatcttaaatatgaattt

SEQ ID NO: 118123 - DNA, 662 bp, Cannabis sativa
caaaggttggccaaccatgtacgaagctttgtaaagctggctggccaatgctgtagttttgagaagctggttggccatagaagcaccatagagggacttgccacccagtacctatttctagcactaactcagttttattttgttttcaggccctgttgaagttaaacctctctcatggcaagaccaacgggtcctcgagtgctctccaagagaagcttaaggcctaaaagatcgagcttttgataaaaggggaaatccctcaccttgcagaggctcttactgtgtagaggtagggtgtgatcactagtttggagtgcatgcttaacatcaggaactaggagaaaaatacacttgttgttgaggcctccaggtaagaggtggaacttgggaagagggacaaagcactgaagcttgcctttgatggccaacaatccattaaagacgagtatgttggcttttcttcagaggtcttatacgaggttaagctacaaaacccttatgttgacttctcctacatgggagcctctttccttgaaagaacattggaccaggggagagaattgtgtgagagcaggatgcaaatagacaagaccattgtcgagcctgaagagtcgtcatctggccactttgatgaggctatggctgacacacctactgaggag

SEQ ID NO: 118124 - DNA, 1312 bp, Cannabis sativa
taatacccatatatatatatattgatgtttcaatacattaacaatgtgagactattaatagtaatacacattcctcacgtttaagcctcatatagtatggatataatgaacaatttttaagagaccacaaggtcaaacattacatttgaaagaatgatcctacaattttttgaaacaagtcaaagaccctgatactaaaaattaacatacaatagcctaaaagtcccaaatgtaggtcaaagacggagataccaagagtttttaaattgttatatatggtaccatgttaaaatttaagataaagtacatggggtaattccatctcaatgccaattgtgtgaagactcggtcaatttgagaaaaaaaatatatacagtacaaaagtgggtgggattcacaaattttttaattattcaaatccctctccctcacttgttcactctctttctctccctctcccatctctttctttctttctctctcttcaaagcatcaaaaacccactaaccaccaccaccgacgtagctccaacgagcactttctcgatcaccgtctggcctcacacgataggtcaatcaaatccccaggcaccgatgacctcaacccacaagtggcaccgccatttttactgcggttagattaggatcgcgagtcattgttttgaggttcaaaatttgggtgcactttttgatcacctttttgatgagttgttttcaccattagacttagctcactgaggagaacaatctacactgagtcatttcacctatctctctactttttctggtaacgttttatagctttgccctttttcgatgatatcatatactggtgtgacaagtggttggtatggtgtaatctactcactatatgtggtcattttgatatatacgatccctatttttgatgatgttttaggtacattgattactaccatcactgattattattatgcaccgcttaggtgaggttttaaaacttcaaactttaaatatagtcatgttatatgatgtttgaatcggttttgagtgtagaatataatgatgataatcataggtgagtgatatctagtattagactaaataattggcccttgggacttgaaagcttaggatttttattttagacaaagtttaacgacttaggagaggtaaggactgatcaacttgattattgaacttgcttttatatatgttgaatgacattagacatattccaattcttatcatttataatgttaacccaaaaatttttcttagtgatatggacttcaatgtatgacacatggcaagaaggatgacatcacgaagtt

SEQ ID NO: 118125 - DNA, 1314 bp, Cannabis sativa
ataataataaattaaattataaaacacctaacataaaactaagtatacctgccttgcacgaaattttttcctagtatatagatatatagatatagataagtgtatagcagtataagtttaaatatttataaatataattaaaaattaaaaaaaaaaaatgtctcatatatatagatatattgataattaataataataataataataataaggaaaataaacgtgtggcggtatgggtattattatatatagtgtttttgttcaaaaaaaaaataattaatttatgttagatattttaatagaaaatttattaaaataatagtaaaatatcaatttgtatatttatactttaataaaatattaaaaatgagagaattaaggaaagtagagaaaaatagttttgaagaaataagaaaaaaaattaagataattgtaaagaataatcctatatatatgagatattttttcggtataaaaaactctccttatatacataaaaaaaatattataatttctaagaaaatatgctacaattatatagtatattataacttacatatccatgttattcttaaaattaaaagatcatcaataaatttataggatcatttattaaccacagttaacctagtatcaaccttgtactttgttgttcactgtcgagccagcacaccaccatacctgtaaggatttaagtaagaaaaagagagttatagcctctagccagttgcacttatatgcacgtcataaacataaatcaatatatcattaaactaatatgtatagaattattcaaatattaacactaagtactaaccaaagtgatttgaaaaaataaaaaaagaatatagaaattttcatataaaaaaatagaaaaaataatttgatatattagtagagagataaaaaggtgaatgactgaaaaaataaaattatgatacaaattaagaaaatagagaaaataaattgattggagtagaaagagagagagaaggaagtctgactgatattatgtgacttataagttagggtttggtttttaaaagtagaattgcttacgtcgattcatatacaatgaggtatattagagtaattagctttaagtatatatataaacttttatatcaattaatatattgacttaaatttatattaaaaatatgaactcggtttagtgagcaccgagagaatacttagttttttttttttttaatagtatttttaaacttaataaaaaataaaagaaaaaagaaaaagaaaaaaattgagagaattaaggaaaaaaaagacaaataattttagagagattttaga

SEQ ID NO: 118126 - DNA, 958 bp, Cannabis sativa
atttagtgtaattaagtttttatgccatatatatcaaaacttatctttattttcccatatttttgtaaatagcccttaattcttcctcctatattttgtggttttattgaaatattgaacttataataatttcagctactttcctccaaactacaaaaaaccatatattttcctccaatttcatgcaaaagctataggagaaaaaaactattataaataataactataaagtcaatcatggtcttatcatataagtacataaacccatatatatatatataataaagaaccttgtgtcacactcacattcaaaaagagagtcataataataaaagtgcttatagaactttgcagcatggaatttgggcaccacaccaccactagtgccaatgttccttcaattttttttttgttggggggacaaatttaccctctaattacttgaccaaaaagactcatgagcagtaaatgagtgagtgttgaagaagtgcatggttttcgaatgagagaataatacagggcaccaactagtagatgatgatgcatatatatgtttttttttttggtctgcaaccgcagctttgggtttgggggagattacttagagagtgtaccaagtgtcgttgtaaagcgaaagggactcttttagtattgcaagcaacgcatccatccaaccctaatatttggcaccacatgccaccatttcctcttttatccttcttttaattaactatatatctgtgcaaaagttatttagcctacaagtatagaaccccctcccttaacctcgtgactaaatttattacacattgcaaaattaaaaagtatgggaaccatgcatagctaaatttaagggaaaaaaacaaaaaaatacaaaaaaggaaaaaaaattacaaaaatactttgggccggcccattaaacatttatacagtccacatacaaatatttataaaaata

SEQ ID NO: 118127 - DNA, 1520 bp, Cannabis sativa
taccccaatccaaaacttgtacgtaggtagatatattgaatcaacaattgaatattcgaaaattgtgtctcatgcaacctatatatattatatataagccaaacaagagaagtggtaaaagtaaaattctttgactgcaaaaagtgtatatatatgattaaaatgagacactttatttttttgcttaaaattcgtattattctgatttcattagtataaattaaaacattaagtttgaaaagaatatgtctttaattttactaaatctgtgaaactatacaaaatttcaaatttatttattataataatgtacctgcaccaccaatgtgtagccctgtggcgcatgttagcattatattggataaaaatactacataattttattttttttgtaaaatgaccaaaaagttcaatgctattgctacattaagatttaggtgatgcatattttttaattttagagatttaaaaactatataatataaataaattaattaattaatccatgtacaaaacccaactgtcaccattcggctgttaccttatagattgttgaaacgtcgtcgaacccttttaacttccatttcaaatttcgaaatttaaaaccccaaataatttcaaaataacataattataataaaacaaaaataaataaaataatatgaaaaatcatagatttgtgggtccacgtcacctttcagtggcccaaccaatcataataaaccacgtaggaaaacagttggggagcagaaaatgacttttgtgccggctcctctaattttttcaatttattattatctaatatttaattattattgttttttttttaccaagtaaaataaaagagaataaaacgtcaaattttagaacctgataatatacgtatttgaccatttataccattcttgtttcctttgttcctgtttttgtaccatttcgatttgaacattatccacttttatgaaaagacgaaaatacccctactattgcatcgatattacgagttgaccatctcacgtgatgaatattctaaacaaagcacgtgataatttggtgatggattttaaccactttaataagagatcacttaagcttgaatctaagtaagaagaaagtagtgagtatagaaactgaaaataaataaagagttgatttaattccgaaaataccctcgtatggatagataattaagatttttgtgcccgtttagagtgggggaatcatttcagtttggtcactttgagacaaaagctggtacatgtcatttgtttggacaacttttaccactctttgcttccaagccatgtcctgtctccattgaacttttatcattatgaagggcattgtagtcattttccatttcttcatcatcatattttcgggttctgcccgcttcaatcaaacgggtgggtaccaattttttattatttaaaaaaaaggggtaagttgaaaaataccccttttattaatccattaatcaaatttacctctaattttatatttatttgaaacatacctct

SEQ ID NO: 118128 - DNA, 2815 bp, Cannabis sativa
tctgactcatggccgatccccagtttctttccccccccccccttttacctgcacaatgaaacaccagtgaatcacaaagactcaacaagaaaagtaagtattaacaaacacatacattacgcattacaagaaaatcatagcaactcatagccaacaactttatcatcataataaatagacattcacccaatacataatcacgcattacacaatcaattaattgtcttataagacaatttgatgcttcataaagcatccttaccactcatagtccacgggctatatatgtcactatcattgcccgataaagcaaacgataagtaagaaacctatctgtggtttcacgcgggtaattactcattctcattaatagtaatgatcgtatctttccattctcaataacgataataaccgtatctttccctcaatcataatcgagtcacaaacgataataatcttacctcgatcataatcgagtcacaaatgataataattattacctcaatcataatctagtcttaaacgataataatcgttcctcacttaacatacttagcagtgcaaatagcttttcttacctcagtccagtaatcaggtgtacacgccgacctaagtgggacataactcgatgatctcaggtcctatgtcacgataacgaaacttgattaacaatttatccaaactccaaaataaaattccataaccggacaactctaactccccactagtctcaaaataacttaaaacatcattaaaacaccctacaccaagctctgaaatacaccccaaataaaatcagtttcgaagccaaaagtagggtttcccctgctggcaaaaccggttgaccgattttatagcacctgtaaaatcaattaaccggtttctctactggcaaaacgggaactctggtttttcaaactaaaacccaaccaaaactccatcaaacatgttcgaactctctagaacagttcaataacattaaaataatatgacgaaacatttaaaactgaacaatacctcaaaatatcaaaaccaccataaaatagtgaaaattgagttcttaaactcaatcttccaaattcaaacctaacagctcacaagaacatcacaaacacacttagacaaccttaaattcaacttataaatatactttgaactcaaacataacccacaacccgaattcatatagaaactcaaccaaaacctaacctaaaaccttgaaatcaaagaaaagggatgtaaatcttacctccaagctagaacaacttcgaggcctcacttcttcagtcaaatcctgcttaaaatggagctaaaatctctgggtgtgttggttttctaggattatcgagaaaagggaaagaggaagagaggttttttcctttttattttgtttttactcttacttatcttatattataacataataaagaaataaaaaaaaaacttgattaattaagcccaaatattcaacctagaagaacactaaaggacaaaatcttaaactcataaaatgactatcctatccctctttaaaacattaaagcctaaaatcaaacctatgatattttggtaatttttaattttcccgaatagactaacaacccgactttctaaactagttcggtataactccaacataacacagctcttatcgctatgatatttttgaccactccgtcgagttttcacggccgtcgaactcgaaaatcttttattttgaaaatggtatctaaaatatccccataatctgataaagtctccgtaattaataaactacgctttatttatttatttactcatatttcactaattgactcgtaattatcttaagtaaaattataaccctactttgatgcccacataatcatacatttaataaaatatgtccaattaaatatcattatatttttcgagatattacaacttctaattttgtgcgggcaaataaaactttcctataaatataagacaaataaacataacattataaatataatttttaaaaataattataaattcctcactttcattatacgtttacatatttatatataaacacttcttaatgggtattacccattgatgggtactaaataaatttaactataaatattaattttaaaaatagtaagccatcagattttgatccgatggcgaataataaaagagaaaattaaatttctacgcttaaattagctacttaattaaagaaaatatcaaaaaatatatctttttacactatattaaaaaaaattatatgaaaagtatttaaataaaacttaatattttttttatcatttttttgtcgaattttttttattattattttttttttcagccggtagaacaaccttagtccatataatgaaaaaatgagagatttttcaattaaatagaaaacttaagtataaaaactcaaaaattttaattatattacccataattaggtaaaattataaaaatttgaatttttatgcttaatttttctatctaattataaaaatttctcacttttacatcatatgagttgagattgttccatcggttgaaaaaaaaataaaaaaacaaatgtttttagcaaaaaaaagaagataagtaaaatttaagtttaacttaaatatttttatatgaacatacttttgatatggtataaaaagagatattttttaatatatttttaattaagtagttgttgcccctgattttgcccaatatacgtggaccaaacggacagcgacacgtagatggaaagggtttagcgtttgaattaaatagctaagtctttataaagcaaaacattattttggatatgcct

SEQ ID NO: 118129 - DNA, 1203 bp, Cannabis sativa
tgaattcgctaagtgttgatcaccctgcacggctcgttgaatatttcattctatatgtgccagcgaggcatcttgctcagctcatcgttccgagcagatgcttcaagtggagtccacgtgtcacaattctcgtgatgccacatcagagtgccaaatttgggatcacaaatatacataagaatattatactaatatgtatatatatgtgtgttagaaaattacattacttaaaaatggttgcagcaatagcgaggtagtggtctgtcaaacttctagaggtgaagatggctacgggagcagagagacggtggtccaacgaagcttcaagcggtgacgacggtaccggcgtatggttttattataatttaaggtggagaagagctagagaagaaaagaatggggtttgaagatgataatgggtttgaagagattaattttggaaaagaaagggtttgactttagaactaaaaattaaatggaaatcagaatgggggggttcggaatttaatttagttttttcgaggagcatcaatggcgacataccactaactacatgtcagtccctctctgacgaaaatgttattggtggtatttttaaaggcaaattttcttcccattacaacggttatttttcaataaaaaaacaaatactgatgacaaagtcatcattaataatgtatgccgccattaataaattattctacaaaaaaatatacatttttattaaaaacaacatttgaatgacgttggtcatactcatatttttagtgaggactttaattatgtcgtcaatcatagtgtcgttggtgatgcttattattcttgtagtaatgtagagcacttatgctgtcaaaatatttctatgctttcatcaagatttgttaagaaactcacctggccaactccttatgatcttaatattcttaaaagtgatataacaaaaaaagaagtaggctattaacataattacggggtgaaacatctaaaaaatttcttgtgttcttattgttaattattattattcgtagattcatcgccttaagaactcataattattggctaaaagcgagatcaatatattcaaatattttataaaaatttacaaaagtttatataaagaattataacgtacaaaatctgttgggttttgtgccataaataaaactcatttcaatatattcagatttaataattaataaagat

SEQ ID NO: 118130 - DNA, 1331 bp, Cannabis sativa
ttaaatactattttaatctggatattacattaatttagattttttttaatataaaatgtgattacttacataaaaataaaaatagtatgagtgtgaatagtaaaaaattgtaaaagagagaaaaaaaaaatatataataagtgtttgtatttttttaaaaaataataaaataaaattttgtgagataataaaaaagtgttagaaaaaatatatataaaagataaaaaatgagtggaaaaaaagagagaaaattggaaaagaaaaaaaaaatgtcacccaaacttacataagaaattaagagaaaaaaaagtcggttaaggaaaaaaatacaaaaaagataaaagaaagaaaaattaaattatagaagttttaataaataaaaaaaaaagatttataaaaatttcaataaataaaaaaatataaatataaaaattatcttaatttaaattttagaaaaaaattaatatagttaaaatttttcatttaatatatattaatttagaggataaaaattttaattagacaaaaaaaaaaaaaagaaagagaaagagagttaaagaatattgtactatctgaagttgtactatggacagggagtcattcatgctttttatttgctgaagttctaccagggagagtcatttatgcatttattgtgtcaaatattaatattttagtttttttttcttttcaaaagataaaaaaaactttaatctttattatcttatcattcaattataaattggctaattagaattttttccctcgaattttgacatgtactaaatcgtgcttcttaaatttttaaaatcgttaaaaattctccctaaactattgagattgttaaatttaagaaattttgtttaatttttctataaatttctaccataaattaataattctattaacattttcactaaaaatagaacaaagaagggtctgagaacttaccttagacattgagatggttgtggctgtttgggactttgggtcggtggtcgtcgttgatcttgggtccgatttttgggtggttgtgacttgtgggtctgatttttaggtggtcgtgagtgtcgttgggaccgacgatggatcattatgggtgtggatcgtaggttggggcaatgaagagagagagagagtagagagataggagtttaaaaaatgagaagagtatttttgggtttaatgcaaaattaatttattttaacaattgtaatacacttatatttgggtatcaaagtttgccctaataatgtatgtatatatggaacacttcttaatgggtattactcatgaatggttactaagtaaatttaattataaatattaat

SEQ ID NO: 118131 - DNA, 1368 bp, Cannabis sativa
attaaattgggtctcttttgaaaaactatttctttaaggaattgaacaacccgggggttcccaagcccgcgacaattccaacttaacaggttcataactccttgcggccccaatacgagaatcgaccaataacacgttttttttttaaattaccacttttaccattatctttgtctaactctcccaactgacccaattgagtctccacatgcttttcatttgggtccataacaacatccttctcattcccagcctaatgtaatggattattagcttgatcaccttcttccattatattaaattggcccattacctcctactcccctctttggcccgattctaaatcgtccagctgacactccttacccattttctctacacgccttcttttggaatcatttataattaacctttctttttgaaattcaaatttttttcctaatataggttcagtaacagcaatcctacaattctctccctgaattttatccatcccatattctcttctatctccaaaattaacgcccccatgatttgtgctatcccctatatcaacctccatgattcttgggtctgcccgaacacttttctggtgtattattgccagcgatgaaccatcggaaggtccttccattggctatcccatagccaccttgcaccaatttttctgttttgtctacgatcaggagctttcataaacaacatatacgactttacaatggtttccagtgattcatcaaataatctatggaagaacttctctaattaagtggccaataactccacagataaaacaaaatgtaggcactcgttcatacttgaagtttgcccagtaccactcttccttattcttatatatcttcatttgccttttaagaggtctatcaatgttgattaaaacccaaacacgaaagttatctctccagatcccagcaaagtttcttggacatgaagagacaaacttgcctatgtaagcaccaacaaccctcaggacatgtttactcttaaactccgcttgtagatcataaacctagacccatatctccatagtattcaaaacacataacctacgattatcgccttttttaagcctttcaataatcagaggaatcttgttgaatgtccacagtgtaccttccacggccctactaatatccacttcatgaaaaaactgaaacaagtatttgttggtctctaactccttaacatacattccttttcctggacgccatcacatttcagactgaatcaaaatctgcaggtttattcagcaatagtctacccactaagcaccatcgagcatcaaaatcatcagtctatccttccacctgatcaaactgttggaaagtattttaccaggatcttaga

SEQ ID NO: 118132 - DNA, 845 bp, Cannabis sativa
ttttggcaagaacataaagtgttagatttggtagtcaaaattttggtcgtatttttttcttttttttgaacaatgaattaattaactttcaccgtagatgagcatactattactacatcataaaaaaataacaaaaaaacctactatttaaactaattcattatccactctaaatacatgtacgactaatttataaacataatctagagatgtctctgaaaaatcgaaaaaagaaactatttgagagttttaatttctagtttaaatcaacataatttgtgaatatattttataaacataatttatgaatatctttcaaagagagtttaaatcaatacataatgaattaatatctcctaaatttctagttttaatgaacttttttgttccaacataaaagaataaaattatttgagttgaacacaataatttagttacaataatttattattttttttaagcaagcaatgttcaatggcaatggcctaccattgtagttggtcatggatgaccacacccaaaatataggatatgagattatgaggagaaagtatggagggaagcatggaaaagacttgtgccaatgtttcttcctttcttatataaatatttcgagaaatgctacaagtagggccgacgaaacgggttagacacgatgctcgaaacccgcacgagagttagcgggttcgggtttgcctgggttcgggttgtgttcgggttgactcgtctaacccgtttaacaaacgagtcgtgttcgggttgacacggctaacacgaaattgacccgttaatgacctatttaaagttattttagtactttaacgtgtcataaatgggttacaaac

SEQ ID NO: 118133 - DNA, 799 bp, Cannabis sativa
cttcaaacttcttaatgcatcggaccaatgttttcgcctccgaagggttggctctgagaaaaattaaagtatcatctgcgaacattaaatgggatatttcagggctattccgagccacccgaatcccgtgtaagttccccttctgctgttcatggtataggatgcgagaaaacacctcattacaaagcaagaacaaataaggcgacaaaggatcgccttgccttagccccctttccggataaaacttgcgaagaggttttccattcaagagaattgcataagagagcgaagtgacacatgccattatcaatttggtagaagacaaactgaaaccgaataagaggagcactttctccaagaacttccactccattcgatcgtaagccttattcaaatccatcttcatcgccataagtccgccttcccctttcttctttttaataactcccaccaattcttgggttagaagagtcgattcagtaatccacctccccggtaggaaagccgattgggtaggagcaatcaaattgtcgaggatcactcttaatctttgcgaaagaatacgggcaattattttataaacaaagttgcacagagcaatagggcgaaaccgatcaacactgtccggattggtacctttggggatgaggcaaacgaacgtatgattcaaccccgaacacataactccagtggagaacaccttctgaacgcaactaacaacatcacctccgataacattccaacatttataatgggaaatttatatagtatactaacttttgtcattttttttataaaa

SEQ ID NO: 118134 - DNA, 1215 bp, Cannabis sativa
tcagtaataatgttcgagtacaagttggtagtgtcaacaaccatcatcctcagaagaggaatcatttaaacttctatcactaacaaaagccttgccattgcctctaaaagtaggtagggatgactaggctgggcagaaccctggcctctaggcctaatcaatagagtaccataaccagcagtacccccgcaagccaagaattggtggaaagccttttctctcttctcggtagtcctcacaatcctgaagagggggattcatcatccatatcaagtgtatgcccaaaaccttggcaagtttcctctactactaaaacattatctgagcctctaaacgggccctcatctcccttaacacaaaacttaagaggtacagaccatacttcagaaagttggccttgtaagccaacctcaatatattcctcctctcgacattgagggacaagatataattagctttatccatcatctggagaggggggatggagcgcgagtaggtcagcaccctctagtagtgatggtgaatttgtcggatatcataggcaatgaaataagtccccaagtaccctcccactttcaacaaagttatgttgtaggtgtcatctaaccactgatagcctgtccgactaaagtataagtatcctatctggttctaccttggaacagattttaactcataaaagtacccaatctcataaggggagggctgaggccagcctaacaatgcaggaagaatgaataatgccaaaaggtactttatacctttcggggtgatctgggttggacacaccatgatgtatatggagatatctctaaagtaaggattcaggggtagcacagttccctgctctatgtggcactctgaccatgccatccatttgaaggccaaccaatgtgctcatcaaactctcaaaggcctttcacacatgatatatcccactagacctcatcccttgatctggttaagcttctgggtggaaatagaggatggggaagatatccactgattttgttagtctccattatcaacgacttggggggctgtagcctcctccaaaacgtggttcacctcgaccaaaaaaatggttggttgtctgccttaaataaagttcatttcaatataatcagatttactaattaatcaaagattaaaaatcattttatgctgcatggttcacatgatttatttcatgattatacttaatgtataaattct

SEQ ID NO: 118135 - DNA, 2063 bp, Cannabis sativa
  modified_base (1921)..(1966): a, c, t, g, unknown or other
tttttgtttttaaaaataaaaaacagttttttagttatgatgctaaacatgcacttattattttgtgtttgcgtacatagatagtttacaatccaaatttatttatttgacaatgtatgttattgttatttagaattttttcttaccaattagtgcaaaaagaatatttttactttaaaattaccctatattatatgtttgatactttatttttatttttcagccttgcagctctttgttgttgctgtactatggatgagtgttgctgtgatcctatgttatattgctctggctaagtacaacataaatatgcatcataatattatgaatgtaatattattttgtgaaattgtagattttagtttaaataaatgtacttagtttgataaacaaagaattgttaaataattgtgtgtgcatatcattacataaatatatattttatggaaagagatgcactttgtagtttctcaaatcaataaatgagacacatatctactaatgatttaaaatgtaatatgcttttattttcttccatctaacttgtttatatggagctcttaatgttgccaatcgaatacatacttggaatattttggataaatttggccaaaataatcatgttgacctgtgagtcattgtaggagactttaatgtttttctttcaaataatgataaaattggtagaaattctgatagaggcccttcgagtgaatttaagaaatttattgactcttaacttcatcccctttagaatttgtaggctcatgttacacttgaacaataatagtttgaattatagaaatatctaggaacgacttgattagtgcattgttaagggaatttggtctaatattttttccggtgctcaattcactcatgccaatttttttggttcggatcatagggccttaattttaaaatcctgttgactcagattcgtcatttgggtaaggccaaaagatttttatttaaaaatggttggctctctaacaccaactggcagcaggtcttttaatcttgttggggaaacacttctaatgagccatgctccattgacatgcttgttatgatccagtcttaatgcgccctcgagtagaatcacaattcaagcttccaatttaagaaggaaattaactcccttgagaaaaaaatcgatatggtcaaggctaacactcattgggatgacaaatgtgtggtcaggatcaaaactctaaaaacccaattagatagacttctttaccaagagaagatttactagaagcaaagagccagagtcaaatggctcttaaatggagataaaaacacaaaattctttcataagtttgcttcgcaaagaaaaaagctaaccaaattaaggagcttgagaatgctactggtaaagtgttatccaataagagagaatcactactgtgattaaggaatttcaagacttttttcacctcgagttgccctctccaccaagatgtggaaaccatgctgaacaatattcatgtccatctagatgaggtggagcaggagatattgcaagaggctttcacgatggatgaagttcacactatgacaaaaataatagacacttaaaatcatcctaattattaagcaccaaaattttagaattgggattagttgtaataaactaagcacttatgaaggttatgccgcgaattactcttgttttaattgttttattttattgttttattttgttgttttacttacggttattttataaaaagacagtatttttgtaaaaaaaaaaattgtgtaacagtaaaattatattttttttttttctaaaatctaatattttttgtaaaaactctttttattttggatgggaggtagtagtaccgcttgagtttttggctgttttataaagtattttattaaaaagaaaagggaaatttacatggtatannnnnnnnnnnnnnnnnnnnnnnnnnnnnnnnnnnnnnnnnnnnnnttacttttttactgtgtttttttacaagtttcatactgcagtatactgtgttaagttttcacttgtgttctactagtgttttactagtgttctactg

SEQ ID NO: 118136 - DNA, 1810 bp, Cannabis sativa
atgtttaaaaacttgttagtaattagtaaattttaaatttaggtcctaggtcctggtaaaataattccaacattaacttcttttattgtatcatcacctaacattgtttcttttgtcttcgggattgtgtcagttatgcatacaccatggattaacgaagacaagaaggtggtggagctggctgagaaacttggagttgctgaagatcaagttgctgctgctgaaggccaggtgactaccttgaaggaaaaagttgcttctcttgaagaggaggtgaccaacctcaaagatgcagccaaaagttccaagtcttgtgagagcactatgaagaacttggcatcttcttggaagaatgcttttgaccttgaagagtcttaacgtgatgctttgaagaagcaaactattgtggctgaccacttgagagaccagattaagtccttggagaataaggtgactactcttgagaaacaggttatgtttgatgtctctttctacaatgatttgtgcttcaacgccatttacactgcttgggtcaccaatggtaggaaccagtcattcaattagattggttttcctggcaatgaggtgccagccttcttcgagtggtgttagagatgttttactgttgaatcttttgaagatgctgactttactgtaaatgttggcgaaccgactgtcagagaaacttcaagagttgaaggctacaatcttgaccaccccgacattcctccttctgttagtgaggtgcctcttgttgagagtgaagagactcttgttgatgtgacagggtctaagaacttctctgagtccattattcttttctgtttttagcatttagctttagtgtgttagttggccattctcgggcggcctttcagagtggataagacttagtagaatgtgattagaattttgtttagttaaatcaaaaattatttcaaacttaataaaacttttattccaatacttatatttttttttgctctactttatctattaccgcttgatcatttaacacctgcacaatacaccatgtcttaaaaaacttaattactggttgtaatgtcaccgttttcttaaagtcatcattaccacgagagtacttacacagacgtgcaaaatttttttgaatgcttgtgtaacatatggctctcgtatactataacataatgtatgtgcaacccaagttatcaaagatgtgccttcattggtcacttgccataccaaatctccttgggccttcttgatcatgactcttgagtggtgctacacgtgtgagaactctccacatatccgaggatttatgggtggcagtgtttactcaattaagaaataagtaaagttatctcaagacaaactcaaaagctttactcagcgcttggagagggtggtcaagtctgtgagttgtaattgtttaatttaaatgaagtaccaaaaaaaactttatttatgctttttctcattaaattaagtacaattacatccctgtgagctaagttaaaaaaaaagagaatacactatgatgtagtagatgaataatttcttcttcatccaagcttagctgaagtgatccccactatgctaatgccatgtttgacttttagcataggagacatacgttagcaatggaccccttaacctagggataacttcattgcatcccatttgttaagtggcaatcgattcacttacaaggagtaaggtgaatctcactatgaagcaagttgttttggagacagctgattttattggtagtttcgtaatagatgcaccccgttccaaaaccttggtaccggcactagattcaagt

SEQ ID NO: 118137 - DNA, 1971 bp, Cannabis sativa
tatatatatatatattatagtatacaaatatagtaaaataaaaaatctatacactaaaattgaataataataaaaaaattgagataaaagaagagaaatagttaagaaataattattagaattaaaatattgtctagctaaggttttgttttaaatgctacattattattaaatgatgattaaataataaaaaaataacaaaaattgatataattgaaaaaagttaaaagaaaatgaaaaaaatgaaagaaaatacttgacatattcttttaactttcatttatatatattgatattgatatttataagtaaaactttctgctatatcaattgtaaaaatattttaacactaaattaaaattttaaatttgctaacttaattaaatccaataacattaaccattagtaaaaatatttttcaatcaactaaatattcaatttatataaaataataagagtttatattaataattctattaatatatttacgataatattttttttattataataactttaattgattgaaaaataggaaagcaccattacaaagaaagaaaagaggtctcttttatccatgaaagctaataacttatcttaaggacatgcttaccaatcccatgagtcacaccattaaagttatgatgtaatatgagagagaaatactctagaaaaactagataataaagttttaatgtctaaaaataagataccttcagcccatattaatcctactaatacagcaagagcttttgcaaaataacaaaaaatagataagaattagtaacttcttcataatatgtgaaaataagtaatttaaaattttatgacatatataaggtcatgaagtagtaatgttttttttaaaaaaattgtaatgaacttctcattgaagtccttggattcttaaataatcaagtgaataaagtaaaaacacacatgataacaataaatatgatatttttataaattaaaaataataactttcataaagcttttgcggaataataaataatagaataaaaaacacagaatatttatataattttgtagttaaatctacataattcacaagtcattcttatttctagtgtactgtagaattcaagagatgtaaaaaataaaagatgaatttcttttagggtgattacttgatcctttggccgtcctctgcacaatggttatccctcctatttattcggtttcgcatatgctaatttttttttttggacttatcttaataattaatcatgaaacatgaataattcccatgtttcatataattacagcatgtggtaaatgcataactgcctagtaaccgtcacttggatttatccaacaaattgtaatttcacctagaatccttcctacactgtgctgctcacaaattagtttagtagttctccatgtggacttcttttgttcatctcgcattataaactctttatgtcatgactcatctagccttcctatatcctgtatttccttttgtgtatgttctgtactcagttatctcagagattcgcaacatatattattttactcttgctgattttttatttaataattaattcttctgactcacctttaattattatttaaggtaagacttaaatataacactgtcaatagtaatttttgaggtactttaagtaccatatttattttccttaagtgcattctcttttatttgagctcttgtccatgtatcgtgactatatttgctgctccaaatatgggcataataattgttccctaaaaaattctttctataaattgaaatgacttttttttttaaaaaaaaaaaaaatcttaattggtagaattgtatttttctcctaattgtaatgagtacactcttttggtggtgttgtcgagcaaaattcgcaacaccaaaaatgaataataatactaataataagaagaaattatgtgaagaacaactgggagtattcaacctaaaacggcgag

SEQ ID NO: 118138 - DNA, 1357 bp, Cannabis sativa
  modified_base (1311)..(1320): a, c, t, g, unknown or other
tatttaaaaataacatccaatctgatccgatcacaattggatattcaatgtttggcggtcggttgtaattggatcggtcggttcttattggatcccactcataatcattctcattttcacattaatacttgatttttattttatgtattcatgtgagagaccacttgaaatatctccaaaaatatctcacgatatttttgggtattcatgtaatctccaataatatctcacttaaaacaagtaaatctcaaaaaaaaaaatcatatctcaaaatgttactttaaaataatatataatgctatttccaacactttttatattacatgataatatttatcatccttaatataaatgaaaaaaattataaatctcctccataaaaataattgatccatccaaataattattatctaatactaatatgatacgtactatgctaagctaaaacatggaccattctttttcgatttgttttgatgtatttacttggttagacaaataaatgatatatatttataatttgaccaataatttatttatgagatactcttaattataacttcacacatacaataaatatgagaagttaatgtataaaatgtacacatgatacaaaaagaataatttaaatacggggaaaatgggagaaatatattttaaaaaggacgtgtgccaccattaataatggtgaaagtgaaagttcagttccaaagaaaaaaaaaaatcccctcctatatatatatatatatataggatatgactatgaggataggagggttgtttataaaaaagaaaatccgatgttgttatcttttaaaagggaggagaatacaattcaacaaaacacaaatcataatatcttaagctagatcacaaaaatacaaaattgttttgacctctttatttaattaacactaactatatagaacatggaagaaggctttatgtggtgtggcaactttgattgtatatgtgggcacacatataaagaagagatgaataattaggatgagaagaaagggttccattccaattggcatttcgaagttttccactccctccttttgacttcttaaaaaatatggctggccgcacaaggaacacgacagactaaaactctcccaccaaacaactatataatgctttagttttttttataaaaaaaaaaaagaaaaagaaaattcccacccaaactaccactcgtacgtatatgtccttgctgaaaaccttactgagttttgcagcttgcacgtgtttgaaaggcagctacagctaggggtgttcataaattatccgatccaatccaatccnnnnnnnnnnatccaatccaatccgcaaaatgcagatatccgcactt

SEQ ID NO: 118139 - DNA, 4629 bp, Cannabis sativa
acctgaaatttgagcaaatgatttgtgaggaagaagagaggtaaaaggaactttgcagagaacaggtgatattgacagcgataaaccaattacaaacaataatttgtggtgcttatattacacttagtagctaccaagccttaaccccatgatagggttatggtaattggataaatgctatgttttgtgtgatttataaaaaaaacaattacaaacaaatccgggaggaaaagtaattgcaaggtaatgtgatctaaaccttaatcctcctcttgcattgggataaacctttgttaacttttttcacaccataaataaactatgctcttgcaaaattcaattgagggtagactacaaataataagtacgcgtttctaatctggaaactaatactataatagtttctatgtaggtgcctagaagtgacttaaacctccagactttgcgagcgaaccatgtatctgtccattcgagcaatctctcttgagtccaattatttaacctgaactttgagttaaattcaaattgtacttatagatgagacctttatggctgttactaccacacagcatgtttctaattaaaataatctcatacttttgatgcttgttgcctattcaatttacctactaactcattcaattgtaatcaacatagtaagcattctcagtgaaagcattgcatcaacaagtatagaagccttctaagccaagaaatcaagtcagccaataaccacgacagtaacaattcttagttttatagaaaatgaaagcctaagtcaatctcatgcttgaagaattacataaccagaaaattctgacaagttaaaaagcttgaactaacaaagaagcaagatcaccgaggtgtagataataaaatgaagaaactcatgtcaagataaaaatataagtttcaattacacgataacaaataatgcaaacatgcatgcatcccctacctcattgatcgattgaacttgtctgcctaggtcctcagtaaaaggataacgattagcaccaaaagcttcacatattttaagaattttgttctttgctttttctccagagtagaaaaccagaaaaacatttttctcaacctgcgcattaacaatcacatgtcaaaaaaagggggaatgcaagacaaccaagcaattagcataatattttacttttgcttgagtgaagtagttaacaaatgaaacagaaaattttaaaaaataaatagataattggaatgaatttttttatttttatctttttaaaaaaagacagttatgttaataacattatgaacttaagcgagaaagggagaagagagaaaggggtacttaaatacttcgagttatgactgacacttcagttatttctatatttttactattcaactttttctattgaaagaagtgttatcaccttctctcctgatatgggatcagtaacaggattctccaatgtggcctgcttcagaaaaacattacccctagtagcacgaaatagaatcctttcaaacgccatagacttttccctaggaacaaggccagtaagataccccaacttcacttgcttggatggatcagtcgatatttcctagcagaacagccaaatcgagtcaattatttcatttgaaagattatttacagctctaaataaaatcaaagctagcgctagtacttggtctagtagaagaggggtctccagcgaatcatctgcttcacgtgaatcagattctctctgcaactccagggcactgctatgagctgcatgaaaaaaatcagctgcctgaaaagtaggaaataattaagttaataaccgtgttattacttcatctcagtttaagttttcattaatattgagaacacatatatccattttattatcaattcacaaacagcataaccctttaatgacagcttggcaacaaggaaggcacactatccactcctctaaattaaaggcttcccattagtagaagaatcaacattaggaatgaacttaatcatgtttgaattgaagaatacaaacattctaatctcatgatatttcatgaggagagttgcaacgagaattaaaagaatgcaaaagaagatgtaccttctgcaggactagcttatattctgcaagttcattgtaagaacgttgcaacttctcgctatttgcattcatttcaaccagctctgactcaagttcacctagtttaacctagcatgaacataaacacaacaattaaacaacataaatagaaaaataaagaaaaagaagtactagtattcttgaacttatagctcacctctaggtcatccaaattgatctcagctcgtgttgtagatgtctttggagagaatcctgcctttgacatctgctccttgaagaaacgtaacttgcgtgccaactctccacatctttttatctttattggaaaagtaatattaaatacaataacaaaaactaatattttgaacttgaaggatagcagttaagtattttattagtacacattaccaaaaaaatgtatttttcatcaatacaatatatgtataatcagaatataagtatattatgtacatatttacgctcccattttctacattaaaagcaacaaaagagtctagcttgttgatgtcagactctcagaattggccaagcctcagtaaactaaataaaactgtttaatctgatcccataaaggtgtagttgagtatttttcatactataatatcataaaagttatatctgcagcagaaagggttaaacaaaaatatacccgcaaaaacctagaatgatgaccgtatacttctttcagcttagtccaaaaatacgctagatatctttaagttacaatgaaaacttctaactacttatcctaaacagagtcgagttcatctttcagatacaagagtgctaattacgtatagctaactgggtaaataaaaccaaaaggcaagcttaagccctagaaaacccttgaacccatcacctgcggatgaatatcttcctatttgatatatatatcgaagattttacagaatcataactttttgcgaatttattaatctggcttctattgtgagttattagttgtatacaaaaagaaaatccactaatcagatagtaataaaattaagatctgcaatgcagtaatcttaaattaaaaaatataggacataaaatcacctgagtagcataagttcgctgaaatgggctcttatctgaattgagctgcaaaaaaatacagtgggggaaaaacatacaagcagtgagaaactggagaacgttcaaggctacatatcacacgaattcaactaagagggaacatagaaagcatgtaaatttactacattaaaatggtatttcttattcattgtaatcattccttaagctccaaattttcaccttttttaaattaaagattaaattagcttctttcacttaagcagcagctccaagcaagtattgtttggtaaaacaaaatataagtactcacttaaaaatgtaaacttttcctaaatacaagacaagtagtaatatgccatttcaaatagtgtaactcatcgattcacaaagaaaaaactacaattgactactggcaacccgaaaaagttagctccttccacattcatacaattatattactacaagcagagccaaagatgaaacggaccccaaatctgactaatcaaaacttgaaacacctaacgaaccaaatatcaaatcgcagcaacatttgatttgaaattaacaacaagatcatatcaatccacgatctacgaaagcaaattctcaactaattcctcccaaattgaatcccctttaactcaatccatcaatcaaaaaccacattatcgatcaatcggcaacacaaaatagctaagctaaaaccctaatttttcaaaaataaaaacccgatcgcgattacaaaaagctaaaaccagtcaaagcagaaacctccaaagctaagactacaataaaactccataattgaaatcgagcaagtaagaaataagggttttgtgagaaaaaagaagggtattcatatatatagatagaaagcatacatctttgaactggagaagaccgaggtcgccgaggtaagagacagtgaggtgagcagactcgattggaatgatgagttgaacgagttgcatcggctcggacctgaacagatccatcgggggacaacagcctcctcctccttctgccattgttaggctttctctgtctctgtctctgtctctgtctctctctagaataacacagagagatgaataaaaatgagtgtgggagagctctgatgatgacgatgagagaagtgaatggagagagagatttggcgtttggggaaatcagtcgccacaatccacaagcttcgctccacgtccttctctctcctctttctctctctttcaataatttaattaatttaattgattattaatattattattattattattattattattagacatttttatatttatatatattttactgaggtgttgctgtgatctgtttggatgatttgtttgtattcgttctaactctattagggtacgaaatttcctcatttctcattattcctttttatcttaatctttttataaataaaaaataaaaaattacccaaaaaaaa

SEQ ID NO: 118140 - DNA, 6976 bp, Cannabis sativa
  modified_base (6720)..(6720): a, c, t, g, unknown or other
aataaaagtgttatttataacctatattgataacaccttaagtgtttctaaaacatgtgggactttaagtttctatttgtagtagtttatttcgaaacaaaatatgaaaatatcacaaaattttaaaaaaacaataaaaaaaatctaggatgtcacctagacacttttgtactttcatttatatttatatatagattactaaagatatataattatttatgatgataaattatttatttatatattaaatacaaattttaaacttactaggcaagatataaatcaatcacccttaaaagaaaaatatttcttggataaaagaaagtagtataataaaagtgttatttataacctacatagataccacctttagtgtttcttaaccatgtgggactttaagtttctatttgtagtagtatttctaaaccatgtgggactttaagtttctatttatagtagtttatttctaaacaaaatattaaaatatcataaaattttaaaaatacgatgaaaaaaatctaggatgtaacctagactcttttgtgctttcctttatatttatatatagatatagattaatacacctagaatttaaatatatctccgaaatttgaaaaataataattaaaagcctacttctactaataagccctaattatctactaattcttaaaataaagctaagcagtcattaaaattatcccccctttaaaaggattatgtcatcaaaatctaacctgaataactctagatactgagccctcatatcggaatccaattcctaggtggcttcctccaccttattgtttctttagagcagcttgacctattttatggtattattccagaggactctatcccttctgtcaaggatctgcactggttgctcctcatatgaaaaatctagctggagttctaagcttttgtaacttaaaactagtgttggatctgagacttatttccttagcatagagacatgaaatacattgtgtactacagataatgctggagacaatgcaatataattctcgagaatcttaaaaggtcttgtaaatctagcaaataacttgcccttcttcctgaaatgtttaacccccttcattagagatactcttttaaaggcatgatctactacctaaaattctatagttctacgtttcaaatctacataaatttttctatctactttgagaagcaagcattctggccttgatcttctctattgcctcattggcccgctgaattgattttgaacctaagtattttctttctctagtttcatcctaatgaatgggagatctacattttcttccatacaacatctcatagggagccatccctatagtactatgatagatattgctgtatgaaaactctataagtggtaaatacttactctaggagcattcaaaatctattacacaggctcacaacatatcctctaatatcctcattttcctctcaaatcggccatctgtcttaggatggaaattgtactgaatttaaactttgtacccatagctcgcttgaaactttcctaaaacttagaagtgaacttcgaatccttattctaaataatagactttagagccccatgaagttgtccccattcttttatgcaaagctcttcatattgatctacttaatatgttgttttcactggtacaaagtgtgctgacttagtaaactgatccacaactacccatatggaattgaacatactcgtggttttgggaaatccaaccacaaaatccatagtaacatcctcccacttctactcgggaagtgtcaaaggttgcaacaaccctgcatttgttttatgtttagccttaatctgcttataggtcaacatcttgtcacatccaccacatccattttccttccgcaccaccaataatagggttctaaatcttgatacattttggtggtaccgagatgtattgaatagggagtggtatgagcttcatttagaatctccattctaagttccacattatttggtacataaacttggggtttataaagtaacatttcgttaccgacactgtgaatccctagcttggcaagctaagacttcttcttggatcttcaccaattctggatccactaacatagcaactctaattctttctaacaagtctgattgtagtttcaaatcactatgtttccttactacaaattgaatagttgacttgaccatgtcttctaccaactgagatgagatcataactttgctgaatacttgcctgagaccattcctgctaacggtatctgccactacatttgccttctcgatatgatagagaattttataatcataatccttaactagttccaaccaccatctctatctcatatttaaatctttctgagtaaagaaatatttgaggctcttctgatcaatataaatttcacacttttctttgtagagatagtgtcactaaattttgaacataaaaaccactgcgacaagctctaattctttagttgggtatcgctgctaatacccctttagctaacgagaagcataagcaataaccctttcaccttgtatcagaatgcaccctaaaccctgtttggatgcattgcaattaactacgaacttttcttgaactaacagtaatgctaacaccagagttgtcatcaatcacttctttaactcttaaaaacttgcttcacacttttctatccatacaaactgctgactcttttagttcattatgttaaggacattgagatcttagaaaacccttctacaactcagtggtattatctagctaaacccaaaaaacttctaacctcagtaattgtttttggtcttggcaaatctttgacaaattcaatcttttttgaatcaaccatgatcccatccttactaacaatgtgccctaaaaaggacactcaagatagccaaaattcacattcttaaatttagcataaagtttatgttcccgtaattattgtaaaaccatccgtagatggtgcttgtgctctacttctaattgggagtatacaaggatatcgtcaaaatatactataacacaaatactgaggaaatccttgaataccctatttatcatatccataaaagccgctggagcatcgttagtccgaaagacataaccaggaatttatagtggccatgcctagtataaatggtagtctttggaatgtcctcctctcatattctcaactgatgatagctcgagtggagatcaatcttagagaaaattttctttccttaaagatgattaacaaatcatcgatcctagacagaaggtactaagtcttgcttgtcaacttgagtagttctcaatagtcaattcacatgcaaagtaatccatccttctttttaacaaacaataccagagctccctagggtgacacacttggtcgagaaaaccctaagtcaagcatccgttgaggttgtaactttaattctttgatttttgtaggagccattctatagggtgccttagaaactggcttcgctccaagtgctaaatcaatcacaaaatatatttttcgctgcggtggtaatcctggaagtttttctggaaacacatctaaaaattctttaacaactttgatatcttcaggctgaagtaattcacgttgagtggtatctaacaccactaataaaaaccctacgcacccctctcgtaataagtccctagctttcaacactaagatcagtaggcctcgggatccctgaaatgatcccccaaaaacaaatgattcttcacccttaggttgaaagatcaccatcttctgcttgcaatcaatgcttgtagcatagttggaaaagaaatccattccatgtataatattgaaatcttccaaacccaattccactaggtcaacactcaactccctatcctcaatcctaattagcttagacctaatccattttttggagataactaattctctgccaggcagtagggttccaaactttatttcataagtgtcatacgacttacccaacttatcaattactctcactaccatataagaatgtgtgccccaaaatcaaacaaaatagaataaaaagagttgttgactgagagctgacctgtcacatttgaaggaccagcttcagcattagcctgggtaagagcaaacacccttactatagtgggtttgcctttgtcttctgctcttcttttcatagctacgagcagtctcttttgtaacatctagttacaccacactaaaaacatcctcgacctctacactcacccagatgatgcttcttataactggggcatcttgggtaagtgtattggttctcaaacccactctgtccattattagaaccttggttccctcaaaacctcttgttttgacttgagccactggacgcaaatggaactttcatcttctaataagtggttaagtcactacaacccttactaaagctagaggtaggaggagtagtggctctaccaacactttgagtctccgagactcctgaatgcattctactacacccttaactcatagtgccttctctatcataatagcataggtagtcatgtcatctgtggtaatcatcaaatcatgtttgattttggggttcaatcccaccaaatacttttccttttttctaaaatcagttggcactattctcgaggctaattgggccaacctatcaaactaggtcgtgtactttctaattgacatactctccccttggaccaactgagtgaattattttctttttgtactacggactacatcattgtagtacttttcattgagcaattcttgaaattcctccaggtaattttggtgacatctcgggttagggataccatgtcccaccaaaccaaggcatctcttggaatttgaaagtagcataagccactctattgttaccagtgactcccacaaaattcaatatcatgttgataactactagccattgtgtaactttcataactttcgggcctcccaagaaaactaaaggtgtttgcttatggaacctttaatataatggttccatacgatttttaacaacaataggccccacttgcattataggggcatgagccatctgcacctcaagagcacgcattacaggagcaccctgttaccttagacgccagatttcttcatcatgttcattatctctggcttgcatttcagcaaacctctgatcccagtcctgggcatcttgtggtgggttagcattacccccaacacatgccctacctctttggcctctagctcagacacaaacattagggggaaactaaactcccccgaccgccacttgatctgatcaagtaaccctatcttctcgtgttttgcctagcatccattctattagaccagcctacaaatctaggggctagcctgggcagatcatgatcaaatttaaattctaattgtcgcttacttgagaaaataaaacacgtgcctattagctaacaggctactaacatgtttcatatcagatttttctatcacatactaataaatcaaactactgaagcataaaaaggcatactgaatcataatttaagcttatctctaatgatgattatacatatcgtgaatatctacaaaagataacccgtaacgccctactagattaggcacgctatcgtgatttcaatttactgtgcactcctttgctaatcaaaaggtttattaaaaacataaataatttaaatttttaaaattaaacttcaaactcaaacatataaatactttaaatgatttgggatcccattttaaagttacaaatgttttacaaaatacattgttaaaaaattgttgcctagcaattatcaaaataaagcttacttcagaagatcgaacactctaggtctaactatctcgatatgtacaatcattattagctcgatcttactactatttagcctttgatttgcctttacctacacatgtaaataatatctgtgagtcgacagactcaataagaaaagcataaacgtaacataaacataagccaaattataaccagacacccatacaccaaatcacaatcctatcctgcatccaataaatactaagtctagaacatttgcacgataataagattagccataacatcagcctatactcggtatcgtagtcatactgatgtgatagtgtcaatctgtactttgcctaacatatatccctcgatattcagtgcaattctacgtacactaatactgctcttactgatatgttatctaataggtaatcacaaaatatacacgctaaacatgtaaatatatatgtaactattatagtagtcttaccttgtgtaatatcccaataagcctaatagttaataattagggtttataattatattatgagttaataaagtaataagtgagattatgatcctactaatttagttgaacataaattttaaatttactataagtggataaataagcataatttataaattatggagatttatatggcatatgtgaatgtaatatgagttattcgtgtaataaaaatattttcaattttggcgaccttggagactcgatcgggggtcaaaaatgtcataataggcttaattgatagaattagtgggaatattgggataagttgataatgtaagtatcaagataattaagagtatacgagattttaggttagcgccctagaagtagaagtttcttagtagctaagaaatgataagataattaataataataaactttttattaatattattattantattattataatattttttttaaagttgaaaagttgattgagtgaagtatacatatagattatatataagttataacttatattatataagtctgaagcagaaaaagaacgaacgaaaacctcgttccttctccttcaataaaaccttctcttcttatacctattttctttgattttcaatccgaaacttagtgatctaagctccggtagtagcaggatagcgaattctcagagcgagaaagcttaaggtaaggtt

SEQ ID NO: 118141 - DNA, 1402 bp, Cannabis sativa
  modified_base (1257)..(1281): a, c, t, g, unknown or other
  modified_base (1369)..(1376): a, c, t, g, unknown or other
actaactattttgccaaacaagatattaagaattcatatgtaagcaacacttcatatccaaacatatcttgtattttaaaatatagtataattagtagactgcataattattattttagtaattacactacgtaataattacacaatcacttttaaacatatcctaaatataaaacttaaaattttctaataccatcataaatatttattaatactgtacctatttatatatttatatggtggagagggcaagcacatacgcaaatctccgtccactcaattgtatgatcccaaaaattaatgagttccaatatatattgtgttttcttgtattattttcttttcacgtataatgtatttctcacaagtgacaagttattgcacacacctaacaaacaaaaaatcatgaataaaattaaattttagaagacatttttttagttaaaaaaaaaaagaaagaaaaaaaaaataggaatatgagttttgattttttgtttcggtgagttctcatccacataaatatttttttaaaaaaaaaaaaatttgtgaactaaaataaataattagtaaaataatttataaattataggatacaccctaataatgtgtacatagtaataatattagatacattttattttactttcattataaaaaatgtgattttttgcagcgtattttttactggcaaaataaaatttatttttgccagcgtaagttaacaaatcgttattggtattagaactttttctggtataaataagaagctctagtaaaaataacttttcttaatgcgtaaatgtactagtaaaaattagaattttgctagcgcaaatgtgcactaggaaaagttagaattttactagcacattaccgtgctggcaaaaaaatctaacttttgctagcaaaaatgtacactgaaaactatcttacttttacgagttcattaacgcgctaacaaaagtcatttttgatagatgaatatttgacttttatcagcacaataatgcacttatgtagctttataagttaattttattttttttaatattatttaatttaaaatttttatccattatttttataaaattaaaaaaaaaaaaacatgaaagcgtaaaacaatattttaaattgttctaattatacatgattgacttagaaatttagactatatttttaagccacactcattcgttagattggtgagaatgaaaatgtagtaaagtaatcactaaaaaaaatcttacttttagtcannnnnnnnnnnnnnnnnnnnnnnnnaaaagttgtgactaatcataaattattatttccatgttgtaactaaaaagtccgtaactaaatgttttagtcacaaaaattacaattnnnnnnnnctaaatgtgtttttagtcacaatact

SEQ ID NO: 118142 - DNA, 3302 bp, Cannabis sativa
  modified_base (399)..(401): a, c, t, g, unknown or other
  modified_base (2733)..(2752): a, c, t, g, unknown or other
  modified_base (2799)..(2816): a, c, t, g, unknown or other
  modified_base (2880)..(2887): a, c, t, g, unknown or other
  modified_base (2935)..(2941): a, c, t, g, unknown or other
  modified_base (3030)..(3041): a, c, t, g, unknown or other
catttagctcattaaaagtacaacctgacgataaataagacgccctagcaacacaatgggcaaccctatttgcagatcgattaacataagaaataaggacattaaagatcaataaattttctttttaattaagttcgataaggtaatgttaagcacaatacatgtatattttttattttttttttaatttttgaaatgggtttgatattttgatctttaaaattttatttagcggttacattagtgtgtcctttgaatgtgattatatatatgtattttatatgtacaataaaactccgttgtgtgtcctattaattataattgtctcttattttaattcaaaattaaataataaagtgaaaattatgtataatatttaagtattttaaatttaaattnnnatttctttatataaaatatctacataatttttctttatattttaattcaaaattaaactaatataattaaaaatatctattagtattttaaatttctttatataaaatatcttcataatttttacttttaagttttatttagtgggatcatctctaaccatccctactttccctaaaaaaattaatcattgtttacatttttcttaaaaacattctaagaaaagtaagaggaaatgttgctagtctaaaaatttcatatgaaatctttgactcagaaaatagccaacaccaagttattatagattcgataatagcttaaagtaaataacttgaaataaaaaagtgttaaaccttcttgccatgatgaacatcaaaacaaaaagaatagaacacaaaaaggaagaagaagaaagaatgaaaatagcaaagattatctcaattcattcaacgtaacagtagagtttatatacattggacactaaccataacaaaatccaacaaactctactaacacacaagctgactaggactaaccactaacagttagagctaattgttttaactaactatcaactctaacacctcctctcaaactcataattgaaatactctcaattttgactttgttcctgaatctagagaatctttggctcgaggttgctttggttaggccatcagctaactggccatcaagaattagtgaagatggcttaaatctttgagaaaaaattgagtattgacagttgagacaaggtctgtaacaacattgtgatcaatgcctgtgatgacaatgttatccacatacataagtaccaaagtgacagaatctgcagcatgttaaataaacagagagtgatctaaattagatgaaacaaaaccaagagacagaaggttattttggagtttgtcaaaccatgctctaggatcttgtttgaggccatagagtgctttatgaagcttgcaaactagatcagttttaccaagattttcaaatccaggaggttgcaccatgtacacctcttcttgcaattctccattgaaaaatgaattgttgacacttgacatctagttgtctcattgtccatcctttagacaaggtaagtgttaaaaccactctagtagttacttgtttgaccactagactgaacgtttcagtgaaatcaaacccaatatgctggtgaaagcctttggcaactagtcttgccttgtgcttgttgatagtgccatcaagattttctttaatcctgtaaacccatttacatccaatagccttcttgcttggtggaagtttaaccagggtatatgttttgtttcttgttagggctaagacttcatcagtcatggcattgttccactgtatttgttgcaatgcttcatgaagtgttgtgggaaccctggaaactaagtgactttttggcttgtgaatacctgacttcgacttggttttcatgctgtattttttgcactgtttaggagcattttggcaccctacaatgtcagaaagtggtgctaatattaaatgagcagtatcatgtgatactggtggtgccatgtatgttgcagggtctgcttacagaggagtgctattgagaacttaaggtaaatttggtggaatagctagtgtgagattaagtgagataggatactcattaggcatatcaacacatagtcttgaagattcacctacatcaaacacagatggttgacttggatgccaactgttagacataatatcaagagtattgttgtttggctacacaaatggttcattaatgtcaattaaaacatgttggtcaatctctgaactggtgtttagcagatctgttagtgtatggtggtttaaaatgaggacacataggggtaatagctgacacaaaaagaagttgttgtttgttgagaggaattaagactggtttgagcactagactgttcataacggaaagagaatttttcaaagagaacatctcttgaaatatagagtttgtcatttttgtcaaggcatttgtagccttagtgattgaggctatagcctaaaaatgtggatggagtagatttaaattcaagtttatgtttgttgtatggcctcatatttaaaaagcacttggagccaaatgttttaaatgatgtgtagtctggtttaatgttgaaaagggtttctaggggagatttgttgcctaacactggagtaggcaacctattgtgaatgtacacagcagtcctaaaggtttcatcccaaaacttgaggggtagggaagcttgagctaacaaagcaagaccattctcaactatgtgtctatgtgatcattaatttatttatttgatttataaattnnnnnnnnnnnnnnnnnnnntgatattcttatttattgtgtcatcagcacagtggaaagtaatcaannnnnnnnnnnnnnnnnnattcctatgatttatcagcacacatggttaaactgatacgataatctacaatgtagtttacttnnnnnnnngataagtgctatgtccttttcaaggtattggttaaagtaagcttgggnnnnnnncatggagtatgcattggaagagatcgatattgaacttgaactagatatgataaactaattaccataatatctattcaatttaatatcannnnnnnnnnnntagatcaagtgatcttaatcctgagatggttagtaactagttcagttgcattatttgtgttcttaaatctgttcgttaaattcgaccaaatggttcttctcgtgacatataggttaaggacatggtagttctattgagtgggagcgctaatcataagtacagaatctataacttctatccggatatacatcaaatgatgatttctttcgagcttggcttaatagagataaatgattgagtactcatttaagtgattatatt

SEQ ID NO: 118143 - DNA, 1736 bp, Cannabis sativa
attagaaaataatttccataaataaaatattctaatattagatttacttaaaaatggtagtcggtatgcttgtacccagaatggagaataaatcatgatttcatgagtaacattttgcagcaaagtttgttgtgggagaacaatatggtgattttaaaagtaccatggctccttatctaaagcccttaattggtccccttcgcaaccaaaatacaagagaaacaaaccagaatgatgttctttaatattcaccttaaaacgaccatcccaatgctcgaccatttgcttttaagtgtactcggccacactttcttattggtaagaatacgggccacaagaataaattcatgtgactcgtctaactctgaaccatcatcaataatggacagaacaacactttctttttcagttaaggagattgcagatttcattttatgaacaaaaggatctatagattcaatgaagggaaacaagatacagaatgagaaagatgaaattcggaataaactgctgcagaatagaagattcaaaccagaaaaagagaaaatacagggttagaactgcacaaaccgataggtaactgtcaatatctgccacagagtatgaacatgggcagccactcttttcttctaaatagatgatatttggacgaatttggaaatatattttattacaacactagtattgcttttcctaaacgaaaaaaaaaaaagaattgtgtaacagtcattttacgtttcaaattttatttttgattattttttttttctttagaaataaatatttttaattatttcataatatttattaattatgttatttaatgagttatttttaaatttaatttacccttaagcaaaattataataaatggcataaattgtaagattatgttagtaagcgttcctatttcaaaatttgtagtaaaatgttcttttttagattatttattatttatattgtctttcgtcacataataaaatcaataattttttttcatagtttatttagaattataagcaaattacttaaagattagggaaattacccatcttacgacattttcaaactttttttccacttttacgttctctttttaaaattttcaattctataaacctttattgacataaatattttttattgacttttcaaattcatttttacatgcctggaagccactacgattcaactatttgatcgcaacttcaatctttcagggaagggcgtctttgtcgtcatcctcgtcgtcaatctcaacatccgaccctaaaaacataacaactcctctgtacacgcagcaaaaacctccctccccaatcaactaggtccctaaagttgacattgaactcagagctacgagtactgtcgaggctgttgaaggcaacactgagcgagcgagcccaagacaccttggagcgaagatggtggtaatggctggagattgctagagttgtgcgagagagagaggaagaagctgtataattggtaagtaaagtgtatttgtgcattaatttttatttgaccgtataaatgaatgaaaaattacttataaaggtataaattaaaaaaaaaaaaagccctaaagattatagtatatctatattagttttgttaatttgtttttatgtgaaagttatgttgatttttttaattttttatgagttgttgtgggttgttggtatatagattttgttatacagtatattttatttttgttgtatagtatattatta

SEQ ID NO: 118144 - DNA, 1285 bp, Cannabis sativa
tgttacatgaaaagttatagggactaattagcaattgttagtattgcctagttagtataaatatgtaatactattatacaatgggaatcaatgaatgaaaagagagaaaattaagattattcctattggagtttggcactgactcgaagagtgcaattcgatacaatcggtaattgtatcacagatcgtataagaataggttaaaatattattcattggaactccctattaaatctaaaattagattcaatgtattgtattcctataagatatattgaaattaatttttgataatttgtaagcaaattatctattgttgatgaattaaattatctacttgctagattaataatggaattgcaattaatttgttttggagatattaacaataaaatggtgatttgttgttaatttttggaacaaaattgatttcgttcattgcctgctattgattgttgattttgttttgatgaaataataatgaaaaaaataagtaaatagtaatgttagttaattgcttgtttaatttatgtaatttatttgttattatttatctataatacagtttaaattgagtttcatatatcttgtagtgtaaagttctttttgtgatataaacaatgaaaatgttgatttattgttatttatttacagcaaaatttatttcgtttattgcctgctatgaattgttaatcttgttttaatgaaataataatgtaagaaaaaaaatataaaataatgtatgtttattgctgattgcttgtttaatttatgtaatttattttgtttttgtccatttataatacagtttaaattgagtttcaaaaatcttgttgtgttaatttgtagaaaaataaaattattatcgttgactggaaaagttatcaactgacttggagtctaatatacgctgagtaatcacgaatagagagttaagaataataaataaataaataaaaagaacacataggattatagaggttcggcccccttatatatgtgtaatgacctactttccttttagttatattaattgtaagataatgtcgtgcatataactaaagaagacagtgaattctagctacaactctcaggatgtttatagagaatattcaacaaagtgctcttagtgcgagattataatttcaggtcccttccttctgtgaactcattcactatttatagggggaaggttattacaatcgactctgtaaaagaagtgatccaaaagtaaatatccctatattctagtgttgggttttgtgccctaaataaaacccattac

SEQ ID NO: 118145 - DNA, 2184 bp, Cannabis sativa
  modified_base (819)..(819): a, c, t, g, unknown or other
tattgatattgatttgaactgcttacatatatattgttttttcaaatatcaataataatctgtgtatatagttaatgctataaggaatcccgatgtgcccaatccaagtgagccaaccatgcaagaacagttcactgaaaattaactctcagaacatattatttaaatgattaatcttaggagttcttaatattgtgtgtgtgaattttgataataataaataaggttcttgttgaaattttggattgtttcatgaataagattttcttcgaacttttgtcctgtattggtggatgaatttagggtttaaaatctctaaatattttttggaaagattttaacaacaatttcttttatatatttatattaaataggtacttattaaaaaataaattaatatatttattttgatcattttacaaagattaaatatttaactataattttaccacggggtgtaaatataattttagaatacaaatataaaagtagaataattagtatttttatcccgtgaacttttagcactatctgattttgcctcttaaactatacggcttgttaaaaattctccctaaaatataacagttacataataatgccctttctgttcggttctattttttaccattaaaaattagcatctttaccccttaaattataaattaaaagcaattataatattctatttttaaaagcaattataatattctattaattcaaaaaaaaataataaacattattagaaatcggataaaatattaaattaattaaaaaatattaattttacttacaaaatcaaacttatttatatttatnaactcatatcttaacaaataaaaataatcgaaaattcaatgaaaatatagaattattttgaaaaaaagttataaattaaactaaaaaaatattatgtttgcttaaacaaatctacatttttcgataaaaataaaatatactcaagtttgttcttgtacaaattagttttttacaaattgaatttttaatatctaaatagattttctaataaaaataaataattatttatatctcttcattagttttaaaattttaatatattttttattttcttaatcattcaaaataattttgtttaagatcaaaattaattttgtaagatttattaaaaaaatgttgaatcttttttatttttattttgagggggtacgatttgataattgtcaaaatttaggggacaaaattgctaattaacaaaaacacatcatcatttaaacagaataatgggacgcaacctaacagaatgactaaatttctataaatctaaaagttcaaaaaattcttaataagccgtatattttaaaagttaaaattaatattattaaaagttttggagaagaaattgctaattattaaaagaaaaaaaaaagtacacataaaatttttaggtagagaattttattattttatatgaatttatattaagtacgtcccctattaaaacttgcacactcaatcaagaaacttgatatcatcatgtggatgttgagaaaatttatataaaaaaacatatgtctgagagaaaaagcttaccaaaaaaagaaaagaaagagaaaatagtgggagaagatatatataatcaatacacgaaactccaactggataattgaatgtgaagggctacacctacaactatgaactgtgtcccatacaaaatcagagaaaaacaaacaaaatcaccacaaaattgggagaaatatcacttttttgctttttgagaaatattttggtaagagtagccagcctacctttattttcttaattttcactattttttaagcaattattacacccttatcatcaaacagattcgaaatgtgaatgcatgagatagtaaaagagatttggcttgttattatgaagttgtcatattcatgcattgcatgtaccaatcttatgaatgcagatagttagcaattttttttaaatggggagataatgttgttcagttctactatcacacgttgcaccggctttggtgtggaacactgtaaaaataagttctttatgtatatatactatatttttatatttttataatacactgcttcaaagaggggttcaatacaattttgatttgtatgggctcgtttgtaacgccgtattaggtcgtattttattatattatattgaattgtattttat

SEQ ID NO: 118146 - DNA, 875 bp, Cannabis sativa
taaaataaataaaaataggcaataagaacactttaagataagcgttgttaataattatggataaataaagaatgataacacattttagataagtgttgctagatgtataatcctaattaaaacttttttattcaaaaatataattttaatattagagtctcttatctaaagttagtggattgtaacttctgtaattaacttcttctatctaatcgtgtaagacaagaaggatggcagagaaaaatgttaatctttagaatgccactatacatatcaagatatcttctacaaaaccaactctatatttattatgatcattaatttcaagaattcgcatcaataccagtactggtttgtagcttttatgctctaaaagataggcttgaaccattatatatgtataatttttctttgttgttttgtgtaaatatttattatgtgtttgggtaatgataataaattaaatttgagttatgccaccattaacataaaaaattatttttcttttatcttgtagctagaaatacatcttgtcccaagttattgaagcgaatagaattctactttatcgcatagttcactagtaagctctcttcattgtatttttgttatgacatagaagactatgatactaaattataaatttttgaaaatatacatatagaatgactcataacttctatgttatatatatagttttttttttcacctgccgtcattttttttttcttgcagtgttcatgaaacgaaaactatatagcgcacatttttggagtagttaattaacttctatcttctatgaagaattaaagttttagaaaatcatatcttgtatttgtacaaacaatattttgatagaataatgagaattatat

SEQ ID NO: 118147 - DNA, 1499 bp, Cannabis sativa
gcctctaaaggggatttttgtagtagtgttacctggtcttcaaaagcttaggcactgtctaagctagcttactcatcattaagagatggttgatgagcttcactgactcttagagaacacgttcatttacttttttttagctttagtaactgatcttatgtggaattgttgtgattatctcagtcactcaagcaattagtgttgttgaggtagacttaagctttataaaattttcttagttagttttatcaaaaatttgtctaactctataaaagaaaaggcctaagtcattaatgtttggttgggaggaattaagtagtaatgagaataaaaatgagaataagaataatggaatagaattaaatttaaaatgcataaaaataattgatgaaaaaattattaaaatttttgtcatcttgcgttagaatgggtacttcttctatttcaaaatagaatagtcattctactaaaatggtagaaaagtcattttacttaaatgacatttcaatacttcaaaatgcaactaaacaaatgaatagcataaaaattattttctttctatttcattccatttcattacttctaactgaatgtcacctagaagaatataacaaagagaaacgaagggttttatagagctcaagcgtgtttgatcctgagtctctcaatgtgagaaattatgtacttttttgcccctcgcgcttagtgtaattctcttgtatcgatcaccaattattcaataaagaacctcgaccattaaagggtacactaaaactttttattttaaatatgaattattacaaaatattattttttcatataattactaattattttgctaaataaaatattaaaaatttatatgtaattactttttatatattcaagcacatttaatattttgaaatatagtataattatagtgaactatataattaccacttgataattacacggtacattataattacactaaactataactagacaattattttccaaatatttgtacacgtacacactagctaggagtttatttatttattttgcacacttgaaattttcttgatcatccaatagtcatatatagtttagtgttattaaacttataattgtaattatttccaaggtgcgctttgacctttgactattcgtgatgaaatatattccaagagagaacaattttgagtcaatatttgtcttgagtttgactcagtacatgtttttagaattttcattgttttctataaatatataattagatataaaaatacactagtattagaataacttttaatttattataaaaaaaaaattaattctcaatttaaattaattataaataaaaataatctttaaattataattaattatgtattttttaaatctcttattaagaaatatatttatactagatagatgttacgtgtcaattcacatattaattttattttagtttttagttttttttaatatcataattttaaaattaataatat

SEQ ID NO: 118148 - DNA, 1199 bp, Cannabis sativa
aatttgctgctgcaggctggcctattcgagactcatgacatgatcctcgtgcctcaacttaccgcctcagagagccaggtcagaaatttcacttcaaaagtcatgaacatacttgcataggaggttgacggtgacacatatttcgccaccagagagcttttgttgtttactgaatttgacctcttcgtacacacatgcaatttgtgaatcgtatcctaaccttcgaagcccttgaaagggttctgagtcatttccgaacacatgtttcactggaatcctccaagaatattcttcttctccagttgcgctcaagtggtgggggttatttcctaggattgcttcctagtaaagtcattaattaaaccttttcctatctctccacattttttttagattagttattgcataacaccctccctccaagcatcctccccaagagctccaagcaatttaccccatctggtcttgtccatctttgagcatggttcaagtgctcatctccagtcgtgattttcactttgccaggtgttctctagatttgagttcttagaacttgtaatggtgtccttttgcttttaatatagggagttttttatttttaatttcaaagcatttttttttttgcaattttacataaattcacctagcaatcaacggagtaacttaaactgcaatccgaattcacatagcaaccacgtaaaaactataactcaaatcataaaaataattcctctttaatatatatgtgtgtgtgtggagccacatatattttggccaactgaccttacttaagaaggaagggaaaaaccacgtaggcccaagaccagaataacccaactcgtttaagcttgaaaatgtgtgtccaagatctctaagtaggcctagggttgattggtgaacagattccaactctattgacgatatttgtccatatgaacagagagaaagtctaggtgacaccattgatccaagtgaccaattaagcagatctaagcaaaatatccctactttttttgaaataaccctagagtcaattaggctaattaattgactacggttatttccctcatggtaaaatagagtagttaaggaaagggatttatttagagatggaaatttataccgtggggactcactcctaatgggctggagatttcctgtcttggtggttaatggggcggtggtgggggacaatttca

SEQ ID NO: 118149 - DNA, 4027 bp, Cannabis sativa
  modified_base (36)..(42): a, c, t, g, unknown or other
ataaaatgatttctgatctttattaattaataaatnnnnnnntattaaaatgagttttatttatggcacaaaacccaacaagtacctacaggggtggtaagacaccattccatatagttaaggctccatctttggtaaattcaaactattttgaccaaggtggatttgacctttactttttgagcttaaatcaccatagatatcccctcaataattatgtagatagagtagatgacatcattagagtccaaataacttcattccaccaacacatgatgtctgggtatctaatcttaataagatgttgtaatcttggttcttccaaaatggaagcctcttaggcagagaggatatagtccaattttctatagggaaccccaaatattccaaaataaatagtttggatctcacttgtgtattgcttctattcatttcgttataatgcttacatgctcattatttgaatctgttattttgtctcttctttttgcagtgcaaccactcacactttcaatgggcttcgtagagaattttcttggcaccatcaaccaaagatcaaaagaggtctgggacctagccaaaggtggtcgtggcaaagggaaggctacataatcttctgatgttggagctaagaagttagtacttccgctaaagactaagaaattattctaaaggctccaacttcagatgtcgtcgcctgtcctctagccacttctactgtggtggactcttcttcttagaaaggagtgaatgagattcatttggctatagttcctctccaacaaaggcctattgaagttgatgatgatgaggaagatgagggcaattggcttgtatttacgcaaaagaatagagctgtctctgaactgggaagagatagcaaaagatcaagggttgaagccaaaaacaaacttcagcagctggctgcttccaggaagtagagtttagaatcttttggtcgaagaggaaatgatgctcaggtaagagacaaaccacctaggcagagcaatcgttccagaaaagaggtcataaattctcaagctttgccatctcagccaaaccaagtccattctgcccagttgcctagagacaggacaaatcttccaccacttactccttctaacatcgtcttaacagtttgttcttcttcattgtcggaggacgtgtgtgttcaattagaggcagacaataaattttttagtaagagaatcaactccaaatacgaagatatggggaagaagtcatctttgctttcaaccacgcggggcgcaacattttttgatgctgcaaaacttaatgagccacttctcgctattgacactaaaaagtggccagcaccagctcgctagatttgcgacatgaataatgaatgtaagtatataatttagagagatacacaaaatttatagtagttcactccccatgtcgcgatggtaatagagctacgtctacttcgagtttaaatttttcaagagatggtattacagaaaaaggctaagtgtttaaggtctagtttctagagatagaaactagagagagatgctctgacattgtaggtaagtttctgaatataaaaaatgagctaagggagctcccattttataggcgaatgaggcctacaaaaatacgagaaaaatagaaattagatatttttgaccgttgatgatgatccaacggtaaaaataagcttatgatagtgatattcatttttcagagcctagcgggacctgttgcgggtaacccgaagtttatttttgtaactctcttaggggtgaaatttgaggtcgataactttagaattacgattgaagtgtgagataagacatgatagagcatttaattagcttgaaaactcaagttgaatcgtgttaatcgaataaatattaagtgagttatggttgttttactgaagtcagttcatgacccagcgcccaggttgacatcccagcgcccaggttgacatatgacgtcaacctggatgctgggtaaatgtaaaagcatccaagggacgtatttaagatgcctaagtgatattttgacatcacttagtctgttcctgtgttgtggcgaaactggtcaccatttctcgaagatgttcttgttttgtgaaaatgagagacaatgaagtcatttctaagtgagtttcccatgttaaaaatgggaagtgcaaagttgtgaatttggcttctctaacttcatggtgtctacctgggtgctaggtcccagttatggcccttcaaaagtttcgtttggtccccagaaatagttgaatctcaatcttttatgaaaatggagaagatgctcagaagttcacgtaaaacttcattggaattggcccaggtagaaaaaatgtcaacttaggtgttgggccagccccaagtgtcactgagtgctaggccttacttttggcgcccaagaagtgttgttttttccccgaaagtacttatttccatgtttttgatgaagatgaagaacgtgctcctggtgctcaaaaatgaacttacttcgaatttggttttgatgccttaaacatgtccgtggtatgtctagttgatgtcccaatgcaaagtttcacccattttcactaagaaggtcgtagaaactaaaaccctagttgggaatgtcaacttgggtgtcaggtgaaaccctaggtgctcaagttggctttcagggtgtaggttcgtgtaatttcaactcccaaggcttggatttgattgctccatgtcttcatggtacaaaatactgaaagatagtgagttggaaatgagttatcaattctaaacttccatcccaaagttctcgaagttaacctgggcatagggctagggacccctcccaagctgacttgttatgactcaggactactcaagtctgagatgtcacatttattgccatgtgccaaacattgatgtccatgtcattaggaatactcttggtgtaaacactttgatattcgatcgtcaagcggttgctgagaggcttcgacccagggtaggctcagatctggctatattgacagcagacttattagacttaaatgttgttacatgtagtagattaggttctcacaagtttgccacaatggcgagtagagatccagtctttatggttgatagtcttaagaatcatgctgctgccgtaagcttgataacttttaactaagttatatatataaatatatctatatctctctctctgtttaatctttagcttacatctaactccatatattttctttttcagatgagtttgatagcagaaagatgctcttcctaggtaaataagttagcttatgaaattgagaccttgaaggctgaacatgaccattctgagcaataaaaggaagaagctttcaaagctttagatgatgctaagtctcaaaatgaggctatgttcaaacaaagagttgaggcttctcttaatgatgcagtgtctaattataaagcctctgccaaggtggagaatgagcgcactaaaagatacaaagagtcttataatcatgccttcacacgtttccagattggaggacaaattaactgatgctcagaataaaatcaaggagcttgaacaaaaagtgaactctacttctcgagactataacatccaaacgaaggctctcaacaagaagatcatcacagttgccaacttggagaaaaagctaaaacaacatcaggatctccaagaaaaggctgaaacttttaaacgggcaactctagaaaagcttaagagctctaaaattaaaattttagccaaacttaaagaggctaagagtactttggatgagtttcaaaagcgtgctaaagaataagttgacaaggccaaggctgtcattgtgaaggatgaggcttatcctgagagtcttgaagagaaatgtgccagtatggaggtggaacatcaagaaaatttaaagaagtctctggttgttacctagttattgggttttgtgccctaaataaaacccatttcagtataatcagatttacttattagtaaagatcagaaatagcattttatgttgcatggttca

SEQ ID NO: 118150 - DNA, 3115 bp, Cannabis sativa
  modified_base (57)..(85): a, c, t, g, unknown or other
  modified_base (2951)..(2953): a, c, t, g, unknown or other
atcatgtgaaccatgcaacattagatgttatttatgatctatattaataagtaaatnnnnnnnnnnnnnnnnnnnnnnnnnnnnnggcataaaacccaacacaacctactgattggaccttatatgaattgatgggaaaatagtattaaaatgattctttttatgaaaaactaaacagctaataacatttatttaaaatcgtacttgaaggttctcaaaaaataaatatgtcatatcagcttaattgtttaaagacattattggaaatacaaagtcattttacaaattgttagccacttttattcaccacttgaagattgatattactatgccttctacagtaatcagatgtaagatttggttcttacgtcaggtttttaaagtaatttaaatggctgaaagttgccatttttttaataatgtacgtcagggttttgacagtgttatgtcaaatcatttcaggaaatcatgacctaaagatatttgggatttgatttttaattaacacattatttaatacactaattatatgaaaaattaaatctactgatattgtatacttctttttcttgtgtaataataattaaaaatagtatttttttttttggataagatcaacttatatgatcttattcttatataatttcgaactattaaatagtttagtattgaaatgattttatgagtaaagtggtacttacaaaaactagtctccctcagtagcaatattgagcctattttaataataataaaaaaaataaaaaaaccgaattaaaatattgtacatagtggtgcctagttacaattttgtatcaactttaattaattgattcatcaaaccaaaaaaaataaaataataaacaactagtttctccccatgttcagaaaaaaataaaaaataaagaataaacatttatttaacaatctatgtgaaggtttgtttaagaagttgtaaatggtaaaaaatatattttttatgtaccacaaaaaggttcatcttctcaccacaacgaatactttcaaaaaatttatttaattgggtgacttataaaataagctgttgtcctatcataatttctacttttcccattttacccctttacttgtcattgtaattactagatgagttgaattgacattaactttaagtttatcaaagaaggtgatgtcttatcgtaaatttttcctttcccaatttacccctgtactactttcaataaggtactcgaatatcattgcagggctatgacttatcaattgattttttacacgatctccaacttcacatcataaatttaaaagcttttatttttaatatacagattaatattttagtaaaataccgtacttcgagttgttttaaatgtatatgtcacatcatatttcttttagtaatgtaatattatcaaatattactaatgggatttatttccattgtacacattgtttaactataaaatagttaaattaagaaaaaagaatcattacgtgtacatgaacctcattacgtgtacatcaacccacccaatcactatataagtaaaggtttggattttaaaacaagacatttattgaaaccctgtattagtatgacctactaaacatggacccttacccgaaatttaaccctttcgaatcaagtcttgaaaagtccccacctcatcctttttcttcaacaagagccgtaggtacaccttcatggagtcctaaactccattcaactttaatttatggatgtgtaaactgtgctaggctggagggtgctctgcacgaacacaaaaaactcatcaagcagccacatgttaaagccatagaggctaagcaggagtcattaaaactggcggagcacctctaccattccacccatgccctgcaacatgcgaacacttcaagagaaaaattggaaaatatcatggatgacattctcgactacaccgaggtctccataccccattacccaatccatccgaaataagaaccgtcaaacgatactccaagaggaagccctttgcgacccaagtcctcgttctgagatagtagccctccatctcaacggaagttcccttatgttacacaacttgattgaacatccgttgagtttcatttagtggtattttatatatgtatgtagtacttattttaaaactcctctcatatggccgttggagcactttttgttatgccatttaatgagatttaagaactttgtactattgttttactattaattgaatgtaaatgtttgtataatataagaagtctattttcattttgaacttagttgtgatgtcaaaattatttaattcaattttaattgcacacttaattaaggaggaaagtcacattactacttcaaaataaaccaaatttcagatttcaccacaaacactgttgctacataaaagcttaaaggaatacataacatgaaaactaaaacagtacatcatttattgtttttctgagaaggatccattcctccgttgtctcccccttctatatcatcttcatttggctccttacctttctcactagaatcttttacattatcttcttcgggtgatttatttacaccagatcagtcaccctcatcaaacaatgaaaaaatagaattaagattgcttcttcatcattatcatcatccaaatcccacatgcatggaaaattattaacacaacaaagttctctcacttgctgcccagtgaagcatcgtcccgtttctccatgtagacatgcagcagaaaagacttctataaaagaatcataatgacatattttgatggaggaaccttaattaggatttttgtttatagcatcttcgtagctactataaataccttcatttggcccattgaaaacaacccagttgggacctaaactcatattcgatatattctaatgatatgaataactaaattacaagtgaatttgctctataaaattgatgatggatnnnaacacctctcaagtgtgttatataatatctcaaggataagttatagtacgttttttacttagttgttgtaatgaccgctttagtaatttgaattagtaaaggcaattagcactaatttctgttatttttatgattatttatgaattaattatttgtcgaccc

SEQ ID NO: 118151 - DNA, 1734 bp, Cannabis sativa
aatctcactttcaaataacatagaaaaaacctagcataaaatttagtatacgtgcctcgcacgtagttttttgctagtatttatatatacatacacatatatacaaaaacatatgtatatacatatacacatacatacatacatacatatatgtatacatacacatatatatacatacacataaatatacatatacataaataaaagttcacacaaatactcatatagacatatatatacacaaatttatacccaaataaaaattaatacttaccttcactgagagaggggacgtcggaggcagcagttagggcacgacagtagcgcagtggtgctgtaattttttttttaacaaagagaaagatggagacaaaggcgagagaaaaagaaaaaaagggtggatatgatgatagtggtggggataatcggaggttgtggagatgatgatggtggtggggatgatagaagtttggtggagaagaagagaaagaagaagaagaagaagaaaagagagaaagaaatggggaaaaggggaaaaggggcttgggctcgagttttattcaggttcaactttgaccgacgaagttaggctcgccggtaaaggtttttacctaaaataaacttgaaacgcagcgtttcatttaatgcaaaatattttattggcgagcttaacctcaccgacaaaactttttacctaattttctgtgcatttttttactgcatgggaattaaactaccaaaaatttcatgactttttccagcgcacttgcttgctggtaaaagtgaaattaaaccgcaaaatatttattaacttttatcggcgcatttactttcgccgacaaaagtgaaattaaatcgccaaagttagctctttttggtggttggtttaccaccttttgccagcaaaactactatacttaaccggcatatgtcacttatgccgacgaagtagttactcgccggtatagaagtttctcaaagtaaaatggggggataattttgccgcctttcgttggcgaggttcacgaactgcgctggcaaaagttaacttttgccaacacagttcatgaattgcgccgacaaaagctctttttcttgtagtgtgggcgcagggctaggatttcctcccatgtcgactgctatgactcgaatctactcaactccgtgatgtcatccctcttatcatgtgtcaaatattgatgtccacgtcatcctgagtagaaccaaagatagtaactccggtctgattccgacgtcgcatgagggagaagggaaactagaaagagatagagaggtatcgccaaaagaagagagcgataaagagattaggattttttgttataattttttttctgtaattttattattttatttattcaaattattttatattttgaaataattttaaaatattgtgggctacttaaattttgccatttgtatatataccaacattacatattgacatttaataatattattttaatggaagtgtaaaaatcaaaataaaagtgtaattcaagtagtttggtcgctaaaaaatcaatttatgtgattaagtcacaaatgggatagttcaaataattttgtcaccaatacccaaaaatattttctacttcattaaagtattacagatactaaataaataaatatttatgaaataaaataatatccatagtgtttgataaaattttataaaaaaaaaatattctttttacttcttttttttttttt

SEQ ID NO: 118152 - DNA, 3736 bp, Cannabis sativa
gccttagaaaggtatgcaagatcatttcaacatgaaccaagagccaaagtcctagaggttgcagaacgtcctccaaagtcccaaagctacagatgtgaacctattaccttcgaagaatcagattccttttatggtagatacgccacaatgaccctttagttgttgaggtgcaaatagctaatatgatggtggctagggtgatgatcaacgatggaaaattatcaaaaaccttgttcaaacaagccttaatcataatgggtttgaccttaaaagacttgaaaccatgcgagcaactgtgtatgggtttagcggagccgacattggttatgtggcaagatcaaagtgccacgcactatcggcattgccctatagcagaccaccatcatggccgcgctcatagtggtggatgtgaagtctccatactacgtgatgcttggaaggcccgctctctacgaccttcgagccatctcctcagacaccatttatccatcaagttttgaatggtgcctagtatcgattgtctccttggtaatcaaggaacaaccgacgagttttataacgcatcattatcacttgccaagaagaccttgtctatagctatggcttcgaagaggacaaacaagacctcctctactgccatggcaccagggggacgagcaatgcctctcccgcaaaagccgaagagatgaagaagacctctagagatcaaaataaagagaagacagaggcgacacctaaagccacttgaacgtgcacccaagatgaggacgacattgacccacattttaaggaaatcaactccgaagttgatctgattgaggaactcaaaggacttcccctcaacacaatagtcccgactatggttttcaagattggatcaaacttgatagaggtcttgagcgagatgctcatggcttgcctcaaaataaatgaagacattttttagggtcgcatgaagacatgatcgggatcgacccccatgttatttatcatgccctcaacatagacaaattgaactttaagcatgtataacagaaacacaggatccttgacaaagagcgttccaaagctctcaaggaagaagtttaaagactaaggtaggaaaacttcattagggaagctttctacccagttttggtatccaaccctactctaatgcctaaatcgaatggaaagtggagaacttacgtaaacttgactcctaaaccaagtatgcgctaaagattgtttcccactaccatgaattgatcaactagtggacgtgatagtcgaccatgaactcctcacattcatgaatacttataatggctacaaacaaatcaacatgcacgccccatatgaagagcatattagtttccgaactgacatcaggctttattgctacaaagtaatgccctttggactcaagaatgcaggtgtaacttatcaaaaactagtaaaatgtatgttccacaacataattggaaacaacatataagtttacattgatgatatgatgattaagtgaaagaaatctgaagaccacatccatgatctagaggagtgcttcaacatcctgcgtgaatattgaatgaagctcaaccctctaaaacgtgccttcggcgtccagttaggaaagtttcttagattcattatcaactcaaaaggtattgaagcatcactgccttgcaagacatgaagtcacagtcgtagataaaagatatgcaaatcctaacaagaaaaaattgctgcacttagcaggttcgtctctaagtaaaccgacaagtgtattcccttctttaattcacttaacggaagcaacaagttgttcgaaaggactgatgaatgcgagcaagccttctaagatctcaaacattacctagccaaacctcctatcctatccaaaccaatagatggtgaagaactaaaaatctatttggcaatcatcgagcatgtagccagtgctactctggtgtgtgaggaagaagggatacaacaccttgtctacgacatcagcaagcatctcatcaaggctaagtcaaggtatccccccattgataagctagcccactgcttggtcgtggcctctagaaagctaaggtcatacttccaagctcacacagtcaaggtgaaaactaaccaaccatttaggtaagttttgaaaaagctagaagcattagggcgcctattcaagtgggcagttgaacaaggtcagtttgagatcacctacaagcctcgaacactaattaagagacagtcattagcatacttcattgctgaatgtactggccatgaagaagacaatcccatgatttgtgatttctaggtccacacgcctaagactgcaattcaggaggaccttcctagaaactttatgtagatggctcttccaacgagcacagttctggtgctggactcatcttaattactctaaagggatttcaaagtcatagtgcattgcgatttgagttcaccacaaccaacaacaaagtggaatatgagacactcctagcaagactatatttagcactaacaatcaaagccgaaacactcaaattctatagtgattaacagctagttgtcaactaaattctcaaagagtaccaagatcgagggtcaaacatgattgcatacttaagcaaagctaaagatctattagcccaactcaagcactattccatccaacaagtgtcatgtgaatagaatacaaatgcggactccctatctaaactagctagtacaacagattttgacactcttagtgtatttctcgttgaatacgttgccaaacgtaggattaatgaagactcagagcctatcctgataattgaaaacactccatcagggatgaatacaattacacagtacttagaacaaggtattattccaactgactagaactaagctaagagattgatgaggaaagcagctcgctttgttatcctaattatgacgaggcatgtggacacgtgaaatacagagtgtcaataggtgagcaaaatcaccaggcataagagatcaattgatgagggatcaagagacacgggcaagatcaagttacaagaaaatggtcagttaggaaggtttgaccagaccattgcatcctggtcggccaaggatgattatatgctggccagacccggatagaaggtaggccgaccaacacatataaaagatcatcaaaagaagcctaattgaacggtggggtccacaactatcttcgtgggtgggtcacaattcagtttcagctacgagacagttataacaacacacaaatgtaaggattcaactccaaacaatctacctatcttttagggatattaattagctatttttgtaacttaaatatatgataaaagactgatgttccctattttaaagggatatttacttacttgaatatagatattttgtaagctctacattatataaagggcattaggcaaagtcaaaaggacttaaattctaagtccctcaagccctagagcactcttgcttctttctcacacgtcacatacattcactagacacttagttaattttctcatctcacttgttcagaatctgtcatacatcagttctcaccattataacattctaacagagtcatagctagaaattacaaggtaaaaaacctataatctgcattgttgtcgagtgaattttgcaacaccaaattatgttattttgttaatacgaaagagaattttaagagaaatgacaagtgcgagtgttcaacctagaatggcgagtactc

SEQ ID NO: 118153 - DNA, 1015 bp, Cannabis sativa
tttttttttgaaagaacttattcaggcctttaggtagtcaaatttaatagtaattgttataagaatttatagatggttctaaattaatttattttgtaatgatattgttttatacaagtttgtttattacattataaattaaatcaaaattaagtactattattttacgtttgggcaaataagtcatcctactactttttttcagaaattagttctcaaagttagttgctttgatataagtagttgttaggacttatatttagctctttaataaaaaaaaatataattaaaaaatcgatagtaagttgcaaaaaagtaattaaaccaatgtttgcctaagtggtggaggtcctatgtttggtaactataagggataaaaataatatggggagttttcacttttacaagagcagtaaaactaatgaggtaacgtggcaggaaaacgaactgtttcatttaaaagaaaaagaaagacaagagagcaaagcttagctcatgataatatggagaatagagctcgacgaatggagcagaagggaaagcacgcgaagaagcgaggagaacgaatccacgtgcgccaatttgagtagaggaaataggatcacacaacatctcttcccgcttataaataagagatcctatcgttcaaaaagatgatagattctgagcatactagaccagtcgaaactctgtcggattacatctttaaaatacttgtaagcttagggttgcaaaaaaaagaagagaatcatgaccgatttaggaaaaattgtgtattttgcagaattgcaatcttttgattggatcaatcctagtgcaaggaattctaagtgaaaatataaattttttgttgagataattttcaacatcaacagttatcgttgtttatgtgaaacactagaacaaaaagttgaggactaggctacatcctaatatgggatccaaggaagtatcggagaatgcgcagaaattgtggtggcgaatgaaggagatactgttagacatttatatgtat

SEQ ID NO: 118154 - DNA, 896 bp, Cannabis sativa
ttgtgctcgacatgccgtgaggcatgacttgccatttccttgtaattatgtttgatgaatgaaggctttctgttcaaaaaaaaaaaaaaatttggacatctaaatttaataatattatagcactaaatttaatatatgggttggagatgctctattctcctctcccaatatttaaaaaaaaaaatacagtttatcttcattgtgtgtaatatgtaataaatgagatggagttagttttcaaattgaacaaggtatcggtaagagaagtaataagaatgtgatcagccacgtggtttggggccataacttttgctgtgtttcaaagctttttctgatagaatcatatgcagtaggtactttgggacgtgtcaagtcgcatcgcatatgggccgttcatctgaacaccaaatgggcccctccaacagtaacacaagaaatgcaaacggtgctgcatcctcctttcgcagctttagcagccgtacacactggcctattcaaactattaaaccattcctctaacaaaaaataataaaaaaacttatacagaaataaatacataccaggaatttaatcccttttttaccagaaaagatttggtgacattaaattcttccaactcctaagttcagtcctaataaacggctgtggaatcaaagaaaaaggacttaatatgactgcaaaagacggaacaaaaaagtaaatggagaaataattatgtctctttattctcaaaaaagagaagtttaaaaatatttgcattaagattaactaatcttttttattcatggcttagtaaactaaaacccacttcactaattaaaggcttgagaattacgttgttgttgtagtttttttttttcacaaaaggagagcaaaaggagagagagagagagaga

SEQ ID NO: 118155 - DNA, 1570 bp, Cannabis sativa
  modified_base (66)..(67): a, c, t, g, unknown or other
aataatttttatagagtatcgctagccaattgcaagtcgacacatttagaaggtgctaggcaccannggtgcccaatagcaatgctcatatttacatcattatcttaggtgatgttacaggcaaagggcctagtacattaattatatatagttttctccaaattaatgtccatggtttgagaagctaagctttacctatagcctaggatctataaaaattaactataggcttagaaatcaaatcagtattcgtaatttttttaattctaaacctatataaggataataaatggaataaattttgtgaagctagctactaaacttctgtatattagtatcttcattattttgatttaaaatatatatatcttcattatttagctttcacaaatgaaatatggctgagaactccattaagttctagcttgggcccatgtaagcccacgatcaatggtgattatagcttctgtgtactcatttaaatgtaacatacatatcatatggcccatatatatactctgtggtccatatagataattaatgaaagttttatatatcgggctcatcatcatagtctaaaagtattatatcaatatatttaattaagatccctataattattatgaattaataaagttctatattttattcaaaaaaaaagtccctataataattatgaattgcaacccgccaaaagattgtgtttagaggtaataagtaaaaaagaatcatgaagtaaacgaaaaaagaaaatatgtttataggcctggccttataattgtggttgggccatttaaaaaattgtatggttggtatgtgatcgaacgagaacttattaatttatatatataaaaaatgagtgagtggattcatcatatcgaataatcgatctcttcttttttggtgtgttgatcgcatcttactttacgtgtgtttttatatacatgattttttgttcaagtgaatgatggcagtgaccaagaaaagggaaaataattaaagtcatgatgaaaggaatcagatcgaatttttagaacgtaaccttaatttatataaattattatattagaaatatatattactttatgcataagcaatctctatatagctagcttggtggtttttgatttatcttttatctcatcagaaaacttggttgggatgttttgtcgagttctgaaatgatacactgtgaataataatcgaacagtgtatcccactaccactagcttgtatataatattgatcgatcactaccgattgactataaaaatgtgtttgtcatattcatatatataacatcataaattgctatacagcttgtaagattacaatgatgatgttttgctatgacaacgccatctcaacactctgcaataatataatttctgttcagccatttttggtcctcaacctcatcgtaaggttatggttacacacactttcaacctatattgttcattaatcatagctaggttttcacttttgatgactttatatatatgtatatatagacattgttgagaattatgggtttctatctcaaaaccaattggcaatgagtggagta

SEQ ID NO: 118156 - DNA, 1622 bp, Cannabis sativa
aaaacagttttatagaacatgcttttgaaaaatatttttactttttcaattttaaaaacagaaaactgattaaaaaagtgttactaaacgacacctttgattcttcacatataaggtttgctcacttttgcttttacaaaattctttcagaggaaagtatccatcaatttgactataccaagttgtaggagtttgtttgagtccatataaagtcttctttaacttgcacacccttttcttcttctcctttgacaacatattcttgaggtttctctacgtacatctcttcttttaattccccatttaaaaaggctaacttataatttcaagttggtacattaaccaactttttttggtagcaagattgtaacgccctatcactaaggcacgctacagtgactttttaattactgtgcacgtctttactaataattttttttttttagaaaatcgtgtctaattaaaactttttaattaaactttaaacttttataactatatacatatatctatacaaaaagccaagatcttgcttctaaaatttaaattcatgttcaaaatacattttataaacatgtcgcacgcaagtacaaaataaagcacaagtcgtctcaagactaaactctcaggtcgaatcacgtggacatgtacaatcatccatgagctctgaactcacagttgctcaggcttagcctttcctttacctacatatgcaagcaatatatgtgagtccacaaactcagtaaaaaaaaatataaaagacataatatattaccgacttgtatttaagcacccatacaactatccataaggcttaacagataatcaagaacattcttaataaaagtacgatatctataccacatgcacttattacttatcccgtactagtgttcgtagggctgaaccgtacccaagtactattgagtattgtaccatatgcactacgcacttagtgttggtaacgccaaatcgtaccttttgaaatatcatatgttgtactgatacagttagtattgctactgtactagtgttggtagcatataaattaaataaacaacatgcatataatacagatacacacacacacacatatatatatatattctatgctagtcttaccttgtttctaaagttaagtgtaccggttgagttgaatggaaaaccacgtgctagatggaggccttatgtcacaatcacataactcgggtaaacaacttgctaaagcttttcggggatctaaactcaaaaatagaagttttcctatcgataaataacaacgcaataccctaaatatcgaggaaacagaagaaaaatgacactacgggaaaattgcttgaaaaacggtgagctatttttctagttttgcaccattaaaaggagtaaatcgtttctgcaaaagcgatctaccatttttcattgtagaaaaataaagagtctccaaatcaaccccaaacatcatactaagctccaaatgacataataacatcataataggccaataccatgcaacaaaacctcagaatatgtaaaaattagaaaactgccattgttgagcaactactacaaatatcagaattcgcgacgtttctaaaaataatttttttcggggaccgtcgcta

SEQ ID NO: 118157 - DNA, 2353 bp, Cannabis sativa
ttattttctattttaaaccgatacatttcttccattgattattctgattccaattacagtttagtaaacgctctattaatcttctgttcttttttggcaaaattcttttattttatgtttattttttttacaaatttgtagttacctatacataagtgtatataataatcatttaattaatatttaacagttatatttatttaacactttaaatttgaaaaaaacaaagtaaacttaaagttttgccaccagagaaagattaggagattaaataaaaattaaattataaagagattttgctgctaattactccaaattataatggcttagcaaaaagaaaactttattgtgatgtgtattataacttaattagaaaacaaaattcacgtgcaagtaatgtgcagactgcagatcactaacaaagcttaaagaaacataactcaaacgattaagcaatgttttgtaatcagagacaattaaatcaaattgagaaggtattgaaacaacactcgatttggcttggacacgaactaagctatccattttcaaaactacattgtcctgctcaatctaactcagagtctcttttattcgaatgatttctgcaattttagactcacatataaagttaattaggtttaattaagtcacggtcgtagacctaagtaggtccgtaatgtatgacgagctttaaaacttacaaaatagtaatagtatatatacacatataagtttttggaaaatttttgagctataaatatacattttcttcatgtgcattttacgcacataattctataggtgcattttgcactggtaattgcacaaatagatattttccttcactgtgaaaattatcgcgatatattatataaatacatttaattatagaaattatgaaaaaggactcgattaaaaaaattattagcaaaactttagtcttctaactccagttatgttgggtactatcccctttctgactttggggtaagacagtgggaaatagtaccatacatataatgaagtaataaatgagtgtcattgctgcttgaaacaatctaaagttatacataattaatgtttaaataaaattaaggtaaatacattattaattgaagaagaatatatatgataacaaataattatactattaaaaaagaaaaaaaaaacatactatatttaatttgaacagattatatttatttaaaaatttatataaaatgacttaagaaaatataaatctaaaattaggacacttattatgtctactggttaatatatcatgcatacattctgagttaaacatatgatcctaaagaaaatttcttacccctttttgtattcttctgggcatattggacattcatctccttcgaaagttatattttctccaaacgaaattatcttcgagatgttcgtctatgtaagttttctttaatcaggtgcattttgcataggtaaatacataggtgcattatctttaggggcatattagactcacgcctaaagctaattaggtctaattaggccatggatgtaggcctaattaggcctgtaaagcaactgttatttgtgtaatgcctgtaatgaacgcatctatttacatttttttggtgtattttgcgtaggtaattccactgatgtattacttttaagtgcattttagactcacatctaagtttaattaggtctaattagactatggtcgtaggcttaattaggcccgtaatacatgtcgagctttctcaaactaaaggattcaaaatctacgaaatattagcagtacataaatatacaaataaatcttttggaaatgcatctatagtaagtacaaatacatttttctcaggtgtatattgcgcatgtatatctataggtacactttgcactagtaattgcacgagtggatttttttcatcaccgtgaaaattatcacgttataagatataaatacatttaattataaaaattatgaaaataccccaattaaaaaaatcattagcaaaattttagttttctaactcaagttatgttgggtactatcacctttatgattttgggataagacagtaggaagtaccatacatataatgaaatgataaatgagtgtcattgctgcttagaacaatctaaaattatacataattaatgtttgaataaaattaagttgaaaacattatttattgaaggatatgtatgataacaaataattatactattaaaaaaatatactatatttaatttgaatcaaattacatttattttaaaatttatataagatgactaagcaaatataaatctacaattaggacacttattaagtctactggttaatatatcatgcatacattct

SEQ ID NO: 118158 - DNA, 1516 bp, Cannabis sativa
tacatgtcaaaattcagggggaaaaattactaattagccattatgattttatatccaaatacatattgtattttaaaatagaatataattactctcatatgtaattactaccctaataattacatagtaacttttagacgcacctagattatgtttgaattatggattttatacacaaatacttttctctttataaaaacttctttgaaacttttgactctgtcaagcattttgtgatcattttaattcttccaaaattagatataaagtttttgttacagttctttttgaatccaaacaaaagcatattaagggacttcattttatttcatcaaaattataggaaggttatgttatgaagttgtctagtcacttaatctcgattgcagatggcaactcatgattggttcctactcaacattctgttatttctgttgctccaagtcctacatagtttagataccaaaaattagaataggcattctaggagagaatcttgtgcgagaactcgatttagagatcatttttgtttctgtattagagtgttgagaatcattgtaagacgattgatcgaagcttttgttggccgttcctaccgtggattaggctcttaaattagaactgaaccatttaagttgcgtttggttgaaaataatcaaataaactggaacgaaaataaattaaatttacatttcattctttagtttagttgtattttaaagttatttttattctattttaaaatagaaggaaacattatttcaaatgcatttatttattggaaaccatatgaagactaagattttaagttccaaattcttaattggcagcagtgactgactgactgaggagttattcaaaatgattattcaaagacaatcaattcaattctagaactaaagttattctcttttactttactttatgtgatatattaaaagtcaagcccttaatttggtttgaaataattcaaaaaatgtgacataatatgcctcaaaattcttgtaatatggaacattttctttgccacattagtcaagaaaaattcatcagtccagcaaagagcatcagtttaggcagagagaaattcagtaagagcatttgtatagccgaactttagagagaaaatactcagtaagtgagtgttttagtaaatttagagaaacacttcgggaaaatacattgagagatattattagtgagaaatatttgtatatgtattttgtatattttgtactcaatttaataatatcagttgtcttgtgtaaagtaaatgagttgttgaaccacatatttattgctttcgcgcacaacaatattaaggacaaatgcatgtgataatgtctaattaaaattgtcaatacataatgtatatcattttgtttcaaaaaaaaaatgtatatcatttgggataaacactactacaaaattgggctttagaggcggtttttaaggggttttggcgtcggttttggcgaaattcgctaccgacgctgttccaggtgacgctataggg

SEQ ID NO: 118159 - DNA, 3495 bp, Cannabis sativa
  modified_base (64)..(65): a, c, t, g, unknown or other
gtgtttaatttattgttttagaattcatattaggatgttgatgaaacatacttgttagtaaatnnagatcctggtaaaatatttccaagacccgctacttgtactctctttcactcagagcttgcaaaaggtgtgcccgtactcttctcgtgtgcttaccttgtcattgtgaccatattcttgtcgcttcactcccttcttgcttgggaaaactctaccaagtttttcaaggtcatgatggagtgactttgcatgcgagcatggctgcatgactttctcgacatcataactgagtgacattctcaatgtcatggccaagtgacattctcaagaagccttttttgggtgacttgatgatgcatgcatgatgagtgactttaggatgcatgcatgctgagtgacttgaggatggcccaaggcttcttctataagtgggtcttactcgtcttgcaccctttagtgttttgagcataactctctcaatagtaacttgatttgggcaattcaagttgctatagaaatctaagaaaaatatctacaaagctaagatgtccttggtctagtgacatttcattgcctttactgagtgacctcttgaatggtcatggccgagtgacatctgggaagccttgtaccacttctgtattttgggcaaactccctcaatattaactcgattttggcaatttaagttgttatataaagctaaggaagagatctacagagctaacatgtccttggccgagtgacatttattgcctttgccgagtgacctcttgaatggtcatggcctagtgacatttgggaagccttgtaccactttcgtattttaggcataactccctcaatattaactcgatttaagcgattagttgctgtagaaagatgagaaaaagatctactaaagctaacatattatcagccgacatttcattgcctttgcctagtgatctcttgaatggtcatggccgagtgacatcctggaagccttgtaccacttccgtattttgagcataacttcctcaatattaactcgattggggaaattcaagttgctatagaaagctgagaaagatatctacaatgatgggatgttcttggccaggtgacatttcatctttgttatggctgagtaccgttgtcgactgacttcattcttggtcatcgttgtgtagtctttcataaatcctagccaagtgatcacctaagctatggttttgtcgatagaccccgcaccatattctttgacttagtcattccttgaccgattcttaaagctaagttctcttgcttcctgagactaattattgacttatctcaaaaataaacctcgtcgattctcggggttaacaacaacttttgtctccacaaatattgtcttgaaaaattttctcttaacaaattttgtctttttcctatttaattaattttaaaaaattatttatttattacaaaaataaataaatactattttgccaattcataagtactagatccataatctgaactgagattacttgcaccaaagaatgggcatcagtgaaccgtattagtaaccattaattaaagattctataactttaatatgttggtaactgttttattcatagctaagtgatatttgttctctgtacaactataagtcaccacatcatatatgaataagaaattttccaattaataatttaacacttatgtatatatcaaaatgatcaattctttattaaaaatctgaattatctttatatgttttttggagtataaaccttaacaatctcccacttgccctaaaaggaaattgtgcatctcccttagtcccatattagttatatgatccattaaagattttactaggagtgtctttgtgaatggatctgccaagttatgttccgacacaatcttcaaggctttcacatcacctctctctactatatcccttagtagatggtacttcttctcaatgttcttgcctttcttgtggctctttggttccttggagttggccaccgatccactattgttacagtagagcattagtggtttttatacttctggaactacttctagagcagtgtaaaatttcttcaaccataccactaccttagttgctacatattacccttccatggttgaatctgcaatactggtttgcttaatgcttctttagactacaacttctccaccaagagtaaatactaacctagatgtcgacttttgactatctttgtctgattgaaaatcacaatcagtatatcctgtatgatttaactctccaccagaatatacaagcatgagatctctcgttctctgaagatacttgagaatgtgctttacagctatccagtgttccaaacctggattagattgataacgactaactatccctacagcgtagcatatgtcaggccttgtacacaacaatacatgcatcaagctcccaaatgctgatgcataagggtactttctcatgtcctctttcttttgaggagtctttggactttgatccttacatagagtaattccatgtcttgacggtaaatgtcctttcttggaattttccgttgagaatcttttgagcaccttatcaatatatgttgcttgagaaagtgctaatgttctccgctttctatctctatatattttgatcccaagaacgtagcttgcttctcctaaatcctttatttgaaatttattggctaaccacttcttaatgtttaactacctttctatattatttctaataagtagaatgtcatcaacataaagaactaagaataccactatattacctttaatgtatttgtatacacatactttgtctttattttttcaaagccatactctttaataaaatctagaggcttgtttcaacccataaattgatttaagcaatttgcacacctttcgatattcccctggtaatacatacccctctaattgttccatataaatgacttcatcaagattggcatttagaaagacagtcttgacgtccatttaccatatctcatagtcataagtggcaactatagaaagaaaaatgtgaatggatttaaacattgccacaggagagaatgttttgtcatagtcgatgccttctcgctgtgtgtaacctttagctacaagcctagctttaaaggtctccacgttcccttctgcatttcacttcttcttgaaaatcaacttacaccctatgggtgtaatgtcattaggtggagtttcatattcccaaactttgttggtgtgcatagaatccatttatgaatctatggcattgttccacttgtctgagtcagggtcttccattgtctctttataagtcaatcgatcatccttgtctgagtcaggtcttccattgcttcttaataagtcaatcgatcatccttgtctgtgttagagacaaaaacatgtgcttcatgctcatagcagaatcctcccactacgatgatgtacctattggattgtctgtcctaaataaaaccaatttcaatataat

SEQ ID NO: 118160 - DNA, 1499 bp, Cannabis sativa
  modified_base (487)..(502): a, c, t, g, unknown or other
  modified_base (641)..(642): a, c, t, g, unknown or other
tctctctctcagatatctctctctatttctcactctaacttctctctctactgtgttgtgcctctctacttcttgttcttcttcccttgtgattctcttatggaatgagaggagtagtccactttatataggccaagagacccaatatgcaagctgttataattaacagttaaattagttcaagactaactaaccaaccgaatggttgttgcgagtttaaagaataataccaatgaataatttatttttctaccaaaataatcaaccagtgtatagatagttgtatgtagtaacttatgatcatatgaacctcattaaatagtttatcatgattctaaaagaaagttagatctgtcctataattaattatcactagtctagaatagaaaacttaaaacagagacaacattagctacttgttatggtagaatccacaggggaaattttcaagtcatccatgtcagcaggcccggccctgggcataggnnnnnnnnnnnnnnnnctagggcccacccagcccaggggcccaaattttttttttcttcttttaaaattatgtatttttttaccaattttgaaaaataccacattttttctaacataagggcccaaaaaatttttttttccctatggcccacttnntttcagggccggccctgcatgtcagtgaggtgcttttatcactaaatcagtgagaaaaaagttacaaaatcaatgctgtgtggaaaaaaatagtacaaatctattcactacttcttttcggtaaattagtataacaaactcaaacaaaattccttaactgcaatggcaaaataacaatggatatactaagcaaaaaaaaaaaaaaactcaaagaatatgcaatctattcatccatcgttatgaaagggatataatttattttgtatcaatcacaatagaaatctctaaaaacataaccaaatcaatagaacacaaaaattaaaatgttactgaaaacataacttacctgtatcggtttgctgttgccgggaagaggagggaggaggattgtctgtcggggagaacgattgggcgcgatgggtcaaaattgcagagttagggttcgaagggaagagatgggagcagttgtcaataatggagaggaagagagagagaagcagagcggtcaattatggagggtcgacaatcgagaggaagccgggggagcggagcggtcgacgatggcaggtcgacgatggagggttgaagatggtaggatccttagagttttttcttcttcaaaatggttgaagacgaatgtgaacagtggcgagatcgatttgggggtttagggatttagaaattattttcgtcgattctaaaccttaggcagtatatgtctcgtcagttttaaaagctcacacaatttttatttgattataagaccatcttcaatgggagatgtaaaaactgtattatatttagcacagaaagtagttttgtggtaaatttacacaaaattttagctttgtgctcca

SEQ ID NO: 118161 - DNA, 1811 bp, Cannabis sativa
  modified_base (27)..(33): a, c, t, g, unknown or other
  modified_base (1771)..(1785): a, c, t, g, unknown or other
aaaatagattacattgaaatggagttnnnnnnngggcataaaacccaacagctgcttgcatcagagcaagtaatttatttgacatgtcttgacaatttcccaatcattgtttccaatgactaagatgccatctatgtaaattaccatgtataccataagctataggttttgatgctctcataaaacccttcatactaggaacaagaaatgtacttaagcccattgaatagattgagcatgatttcccatcttatccttgtactttgaaaaatttaggttgctccatatgaatggctaaaccatagttctctaggcttcgaatcttagttccttatttggactatccatgtctttttgaaactaacgatgggtcgtcaacactagtgttatccaacacatactaggttggttcctaaaaaccctcccactatgattgtgtaccgtaataatatatctagcaacttcagtagtatagacctctttagttgtatcaacacaacagaggttatggggcaatcttatataatataagatgatggaatacttttgtatttgaatcaaatggtatcttcacttctttgttactttggttctgagattacatccatgtagtcaacatctcgaaaaataatatttgtgaagaaaaaaaaaacactttctagtcttgatgaccatagtgtagtctacccctagtcactttattatagccaacaaacatgcaaatctcagtatccgaggtgttatggtgttactgcaccacagaaaaaatagtaactagccacactcctttctctctgacctaggaatatgaaacaatgatacctataaaactcacaccaccgtaacactagagactcacctatgactagcacgccaatcatcaattgttggctgagtctctagatgagactggagaaattagaaagaagtctgagctcccccaaggccgcgtatcaaaaaagggttgcccaacactacaagtccttggttgaagataggaaatttaagcttggaggtatcgtgttatgaagtattccagaatacagaagacgcagcaggagggcactcagaccttcttgggaagggcgatatgtcatcattgaagcactagacccaagaatatacaagttagcctgttatgagttccacttgaatccagtgcgcataccaaggtatttgaacaaggtgcatctaagacaatactaccaatgtggcagctatctcaaaaatagctcgctccacagtgagattcaccttgccacatgcaagtgaatccatcctctcttaaactgacttgatgtgacaaagtcatctctaggtcgagaggtccattgccctgttatggcccccacactgctagtcgaataaggcatcggtgtagtggggatcagttaagctaatactgacaaaaatgccaattagcaaacacttgttcttttcaatttagctaatggttatgtttttgtatttaaatttttgtgaataaaaatttttagtaaagttttttttttgtacttcattgttattaatcaattacaactcgcatacctgacgatgctctcaaggactgagtaaagcttgtagagttagtcctaaggtaacttcagttatttctttagtgagtcaagcaatacaaacccacgaatcttcaaataagttgatgagtgctcaatatgtaacaactccttaatattcatgatcaagaaagcctagggagatttggtatggcaagtgaccaatgaaggcacttcttgttggaaatattttaccnnnnnnnnnnnnnnntaccatgtatgtttcattaacatcct

SEQ ID NO: 118162 - DNA, 2568 bp, Cannabis sativa
  modified_base (41)..(81): a, c, t, g, unknown or other
  modified_base (199)..(206): a, c, t, g, unknown or other
  modified_base (2509)..(2522): a, c, t, g, unknown or other
ttgagataatactgcctgtagactcagttaattggttttannnnnnnnnnnnnnnnnnnnnnnnnnnnnnnnnnnnnnnnnatgaattttcactaagaaagggtttaattgagaaggaaaaaggtttttgagtttatttgttaattaagaaattttgtaaggtccaactaataaataaaataaatgataattttatttnnnnnnnnattttaattattaaataaaaagatttgataattttttttatcaagaagaagagacttcattaatcactagcaaaaagccaaaacaatacaataaaaggcacagccgaaagctgcccaaaaggaaactaaaggttacattttaatcttacaagaaagtttctttcatctagagctaacttcctattatttacatactataatcaatacagaataacctgttttatcttttttgactatagtgccaacaagttttgagcagcctttaaatatgcatttgtttcagttagaccaaatgtggtaaatacaagcagccagtgtagctgtaataacagtagcaataataccagacttcttgctagctagccaggtagtccaactcccatagtttctagaccaagctgaaaaacccagccacaagaagacctcatcggtaacttttctaaataagctacactcaaataacaagtgggtatgactctcattagagagccaacaaactgcacaaaaaagcgtctccaagggaatgttaaactgggtgaggagatccctagtgagaagatgagagtttaaggcttgccataacataaatctatgtttgggcaagttaactctattccacacattaccccaacacaaaacattttgatgaataatgataatattgtaaagtgaagaagctttaaatttacctttacaaccggtagcaagaatttgacttttggagaaactttgtctcaacgtacagagctttctccaataccagcttgagtcgaacttcataggagtatcccaaaagtcccttttcctcagataagttgaatgaatccagtgaacccaaagcacatcatgtttttcagaaatagcctagatatacttggctattatgactctgttccaggtaggcccatctagaaaaccaaggcccccaaatttttttggcaagcaaactttttcccaagaagggatatggattttgcatctattaccttcaattccccaaagaaacccatgacacaatctttcaacttcttttataacactctgaggcaaaaggaatatactcatccaatagttccggagacccagcaaaacagttagaataagctgaactctccttacagacgatagatgtttagtagcccaagtatgaagtctcatctttattttctttaagataagtccacagtcttctttcccccatttaaaaaggtttaaagttaaaatatggtatttgtgacaggaaaagatgaattatgaaataaaatggcaaaattgtaactagtggggtccacatgagtagccaaccacttaagaaattatttagccattatttatctttttcttaatccatataatttaaagctagccctagatgaaagcctataaatagaacatgacagactcataacctgataactaatcattagtctattatgtcagaaaattgaaaagagaggctcctctctctaatttttgagttctcttcttcttctcttctctaaattcgaagcctatagtgatagagtacatgcccaatcatatcaagtcaagtactcaatcatagtgtagaagattgtgaagaatccaacacctgaagaagatccaggctcagatcttgttattacctgcgacggaaaggaacaagggttagagatctgaatggaatgagccatattattcagctgccatcaatataaggatttcttaatctcttatgtgtttattttatcgtattaagaagttcatatttagggtgttagattatagaattataatcaatatatatatattagtaaatctagatcctagtaaaataacttccaactggacaatggtctgtaggagttggtggtgaattatttttctaatttgtttttggcttctaatgctaattggcaggaggtggtttagtgtgttccaagtactattttgactgctcataattcagagttgatcaagcctgtgttggaagaagaagtgaagcatgctctgttccaaatgcacccagacaagagcctgggaccgaatggcatgactcctaattcttttccaaaaacattagtagatagttggtcatcatatgttgaggatggttcaagatttttttttattgtggtgttcccccgaagggtattaatgaaactagtgtggttctcattcccaagaagaagaacccttctgtgttgggggacttgcggcctatttttttgtgtaatgtgttggtcaaagtaattactaaggtgaatgttaatagaatgaaagagttgttggatgttgttgttgaaaaaccgagtttttgcaannnnnnnnnnnnnntatgaaaatataaaactgtatacgcctgcagaagcagaatgtaatt

SEQ ID NO: 118163 - DNA, 988 bp, Cannabis sativa
  modified_base (162)..(166): a, c, t, g, unknown or other
  modified_base (952)..(954): a, c, t, g, unknown or other
tttgaacattttgctcatgtacgataacttcttgattttacagttttggcaaccatttctgatttatgtcagtggttggtaaaaactagaaaagcagagattttttcaattgtgtataaagttataaatcttattcctacacttccagtttctacagctacnnnnnaacgatctttttcagctatgaatatagtgaagactacacttcgcaacaagatggaagatgaatttttaagtgattgtttgctcatttatatagaaagggaaatcgccaaaaaatttagtatagattcagttatcgatgattttcgtgatatgcaagaaagacgttctgtattttaattttaattatgaatttaataaaaatattgaaatttttgacacttaaatttaaaatatagtttggcctcccctaacttttcatgctggctccgcccctacttgtcatgtgtacacatgtaaacacattagcagttcaatttagtatttaacagaagtttttggactgaatagtaaaaataaaacagaagtaaagtttggaagattctgcccaaaaagattagtttatagaattaagtgtaacataatagatagtttaagtaatattgtcatcaatatccctaataataataaaattctctcatacatttatgcctaacatccaaagataatatcctctttaattattattattagaaagataatataacccaatacaaataaaagaatatatatatataaagagagaaatacaattaaagcacatcttttttctttctaaatttgacgttagagattttacacaatggaataaatcatgttattgcacaattcaatcataaaataatacaagaaaaatataagagattaattatgtaaatattacaatatttttacactatatataatataggctaattaggatttttgctccctaaactttaacatgtannnaatcatgccccctaaacttttctagccgttaaaa

SEQ ID NO: 118164 - DNA, 1192 bp, Cannabis sativa
caaatgtttacaggttatctgatccacgtgtcctaattcgactagtccacgtattttgggcgaattcaggggcaacaataacaataacaataacgtttttaaaaaaataaaaatctatagtaaaaataatttaaattaattttttttgatattaagatacacttaactgtacaaataaaattctctaataataaaaacaaaaatgatgtcggccctaaaaatctccatatatatagtttagataaaacttataaatccaacaaaaaataaaaacattacactaaaataatttaaaaattatacgtaaataacatgaattctcttggcataatcaattgggggagcttgttttaagtaggattgtacgtgagtcggtttggacagtttatcctacatattttctaatctaatctaaagtgcgagctgctaaaattgaactccaacccatagacattgagataagagagccacaaaatataaacaaataagagagagaagttaccactaccagataacaacgaagagaaagagaaatccttggtacgaattatgaaatttatagttagcaacatatatctcaactttttttttgtagcaaacatatatatatatatatctcaactttaaatttaaatgatagacagacagacagagtgttacttactagttgttggttgcaccggctccgttgaagacgtcgtgacgaggagaaggctttattgcaggttgcaccggagaaactcagaccgcctgagatgggctgatggtgtcggcgtgaatagggaaagcaagagaggatgagactgagagagacgagtgagtgagagtcttaaattttagggtttttttttatcttttacttttaataaaaactgccaatttttttttaataaaaatctgttaaatattataaaaaaaaaatataaaattgaaaaataataagtgttattcgggttatttcgggttaagtcggtttaattaggcggattactttatttttaacctggccaatatacagaatggacggtttttttttttgtcagattttttgattttttttttgtcggtttagtttgggcggattatggaaaaatggcaattttgagaaaataagatgaacaattggaaaaatggcaaaattgcaaagtggggcccaatatccatggcgggccacttaaggagcaatttacca

SEQ ID NO: 118165 - DNA, 1745 bp, Cannabis sativa
  modified_base (1641)..(1641): a, c, t, g, unknown or other
  modified_base (1712)..(1717): a, c, t, g, unknown or other
tttatttttcaaaaacaaaatttttaaaaacaaagattttactttcattttgtgattaaaaaattagaaaataaaagtattaccaaacggcactataatattttaactgagaggttataactaaatagagttacactaaaaaaactcaaaaactcaaaatctattaatgtaacaataataacaataataacaataaataatcattaatattatatcataacaaaattatttttgagtaaatataatatttatatatgtattacaatttgaaataaaattactaattctacgtaaataaatttacaaaatatatgtatgagtgtacttttaatgggtattactcatgaatgggtaaattttagtttttaagcttaatttttctatctaattagtttaatctcttatttttacattatatggattgagtttgttctatcggctggaaaaaaattaagaaaaaaaagtttttcggcaaaaaaaaaagataaaaaaaattgaggttgacttaaatattctgtatttaaatatatttttaatatagtgtaaaaagagatattttttgacatttttgaaaattaagtagctaaactaagtataaatattaaaaaaaaattattattcgtcattggatcaaaatctaataattaatattttaaaaataaatatttatagttaaatttatttagtaactattaatgaataatacccattaaaaagtgttcaatatacttatttattctcttttgtttgtattcatgagccatttcttttcatcaaacattaatggcttctcttagctttctacacacatcttcgagctttcaaagtatagttaattttattctttctctatttttttatgtatatatatgtggtttgtatattataatgataatgatgcataaatacagtgagtggaatgtgatagtctatgactctatatggaattctcttattattttttctggtaaattatatatttttaaattttcaattatttggagtttttctttaattacacactttttttcaagtctaacatgccttttctattaattattatcatgttatttgttttttttttcttttccaaatattagtttgtttctattagttcttataagtaatttatctatcataattcttaatgcaataattaatattaattaaattagttaaatatatgcataattattgtaatagatttatgttggaaagtatttaattgatttgttgtacactagtcattcatataaatttgaacaatctcaagtcatttatgcacgttatgcgttgaataaatataaatacaaattccgctcacagacagtatactcctaagttatttacgcaaattaaactaatataaagtctaaaattacttaaaaccaatttatttatttttctcatttttctttctaagttttaacttttctattttttctcatttttctcattttttttaacttttctaatttttcattcttacttttttttttaaaaaaaaaaaaatcaaaattttctttctatttttttctttttaacttttctaatttttcttagttgtttctcatttttaatttatattaactaaataataaataataagatctaagcattcctgttgaccgaggttttcgncaactattaaaatataattataataaggagctgtaagaaagtgagatggagattttttacgtggttggggnnnnnntgagccttagtccacgagccactgttat

SEQ ID NO: 118166 - DNA, 1196 bp, Cannabis sativa
gtgggctgcaaaaggaaaaaaaaaaaaaaagaatgaaaacctccaagttttagaatggtgggaactcatttattgaatcaatatatgtaggaactggatctaaaaccgtaccaagtactgataatggcacatcttctggaagttccaccaagatttcaactccactgtttttctttgctcttcttgtggctgcatatacttcagcctttgcaacacactgattctttccagtttagtctgtacttcagagttcccagaactcttatacatagatgttgtgattgtattcttcatttgttctgatctagatttagagaggtgtgcagtgttatttattttgaaaccctacttagggtttatcattgttttgtatttactgaagagaccagttgatgcatactctcttctatatttaataaaagtgttgtggtttgcgacttacattggctgctgaaatattatatagtacattaaaaaaataaatataataagcattcagtaatgaaccaacaaatctaaaagttaaataagggtgataaaccttaaagaggcactactttagaattgaagtatctcattccgataatatgaggacaccccagaaacttggaaaatgctctgggatacaatgagagctacaattggggaaaacttggtaatcagaacaaacaaatggttgattgaagagtccatcgagtgatcatgtactctgcaacttgactcactcgtatgtggctttcttcaagtgccaacttgtctgaagcagtcaaagcttaaaacggaccaaacaatctatgagatcaattacttgttttttttttccaaacaaagaaaagcgtttttcgttctaagaaagaaaaaaatatgtcctgtcactcaacccttggctaagccactctactatggcccttgtcccagtatcatgtacggtggatacaatctcatcaaccatggcacaactgatttcattgccctggaatagtatgaaacatattactcattgtccctgattagtaaacaaaatgcatgagtaatgtacagtcttctcgcctaaacttggtgcacatcaagaatgagaacgtgatcgcacaaactcttcgagtctatcccacacctctaatgctgcagctctatcttgatgccgtttgttcttactaatctgcacattaaaattccaaatataagtgtaatttaac

SEQ ID NO: 118167 - DNA, 2607 bp, Cannabis sativa
agaggtatgtttcaaataaatataaaattagagacaaatttaattaattgattaataaaaggggtatttttcaacttacccctctaatttatgtcctatagtcttttttatataaacaaatcatataaaaagactaattataaattagtaaaagaaataaaaaagcatatttggtatgcactgtatatgaaaaaaaggagctctctaaattaatagttgttcttgtgattaaatgatatgaggatttaatggtaattaacaaaaaaaaaaaaataaggatttttttgtattttatcccttctcttttttttttcaaaggaatgctatgatattttgcatgcatatatatgattactaggtttacactgttgtaagagtattttcaattgtattctctatttttttttatctaatttttaattaaaatagctaaaaaattatatagtcatttttattattctcgctctactatgcttcttactttaattaacatttaattattttaataatattttataattctattaaaatatatatatatattttataatttaaaattattaaatataaattaatttgttgaaataataaaaaaaattaatattacttttattaaaataatattaacaaaatttagcaaaataatatatagggtttccatgtagagagttctatgtccattctctattgtatagagatccatttttttcacggttaaagctcatttttgtaagactcacttcttattttagctaaaatttgtgtttaaaaaacatggtgattagatgctctaacttgtcacgacaaacacaaaatgcaaagttaggtagaatctttattacgtacattactctccacctccagaagtattaaagttaactaataatatgttaaaaatattcaaatatacaaaagaatattccaagccctaatataatgtctttggtgcatacctttgattaatcttcggtactttcggagcggtttcgtagcgcgcgggtagctgttattttgtgggaatgttgttgaatttgttttggccagggagtagaagtgactcaagtgagaaagaagtactgagtaatgcctacaagaaggttttccttaagaaacttatttattttcttttcagatcatattttttttgtgttagaagctaacactatatatgtctctaagttaagtcttgtcgagacagttagtgtaggacccaactttttgtacatgacaaacaaaagcactacgatcaaccacacatacttgagctgaaatatcaaaggaagacttagaagcttgggttgacctaaaaaaatatccaatttgtatcttaaatatccaatttaagataggatttattcattttatataaaaatgaataaatcctatcttaaatttcaccttctttattgttttaaccgaggcctagatcaagtggtaataaatatataaatgtaatctgcttgtatttttgatattcagccagctcaagtggtaagtgactaactattttcctttaaggttcctactacaaatttgaactttagaggcggcttttaaagcctttcagcgtcggttttggcgaaattcactaccgacgctgatttaagtgacgctgtaaagtctaaaacaaccgacactgaatggtatcctatggcgtcggttcatagtgaataaccgacgccatataccctaacaaccgacgtcaaatctgtaataattatttttttcatttaatttaatttaatttatttaaattatttaatttaatttatttaaattatatatttattaatttatatataatattatttaatttaaatttaaattaaatatttatttttttaaaaaagtaaattaaatattatttaaattaattatatgattagccaatctacctaatttcatttcatagaaacaattaaataaattacaattaaatattacacaaatattgtaaaattattccaaaatattaacaagttaataaatctaactacaagttaacctacactactaaaaaacccgaaattcctgatatttttacaccgtcgggtaaagaattcccaacggtctataaaaccgtcgcctatatgagcgtcgtgaatactgggtagaataggcgacagtgaaaaaatatcgttataattgaatatagtcgattgccaaaaaaaaaattattgtcgtcatcctcctcgaaaccacttctcgcatgtatcgcatccgctccaaaacccttacaagctttatcctcctccatcgttgttgtgctcgtcttcatcctcgttaaaattttttttgacaagtttcgaattgtttttcacttaacgatccttgaaactttctttgcattgcaggctttggatttatttcgaacacatacacagatcaatatcaacaaaccaaatcatgactaataaaaatttaaacaacaaataagagaatgttgtgcttacctttatgctaccatgagagagttggggaaagagacaaaatgagagagagtagaggaggggacggccggtgtggctcgtggtcgcaaaagagagagagccgaaaaatgaaatgaaatttacaaataactttgaaaaatgagatatgatttttttt

SEQ ID NO: 118168 - DNA, 1311 bp, Cannabis sativa
aggtaagaggtatttttatatgaattttggttaaatgacttataccatacatatctataacactttataaaaatattgtactttttcatggtagcttctttatgtgaactctatagattgggattttgggtatgtggacatgaatatggcccccatcacatggtggaatcataaccgatgcaaaaaaaaaacataagattagctaaaagataacgggggacatagcaagccacatgaactgtaacgccttactagcttaggtgcactatagtatttttctcaattattgtgccaacatttgctgattaaagggtttcgtgaaaaacatgattaacaaaaactagtcttcgggctgggcagaggcgacgagccttcgagctgggcagaggtcgacgagccttcaagctgggcagaggtcgacgagccttcaagctgggcagagggagacgagcctttgggcttttggtggaggggcgacaggccttcgagcttctagcagagagaggatgggttgctggcagagagagagaaatagagaggagaaaaggtgttggggtttgaaatgagttagggttagataagttaggttaagtgtttctagtatgtttttttttatgtaaattagtgtcggttttgcaccaatgtaaacaccgacgcaaaaaaccttgcaaattgacgctaatggtgtgtctgagcaaaactgacacaaaattcgaccctctattatttttttttttttgggttgcgtaatttttcaaacgtcaaaactgatgctaaatgtgatatttatagtagtgctcatcggagtgaaaataaataaaaaaatatatattaaaaaagcacatatggcttcaattatttgctaataaacaaagccataggggtcttatattttcatatacaaccccctatgacttcgattattagcaaataatcgaaaccataagacccccttttgccttctgtttttttaactccttaataatcgaagccatatgagattagatatgcgtatatacaacctcatatggcttcaattatttgctaacaaccgaatctataggggcccattttgccttcaacattttttaaccccttttttctttgcttggaatgccttcgattttgaattttgtcaaaaccaaaactaaatggccaaaaaaattgaaactaaaaggtgatatgttcatcttaatgatatatctttttctttatctatatagtagacgttattaatatatattagattattaagggctcgtttggtaggtcgtataaggattgtattgtattaaataatgaataacacta

SEQ ID NO: 118169 - DNA, 1317 bp, Cannabis sativa
  modified_base (1120)..(1120): a, c, t, g, unknown or other
cactctttccctacacgacgctcttccgaattcctaacacgaacaaatacagtaaatgtaaccagttttgtcataacacattcagatcgggttattatcaagtttcattttgacaaaaaaaaatcaatttagggtactatttagtatttattagtactattttgtaatatacagagtctaatttatcaaaacagacagtctaatcaataaattttacaaaatacagggtctaaaattatatttactctaataataatatgattttgcaagtgtaacttataaatattaatatatatatattgtgacggtttgaaattatcgattaagctttcataagtataactataatatatacattaaaaaaattattagcagcaaaactacttaaatttattaataaaatttatattactacttacttttcaacagtattaaattaattgtacgataaaaaataaaataaacaaaagttatatttacaataaatttaacaccgtaaagtattggatagatagtaacaaaatattattttaataaacttaaatagtcttgttgttaataaaaaaaaattgaattatttatccattacacttataaaaatttagataattttatcatcgataaattatttaaaaatttattataatattttaggtagtttcgtcacaaatatctttaataataatgataatataaaatatttggctttactattgtaccctaactttatttatttatttattttagtaggtggagtagtgaagagtatatattggtaataatattaaagtatattcaatcaattcttgatgtgtgttacacactttagaatcttgtgccctagtccacctataggaccacttgaaagagcttaatatcaataaataaatagtacaatattaaagtgtatattaatattatacattattatccatctctatgtaagtagattaattattggtcaataatatattaatattaattatttgaatgtgtcttaaaataataactattaaaaaaataacttttatttaattttctataaggtataattgagtaaatattattttaaacactgtattttgtaaaaattatcaattgaaccatctattttgttaantgataaaatagatcttatattttccaaaatagtaaaaataagatcctgagttcaattttttttaaaatgttttttaatataaccaactttaagacaatttctaacatgaacagatgtagagatataactagttttgtcataacagatcatattattattaaattttattttgataaaaatcagttcagggtcctatt

SEQ ID NO: 118170 - DNA, 1229 bp, Cannabis sativa
tttaagagaattaaactaagtatttatgacacaaattacttctggaaaatttaggaatgtattatacatttatccacacatatatttatatatattatatatattcatgattttgacaaaaaatatgtaaaatagagaagaagacaatatatgacagatatcagtttgaaaatgaaaaagcacaaaatccaaaatatatacaattttttcatcaagcacatccactcagtgataaaaggtttataagagaaaaagcaaacccaataatagtatttttgaaaagccattattttttgttttttttttgaataaaaaatccaattaagtttggtactatatagatatgtttaaatatattataaattgaatttatatatagataactttcagtgtttttggtacataaataaattgtaattatatttttgtttttagtatatactatataatataattataagagattctcataaatttcaacaaaactttaaaataatttagaatgttttgatatttcatatgcacgtgtagtagtagcggtttgaaatcatcatttattatttaaaattattttgaatctatgtaactacattatatattggtgtgtaaaaaaaatgccaatattatccatacacttgaaaatttcaaaagataataagtatactatgtatatatatgtatttatgttaaatattaataatgaatcagggcaggcaagataattaaaataaatttgttaaaaatatttatatgtggatatatatatataccgaaagaactccttctcttgcagcaagtgctaaaatatcagcacaagagacagtgttactgcaaaccctctccactcttgttttgatgtcatcgatcacatccattcctcttactgagttcctatttggaaaagcattttgttctcccgtgaagttcgctgtgtcatccaatagtatagatccatcacagccctgcaaaatcatatatattgtcataaaaattacacaaaatcccataaccaaaatcattttctatatatacatttacaaagcagtcgtggaagaacaggcgaagaatagaggccgccatgcgaggctccttccgaacagcttgcctcatgccttggcgtacgatcagcacaagcaatggacacgtggatgcataataggatggagatagctgtgcatcgatactagaactactcataagtagccagccaattattactacaaaatagt

SEQ ID NO: 118171 - DNA, 1371 bp, Cannabis sativa
  modified_base (99)..(111): a, c, t, g, unknown or other
  modified_base (918)..(919): a, c, t, g, unknown or other
atgtgactctcttatgtcagggtattttaggtacaatacacataaaaagaggtatgtttcaaataaatatgaaagtagaggtaaatttgattaattgannnnnnnnnnnnntatttttcaacttaccccatatatgtgtatacatttgtgaaattagtcctttaagaatttgaaaggcacctttctaattttgtaatctatatttttatatataaatttccatatatgcataaaaacccttactatacatagatatgactttaatctactgataatatcttttttaatacgttcaaataattgtaatgttttttttttcaaagaccagtacaataattattaattcccatatggtgacaatgattaacagaaattagaagcaattaaaatttgattaattatgattcaaatcacgtctctcaatttcaatttttaagactgttaaaaatctcttttagagttgtttttcatataatgagaaatactaaccatgttgctcatggtttagcaatagtggtagaatcagccaactttgttagggggcaattttttttatttaaagatgttaatgaaaatataattattattagataataaatgcaaattttatggagatcaagaagaaaattttcaaaagcaaaaataaaaattagaaattatatatataggaacaaatataaaaaataaaaaatttgtgggggcaaaacatggtttagcaacagtggcggagccagccagctttgttggggcggggcaattttttttggttaattaggattttttctccctgaactttgacatgtaccaaatcatgtcctttgaacttttaagaccgttaaaaatgtctcatgaactattgagattgttggatttaaagatttttgtctaatttaattcaattttactattttagtgatnntttatgtactaaactatgctccccagactttgataacaaccaaatcatgtcactcgaactttgacatgtgttagatcatggctcttgaactttcatccatgttagacttttttactaaaattggacaaaagtccttaaatttaataatctcaatagttcagcgggtatttttaacgactttaaaagtttaggggtatgatttggtatatgtcaaagtttagaaggcaaaaatctttattagcctttttttttaaaagatattaatgaaaatataattgttattagagaataaatacaaattttatagatgaagaagaaaatttacacagacaaaaataaaaattataaattatatgtaacgctccaatattttgccttattttacaaaatactaattttgatgcattaattaaaaagattcaaagctgtttggaaatacatagtgggtttta

SEQ ID NO: 118172 - DNA, 1599 bp, Cannabis sativa
  modified_base (981)..(988): a, c, t, g, unknown or other
attaataccggcggtttggctccgccggtattacttccgccggtagtaaaaatgttgtagtgactgtatttaagaatttaacataagtaaactgtattaaggattagtaatcaaaaaaaaaaaaagaaggcctagattgtttgcccttttagagggatatattggaattctaaagacaagaattctagtcaactcaatattcttgcaggccaatattgtggacataacaagtgcaataatgcagtgaacaataatatatcatctcatggggaccatatatattaattatctcatcattttattcactctatctcactcaaatttatactcgatccactcacactcaacacaactgccttcttcagtgtatattcaagaatacctccaataaataaattgttataataatattatgtctcaatttaagttaattataaataaaaataatttttaaattataattagtttaaagttccatattaaaaaaaaatatatatttaaaataaataatgtgttaagtgatagaagtttttagataggatttgatttggttttgtattaaagtggagctagctccaattacatggcaacaactgtgcggtattaactttatttcgtttctaaaaataaggaatatatcgtacaaattaatttagcaataagtttgttttgatcttattcacttttgcaaggttaaatgtaatgattcaattgcatgacacgtcattatctaaatccaagataatgtctcactatatatatatagtaattataataagatgaaaatgaaacattctattatgagctataataaaaacgtaatcctgaagtgattggtactaagtttgtactacaaaattgctattaagtttacacgcttctccaatcaccagcttatgtttttgtttgtctgtatgatactggtactgattttattggtgtggttaattaattccctcaaattaataataataataatannnnnnnnaataataataataataatataatcataattggtaagagtgacacgtgttcaacaattcttctgttaggtattaacatgaataatcgttatgatttcaaacgttttggtgccaaattttcattcgttacggaattaacagatagtgacaatgttatactgtcttaattattattcatcatgtaatgttaaattcattttagaaggaattaattgcttctcggtttggaaagttaggaataaagttttgtggctccaacaactaacacatttgaatatatgtgtgaaaaaattgttgaatttgtaaaaaatataatttttaccatttggcctaaaaaaaatgagtttggtagatgctatttggtttgagaatcttttggataagtaagattcgtttgtatagaaatttcagatcttttatagagatgaaattaaattgtatatttattttttattttttattttagtttttatctttattttaattatattattctttaattgatacttaattttataagttatattttcattatgtgcattataaattttaattttaataagttacgtgaggttgtatttagtactttaattataaaaaaaatagtatttat

SEQ ID NO: 118173 - DNA, 1651 bp, Cannabis sativa
  modified_base (1545)..(1562): a, c, t, g, unknown or other
tcaagaacagggtgtctaggcctttattgatatttaaataagtgatgaaaatacttttgtctctttattgatatttaagagattgagattacattgaaatagagttttatttaggccacctatcaagaacagggtgtctaggccttagaacaacttgttctccgataccctgggaaagagggtcacaaaggtggccagccagagcttgggcagcatgtaacaccccctctccaagatttgaccattgtcagacagtaaaggttatgtccttgtgttcgaggaacttgggtggattgtttgtccatagtctacatgcctgtagaccctacctgttctgtttatgaaccttctttgtaaaggatctcttattagatcctaatctcttttagtagttctctcatcgaactgccttatcaggttattggcttctcgactgcggcggttcaattccgcttggcagtcccggaggatgtactcctggtcatccatccactttaggaattcgtgtctctgctggggaaaagcatcgcaaccagcagtgtgtggttcttcttgacctctcaagatttcgcgtctctgctaggtgaaagcatcgcaaccaacaacacgtggttcttcttttcctttttgagtgacctggcctacaacttctctgagcctggccagctcaacatcatctgctaggaccaagtgaggctcaccaataactagtttaacaattcctgaccttgtttctcctacgtagcactgtggaacagcccgagttgtgctctatggaggttgtttcatgttaatctgctcctctgtatgagatcttgtgggttgttcaagccttcgaggaatggtgggatcaacaagattcacatgattggttggattgatggtgttatccagatcggtaggaccctctgtggtgggaggaacactaacattaggaccgtcatgggatcctgaggaggatccaagggggagttcttatatttagaaccatggtgattgatcagaaaaaggctcttaatgaaagcacaacaacgtggactcaaaatttggtcaactagcagcagagccgtatttatgttagacaatcactacgtgtcaatgagaacaataaatgataaaagagacaaagatttataaaggtttagcctccttgtttagcgggtaatgacatactctcattttagttgtattaattctagagataataccatgcagatcataagtgagaaccttatgaagtctagcgatagctctctttgaatgttacaatggtgagaactacgctaggaagatcaagaactgaagagttcttgtgaaggacttaagaagatatgactaattgtctaggtggcatggatgagatatgagacttgaaagagggagagagagatgcacgtgtatgaggcttaaggaagcctttctagcatatggaatgacttaggatgacctcccctttaggtttagcctagtgctctttatataggagagagcttacagaagttctaagccaaagtaggttgatctgttagaaatattttaccaggnnnnnnnnnnnnnnnnnngtatgttatttaacatcctaaatttgaatttctaaaacaatgtaatttaaacacataaaagttatgagaaaccttatagtgggtgcagc

SEQ ID NO: 118174 - DNA, 2230 bp, Cannabis sativa
  modified_base (2160)..(2160): a, c, t, g, unknown or other
aaagccatctcaaaactgaaatgtaagaagtaaaaagtaaccccatttgattcaagagattttgtcatgacatttaggttaaaacagttgcggatgaaggatgacaataggttcaacaaaaagacagcagtgagttatgacgggattgtatcgaagttagagaaggaataagaagagaaatcggagatgccataccttcggtgattttgatagtagttatcaagttggtagtaaatatagattggagctttcatacgcttgtcaatctgaaaaacaaaaagataaattaagatatcaataagaatgattatataaaggcataatttctgattttgagaaatctttcatacataaaaggagaaattgaatgagattctgatacggggaaaagaaaacatgaccttaataaaccgagtacagttcttcggtattgagttatcttttatatatgccaccttgttaattttaaattcctcaggcacacaatcagcatcataccggtccacaatttcaacaatctatggttccatagagaaataatagttcatataagtatgaatgattttaaaggtcaaaaaacaaacaggctccattttaagatattggaaatgagacttacactacgagaggctcgaagagtaatgaatccggtaggaataaaaatgacactgatcataaaaaatgtaccaataacctacagataatcaaatatcggaagaaactgtaaagtaatgtattagagaatataacaacataaaaatgtagtatcaaattactcacccatgctggagtgaggacaggcttacaagctggaagactctgctgttgaaattgagaaatagctgcaaaatcatcatataagtaccgaaaaaagaaaagattcaatgccggcaacaatcaaaactctcaaaaaaagaaccttaccaacaatctgtgtcttgtgaaagctaaagaaagtaaaatatgattctcaagttacaacaattcaagacttagaataagaaattctaatgtcatcttcaaaaacaagttactagcaaaattcataaaacaatttagaaattttatcatctggctcaattattcctcaaacaattttatcatttagaaactaaaaggtgttccaaataatgtgagagttcaattagcctacattgttataatcaaatgcaaagaaagttaccttcacgtcgtgttgatcgccgtggagttgattgagactctattgagaaagaggttgaggtattctgttcatccacatccatctattctatctagacttcaacaattcaactccacaaatgcattaatgttcttaattagcctaaagtccaaatgatacaccctgcatcagaaaaatcatttcttcaattttgtgtttaaattcagttcaagattcaatcaaataacaggattgcaaatgagaatcagactcacattgctcacaaattaacagtcacaagattattatctaagtccacacattttgcttccctaagaagtagatattcttatatacataaagtttattggacgtaagaacaagattattatctttaatcccattaactttttgatcaaataaacccctaaaaacgaacttaaaatgaatttcacgcaaaacccagatagttcattttcaagatttttagataattcagaaattcaaagactcatacatagagaaacagaaaaatagtttttttgccagctaaaacaagaacatggataaagaaagtaaaatgaaattgataaaaaaaaaactgggaaattgatgaagtcgaaaatggggtgtgaaattagttacctctgaatcttgaagagtcaagaaaatgaaagatcttggagatttgcgttgttgttggtttagctctgttgataatggtgggcaaagatagattcttggttgaactaaaactgaaataagtttaatattcttagctttctgaaagaggaactgtatatgtatatgtatatgtatagatatatgatctttacagaagatattattataaatataatatagagagagagggaaagagagatagaccaaccactgatataacgagaagaatacgatagagttttgcccctaattatttcttaaaaaaaaaaaattaaatcataaatactaattagtaattttttccctgaactttnacatgtactaaatcgtgctccctgaattttttttggccgttaaaacttctcctgaactattgagattgtt

SEQ ID NO: 118175 - DNA, 598 bp, Cannabis sativa
aaaaaaaaaaaaaaatctctccttatatagatcaaatatatttttgatgataactttttaaatttggtgtgttttgaaacttgtgtattgtttatagaaacgatattcttagaaatatttaaatactaattaagctaggtcaactaggatggcatgggagggatgtagagtgatttttacaatatttaatatcttattttaaatctaattttcaataatgactttgccatttaatttaattttttattttaagttttaataataatgactccctattcttttttttttctttctctctttttcttctctctgaattattgttacttgattgaattttaaaaaaatattattataatctattcttcaatgtaaaaatttcataatatgggaagtatatatattttcgctagtttcaaattttaaaaaaccatttgattacttatgataccaatctatattgattagttactatatatttttttttattttagttaatatttattttagaatttaattaactgaattatattatactataccataactaattagtttctccactgttaggttatttttagtattaattttagattaagtt

SEQ ID NO: 118176 - DNA, 2446 bp, Cannabis sativa
attggctacccagccgatgcaggcctcgggggaggaggaggtagtgaggaccctgtggcatcactagacatggaggtccaggccaccttggcattggggcgacttgaagaagctccaccgaaaggcacgagcacgaccaagcgcaaaaatacaagcttgggcacgacactacaaattggcacgatactacacgatgctacaaattagctcgatgcgacacacacaatatgggcttaaaacacgacacaactcaaaaaatatgagattaagcacgacggcacgataagctcgaaaggcatgacacgtaagcacaaataatctatctaaaaatgcaacatgttaaaaactttatatttgataatagtaataatgacaataagagtaaattacgaaaaaacacctcaaaactttcactctactaactctcaaaactcattttttggcagcaaaactctcaaaacccatgttctattagcagtttgctattttcatctattttaggatgtcaagtgccacaccagacggcctacatgtacactgtgtggtctacgtgaacacaatgtacacatggtaaaattttatttctccacgtaaataattattcaaaaaaaataaaaataaatttaaattaaaaaaaaacttaaaacaaatagaaggaataaatataatttttttcatttatttttctttttttctttctttcttaaagatcagtacaatagtgagtagtgtttcttttcatttttctttttgaatccaattttttatttcacttcttctttattcttcatactatcactacaccaccatccaccgccaaaaccatcactatccaccaccaccacaacaactaccaccactacaccctacttttcatacccaaatcacagaaaaataaattaaaataaactcaaaccaaatctcagatctgctttcccactaccaccattgcattttctaaatccaaattagcaccgataaaatgaaaaataaaaataaaacaacaaaaaaaatacaaactagatttgatagtgtgaaagccctaaatgtccaagctcgcctaaaaccacggggacgcgaactccaatgactgcgactcccaccacttccttcctcaaacgcttaccttttagatgacgaagctaccttcttcctctgtggtcacattcgttactcttattgtctttattgtcagcgatccccatattttcccgatgatggtaggtactggagatctgaaatgttagcacgatcaattcatagagatctgaaatattaggggaacgatcgattcatagagctctgaaatgatggaggaacgatcggttcgcagggttcgatttgatcgatttacacgatctaccatttgggtttgatcgatttaattcaatatcatctgggttaggtttttcttatggtatattgaaagataataacatgtttggtgttgtggatatttttcaacagtaaagtggatttggaaatatggttatggatagtatatggtggtaggtgaagaagttagggtcgaagatttagggatataaggtcttttatttattcttttaaaaaattaatctttttatttatttaactaaaggaagaaaaagaaaaaaatatatttttaatttataataatttcttaaaaaatttgttttatgttttttttgtttgtttttgttttaatttataatctattttattttctatttcttttaattgttttaaattgatttttttcttaatttcaaattctttttttttttttttttaaattatttacatggatgaatagaattatgtcatgtatacactgtgtccacgtagacaacatattgtgtatacatggacaatccaacgtagcacttaacatccaaaaataaatagaaataacaaattgttaacagatcatgagttttaagagttttaccgctaaaaaataggtttggaggattaattgttagcaaaataaaaattttaggaattttgccgcaatttattcttgttgaccgatgttttcggcaaccaattaaataatatacaagaaaagctgtaggaagtttaaggcattagatttttacgtggttggagcgttaatgagccttagtccacgagtctttattattaatgagagtatttattacagagaatgttctttatagatttttctcctattttctttctttgattcctttgaacccagaattctctctcctttatcagtatgtttacggggtatttatatggggtgatccctaggaatggatcacttgtctttctgtgttagctttataggggcacatattcccagcagatacaaaatatgaaatacttgacctattgattgatgtggatataatcttttgtcccctcttgattgatgtgattcttcacaaagtagccgtcactagccttattgattatagtgtaatagccgaaaaagggg

SEQ ID NO: 118177 - DNA, 2337 bp, Cannabis sativa
  modified_base (2083)..(2092): a, c, t, g, unknown or other
ttaagggtcgttttcaattatatatttatagatgcattattcatatatttatatataaaaaaaaataataaagaaggcaataatgatataaatatatatatatatatatatttatatgaagactcagaggtcacaaaggaacaagtgaaaacaacctctatttatattatatacgaacaaatagaccctacaatctaaaaaagaacaaagaatatgagaaaaaaaatagagaaaaactcaatcaaaattaaaattaaaaataaaaatttcgaaagttgtcccacactaccaaaaaacctaccgtccaattactatgaaactttgaaaccatgcattattaattattaagtttggttatatgttaggcgatttctttgacttgttaaaattctttcacattatataaatctacatatatatataaataaatgtgttatttaataaaaaattattaatttaagagtattttattttgttaaaattaactgagaagtatcaacaaaattatataattatttttttttataaattttaatttaattaattaatcattttattagttatattatttaaaatatttacttattttattatttaataaattaattagatataattttttataaattaatttaaaattaaattaaacttatatatatttaaaagatatattttaattgtattaaaattaattttattattattgttttatatatctaatagtaatacttagtatatataaatatatatattttaattaaaaaagttgtcgtggtaattgtatatgagaaagagatatatggtgtttattccaatcaatgatcatcatctaaattatttgaattaaattatgtagaacaaaagaagtattattagtggataaagttgtagattaagaactttcaaatatatatctatttagtaattaattagggtttgggggcccaacttgattttttttctttctctcacaaaaactaattataataaagatagttaggatagtctagctcaaaagtaaaagcactagctattagacaacaacaatatatatggatgtgattctttttgcataatgccataattacattcaatgaaaatatatatactatacatatttggataataatcatccttatcttaatgagaattagttacttaaaaattgtcaaagtgttaattattttttttaacaacaaatttttattggaaaatatcagtgttgagtacataacccaaaagatggaaaaaatttcattcaaattagctcaccatccaccctgagtccatgcacagctaattcatgaacaatcttattagttgaccgacgaatatgaattaaagacgcctcaagaaaattaaacagtaaactagaaatatcatctaaaaatgaaccaaaaaaagaattaattagttgtttaaagatatataatatatttttaaatttataaaatatatatttttaaaaggaatctttttggtgggaggtgaacctgtattaaattcatatattttaatttaataattattatataatataattaactaccaactaagttcaaatgcctaatagcaatgttttttatcttataatataaactctatatataacaagctaaaataattaaattgcttatatacatgaatttatacaagaatatataatcttatggatgacctctaatctataaaccttaatttaatgagccaaacctaacctaagtgggcccatgtccccaacaaatgaggggaacatagggctccattcattttgaaaaatgccataaatcattgtcttattgtggttaaggacacttcttctctaacttccctttggaattatatacaaaaggttatgtttctattatatttttataacaaaaactaattaattaaggcctacaactctttgaaacacattattaatattattgcaaatatatatatatatataaatatataaatattccctttgactattccacatctaacactataccattttgtgccatatattgtcgaaaaatgacatcccccacttaacttctcctttcggcgtttcaataaataataataataatannnnnnnnnntaataataatcataatcataataatatgagagtattattattgggcatcggtgatacttaattaggggtgtttatcggatcacatccaacatttttaggtctatccagatctgatccaatatttattgatctaatttgggtttatctaatattttagacctagtgttttttggatcggatcggatccatccaatattttaagtccagtatgtattgaatttgactggattcatccaatccaagaa

SEQ ID NO: 118178 - DNA, 1401 bp, Cannabis sativa
taggctttataggcagcctgaaattcagatggaaaatcctaggcaatgcagtgataatttactgcccttgtggctaattggaggtggattgtttccctttcgaagactggatggcccttgtttgggacggagttatcgtaggtgggttagggagggatgttcttggcaattgttattataagtgttgttgttgttgttgttgttgttgttgttgttattctcgtggttattgttgttattgttgctattattgttgttgttgttggagtggtgttgatgatgatggtattgaagtctctagatttggtggcagaggagtagtggattcgcaaaggtcttcctcttctcctggagaatgctgcatgagtgaagttgacttagccttcttagcatccctttcggattggggaggaggagttttgcacttcatgtcatggaaacacctttcttatgaaagataggtccttccaagttctcatccgagacgatggtagtctatggattcgtcagggtagtcccctccacgaccaaagtaggtgaagcctctgccaaggctttatgtttaggatggattgcttaagtcgtgccactcccgaacacaattagttcccgagagacctccccagttgcaagtgaagttttctctatcccaacaggagcttgggaaccggaacgcttcacggatgccttcgtaggaagggggatttcctgaaccccttaggaaaaggaagtgcacaaagaccttggtttataggtcctggaggccctagccttactcttccattttctcttagtgccctctgtcttggcaacaaactttgtgatttagtcactcaaagatctcatcatctttgcttttgaagtgtctgcaaacataaaaaccagatagttagcatgcaactttcaaaaagtagtaaaattaaatcacaattaacatatggcaacaatttctaaagatgtgtatgtgggtgcaaccattcagtgaggagttatatggttctccacaggcaaagaagactatgtcatcctagccaatgaaattgccatattctctgaagttagggaaagacatagtcacgaaagggtccactctaatagtatctagagataactttgggttactaggactccttacgatttcatctactctattatgaaatccttcacgaggaacttaagatgatctaagtttgataatatatatatatatcgaattccccttgatccatctaggatatgcgatggtggttaggggtacgaaatacatggaaaggtatgttatttcttccaaaagtgctagctcccggggcaccctcatctgagtatgttgcagcatatctctctagaatctcctcctcctctgttaaggaattcaggttggggagcatccaattagcttcc

SEQ ID NO: 118179 - DNA, 3377 bp, Cannabis sativa
ttttttcgggttcgtcggggtttggcgagttcggtttaggcggtttacaaatttttttgtacagccctattctaaagtggtcactttgttatattttattacacgtggctaataaaataatgatgtgattgttcgaacaaatgtcatatcatcgccacgtgtataattcaaaataaaaaattaaaatatttatatttttaaaagatcattaaattgaaaattattgatgattgaaaaaattatacaaaactaaattaaaaacttttaaattattatttttaattaattacacacgtggcctagatataacgcttatgtggcaattgcctaaattgccacaatatcattttgtttgccacatgtgacaaaacttgatagaatgatcaatttacaacactattaataattcgaggaccatttttaacggactgaaaaattcagaaagcataataatgtataaattatagttcatgagacaaaaattttaaataacttaattcatataaaattatataaatgtaaattatgtaaataaattaatttaagggtgataattattttctcagcatataataaaatacttaattaatttatacaaaataaatatttgaatgtttaaataataaaagaataaggagataatatattctctttaaaatatatattttttattattttaattgtatgattcacttgtttaaataaacaaatttatagctctcaaacaatttagtattttatttttttatttactttgagaaaattatatttttgtttgatatattagttatttatcagtaaaatataaattttatttaattgattttttaaaaaactattttatatataaataatctactccaaaaaataattgaaattggagatagaaaaaaaaaaaaggttacaaaggctgaatgtaagcctctatattataatcacgtgaatcctacacatgcatgcctttattaatcaaacaaattattttttaatatttttctatggctgtgaatcaaggacatgtgcaatagaagagaacacaccaattttttaaaaaagtgaaaatatgtataattttttaaaaaaatatatgttacataaaattatttttatttttcattttttttaaattgttaaattttggaaaaaaaaataagttactcttaaaatttattcaaacaattttttttaattatagcccggaccccatacctcatacctcgctctcgatctaagctcgaacctccgtctcgacccagaccagactcggaccgcaacctcgacgcgactttaggcccaaaccttaacccaaaacttggcctcagtctcggcccccatctcgacttggacctcggtctgaacccaggccaaactagactcggacacgggcctcaacctcaactcaaccccgactcctggccctggttttagacctagaccccatccccgacccgtaccccgaccccgacctataaagaagatcccaaccccggatccaaacacttgcctaacctagaccacggactcaaatcagtgttggacctcagtttcaacctgtacccaacccccggaccccaaatagtggctctaaggtatagtacctggaccgttggaccttgaccttagccccaacccaaatcttgacctcgagctcttttctagacccaaactccaaatctagctcccgacttgaacatagacccttggaccttgacttggcccccaaagctcgtcccttgacgtgaatccaaagtcaagacctcaaatctccagcccactttccctcacttcactttctactcttcacttaaatagtaaaaataaataaataaataaatttacaaactacatttttacttttctttttctctttaattaaaatcaaaattcaaaacaattatggaacccattttttttttcaaaaatttaaaattttattattattttgtgatttaaaaaattaaaaaataaaatattacataaccctcaatttaattatattattttgttaattgaatgcatattatataaatatatcatttaaagaaaaattatataaaaatataataagacaaactaattatgtaattttattaacacttattactaattatataaaaatagaggatgttttaatagctgcatcaaatatgtaactatgatgattatatttatttttaaccattaattattgatagactgtgattaatttaaaaattaactaaaaataattaataaattacccttagcttgatactaacctaaatttattttcttttcctataaataaaaaataaaatatttataattattaattactaaaaagttttatgaactatcttaatttaaaaaattaatttattttaatatataattaattataattaatttaagtctaaacataaaacttttacctattactaacctgttacagtaagtcatacaaaaatgtaaccactcaataatcatctataatagaataactaaggtggtgtttaattggaggtaataaaatagaatggaattagaaagaaataatttttattccatccatttgtttggttgtattttaaagtatataatggaatgagttttcttttattttggtgggatgactattttattttgaaatagaaaaaataatgcaagatgagaaaaaataatgattttttcttatttttttacgcatatgaaattctattccattttattcatatttctattctcatttttatttttattctttccaatcaaacactatagatgtatatatatctactagattaattaatattacgtgcaatgcacctatacttaattattatttggatgaataatgcttccactactacaaaaaagatttattgttttgatttttaagtgacatataaagaacttgcttcagttagtgtaactgacgctataaccgtagacgcaaatagtgatgtttttttcttcagttatcaaccgacgctaattggttatttgcttcagttataaaccaaaacaaaaaaaaaaaaaaaaaagcttttgcttcggttcataaccgcagcaaaaaactagtgcattgacgctaattattttttgcttcggttataaactgaagcaaaaaaattaaaaaaaaattaaaaatcttataattatgacaagattgatgccacacaaaatttttcagtttcacacatttttttcaatttcacataaaaaaatctcatatctcaaatttacaataatctcaaactttcaaagacgggagagcaccaccgcatgtcgcgacaccaccaccactacaccacgacaataccaccaccctaccaccgcaaacttgaaaaaaaggaaaatatcatattaaaaatagagagatcgagagagagagagag

SEQ ID NO: 118180 - DNA, 2442 bp, Cannabis sativa
  modified_base (1997)..(2003): a, c, t, g, unknown or other
caaaagtgcaatactttaatatctatctacccacttgacctgtgtatggaccacaattcaacaaaccccacaacctaactattattaactccactaccagaattaagaaccactataaatccaacacactcataccccaatatttttcaaaaccctaaacactattagaagaaaaaatcacttaccgtagtctggaggagcatcatccctattccgacgacgaaaggccatttcatgaacgagatctggtttctgagtctttctcttcaacttctattctgtgtttctgggtttcctttgattttacgataatggatttggggttcttacactcgtttcacgtgcttactcatcgatttccaaacagtgttcgtgagcttcgttcgattttacaaaaaacggtttggggttcttacactggtttaggtttcctttctcctcgattcacacagtgtttctgggttgtgtttatcttaaggttagttcattttgtttattggatttgtattcattttttttatttcatttcccccttgcttattctattttaagtggatttgtgttttgtggatttcatttaattttaatgggatttttgattttatttagttattattttaatttaattttaattttcagttataatcctaggttttagatgaataatgccacgtaatatggattttggtgacttggcaattgggctacccagccacataagcagaaaacggggtcagttagacgggggagtgtatttgctaacggaatagatgtttagatggttttaccacaaaaattttaaatttgtgggttagttgcaacaacctggccacctaaggaggttatgccgcaaatcccccttaaataattataatatacacgattataaaaaatattagactaaacaagtttatcgggtgccgaaacaaataaaagtacatcagtacaacactttaaaaaatatatattgtataatttctataacttaaattcttaatttcacaaatacatctaataatataaatattaattaaatatatatatacaaaatatcgtatctacagtgcacgtcatatatgccgtgcactgtagcattaacctcaaattagtgtgcattatagtatctttttaaagaagaagcccactccatatatacactatggagtctcgttagagttaaccttaaatcatatttaaatggcaaaaacctaaaataactttttttcttaagacttttgagtgaaggtgttaaaatctttagttaacatttaggaggatatatcgacattaaatcttttttgtgttactaatcatacttgtacaaccgagttactggtagatacacacaacataagttgtgtcaatttgctgtggaatttgattgcacagtgtgagaggtattcaacctcttggacatagttccaaaagaacaaaacagagcaagaagaagaagaaagaagaagaaaggcaaagagaaagaaagagagagaaaaaattgtcttattgattaatctgagctttacaattatatatacacatgattagaggattgtacaattaaccacttgtaacaaaaggtagttagacagttaaccgaattaaccaccatcctaacaagcatactaactaaccaacctaactaactgtcctaacacgcccccttaaacttagcataggtgggataaccaatggtaagtttgtgtcaaaaagatgagaacaattgactagagataggcttagctaagccatcaactgttggattatattttaataggacctagatttactaacaagtatgtttattaacaacctaaatatgaatttataaagcaatggaatttaaacacatataaagtttgagtaatcttacattgattgtagcagaatataatgacttctcccactcagatctctaacccttgttcctttctgtcacatagtattatcaagatcagggcccgatcctccttcagttgtttggattcttcatagtcttnnnnnnnatgattgagtactagacttgctatgggttggtatgcactcaatctctaaggctcaaaaatttaatgaagaacactcaaggatttcgaaataagaaagaagaagaagaagttgtctcaagaactctttagttgtctaacaagttgtaaactaggtttagagtcatttgttggattatgagactatcctattatttttataataattcatttagggttaggattatggaataaaaaatgatgaaaattagccaaaaataagacttagtggccgaccatgaaagtgggccccactaattatatgtttgccattttttcaactatttatctattatttcacaaatgctatattttttttattttaatcgtatatgccaaaactatttatttaataattataattaattatcaaataaatttttcatttatattatttattaat

SEQ ID NO: 118181 - DNA, 1145 bp, Cannabis sativa
attttgtaatagttattaaattaaattatgcgagatctgatacgtaattacattaacaacaatatagcacctctaactagctgtgcctttttagcatttcttttttgatttagtgtcacacatgactcacattacaatatcacatgcattgctagctttaccaattgctctcacataccatcaattaccctaaataaagataaaaacacataacacttttattatatgaaaagttgatctcaactaaaacagtaatctttctttaacatctgtcacgttatacattcatatataaaatatatatatatttttcgctatttccaattatagtactcattattctccatacgtaccaataattaatggacataattaaatcgaatatatattaattagcaatgttaatccaatctatacccatgcaaaataaaattgacaatatatagcaaaggcaaaaaatacatataaacatggaagctaataactttattaaagaatgtaagttatatcatgtacaaaaaggacaattggtgggtgagtaaattaggagagagagtacttcatatgcccattaactcatttcattataagtgccaaacataatctcgaaggtatctttagattacatccaaaatcaatttgtttagaaagatatcaaagtgcatagatgaaacgtgtcatgacatgataggtggtccccaatggccaaaatcactataaaatctagtggagaaacatcatcagcaacaatatacttattagcaaaatatacagctatatagcctttcatggtatacgatgcttgccaaactatggctcactcttcttttccttggagtggtggagctcaccgcaaccaccaccggtgttgttgctgcaagcactcacttgccccgtaatttgaatgaattacctcatcgtgagaaaaagccacctcgaaaagatcaaccgaaacttaatccaggtgataagccacctttgaatccaggtgataagccgccacctgaagacaaaccacctttaaatccaagagataagcctccattgaatcctggtgataagccaccaccagaagacaagccaccattgaatccacgagataaacccccgttgaatccaggtgataagcctccaccagaagacaa

SEQ ID NO: 118182 - DNA, 1857 bp, Cannabis sativa
aaaagtctcccgctgttgatgctaatccatcaagatccaaaatttcatgtattcttctccagaatatgaatgaaatttgattctctaattcaaatgttactgcttcttccttgtagtcactactacccttgtacttaactagtcatttcaaacctcaaattatatcccaatatacagaattttttgtctaataaaataatccaaactttattatttaataagataatcagtgatcactgttctttaatatagtaactgatcctcttctgatgtctagtaaaacaaccatatctaccctactatggtttatagagtaataactctatcacccttactgttacttaaaaataactctgtaattctggtcatctaataatactacccctatatggcctactatctatgctcaatgatgaatttaaccttactcactaaaagacaataaattttttatcgggtaaccgactattttcctttgaaggtattcaatcattacaagtagatttactaatcttatttccattctaacataaaattcacttttctaatacttttagctaaaacccacatctaaaagagcatctgaatttttttctctttcaattattggggttataacccgtacctcaattgataccaaaatagagactaccaagcatctcttaggtattgtttttcattaatggttagtactccatccatcacgattcacaagagtatctagctcaaccatctaaacatatatgcatgttaattacacctcagatagtgagcttctccacttttcaagtgaacctactttttcccagattttgattatcactttgtatataagattaaccaacctatcaaatttaataacataactcgttatcgttgtaacatcccaaacgaatgaaataaatccttttgtctcaactttgtaaatgatttcatattcatccctttacaactccttagccaatcttatattccaacttatagattttgtttcatgagcttcaaactcaaccttccatcaaatgaatgtctcttttgtggtataagatggcccaatccacttagtcatcatctttagctcgcttgatccatgaatggaaagcaatcataaccatctgttgctccaccttcaacgattctggatcacctttaaagcaaagaagtacattctttgttctacttagacaaccaccttaaacaacccctcatatcctccgacccactataacatatctaaaaatcaatctatcattagtccaacttactacttaatcaattctctaatttgtctcaccaaataatctactttttgttgacgtacatcacttcatagtctggagtgataccaaattttcacctctccatcatttctaacctgtcaaactcttcgtcaaatctctcaaatcaccttagatgtgtcgctcagtacttcaccaatcatcgaatagtatcgatatagctcttaagtaataacaatgctaataagaattttcccctaactatacttaataattaaatacacattttctaccaagctttctcaattaggatataatcataatataccacaaataataactcaactcatgctcttccaaacatccttctaacaatatcatataaataattaatcacatagtatgtaaacaaataaaacttactacaccatgagttgagcttgtcttcacatcaaatgtacatatccagccagtcttcaagacctttaatgtcgtggttgctctgataccaagttttaatgccccatctcctaaggatgctacgtctttgcttttattgttagacaatttatatgtatagactaacacatatatgattatgaataaagtgcggaattaa

SEQ ID NO: 118183 - DNA, 2561 bp, Cannabis sativa
aaaaaaaaaaaaaaggttctttaaacgtaaaaatgtattttttttttttacaaaacagggtgccttatataaatattccaaataaataaggtggtattttacgttaacattctcttacttagttttttcatatttttaaactttttcttcaatttttctataaaataattttttaaaaaaataaaaataaaaaatcataaaatttataatttcctcataaaaaaatttacacaagaatttaaacataacaaaatgaactatataagtatccttataatataattgaaatcatattttttcactcaataacgttaatttttgtgatctgataatgatctgtattatccactactatcaccaaataatatcgttattgcagaaagtaagtaaagctaaaattaaaatgttgaaatactcatactcattattagcattcttcatttctttcctctttcacccaacataggaaaatcagtcttattggagccattagtactctcatattataatttttatttttgtttggcatggttttttgcattggaccttaaaatatagctgttagggtaaaatttcatataaaattatttagtttgtttatttgtatggaagttgtgtttcactttgttttttatttttaaaattgtgtctttagaggagcattgttataaggcattattggtgcctaactaaaactcagtagtgatggactcaagaaattttttgtgtgttataaggtactattcagcctcttttcacaatattttacaaaaatataatttttttccaaagtaaaaaaatatactatataaaaaatttgggccttgggtttaggtgggccctaagcacggacgggtctaacccgccttagtctaaagtcgggcatgtgcgtagcaccacctagatttagcggcttgtaaatagttagtgatattctataatagttattaaattaaattatgtgggacatattacttaattacttaaatagtgatatgacactataggataccttttagcatttctctttttttaggaatgagaagagaaaataatttttgtagctttcaaaatacaagatgcctttggtaattgctttcaaaaaaatgtaagattttttttactaaaaaaataacttcataattccacacctcgatacaaacccaaccccaccacgactcttatacagactcaagacatcgatcccgatcctagtcctgaacttggccctgtaacccgagctggactcggacatagttctatacctcaaacttggccccaaactcgaacctcgaacttgaacttggactcagaccctgaactcgaccctaaacatgtcctcggtcttggacgtggaccctgaacccgaccttagccttgggtcccgaggtatgtgatggaaaatgtaaataaatatgtcgaaaaaaacaataaaaattatttttgatatagaaacaacattttgatgtttttgtacttgttttcgaaaaactatttttagaatatttggtcaaaaaactttctattggtttttagaaaaaaaaaatatttttaaaaagaaaaaatagtgtttagttatgaaatataatatcccttaattttatgttatatgtatatgataaaaatgtatcaaaaaagaaaaggaagaaagtaaggaaacaccgtgagagatagagatttctaccataagagaacgaaggagagagatactcaagcatctatgttgagtgagaaagaagaggtatacatttgagaaatgaacaaatgagagttaaacaagcacatagaaaagaaagacaagtagtacgtgcattcaaatattatgtagaattcttattttcttttatagataacaaaaagtcataacctacaaatcttgttaacaaagaaaacgattcaagaacgggtcttacaaataatataaatacagaaaataaattcacaaaagtacgcttgaacctaaacaaccaaaagattaaggagatttcgttgcaccaaaagcaaatatgttcgcgtctatttgtttagaataaatattaataacattcactaacattaaaggtcaatctttattaacaacgctgcatataactcactatcaatgtttaggtgtatattttaattgtacgtattattattcattattttattttagttcaataaattattactcatcaattaatttatacgtattagttttaaatttatttcttaaatggggtattgaaaattgttatttttgtcaataaaaaatgtgggtttagtaacaagatgtgatttatttatttattttgaaaaaaataataagagaactacaccaatgtggcttcttatcactacgttcaacaaaacacatgaagttgtattgggtgtgaataaatcttttcttgtattcttattcactattactcaataaaggtatagaaaaatatcatgtatattatattgggaaatttttattttttatagtttttaaagtataaatttataaaaatatggctttttcttaaaaaaaaaaaattattttataagaaaattttagaaaaaattgaaaaaatatg

SEQ ID NO: 118184 - DNA, 1773 bp, Cannabis sativa
  modified_base (226)..(233): a, c, t, g, unknown or other
  modified_base (1130)..(1139): a, c, t, g, unknown or other
ttcattattccgcatttaattaattacttaattaaataattaaactgtgaatattaaaatacggaatttcacactgagtataggctgatattaattgtattgtcgtacgaacattctagactcagtaccgtgttggacacggggatagggttataattggtgtatggacgcctgtttataattcggattatagttatgttattgattatacttttcttactgagtnnnnnnnntcacagatattgtttgcatgtgtatgtgagagcaaggctaagttgagcagtcgtgaaagcgagcagatgaagattgtacatgtcggggcagttaggcgtggagcgtacggtctttggaacagttggttgtattttgtatagtcgttagacaatttttgtagtacatactttgtaatagttgtaaatattttatactcaggttctcaattatatatatatattattgtggtatttataagtatttaaataaaattttgattagttatgttttttaataaatttattgatgagaaagagttgcacaattaaattaaaattagcatacctaaactagtagtgttacataaaacttatatatcactaaactaatcccacagtgaattctgaattcgaggtacctttttcttaggttccttaaaactaatgcaacttaaattactcttcaaaaaatatatacaataataataaactaagcaaaattctatttattggtgatgtaaaatttgtaaaatagagtagaaataccatttggagtaccgtaaacgaaaaagcaacctacggattaagtctagaaatacacattaccccgtaaatcttcaaaattaatttagggcttattaattaattattgtggaagtaactaattaataaccaaagaatataacaccgacaaaagaatccaaggagatgacgttgcatttaatgcatcaacaaataaaaccgtgaagaccatttaagatacaatggccagccacgaatttggctgtaattctctcaccatgaccataatttactttgtattatccattgaagaaacttggatatttaattaatatgtacagtttaaacacaaatatggctataaacgatcaaccatatttattattattattattnnnnnnnnnnttattattattattattcttttaggctgggaatttgttaatttatgaaattgaaatagatttggtgtgaccgtgtgagtgcattaaatgcttttggaacttcaatagagacagaagggaactgacctttgtgttatggaacatcaaccatttttattgctgaggagaaaacttcaaccatttaggtaaaacgacaacttattgatgaatataatgttaaaagttactacatcagcatgctattaccaatcattattaatacaaacacatgctcatatcatttaagatcaaacattttattttagaacttgcattaatttttaaattagtaaacatacctactttaatttttattgttgaatctttaaaagctatgaagtatgaattattgttgatttcataagcctcttgatgtacacacaaaaaaaaaaaaaacaagaaaggatattaataaacacttctcttttattctctcatcactatggccacacccatattctaccttaatcacatatatagagcataacccttgggaattttacaaaaatactgctttttgaccaaaactttacatttttactgggacacggcaaaaacaacttttgtactgcccaagcccaatttcattacttttg

SEQ ID NO: 118185 - DNA, 3708 bp, Cannabis sativa
tcaatctctaactcaaaatcatatgctcaagtgaaagaaactaaattcctttagcttcttcaaacataatacaatccaaacagccatgaaatcaactaaaacatgtataaaaaaacctaattcaactaagaaatcatactcagaacttatctaaccctacagccttgaaaactaataaaaactatcaaaacctagctttagaaacctatgaaatcaccaaaaatatgaggacgaacttacctcaagattctaggttggcttggggttagatttagcttgaaatgacacttgctgaagaaaaaaattctcaggtgtcggctggttcaagcagctttcacgagagagaggaagagtggaggttgtatttttttagtggttacttagcttctaagtaatttatagtaaggttcttctttcgttttttttttaatatacaatcagccccctaaaataaaaatagaaagggacaaaaaaaagtttatttaaagaatgactaattcgcccttagaagcaaattaaactttgaaataacttaatggcattttggtaattttactaatccaccaaactgacattctaaaattctaaaatagtctggaatatcctcaaaataatctatcccttaatgtcgtgacatttctgaccacatcgctaaatttctacaatcgccgagcccgaataaaatatttttattttaaaaatggtatccccgatagccacatatctcaatataatctccgtaattaataaattacgcttaatataatcatttaataaatcctcactaaataccataagtaagatcataatcttactttattaccaaaataattacatatttaataaaatatgtctatttaaatatcatcttatttttctgggatattacattaatttacaaaaagccatatccaaaagctattattgacgagatgagggaagagtgggcgatagatttgcttccacacttttagagttatcacattgtgggtcattagttaatttttttttaaaaaaattattatttatgaaaaatatttagttacaatatcaattaaatgtatattattttttttattataatatttgttaattttgttatgtatatatatctttatcaaatattataaacattgtgatatctatgatagtttaaaatttgtatttttttatgtgtattaattgagttaagttaattataagtaatttgttggaaaaacttatattatataatataaataattatttataatataatataaaaataaagaaataaaattaattttgcagcatttaatttagaaaaaaaaaataaaaaaatctagtttcaagtccaacttagctggactagaaaaaggttccctgagtgggattatttttcaagtcaatcattgttggactagaaatgtttttctagtccaacaattaagtttcatgttgtgggacagctttttaagtccaataatattggactagaaatgtttttctattcctagaaaaatatcttttttatgtcccatgctattatgtccaacacaaaagggactagaaaaatttatctaatctatgttggtggactaaaaagggggttttcaacgtagagactagttggcagcaagggaatgcaacaacatggcaatgaaaagtcaaccccatccttggactcaacttttccaagccactactttttaacacgcctgctaaggcaataaagtggctaggagacgccacgtggggcaaccatttttagctttgatttacttttcccatgattgaacaatgttattagtttttagttgtcaagtgtcattttaagagcacaacatttaatttctttttagacattaagtcatttatttttcaataaatgtttacactttttgcaaaaatatttcttttgtaatgttacgtcctcacccaaacaagttacaaaagtaacccaatacttttataacttgaggggcatatatggtatagtccataactatactccaccactccacaagataaatctcaaagtcattgcctacactctaccactccacaaaataaatcttcaagtcattgtcgacaagataaatctcaaagtcattgccgacacatcactttatgagcatgggatttaaaaaaaattgccatgaatattttttcaaaaatatcatcttggacaggggcaaagtcagtatatcgacgagataaaataaatctcaatttcattactaacacgtcactttaagagcatggaattttaaaaaatttcaccatgaatattttttcaaaatttcatctctgacatggggcaacgttggtacactgacgagataaaagacaaatgagggcactccaaggagccataactcaaaaaattttgcttaccaaagacatctcgaatggcctacattagagactttgacaagtgggttgcatgctaaaaatgagtatccaaagagttatgatccatgtcgacaacttgctcaaactagcaaaaatgcaagccaccattggcaacaaaattaatgttatctttaaaatctcacattacaaagataataagcatgggaataaaataagcaaaaaatatattcaacttaaaattctaaagtcaccaagatatggaattagtttaagttatatatgcttaaaaaaattccaaagatgtgaaaaagacttgttagttttaactagcaagcactccacactaagtggaccataaagtgaacccacccatgtgggccctaaatgtcgatacataataaaaatagatttatatggcaaaagaagataaatactaatatgttctcacataggtaataaaatgcctaaagttgctcaatggaaagcactgccataaggcaactcttgcatggaacactacaagacaaacaaagaagactaaacagcctaaagtcaatatgagaatggtagtgctctccgaaatcagagaccactgtcaacatgccaacacctaatctgttaaatactgaggtaccaagtggtctcggtatttgacttgtttggtcggtgggttggcctaaattttcattctggatgaagttattaggtataactccacccgaagagtggtcaggtaggatttggtcgtctactgcttggccccacaggttggacctgtggccaaggattggacgactgaccattatgaacttgggcagtatgcccagtagcatactcttatgtactgcttagtgggatactggatgcggtagctagttgctgattaacgacttggtaggcccgccttatcagtactgtagcctgcctcttgcaatcatcgatggctgcttgctgagccttcaaagtttccatctctctgtccctccactttataaacttgcatcgctgctcatctaacgcaaggtttatagtagcacggagatcctccatgtcatgatgcaaagcattattatggctttttcctgaaccctagttttgcccgtttttgggttgctaagggtgttagcatcctatttatcgatagggttatccttagtttcaattttcaatccccgatagatgttttagcgtgtcgctcatccaattttgaatattatggtttagggccctgtaaagcgtcgagctgtgtttccactcaggctgatcgacacacttgagcacggaatgaggtaagatagcataatagcgtatatataaatatatgcttgttttaactagttacactactaacac

SEQ ID NO: 118186 - DNA, 2855 bp, Cannabis sativa
tattgtataattgttcggttttcctatttgtacaattttaaaaaatgcagggttcattttgtcatttaataaaatagagggtccaattggtaacttttgcataacacagggtctacaaatgatatttatccttttaaaattaaaaaaaaaaaataaaagggtgttttgtaaattttattttttatttttatttgtttattttatttaagtcgggtttgaggtcgtgactgagagcgggtctaaattcgaggtcgaggtcagattcggtttcaaaagtcaaaattaggattcaagttcaaaatattaattaaaaaaacttatttaaaaaaatattgaaagtgatttttttaaaaaagaaaaattagatttttaattaaaaaaattaaaaaataaaaacagttttatagcttaaaaaaattgaaaaatattttatttttttaattttaaaaataaaaaaaattaattaagaaagtattagatttttagttttatctgccgcaattttttttattgagggaaccaatgagtgaatgagggattatgtgacgtgattgcgttttcgacacgacctttgaaagagaggagaggatatgtgaaatgtcaattatatcttaccaaaattaaaccaaatcacacccaatccaaataagccaaaactacgcctacgctaagctgagctgagctgagctgagctgtaggaagagttggaattattaggacttggcgcgttttctatttcattttccaaaaaaaaaaaaaaacaaatgtattatatatttatttctttatttgccgatttaaacaaattgtaaacaagtatatatataattcccaatggacttgtatttttttttttttttaaatgagtaaacttgtatatgatatatatgaaaaagataaagagttttttttttcttttttgaacaaatgaaaaagatagagtttgaatttcaaggacatgccgtttctcaaaaaaaaaaaaaaaatgaaggagatgagtttcccaaaaggttgggtgctatactcgcaatagatttgactgccacttaccggtggtatttggttggtgagatgacatgtcagttctcactcgctgtccccaatccatttaataataatatcaaactaaaaattaggtggaaattggtttgaataattatattaagaaaatgttaatggaagtatctctaaaaaagaaatataatattttattttatattattattattatttaatatatataaaataattaaattttttattttaggacaaaataataataaaaagataaaaaagagaaaatatatacattaaaaaatatcaaaaatatattcatgttatcaaatattttttaaagcatcttcattaggaacgagaattccactaagactaactatttttgttgactcagttaaaatttaattttttaataaattaaaaattaattgatgtatcaaacttaaattagtttaacatgaaaaactattttttgacaagggatgttgatttctccattcaaaatactctaagatattgatatacttcaatatcaattctcacaaagtctcgttttagtatagtattagacactttttaataccaataacaatcttccttataataatatctaccactaatgttgtttgttagactaattaaataataggttgacaaagtattcttattggacttttttttaagaaaaaaagtatccttattggttgatatatttacgcctatacatgttatttgtttgaattttacaaatatataactttattacaatatactgcacataaaaaatcattattatttactcatatattttaattagtaataaatatattatcagcccttcttcttttttttaaagcttttgctctttatggtggagttttgagattttcttctcaaaaatatatttataacaccaatatataaatcaatgttataataaaacaattacaaacaacttgtctttgtcatttagttttttttttttatatatatatatatatatatactatcttttttttattttttatatactatttttggtaaataattttttgtacattctattaacaccttaaagtatttaaagtattcaatatcataccgatgtggtacttaataattagttagtaatttttttgtcttttgtcttttgtgttttattttttttttattttttataaataatttttgtactattttttataaatagtttttgtactattattattatgtggcactttaaggtgctcaattccatacaaatacacatacacaataattgattagtatttttttaaatcatattaaattaaaatttgtaggaactaatatgaaaatgcaccaataacgatatgttaccttttgtggtactttgcaacttaatgtgtcccttaacattttcattattaatatgtacatgtatttattaactttaattattattttaattttttgttattattatatataagtttgcaagagtattcttaataggatatatataaattttgctatatttaaccaaaaaaattaacttgtgatacatttacatcaatttttagtattatgttccaatgcataacggcagaacttgatgtaattttttttttcttttattttttttttattatgaatgattatcaataagtgaacttataccacactatgttcttatataaatataattttttttcaataattgtttaaatataattgataaaagtaacatatatgattataatattagaatatttttaattaaggaaataaaataatattattgattctgataaatgaatattttatattcattgaatctggacagaatcaattacgta

SEQ ID NO: 118187 - DNA, 1366 bp, Cannabis sativa
aaaaaaaaaaaaaaaagctagaggggatcaacctataaatatgatttaatgatatatttgcaaaataaaaaattatatagtggtgatcacaatgctttttaaaacaactagccatatctatgtgaataattaaaagaatttttcaccatactatatgtaatattttttgtacatgattctgaatgaaagaggagtgatattgtgaactttctattataattttttaattaatttttatgtttgaaaatatatgctagaatattttaattttttttatagtggtgttcgttatgcttacaacattatttctgtaaattttttgaatagtttacagtgccgaaaatatgtttgaaattttttgaatacgcgtggtaaattaaaatattaaaaactcttttttggcattgtaaattattcaaaaaattttaaaactttacagagataatactataactataacaaatacatatatgaaaaaaatattccaatatgtaatttcgagcatagaaattaaataaaaaattataatagaaaattataattaacactcctctcaaatcaaatacctttaatgtagacaacatattaaaaattaaaataatgacaaacttagaaaaatctattaaaagaaagatttctcatcatcaatgaccttataaagaggttatattaaaaaattatacttgctcaaagcaagacactatattttagtattttttttatttactaatgttgaattagtagtacactacatacaagaaagaattgcacatcagtggtacctagcactatctaataatattattttatacgagacctaatatttaattataccaataatcaatagctatataacacttataaaagtactagatcctcataatatctttcagcatttcttttcaagaaactatatcttgatttgcttttctagcttatggagttctacctttattatttttaacatattacttaaaaacaggcctaagaatatatgggcataagttaagggctctcagaaatatatatatatatatataaatgttaaaaaaaaattgttatgagagtcgaacctatgatatttagtaatatgtcatacatctcatccaactaaattatgaatatttattgtttataatacacttaattttacttaaataaaagtctaatggaactttttttttttaattttagactcccgaaaatgtggaccctaggtatagatttagcctgcttatatgtaaggccggccggcccaaacttaaaaagtgtaatgcttagggaaatttacaccacatactgttttttcctattttatttcaattttactgttgtaagggaaatattacatttttactgttttttt

SEQ ID NO: 118188 - DNA, 1628 bp, Cannabis sativa
aagtggtcatatatttttaatggtgatatgtattagtttagaaataaaatattaggtatatgtaagtatagaaaatcaaatttccctttcaaaattatcataaatatttacataactacgctaacaaattcaaattaataataaacaacacaaatatataactaaaagttagctatggttttttttttttttaaaaaaaaaaaagttagttatgctcttagaggcaagttagttagaattattaaaaattgtttgagttaattagtaatattttctctaacttattcaattgtaatttgtaactacttttgagcattctttccactctttcactctcgtcctctcttcacattctttttttcttgctcaaagtctaactttgaaattcagagctcttacatggtattagaaagccatggtgaatcatggagacaacggtagtagtcctagaatttgacttgatccaccatttggagaaatagtcaaacaactgcaagctcgagctgcaaatccaattcccgctcttgaagctcaaactccactccccaactatcttctcttgaccctgaatctcaaattagattgcacaactacactgtttggcgatcacttattcttgctgcagtgtgtgcttatgatattgatggctatatctgtggaaatcttccttagcctctaacatctcttgcaggtaatgttccaaaccttgctttccaacaatggatgcgatttgaccaattatgttgccgaacttatgttgggacatgtcatttcattgtcaaattttctctgaaatttggtccacctttacttagctttttgctaccagatcccatgcaaggcttctgtaactttgaaatctccttcaaaccatcaagaaagattctttctcaatcgaggaatatatgctcaaaatgaagcaatatgttgatcatcttgtagctgctagtcaaccaatcaacgatgatgatctagtgctctacattcttgtgggttgagtatgaggctgtgattgccaacctcacatcaagaaccaaacatctcacacttcaacgagtccaattcatgttgcagaatcaagatatgtgcattcaacaacacactacaaattctctccaaaatgtgcaagctaatttggccaatgcaaatttcaatagcacaagaggttcatactccaattgagattacagaggtgataatagaggaggtagatcaaacaacacaaatagaggtggtcgtggcactagaccaatgtgccaactatgtggcagagttggccacacaaattaatagtgaaatgttagcacaaatgtgacataatcttcactggtgccacacatggatcaacctcatcctctcttggtgttgataattctcaagctttagtatttgagattaactctacttctaatctctcagcagcttggtacttagatagcggagcaactcatcacatgacaaatatgatgctaaaaatctcaccattacaacaaactacaagggcaaagccaagattgctgtaagtaatggctcttccctctgtattcattaggggtatttattggatcacatccaatggatttggacccatccgatccaatccaattatttattgaatattggatttt

SEQ ID NO: 118189 - DNA, 3105 bp, Cannabis sativa
atatttagaaataattttttaattttttacttacaacaaaatttaaaatttaaatttttgtttccaaaacacatttttaaaaaatacaatttttgaataatagagtttgttgtaaatatttaagttcaattacattatgctcattttttttaattgaaaatgagaataaaaataaaagagaagaggaagactaaaaaagtgatgcacttatttcaccagacaataaagatgctttcattattggcttcgtcctcttcttacatgggccattgccatttaaactaaacagaacaaaataagacatttggtaaacgtgtttgaatatttgctttttttgaaacaaaaatattaaatattaatattggtgtaatttaaaagaaaaatgataaagcacacttaaagtgtcaagcaccataaaaagtgaagttattggtacatttaaaaatcggtcctcaatttgatttaataaataatatgaggagtcgttaactaattataatgcaacaaatcagtatggtgtttgacactttaaaatacctaatagcaatattcaatttaaaacagaatcctaaaatatctctcctacatcacttccagtagtttttagagatttttcaaaaatttgaaaacaagtgagccaatactttgtctaatacttcttctctatttaaaacatctttactttcactaaatacttatcttaaggagaaagttgaggggatacaagaaggataatcaagccaccaaatcttgctaataacttctaaccaagcatatttagccaagaaatgagaacaatattaacagatctaaaacagaaaaaaagactaacataataaaattcagaaaaaacactatttcaaatctgctaatgctaaacccaacgaagtagccaaagaaacctgattattaaacttcaaaatcacattcaaacaatcagattcaaaaagcacattctacaaacccaatagacgacattggatggtagtattttttagagctaaagtttctccatttcatgaggaaaagtaccaaaaatgtgcgaaacaacataaaccataacttcatcaatggagtcacgagccaccatacacaaaccacatctatcattagaagcgtcaagagcagcatcaatataaattttttttgttggcatacttgataaaatagacaaaaaaaaaatgtttgtggtatttttaaaattatttttatttgtttattcattatttttgaaaatcttgttgccttttctggtgtgaaaatgctttcaaaatcagatcctattcttatttgactttgtgtgaattaaatatgagttttccttttatagaatattcgattgtattatttgctttttaaggaattcttattcatattttattccttttgatctgatttcttgaccaagaaatcatgcacagttataggtattaatgttgttaaagttgccttatttatttatggaaactttgctaaaaaaaactgtccaggttcactgtatctgtttgaaaagactgactctctgtttaaatagattttgactttctttttttgggaagattttcatttaatgacctgatcgtttcttggttgtttgtccacggcctagagggtttctaaactgtaaatattcatccttaggtcgctggttttggttagctctcttggtgtatcaattctatattacttttcaaagttagagagtatatttttttgttgtgtgaagaacttaagtccaacaagttcttagtatttaattattgtgttactctgtattgtttcttgttaaaattgtgcaggttgaataccttggatatttttaatcaagcttcgggagaagttttgttcgtgagtcaccttttcgggaggaaaaagtacatgtgagtcactcttcaggaggaagattgcaagttagtcactcttcgggaggaagattgcaagtgattcactcctcggaaggaagattgcaagtgagtcactctccaggaggaagattgcaagttagacactcttcgggagaaagattgcatgtgaaacactcttcgggatgaagtgtgcaagtactacgaattgaagggagttcaaggtctcggtacttttgaaatttaattagaagaatagattacaacatttgtgccaaattcaaagagggagtctttatttgtataagtcaatttagttttgtaaacacttgtggttcatctaataaatttcgttctctgagcgtggccccatggaataggagcaattcgaaagagttgctgataccacatataaaatattatgtgtcattttaattttctacattttgctttttgtagtatatttctgtcctgtcagattctgtgtctgatagaacaaagataaattctgttcaaataattttattacagtcccgcattatttaaattgtttgataatttcacttggtaattattaaaaacggaatttaaatcaacattgatctttactgttcccctaccaggcaacactcaagcatgattaggagaaccgtttagagaaaaaggcaagttctcaaccgagtgagacttatacgttaataatcaacaaggaaatcacgaccccaagaaacaacaatatcaggagcaattaccttatcatcatgagtatttttattcctcctaaactagattcgccacatgataactaaaaccaactataaaaaggccacatgcaaagaatctaaaaacttgtgaatgaactcataaaaatcatgacaaatagtaagataatccttcggaaatatcacaaagtttacgacactcagctaaaaacaggaacccccataaagcatggtgggtagtttttagtttaagaatcgcaaataggacataccccatcaatcaataagccatactttgtaaaattacatttggtaggaatccaattagaagaaatatgccaagtgaacatcttcaccttggggtgaagattaagagaccaaatttgtttccaccaaccagataaaccaaatgaagaagaagcatgacctacccccaaatgaggaaattacactctatactctttttgtattgtcctctttcatttttaccctcttttttaaagtctatcatttttacctct

SEQ ID NO: 118190 - DNA, 1686 bp, Cannabis sativa
taaattatagtgcatatatgatttattaattccgcactttattcataatcatgtatgttttaatctatacaaataaatgtctaacagctaacacatatttggccatacgatagggtgcaacatttgaagatctaggaaaagaagaaaactatactaagtagagtttattttaaatcatgaataataacctctgacctcatcataatcacccaagttggtacaatccaacgttaacatctttacaacttccgaagaattatgctgaaagaatccttaaacgctgcaactttatgcccttggcaaccttgacacttgacactgtccatgatggtccataattaaaaaggtccgttgaataaaattgggtttgaatcacattctacttttccctcttttgtctctagcaaaagccctttcgaactacaccactcacttgttttgaggtgtcaacactgactttaatgagatattttgcctgtggctgccacttctcagcctgatgtcacaaaccatcatgaagcaaacaaacaaaatcattatttgaacatcataaagtcaggttcataagcttaacgaattttaagatagaaactgttgtttcttttcctttgattacagattcctcaactgtgctttaaaataaaaaaaatttaaaaatacgaagaattggtcccaaaattctattccaacaaatgctttatattatgagctattatacatcagctttatttctttgctacaagatagctcctttaaattattattttttttaatctcactcctcgattaaatgcttctttgtttatttttagttttttattattttttattgtttaatactaaaagtatgttaaaatatgacatttaaataaaaaaattaatataaagcgtataatataaaaatttgaagtaaaataaaaaaagtactattttagtaatttattttaaagaatgaaacaaagacacagctaaaagtgctgatcaaacatgagggactaagtcacaagtgactaatttcccatcacaggcgactcttttactctctaaaaagtgtcaaatgagttttatcattaagaatatatgtttattaaattaaattttgaattattttaaagtcatacattaaatatatatatatatatatatatgcacatatatatattaggttgatattacgtgcaatgtacttataattagttttctttttaattaggttcaattaggtgatgttaagtgcaataaatgtatgtttaatttttttttaattagataatgtatttttttttatttttgaaatggaatttaagattttgatcttgaataatttttttttagctattgctacattagtgtgtcatttgaatgtgattatatatattttttaaattattaattttttttaattaggtagcatatctgataatgcatctattgtaatttacttattcttaaccaaaactcacataaccaaatttgagtgtgtctactatatatagattggattcgtaaatttgatttaaatatttgttattctcaaattttatgaaaaaatatggtgtgtgaataagtttaccataactaaaacagaaagcaatcaatttcttattacaactattttaatttaaaatataaaataaataataataaagttaaaaatatggttaataatattttcaatattttaaa

SEQ ID NO: 118191 - DNA, 4750 bp, Cannabis sativa
  modified_base (4391)..(4397): a, c, t, g, unknown or other
  modified_base (4722)..(4725): a, c, t, g, unknown or other
aatgtatggtattaattagtactcttcatatatcatttgactatttgaaactaatatcatttaatgtttgttttttttctaataattaatgtaccttataaagtctttattttcttttttgtatatgtatcgagtcatcatcatcatcagcaagttgttaattttttctcttttaagaacaaggtcatgataagttgaaaattttgaaagaactatactatcgtttatataataattaattagggtactcttacttgtaaaaaaatgcactatatataaatatatatatatatatatatattggctgtgttgtgttgtgttgtgtaccttagaatattaatatacgtactgtgtatacagtttttaataaacgtaccttttaaagtgagatatagtacgaaatgaaaacctacaccacagaaaattaatggtatagggttaatttaattggtatatatatatatacttattctaaatgtgtaaataaatttatatagagatatataatgaattgagtttgccctacaacgtacgtaatatatttgtttgtattcattgttatgctttttggttgatgtgttcttacattataaagtaacatggaaacttcaatttcatatagctaattaatagtaatacaagtagtacaagttagacaaaagtgttaaagataaaggtcagcaatgttgctcgatatcgactaataatttttttatattattattaaatcatttacttcctaatttaatttaatttagatatataataaaaatgtgaagaatgataatgtgtgtgtatatatcacacatatacgatagataggcatatgcaccaaatttatatagagtaattaatttccacatattgtatgttaattactatatatatatatatatatatattaagtttcgtacgtgatcaaatggaacatgaataattataatattaatatattatgtattttatgtgaataaattcttagatccatggtggtgttctccgctaacgggacacttctctttaaaaattgacgctttagtgaaatctcgagtaggagttttgtgggattgagcggtgtgatacgggatgatgagggccggatggtggggttggatggagattatggtgtgaatgtggcggagttactagggcggttacattgggtttcagtattgctcactaatttggtttttctatatctctattattaaaagtgattcgacaatcttcataggctggattaatagtcctaattctaatcttgtatgtcagcaaattattttaaatgttttatctttataattaaacagttgttggtgatgatttttgcaagactatgttggtattattcatgtgctaactacttttattactaattctttaaaaaagtatatttaaatggatatttattcacgttttattagttcttaatagttaatttaatttaatgaaatccatgttctcttttaaatatatataaaatagttatgatcaccaagtacttttctatatttactacaaatggaatatgaaacaagttcttcattttgaaaaagaaggtaatgcagtgcaaaaaaaagatatatataaagtgccaagatgtataatatcggtccccccattgatgatctttatcatgaacatgaagtaatatttatatatatatatatataaaaatttatataaatgcattaatggatggatggtgtcctttgttggaatatgaggataaaggagtgtaacggttttgtattatagtaagtactatcactgtttggtttttgcttgtttgcggtccttaattaaaaataaaattaaatgttggagagccagggccactcttgacaatgaaagatgaattgccatccatcagtatatacgtatttaaaaaaaaaaaaaatcactacaaaaaatctattttatttttagttataataaaatttgtgactaacaaagaaattaagcatgcttttcagcatacctgatacaaaagcacctggtgctgatggttttagtgctggttttttcaagtacttctggtttgatttgagagtcgagttttgtactgctgtgaatgatttctttgctacaggttttatgcccaattaaggagctccattcaaccctaatcactctcatccccaaacatgagaatccaactagtaccatggactatagaccaattgcctgttgtactactgtgtacaaatgcatctcgaagcttctatgttctagacttgcaaaggtgctgccgcatttgattaatcaaaaccaaggagctttcatctaaggtagatctatagcccataatgtcatgattttgtaggatctcttgaaaaattacgaaagaaaaattgtttctcccaggtgcactatcaaaattgatattagcaagccctatgatacagtgagttgggacttcatggaggacttgcttgttgcttttaacatacttcaaaggtttgtaaagtggatgatgggatgtcttagagctactcttattccttggttatgaatggaaaagtgcaaggcggcttcaaattaagggaaaaaagggttgagacagggagatccgatctcccctcttctttttgttcttataatggagtatctcacgagaagcctccatttggcaacttctcattcaaattcaggtatcatcctttgtgcaagggccttaagattataaatctctgttttgctgatgatttaatcttgttcagcaaaggatccaaaaactcggttatggtacttaagcaggttcaattcttgaggagttcagctttatctctggcctccacattaactcgagtaaatcccagatctacttaggaggcattaaaactgtggagaagcaagctatcattgatgggtttcatctaatagaggctaccttccctcttaaatatttaggtgttcccctgagaccgacaaaatagaaagctgaggattgtgggatcattgtggataaaatcaaacagagattacatacttggtcgagcatacatctctctttcgctggtaaggctcaactaattcattctgttttacttggccttaggaattattggatgagtatctttgttcttcctcatagtattacaaaggaggttgaaaaactttatcggggctttctttggggaatgaatggtaatagaagtaagattcatgttgcttcctgggagaaagtttgtctgccgaaggcttatggtggcctaggttttaaaaatggtgtcaaatggaaccaataaattctggccaagtatgtttgggcgatttctacaaagtaagatcttttgtgggttaaatggatagataatgtctatatgaaatcggggagcttttgggattatgttctcaaatctgaaactagttggtattggcgcaaattatgtcatttgagggagaaatttaagagatttgatatccttaaagcaggtgccaaggaccagttcaagactaactggttatacaacaacagtctagcccgaaaccaggtcaactatcacaaagctatctggagttcaaccattgttccaaaacacagatttattctgtggcaagtggttaattcccatcttctcacaagggacaagttagctcgttttcagatcgatctaagttcaactatgtgcccgatgtgtgaagctgagattgaatcccatgagcacattttcttctcttgtgtgttgtcgagcagggttcttgatatggtgttcaagtggatgggatatagagggtggccgactgattatgcgggctggtgtatttggttagctttgagagggcaaggctctttgcataagatcaactcgtccattttggcagctgtggtctacaacatttggctcaatagaaacagatgcatctttaaaggttacttaaaatctatttgtggtgttgttaatgatgtaaagaatactgttaagtacaggttacaaattgtaaacactagaaagctaactactcttgagaaaagatatgtgctaaaattaattacaaagtagttagtttttgtgtgttttggtctgcttctccttgtttggagttagtagttggtacctttgtattttattggtctttgtacctgttctgttgattaacgaagtctttccttcttgatcaaaaaaacaatttgtgactaaaagtaaaaatgttgtgactaattattaattatcattcttatatcgtgactaaaaaatctgtggctaaatatattagtcacaaaaattatattttgttgtgactaaatgtaattttagtcataatatacttgttgtgactaaaagtaaattagtgacaacttgtgtgtttagatactatgttttagtcacaagtagttttttattgtgacccaaagtcacatttttagtcacaaaaaaattatgttnnnnnnnaaaaattatcactaaaagtagctgttttttatagtgtcttctgttatttaataaattagaattatatatagttgtaatttaaagttttagatcaaaaattaaaaaagatatatcaatactattaaatttttttagttattaaactttttttatttacaaaatatctcttcagtaaaaataataaaatattttttgttgttgtaattaatatttatattataatcactacaaaaaatagttatttttagcgacaatttttgagtcataatataaattttttgtgactaagtatgatttttagtcacaacaaaaagttacttgtgannnnaacataatatttagttacaagttgt

SEQ ID NO: 118192 - DNA, 721 bp, Cannabis sativa
gttcagcattcaaaactaaaacagttgtaaacaaacacagtcttggcgaatcaacatggtgtgaaactaataagttcagctctcaaaactcaaaactcaaaacagctatttcaaaagatctaatcaactataacctatgtcaaagaacaaaaacaagtttctactatggaatgtaaaaacattattcaatcagttaaaaatcccccaaaaaaaacaaacaatgcttgtgtaattatacacatgtacatatcaagaaaaacaatatgatcaaaatcccaaatgcataatgataagagtttaattttattaattaaaagaaccaatctcaaagggttttacaatgtcgatctcattaatcaactaaacatctcaaattcaataacactaaacattaaccccaaaaacccttataccagatcaaaagccaagtcacaaacaagaaaacccagaaactgaaattagattcaaattcataaaaatactaactttttcctgcaagatgttggatgagtcaaaatgctcggtcataccgacttgacccacatcttcaatgaaggaaagcttctcagcatagcccaaagacatgatctttactcttcctttctgtaacactttctctctctaacgctcctacttcctctctctctctctataaaaatgaaaactttgattaaaaaattgaaaataaaaataatcccttttattttcttcttcttcttct

SEQ ID NO: 118193 - DNA, 1555 bp, Cannabis sativa
tatattgcttattaaattatgattataatagtacatatggtgcaaaactaaccagcccaaataagatagttttagtacgtttaaaatcttatctcttctttttgtcaaacgtcacataacacattcactaatagttttccacatatgagttacttttcttattagcccccttgaagttggtggatcattttgaatgtgcataacattacattaacacaacatataatctttattattcacctccatacagtgtcagttattctttatttaatcatggattccacttcatacacatacacactataaatatatatatattcataatacacattataaatattaatattatagtctatagatagtctatagatataatattatttaaatctctctcggatcacccaacctctccattataattttttgtctacatggtataatgatcaaagctccaaatgtcttgatatgggccaatatcatggtacacattgcttgaaaattgagttagaaattattaaactcggccacataaggctgctactaaaagtctcaaacccagacaaagaaagcaacaaacaaagctagttgtttgttgtgaacattaattaagaacccctttttatttatttattcaataattttacttttttttttgagggagagtgacccgctaagttatagcgagcaggaaaagggatcacttccatttcaaagtcaagtgttatctaacccaatagacaattacactaagttgtgtgttgttgtattccttagcctgttaatgtgagataagaaaacaattgggaaggagaacacttctttaagagattctgttatggtgcgaatttttttcctagaaactcaagaccgggctcctataagaatgacacatggactcacatcccttgaggatcgttgagctttcaagaagggactcctcgagaagttagcctcgcgagatgatgtgactctgacagggtctaatcacattattacgtctcgcctaataaaaaataagcaggaccaagaagggactatacaagtcgcgcatataccgagatatatgcgatgaataagtagtcttctcctgcgacttagtaaagatcatttctttacattaggaattggttccaatgtcccagtgtactcgatgactcgataaggactcgcatgtcctatgttatcaatgctgataatgtgtccacatacgctactcgaccaggatgcagataccttagtacaaggtccattagcctcctttagaatgataaaatacaccctaagcctgcgagcttgtgtgagaagatgagcaggcaactcgcactgtaacaccctaactagcataagcgtgttaacgtgattttaaacatactgtgtagctcgtgctaatcaacgaggttattgaaaatcgtgattaattaaaatttgcttatttaattaaaaacttaaaagtattatatatataatatttcgagatcccgtctacaaaatactttacaaaaggtttgctattcatttacaaaatatttgtcgcccagcgactaaacaacaaaag

SEQ ID NO: 118194 - DNA, 1644 bp, Cannabis sativa
  modified_base (57)..(66): a, c, t, g, unknown or other
  modified_base (1573)..(1580): a, c, t, g, unknown or other
tgttttcgtgttattttttggaaaaccgtaaaaatgtaaaaaaaacattctttgaannnnnnnnnntaaatattttacaaaaaatgatgcctaatgtaattatttcttttaaactgagtctcacgctctttcttcatttataccattttagtcaatggaataatttttaaaaaaaaaatatatggtccaaaattttcaatatttttacaatttttacaattttatttgcatgaaatacaatcttttatgtatttttatattgtactcttgttattttgttgttgggtttttgttatttgtatattattttttatgttgttttgttattggttttttgttactttcatgtgattttcttatgtttttataaaatatcataaaaatatatataaaaaaaatgattttgaatgtaaaaatttaaaagttttataaaaattagtgttttatgtaactatcccttaatcaaattcgaaaattaatacaaaatgaaagtaaattaaatatattatctaaaataatgtacaattaaaattgtaaaaatatttaatttaaattaattttatatatatacaataaaaattaatgctttaaaatatgcaaatttgaatattaatcatgcatgtatatatcagggtaggtatggaggcagtgtatataaacaacgtacctgcatcatagccgcatatgtgtacgatgcagttatttcctgctcccattacttttttcattaaccacttgaggctagctcaagtggccataagaggtgttacctaattgtttcaaattattgaaactattctttgtatcttcctatctttctttcactctttaatccttattgtctggtttcttggaatatactatggctagaagaactacaagattcaacaaccctaataatagttataggagtagctatagtggtgccaaacaagctagttatagtttaaacaatgagtcattgcaacatagtgtatatgtttattatataaaatgtcattttcgtcccttaatgagcattgtattacgtaagtactacatacattaatattggaggagggtaatgttagaatactctgcattataatcaatatatctacataactaccattgatttaatattaaagtcaatacttaattaattgacaaaacattatattaattttaataccaatttaatttatttgtatataactactatcatcgggctttaatattagttatggtgttggtgttttaatatccatcatttgccattttaatttcttatctttcatatattttcttaatcatcataataatgtccactcaaatcttagcttcatcatcatcatccaaaaatgacaaaatacataaaattgttcgaccaacaacaaattatcatccatctatttggggagaccgattcttacatttcaatattccagaagaagaattggtaagtattaagattaatatacatattaataattatatatatatatatagttataatatgcattatgtctcactataaatttttttacttttaatcgtaacaaaacttgagactaaaagtgaaaaaattgtgacnnnnnnnnaattattattcttatgttgtgattaaaaagtccgtgctaaatgtattagtcacaaaaattacaa

SEQ ID NO: 118195 - DNA, 2167 bp, Cannabis sativa
  modified_base (68)..(70): a, c, t, g, unknown or other
  modified_base (1187)..(1206): a, c, t, g, unknown or other
  modified_base (1743)..(1759): a, c, t, g, unknown or other
  modified_base (2040)..(2044): a, c, t, g, unknown or other
ttaacaatctcaatagttcggggagaatttttaacggctaaaaaagttcaggagacacgatttagtannngttaaagttcggggaaaaaaattattaattagccttttttatatattttatattaaattaatttaaatataaatatgtactgacttgatattccatttatattaataggaatatagattgtgaggcacgtcttaaatccttcttcaaaatgtcaagagtaggatatttttgtgatcataaagagatttaatgctcacatgctttgtatcatctttctttgttttatcatctatcatctttgaatattaagaatcattttgtcaatggcatatattatggatttcaaattccattgcactcatcactaatagtggctctcaatccttcaaaaaatatatatattttttttaatattaatgaaaataaattgtatttcttcaataacaagaacccatattggttctgatgactaaagtttttttattttatttttttctttttctttgaagtatttggatgtgttagttttcatttgatgtattttttttagtttatgtgtattacaatatttgtataaaattggagaaataatagaaccttataatggtccactttctttatcctaatggtatgaataaagggagttattggaatttctagataaatttattaaaagcatattttccaatgaaaaaggtaagttgacactagtgaataatggtccactttctttatcctaatgattaaagacgttagaacttgcaaacttcccaacttattcaatgagagagtaaataagtatagataattttttgctaattattttttattttatcataatttttagtctaaaggtttttataaataaagtttgttttatgtatactattgtaaaaatctcaattaatcatttaaaaagaatctcaattaatgtattaagtaaagatagagggttctcttaaaaaaacaaagaaagataaagatgtggtccaatgagttatcatctcattttcaagtgtttttattttttattttttgataaatcacaccaaacttgaaaattacttattttcaaattatcaaatactagtaaacattttgcgtttcgcggtggatatataaaatattttaaattatatataaaaaataaattttgtattttaattaataataattnnnnnnnnnnnnnnnnnnnnaattttaactttactattaaaaaaatttgtgatataaatacttaaaatattaaatttattgctaataaataccgaaatttgaaaaatagtaacataaatcctcatttatggtttaatttttattctgatgtgtgtgttaagttctgtgttcaaattttattgtgtgtgtttttaatgtttgagttttagtattttactggggttctaatgtttgagcttgtgtttataagatctttatttatatatttgtttatttatttttgtagattttgagaacttgaaatttgatgttgtttctattgattattggaattgaaagttagatttttcatacgggaattaaaatttgccttttcgtttcattgattgaaaaatattagtggaaagtttatggaatgagaattttgaatatatataaatagaattgaaaaatagcatttgaattgagaatcaaaatttattgttaatctccttaaaaaaaaaaagtttattgttaatctataaagataatatggctggaagaagatggaaaaattnnnnnnnnnnnnnnnnnatatgtatataatattttttttttgaataatatgaataatatgaatttattttaattaatttttatttttttagaattattttttctaaaagaattattagtttggtcaatactatatttacatgcagggccggccctgaaacaaagtgggccacagggaaaaaaaaattttgagccctcatgttagaaaaaatgtggtatttttcaaaattagtaaaaaaaatatataattttaaaagaggaaaaaaaattttgggcccctgggctgggtgggccctagnnnnnggcctagcccgcctatgcccagagtcgggcctgtttacatgtggcactttattgatcaactaacaaaacgataaattgagtgttaagtttagaaatttaagaatatcaataggaactacaatg

SEQ ID NO: 118196 - DNA, 2030 bp, Cannabis sativa
aatgtacatgaatatgaaaaaaattagactaaaaaatttttctgaatgccgaaacaagttaagagtgcatcagtacatcccttttaaggggtacattgtagaatctccctataatatatataaatatgtctatatacatataaaaaaaagggtgattctacaatacacccccttaaaaggaatgtactgatgtatccttgacccttttcggcatccagaaaaaaattttagtctaattatttttcatattcatgtacgttatagctatttaagataacctacaaaattttgagaaattcagaataatttaccatatagaaaataatgttcaaacagtctattttacacgcgaataaaataaaatagtcacgcgtgcaacacactgtttgaacgtagttttcggcgtgttaaaattttcaaaatttcttaaaattttgaaggatatcttaaataactataacgtacatgaccatgagaaaaaaattgattaaaaaattatttcaggtgctaaaacaaataagggtgtatcaatatatctattttaaggggtgcattgtagaattttcctaaaaaaaattatgttccataattttttcaatgataaaagttcattccttagggtttagtatgtgatggctccaatgatgtagaattaaattcattatttaattgatatatgtgatgtggtgtaaaccgtaatgtaatatctttaatggataataaatatgaaataaatatatatataaaatcactaaggctagtttaatggacttttaaactattaaactaatatgtagttctaaaatactattacgctacactaaaaaaatatatatatatatataaatatcaaagaagcttttatataaatattatatcataaaattgttaaaaattgagtttagggtcctatttgtacaattttaaaaaatacagaattcattttattattttacaaaacaaaatgttcatttagtaatttttgcacaacacaaaatcaatatttacacctaaatattatagcatgtattatgatatctttaatggataataaataagaaataaatttatttagaaaaataagagcgattctctatcataattattgctcaattttgtggctactatcaattaagtaatgtattgatattatattttattttgttatcattgagattatggattcataaatgagtaatatttttattgaaagataaggcataaattaatattgcattatttaattttagaaaatatataaatgtgagatccattatttgcattacttttatgtgaggtagaggacccataattaaagttgtatttgtggtataaatatatattgttgagtttattattcataagtacctaaattcaaaatatagcgtcaaaaatacttaaatctctaaattaaactattctgttggtactcaatttaaaagattttttaacttgaccaaaaataacacatgtggtatagctatttgtctatatcaaaataataaaatataattaatttttttttttgaaaaaaactacgattaaatttattaacattaaattgttggttttatagtactaaatcaagtatgcagcagaacaaaagtttttgattttcatcgtactatatcttccagatcaacatatgtacatacattaaatctgaaagtaaaatagatgaaaagataatttacctcttgaagcctatcaaagtattattgagtatttttgtatattatatctttggaacggtgacgtcaaactcacacattgatcttccagatctttcaccacatacaaggactagtgcgggctagtaggataaaatgtatatgaagttcttgttggattctcaacgcatgagcaagaacaattctatactgttttaagagaaaaaaataaatcaaattgatcttttaggctttcaaaaaagttatgtttattataaaataatataaaatagatgagaagaaagaagaagaagaagaagagagaaagagaaagtaaatgtgaatttctcagttgtttat

SEQ ID NO: 118197 - DNA, 2210 bp, Cannabis sativa
aaatcagattagattgaaatgagtattatttagggcataaaatcccaacacaagtgacactggtgttcaataagttgacatatctatgctaccaagactaacaatcaagagtaaaaatggtactttggtatggaaagtgactaaagaaaagcatttcttcgatacttaaggggcacacacagcaccatcatatatgaacgctagaattttttttgcacacttgagtggtacttaactggtttaaataatggttaaagttacccatgattatagtaatcaagttcttaaaacctaaagtgaatagtgcaaatgtcgtgcattcattaagttggatatattactaaaaaaaatcaagaaacttattatacgtcaaagcggtagagaataagtaaaaaaattaaattacattaaattctaattaaatgttttgacaaatgttccatgaggttaaaggccactaaggtcgatcggctaactaagactaaatgctaaggaaaaaatgaacaatgattgaagtcttgaactaagcaatcaactatctaagtcttgaatgggttgatggtcgcttttgttatctcctggcacacctggttgtgtaaataaccatttaggggtatcaccaataaatagattgaaaagaatctactggtggatagcaggatcgtcagggttatatgcctgaaccctcaaaacattgacaatatcaagttcattaagtgtatgttctccatcaactctcatgcttcacactccaacaagtagggatatctggcatcctttgagaactcattccagttgaagttgggattgccactataaataaaatacacaacattaaagatcatcacttgatatctagccttgtctcataccacttgtgcatcttgggccacaagctcgacttccaacctctaaactctatcctccaattcagcaaataagacattcttcagactcatggcacggtcatttaaaactttagcattgtccattttattttggagaagtgcaagattattcttaatactttcctctccagcctaaagccattcaataagcttttgataatttgtaagctcatgttcctctttcatggagaatgcttcccgaagagtgactttgccctaagcaatggtggctctcttgatagcagctttaactttctagtctaaagtcttcacctgttcctgaagatcaacatctatcttatattcttgttccatgacataagagaagcttaaacaagtctacaacaagaaaaagagttaaccaactagctcattaaaatacagataaaatgtataaggggaggaaaacacttataagaagtggaggtgtgcttgtgtcaataccacctgccatcaaaatagtacatggtccttatagggaccacctataactcattttgtaaacaaagccaatagagcccacctatagggaccacctatagggaccaccgaggttggaaccttgtaacattgagagacaattctcttaataaaaagcatttcacatcttctcccttactcacactcacttatatttttacattaatattactacactatttctatcaatcattactcaaggtttttcgctataatatcgttgatgagttcttaccgtcaatagatagtaaataaaaggtaatatacttaaaaaaatctattaatttattaaatttaattacaagccttattttacttattttcttattattttgaatttgtatacatatacatcataaattattttaatgtatagagtattttttgaggttataaagaatataatattaaaaaaaaaatctccataaaactctaaagaaaaatcatcatagaaatatttatctaaaagtaaaaaacaatcaaagaaatatcgtcaaatgttataataaagaaatgattagaaataaaagaatgctgatcacacaaaataaaaatgtaagtaaaaagataattacttatgattttaaaattgttatcattactctatttcacatatagtcgatgttaaatttaaaacgttatcaaatatcattattactatcctttccaattaaaataaatcaaataatagtttaattatttgccataaatcattcttttatataatcatatatttagggaaatttgcatggtatactaacttttatttttttttttacaaaaatactgtcaggcggaatttttttcttttttactgtattt

SEQ ID NO: 118198 - DNA, 2167 bp, Cannabis sativa
  modified_base (31)..(31): a, c, t, g, unknown or other
ttttaatcataacataagaatgataatttanaattagtcataacttttttactttgtcaccaattttgttgtgactaaaagtaagatttttgtagtgacttttttgccataaacaagagctgcatcagttggaatctcagcagcaacaagtagtgtccatatccactacaggagtcagaattcatggctaccactgatacttttaaagaggcagtttggttgcagggtatcttataagagttgaagttgcttaaaaaagggactattttattcaaacaatttgtcatctattcacttgtgcaagactctgattcaccatgagaagagtaaacacattgacataaggttgtattggataagagagaggatagaagacaagatgttggaattggagaaagttcacacaagtggcaaccctactaatatgggaactaaggttctcactttcagtaagctaaaacattgtcttagcttgctgaacattcgtgcttgttgagacctttgagagtttaccatcgtcattgatcgagatttgggactgttattcttttgaggatgaaggtggaatttgtggaagttaatcctccaaaacaataaccaacataactaactttcagttaagttaattggaaccgagttgcttaacacctttagttttcagttataacagtttgttatcttgtatgagctatagctataaatagttcttatcccacttcattttagatgtaacttatactgtaaatgttagagagagagtttgagagagagagagagttctttgaaattaagaactcaaaaggagtgtactttgggttgagaaaaatttctagtgttcttcggtgtgagtacagagaggtcttgagatctctacaattagagtttatacaagttcaacattgttcatattagattaatgatgatggttctcaattggagtatggccaggaacaaatttgatctctaaaactagaaccaagataaattattgtcttttttactattttcaatttctattttatgcttgattcatttaatttgtgttgctttgattgtgttgcatctggttaggtgttagatgaatttagttgttgtatgtgaatttccaacaataataaataactaaatatatatacataatgatttaggatattattatttagctttgtgtaattttttgatagtatacacgtacgattatgttataattatatagaattaataatacactattgtctaataaaatgttaagtacgtagtatatactctgctcaggccagccttcatatgtattaattattaattaatattaaaaaataataagtatagttatgttaataccgtaatattctccatctgaatctgattaaccattgacattgagcatattgcaccttctttattattcgtcacactgtgctgctcaatattgctcccgctcccagttccactttcacttcctagttccacattttgttgctatataataataagatattattttaatgttatttaaaaaaaattgtattctaattacaaaataacattttcaataggtgtaagtatgttaaaaataatagtttataactattaaaataataataaaaaaattagggacgtacacttagtaactacacgtatacggaaaaatagttacgtgtacaacaaaatgtaatttgaatttattcttggcactataaacttttagatattttttaaaatttacataacaaaaaaaaaaaatggactataaatttctcttttaaaatagataaagagtatacgaaaatacctttcttactataaagttctaatattttacccaaatattggaaaaaaaaagaaaaaaaacaattcaaagcttttcaattctctataagcaatatgtaatactatctttccctcttttttccaatggtgtgtggtttgcctctttgatttggtctcattatagcatcccaaagcataggtttattgcttgggttgcttgttctaaatgcttgtgtatatttgatgagaagtgttaccgtcaacctcttgttacaacctcttaatcaactttcatgcccgaaaacacaagctggaatattttttttcaatttttttttcacaggggtgttcgttatgcgtacaacatcattcatgtaaatttttgaaaaatttcgaa

SEQ ID NO: 118199 - DNA, 2047 bp, Cannabis sativa
  modified_base (1915)..(1915): a, c, t, g, unknown or other
tcattttttttttttttttgaaacaagttgtatttcgtttctaatattaagaatatattatgttttaaaataaaataaataaatttaattcttctcggccttctaggtgtctattttatgagttaacgaaagtggtagtaacaagtgtaatagaattgtaatattaagtatttttgcttctaaaaataaagataagttatttaaatttataaaatttaaaatattaagtattttttgctccagtttaaaaataaaaaagaaaaaaaccacactaaagacaatgcattccatattatatagtattttgagtacacaaattgcttatattattttagttaaaaaaatagtttattgtttacgtaattcaaaatttgcaagggcattcacggaatgaaaattaagtgaaagaagccggactagctcagcaacgggtgacatatggttcagatttgagttaggcccgttgttaacggtggacacgtatggctatggtggacccaccccagttttcccgcgcgaatcctcgttcaggtttgctttcgtcaccaccaggtggtcctaccagaaactgactttctcagctactgttgcacaccgcgttgacccattatccagctgtatgatgacgtggcaagccacgaagacgccttcgcagtgggcctggcgggacgcgcccctctctattatcaaatctttcaaattcaaaaacttattatatatcaagaaaaaaaaattattatatataaaaaagaaaaacagaaatataaattatgacgataatgtatttgcacttcttatgtttgagattaagacttgagaagtatttttatttatttacttgtttttataaactgagaatagattcgctttatgctgtttcaaagtacaacgaaaatctatgcaccccaaaaaaaaaaacaaagtccaaagaaaatagaattatgatgatgttaattgtgtaagaaaattgctgcattaatttcctattattcatcctattctgaaaacaaattgaaagggaaacaaatgttgaagctatgtgtccctctcccaacatttccactaactatatatatcattatacatacaagttggcttaatataatttgttttcattttccaaatagaaaagacaatttcaattcactatcactcacgtctgaattggcaaatattgatcaattaatgttatttgacatgtttatgacaaagctaataaatcaataattgatctattcatatttaaatataaataaatgtattttataaaagtttggttgcttgtgctgatggacaacaatactaattaattgggcgcccatagagtatgtacttatataaaacattatattcatgattgaaaaacatgtaactaagaaaaaaataagagttggcatgcaataattaagtaaagggggtccataatgttaaaacttaagcttggatttgagtagtatcgatagtagtatctatggatggaaaattaatgaatttgatgacaaaaacgggttgctaaggatagggcttttggtgggtcgcatatcttatccttatacacctattgtggaatgtcctttactttgttccaaaaccccacttgaagaaagttgcagagtttaaagagttgtaatattacacacaggctgatgattattccttcccatttgcatgaaactccctctgcattgcatttacgtttataaaatgctttacaacaacaataacaataatgataattattaattaagacaaaataagtgagtgacaataggccaatatagggaatcttttgaaaatatcttgatcatattcttgtacaacttgattgatggggtgctatgttagactataatatagtatatgaaatatatcatatataaacgatatgtaatgcggaaaaactataaacatatcnataatatatatacaatgaaggatcgatattggagttctggctttctcgctctctcaactctctttagatggaatttgctgaatgaaatcaaaatgagtaaggagctcagggatcgagaccctatatttatag

SEQ ID NO: 118200 - DNA, 1811 bp, Cannabis sativa
tggtaaaatatttccaacagaatatgccgccaatattgatacaaggaagtctctaacatggctggtattttgtgtatgtggtagtacaattagttgggtgtcatatacacaaaaggtggttgttctttcaaacatagagacagagtacatggctgttgcagaagctttcaaagaagttgtatggcttaagggcctaactcatgagttggaatttaactctagcaacataaacatatattgtgataatcaaagttacctcaaaagtcccatgcttcatgaaagatcgaagcatattgacataaaataccacttcattcaagacattgcaacacatggtcaatttcaagctaagaaaattagcacagaagataatgcagttgatatgctcactaagagtggaacttttcaaaagattaggcattgccttaatctgttacacaaagataagtgttgctgagctcttagctcataagtcaatattgttttcacattcagctcaagtaaatgaatcaatgtagatttattgtgtgattgatagacttgtgctaatgtgttaaaaggcattgatcatacttcaaattctattatttcagttacaggatcaagaactgtgtaaccaattctattaactctcacactcttatttaactacctaaaaattggtcagtatatagtaatctaacaagtctcagtagcctgttggaaatcaattcaacttagagtgaatttaattagaattatagataataagtgattggagggctgtacaggaaactaggtgtgtttgatcctagtccttcatgtgagattaattgtaattttgatttttaatctcaaatcctttccattgtaatactcttgatcaaataaaggtcatttccttggtctattcaatctctaattttctgtttaattctttttcttttatgtttaattttcattctttattcatctcttactttcctagttttagtttttgaagagtgtagtaagcttgcactacaagtaaaacgagacatctattttaaaaggaactaagtattatggagagatactttaaataagtgccttaattgagtaatgtgtctattgtcatttattttagctctctttaggaaaattacaagctcatccctacgttattaactttttcaaaatcacctcaaatgtcaatatacttatttgaactaattgctattttatttgctagctatcatgacatatagtgacacataaataagagatgtaattctttctattctgctaacgaataatcgataataattcctaaattcaaattgttttttttttatttaagagaaaattggctccatatgtacatatagatattttttaaagtcttagaggctaatttacttttggacatgctttgtttgttttgttctttttctttgggcatatttagaatggtgctaaactttgttcgtggatgtttttgctcgtattaacctagatttggatgcttactataaatcacttctatctaagatgtaaggctaggctattcttatataagattcgatattgattattagactaataactgatgaatgcgcaaagtctctaaccttattcattccacgtgtgatcctaataatatataaaaaaaaatgtttgaatccttatcattccacgtgttatcttaatattattaaaaaaacgttggataaaagtgtaaaagattattattattattattttaactagggaactaagccgcgcttcgcgcggtgttgtccaacttttataatttttatgtatatatattatattaaatgatataatttaaa

SEQ ID NO: 118201 - DNA, 2390 bp, Cannabis sativa
agcaacagatccttctatgcaagcacagttggaccaaatgagggacatgataaagggcctagctggtccaaaaccttcggacattgagctagataggtcaaggagatcaccattctcagcatacataaatgctttgcccttttccaagtttaaggtgccgatatagaagatgtatagcagacgagaagacccactagcacacatcaagtacttcgagatgcagctcaatctccaaaaaattactggtgatgtgtagtgccatatattcccagcaactttgtcagaaacagctcaacaaaagtacttcaagcttgccctaagatgattcaattcctagaacgagttttctcaagaattttacacatagttgaggatgtgaagaccacattctaaaatacttaaatggttttttaccactaagtatttcaggatagatagtaagcatagctgggatatgatcaaaaataccccagtcatgaaaacagcctctgagttgggcattgcattcagccaagcttcattcataagcaccctatcaatcttggagtaaattctctcattgccttgtcttttattactccatgtaaagcagcttccactatatttaaggtcctccaactgacagacctcaatatagttcataaactcccttgcttttttgaattttactttttttccaattatttcatccttattcggtatctcattaaaatctccacggactacccattcttctctttttgctatctcttgtaaatctttccataattcattcctcccatcagcatcattgtaaacataaacaaaagtagtataaaatttatatttatcatctactgtggaaacaagtaaatggataagctggctagtacatttgagaatgcttacattgaaactgtagggattccaagtcacaataattcttcctcctccatgccatgtaatgtttgatgtaaaacatcaccctttgaacatattgacatataaggcccctaacatctgggccttaacccttgtcttgagcaaaccaacaaggccaattttttgattaagaatcaaattcttaactacattctatttttcatggtcattgattcctcggatgttccagcttaggactctatccatcttggagaggaggatctccccctcctctagtgtgctttgttgtaggaatttcatgacctcctatagtaatcaattgagtcttagacctactttccatcaacacttcttcaagcattttgaaggatcaatttgattatataaatattggaaggaattgcttgtgtgaactttatcaattacttctttacatctatctttcttgcctttactaacttgctgaaaccatttgcatcaatcttcggatctggtgcatcttttttctccatcacctctttactggttttcttcacaacctgtaacgccatgactctcagggacgccatgtgtgtgcttttacaaacttattatcactaatgtattagtttaggaaaaaaagtgtgcttaaatattaaatttttggttaaatttaaactaaaaactttcattatatatatggttgtaatatgggcatcccctgctaaagttcttttacaacaatttacaaaacaactattataaaatcaagggtacatttcaaaatatagaaaaaggggtcaatcctacttctcggaagccaagacaccatggctgatatgtacactactggatgacctctggctcatggctgaacacatttactattcttcttacctgcaccacaaaacatctgcgagtcacagtgactccgcaagaaaaactactagataaagaaaatcaaggaaagtgatagcagatttcattacaacagattatacataccaataggtcatactctttcaacgtacatatatatttcaaaatctatacgaacaaacttattacaaaattgagtgtatttgtagctatatataatcaacaacctcagtgtttcataaaataccctaatcatacattattataaacacttactttcaatacttcataaagcactctagttcacacattagcatattcacataatttcagtgcttcataaagcactctaatcatgcatcattataatcatatattcttacatccctaagccactgagagtgcaagaaaagtgatcaatttcataagcaatataacacacattcaatcatactagaacaaaatatattcaattacaactcatcatataataacacgctagatccatttcacaacatcgtaattacacaatttcgatacttgataaagtacccttaccactcgttaaccacgagctacatatgtcactatcgttgcctgatacagcgaacgataaggaagaaacctatccgtgatttcaagagtaatta

SEQ ID NO: 118202 - DNA, 1110 bp, Cannabis sativa
tactccaatattctcctcaaaattagagcccaatctttgcactataattagttcatgaatcccacaatcagctcctttcccacgatctttgtcattaccaactgttgagtgattgtggtgacctgctgtattgccaccagtagctgcaccgccctgacttctagtggagtatggctgatcttccccctgtctgtcaattcttcccgactgaagctattgggagccaataaacttgttttgacgttgagtagtagctctcatgaatgctccttttggcctaacgattatctcttctggggttttaaaaattcttagataaattttgtcagcgtgaccgagcaatgcacaaatgaaacaaagcgttagagtgtgctcatatttgaaatttacccaaaaccagttggagctatccaaccgacgaatttttattcgatgcttcaatggttggtcaaggttgatagtaacaaggatcttgaaatactctcgccaaacgcctgagaaattagcctcatcagactctatgaatttgccaatatagtttcctatcttctgtagagatttttctgtgcggaatccgtgttgtaaatcgtagatttgaacccacaagtccaaccgattgaggatgattgatcttgggttatccccagcctttagcctttcgaaaataagttgtttacgttcaaacgttcatggctttcaaagaaaagtcatcatgtgctgcatagcttgcacatcaataattccagcattctaaaaacgacctacaagacactaatgaatatcatattcttcttcatcttcctcaacctctaacgacataccaccaaactcttcaaaaaatcaagagtaacctcagcgtccgaatcaaaagacatcttacttgaacttgctgatgcatgacaaaaagaacaaaaagacacaggacatccaagaaaataaaagggacaaaaatcacacatgtcaaaacacataatattacataaccgtagtttttgataaaaatataagtgaaattatatattatagggtgattctacaatgcaccatcttaaaagggatatattgatgcaccccctacttgtttcagcatctagaaaattattttagtct

SEQ ID NO: 118203 - DNA, 1749 bp, Cannabis sativa
gtaaaactgctccaaaagacaccaatagatgagataatgctaactttaaagacccgatacataggctaattataacctaacagctatccatcaccttgacctcccaaactatttatacttagtttgtatataatgtgatatacgctaagagtttttatcgttattgtatctcttgcacctcacaaggttaatgcctcatcttgcacacttgcactcacatggtttctcgtcgataaataaattagcagttcgtacatttctgtctcgcataagacttcttagccaaccaagttataaacatactctacaaattgtgcttctaacgagttgttccatgccaagtgtacttacgattgcatgtttgagttctttcttcttcccctctcgacatgtatcctcttctgaagtgcttaccgaatttaaggtataacatcattccataggatcaaaagcaattggcctttttgtccatttaccacacagattcagggcggaccagcgtgggcgagggaaatctccctctcctgctactcacaaactggctatccttaatagtaggctcatcttcggtgatggtttctaaaacctccacaagctgaggcgttactacgaggattctggattgatctcttccccaaaaaaaactttttgcaacttgaacagagtctcctacgatggacatggttatgtctgcaagggggtcttggttaaaatctatggaagaaaaggagggatttattacacacaatctcgttgtactatctcagtgtggtgctggccctaaactaagctaaaatctttcttaccctaaaaagaaaatgccaaggagaagtagacgattcgaaaaagttccctcgaaaactctgtagccagtcaatgcaacagtcgcaggtagcctaaaacttaaatgttcactccaacgaagaattttactagttcattaaaaggggagaagcgtttggaaaatgctccgtgcagatgacgagtagacacggaatcagaccctatatttctttttgcatgcaaaagacaataagaagagggaaaaagaaaagaagttgaagttacagagaaaaagtgaagctttaaataaaaaggataaaaaatagtaatacccctacagatagtatttatttcagaaagagaaagggctctgcaagatcaacgacttggagaggttacaaagaatctgatgtctaggggaacgaggggtcccatatgatgatcctaggatccacaaaaatatcaaggtcattttcctcatgtcattcagcagtcagaggcactccttctttcttggtaagcacacttttccatatataaagaggtgcaatgaacacctacaagcatactgcatggtttccatgcaaaaggaagtaaattcaaataatatccttcaaaggatacaactcatttgggaaggtgtccgtgatcgcgaaattgaagcacgtgttcacgatcaacatttaagacaatagtaaacttccaggaccctagggatctcgaaagctggggggtaaatgttatctaaattttcctctaccagacacgtggcacgatcagggtagggacacgatttccgcatagggcacccgagagaatcaaaagaaatgactcctagacccaggattcattttgaggtaacaacttacgggaacattctcctttagcgatacatgtttcaaaaaccagggacacactgttggaattattttaccaggatcttagatatgttgggttttatgccct

SEQ ID NO: 118204 - DNA, 1537 bp, Cannabis sativa
  modified_base (27)..(29): a, c, t, g, unknown or other
aaaatatagggtctattttatcatttnnnaaaacagagggtccaattaataacttttgcaaaacacaatgtccaaaatagtatttaccctttaaagttttttcatttttgtataacttacttttctttttgcaaaattgcaatttgtatgataacacacacttataaaacacaccatttaaattcaggaaattcaatgtatgtcttttacatatatttaaataaatagtataaaagtgaaaattcaaaaaagaatttgcctcctaaaataaaaatgtatactacttgttaagaattttcctggattttttacagttacagaaatttagttcttctgttaggttttattctattattcctctaaactttcaacaatactgattctgccctctaaaatatacgactggttaagaatcacttatgaactttaaaagttaaggaaatttagttcttctattaggttccgtcccattattctgtttaaatattgacatgtctttgtaaattagcaactttgctctcttatgttggattaaaatcttcaatatgggctcatatgtatattagtatattgctatttgaaatttttgactcaaaacaaagtgataattttagtaattgtgagtcattggatattaagtatcatgaactaaatgtgtaaataccctaagcgatatttctaatttattgaggggctaaattaaaaatacttaaaattaataacctagttgtgaggttataattgacgtaaagtaattaagatttttttgtagtgttaaattattattatattttgtatgtattgtattgtgtagtttttggtaagtttaaacaaaaattaattatttattctcatatttattttgactttattttgttactaaaaatgtttaatttttttttgagattttctttgacgattgagtatctctctaaacaaatctcaatcagtcaagaatcaagatcagaaaacttcccaaagaaaatcaaagtaagaatgagacttgatcaagtctagattcgcttattgctcccacaattgtgatttaaaaattaatatattatttatgtttttaatttaattaaaatcataaaggaaatatatttcaacttatctttcgtaagatggactatatatttagttcttattattttaagtcaaagattattattaattatgtgaacaagtttaaacaagaaagagtcggattgatcctcattaaagccgaagattggatattgtcgtgctgcctatttttttgactattttgtagctatagaatttggaaattagaagaaaatgaagaattattttggaacgttttcttgtgggcttaggttggttttagattgtgttttcttgttcaatataagtatttttatctataaaaactcatattgtatgctagagtaaggttatttcttttgaattagaaaggattttattaatcaaacgaaacatattgttgcctctgaattcgcctaaaatatgtggaccagtcgaatagggacacgtggatcagataacttgtaaatat
